(19) United States
(12) Patent Application Publication
(10) Pub. No.: US 2011/0177960 A1
(43) Pub. Date: Jul. 21, 2011

(54) Microarray for monitoring gene expression in multiple strains of Streptococcus pneumoniae

(76) Inventors: Ellen Murphy, City Island, NY (US); William Martin Mounts, Andover, MA (US)

(21) Appl. No.: 11/716,128

(22) Filed: Mar. 9, 2007

Related U.S. Application Data
(60) Provisional application No. 60/781,532, filed on Mar. 10, 2006.

(51) Int. Cl. C40B 30/04; C40B 40/06

(52) U.S. Cl. 506/9; 506/16

(57) ABSTRACT

The present invention features an array capable of monitoring gene expression patterns of multiple strains of Streptococcus pneumoniae including a substrate having a plurality of addresses, each of which has a probe disposed thereon.

### CROSS-REFERENCE TO RELATED APPLICATIONS

[0001] This application claims priority to and the benefit of U.S. Provisional Patent Application No. 60/781,532, filed on Mar. 10, 2006, the entire contents of which are incorporated by reference herein.

[0002] This application contains two compact discs labeled “Copy 1” and “Copy 2” containing the sequence listing. The materials recorded in each of the compact discs labeled “Copy 1” and “Copy 2” are incorporated herein by reference in their entireties. The compact discs labeled “Copy 1” and “Copy 2” each contains a single file named “WYE-057.txt” (136,4371(B, created on Mar. 9, 2006). The compact discs were created on Mar. 8, 2007.

### TECHNICAL FIELD

[0003] This invention relates to nucleic acid arrays and methods of using the same for concurrent or discriminable detection of different strains of Streptococcus pneumoniae.

### BACKGROUND OF THE INVENTION

[0004] Streptococcus pneumoniae (S. pneumoniae) is a common, spherical, gram-positive bacterium. Worldwide it is a leading cause of illness among children, the elderly, and individuals with debilitating medical conditions (Breiman, R. F., 1994, JAMA 271: 1831). Specifically, S. pneumoniae is the most common pathogenic cause of bacterial pneumonia, and is also one of the major causes of bacterial otitis media (middle ear infections), meningitis and bacteremia. Statistically, S. pneumoniae is estimated to be the causal agent in 3,000 cases of meningitis, 50,000 cases of bacteremia, 500,000 cases of pneumonia, and 7,000,000 cases of otitis media annnually in the United States alone (Reichler, M. R. et al., 1992, J. Infect. Dis. 166: 1346; Stool, S. E. and Field, M. J., 1989 Pediatr. Infect. Dis. J. 8: S11). In the United States alone, 40,000 deaths result annually from S. pneumoniae infections (Williams, W. W. et al., 1988 Ann. Intern. Med. 108: 616) with a death rate approaching 30% from bacteremia (Butler, J. C. et al., 1993, JAMA 270: 1826). Pneumococcal pneumonia is a serious problem among the elderly of industrialized nations (Kayhty, H. and Eskola, J., 1996 Emerg. Infect. Dis. 2: 289) and is a leading cause of death among children in developing nations (Kayhty, H. and Eskola, J., 1996 Emerg. Infect. Dis. 2: 289; Stansfield, S. K., 1987 Pediatr. Infect. Dis. 6: 622).

[0005] The ability to promptly identify and classify different pathogens is often pivotal to the diagnosis, prophylaxis, or treatment of infectious disease. Traditional detection methods such as 16S DNA analyses, serotyping or ribotyping are laborious, and many of these methods are incapable of discriminably detecting multiple strains of Streptococcus pneumoniae at the same time. Therefore, there is a need for new methods that would allow rapid, accurate and discriminable detection of Streptococcus pneumoniae.

[0006] In addition, one major challenge in Streptococcus pneumoniae treatment is that Streptococcus pneumoniae has developed resistance to most antibiotics used for its treatment. In fact, it is common for Streptococcus pneumoniae to become resistant to more than one class of antibiotic, e.g., β-lactams, macrolides, lincosamides, trimethoprim-sulfamethoxazole, and tetracyclines (Tauber, 2000), meaning Streptococcus pneumoniae treatment is becoming more difficult.

[0007] Thus, the rapid emergence of multi-drug resistant pneumococcal strains throughout the world has led to increased emphasis on prevention of pneumococcal infections by immunization (Goldstein and Garau, 1997). There are about 90 types of the pneumococcal organism, each with a different chemical structure of the capsular polysaccharide. The capsular polysaccharide is the principal virulence factor of the pneumococcus and induces an antibody response in adults. A 23 valent polysaccharide vaccine (23vPS) is available and recommended for use in adults over the age of 65 years of age, and in a variety of high risk patient populations older than 2 years of age. However, 23vPS is not effective in children of less than 2 years of age or in immunocompromised patients, two of the major populations at risk from pneumococcal infection (Douglas et al., 1983). A 7-valent pneumococcal polysaccharide-protein conjugate vaccine was shown to be highly effective in infants and children against systemic pneumococcal disease caused by the vaccine serotypes and against cross-reactive capsular serotypes (Shinefield and Black, 2000). The seven capsular types cover greater than 80% of the invasive disease isolates in children in the United States, but only 57-60% of disease isolates in other areas of the world (Hausdorff et al., 2000).

[0008] Laboratories therefore continue to search for additional candidates that are antigenically conserved and elicit antibodies that reduce colonization (important for otitis media), are protective against systemic disease, or both. Thus, there is an immediate need for a cost-effective vaccine to cover most or all of the disease causing serotypes of Streptococcus pneumoniae and methods of diagnosing Streptococcus pneumoniae infection.

[0009] A better understanding of the genetic expression patterns of Streptococcus pneumoniae will provide the basis for further development of preventative treatments, therapeutic treatments, new diagnostics and vaccine strategies which are specific for Streptococcus pneumoniae.

### SUMMARY OF THE INVENTION

[0010] The present invention provides compositions and methods for better understanding of the genetic expression patterns of Streptococcus pneumoniae. The present invention provides compositions and methods that would allow rapid, accurate and discriminable detection of strains of Streptococcus pneumoniae.

[0011] In particular, the present invention provides probe arrays capable of monitoring gene expression in multiple strains of Streptococcus pneumoniae. The present invention also provides probe arrays that allow for concurrent and discriminable detection of multiple strains of Streptococcus pneumoniae.

[0012] Thus, in one aspect, the present invention features an array capable of monitoring gene expression patterns of multiple strains of Streptococcus pneumoniae including a substrate having a plurality of addresses, each of which has at least one probe disposed thereon. In one embodiment, the array of the invention includes probes that are oligonucleotides derived from genomic consensus sequences of Streptococcus pneumoniae using a probe selection algorithm. In some embodiments, each probe is an oligonucleotide having a length of 10-50 bases. In some embodiments, the probes are perfect match probes. In other embodiments, the probes are mismatch probes with at least one mismatch position located at the approximate thermodynamic center of each probe.

[0013] In preferred embodiments, the probes suitable for the present invention are derived from the genomic consensus sequences including one or more sequences selected from the group consisting of SEQ ID NOs: 1-5980 and 7782-7870. In preferred embodiments, the probes suitable for the present invention are derived from genomic consensus sequences including ten or more sequences selected from the group consisting of SEQ ID NOs: 1-5980 and 7782-7870. In preferred embodiments, the probes suitable for the present invention are derived from genomic consensus sequences including one hundred or more sequences selected from the group consisting of SEQ ID NOs: 1-5980 and 7782-7870. More preferably, probes derived from each of SEQ ID NOs: 1-5980 and 7782-7870 are used.

[0014] In some embodiments, the array of the invention further includes at least one additional probe derived from exemplar sequences of Streptococcus pneumoniae using a probe selection algorithm. The additional probe can be derived from one or more sequences selected from the group consisting of SEQ ID NOs: 5981-7757 and 7871-7915. Preferably, the additional probe is derived from the exemplar sequences including ten or more sequences selected from the group consisting of SEQ ID NOs: 5981-7757 and 7871-7915. More preferably, the additional probe is derived from the exemplar sequences including one hundred or more sequences selected from the group consisting of SEQ ID NOs: 5981-7757 and 7871-7915.

[0015] In one particular embodiment, the array of the invention includes probes derived from SEQ ID NOs: 1-7924 by a probe selection algorithm.

[0016] In particular, an array of the present invention is capable of monitoring gene expression patterns of one or more Streptococcus pneumoniae strains selected from the group consisting of R6, TIGR4, 23F, ATCC55840 and TIGR 670.

[0017] In another aspect, the present invention provides methods for identifying a serotype of a strain of Streptococcus pneumoniae in a sample, including the steps of exposing the sample to an array of the invention as described in various embodiments above; and detecting a gene expression pattern indicative of the serotype.

[0018] In yet another aspect, the present invention provides methods for detecting the presence of Streptococcus pneumoniae in a sample, including the steps of exposing the sample to an array of the invention as described in various embodiments above; and detecting a gene expression pattern indicative of the presence of Streptococcus pneumoniae. In particular, the method of the present invention may be used to detect a disease-associated strain of Streptococcus pneumoniae. In one embodiment, the sample is a biological sample from a patient. In another embodiment, the sample is from a culture of Streptococcus pneumoniae.

[0019] In yet another aspect, the present invention provides a method for monitoring gene expression using the array of the invention as described in various embodiments above.

[0020] Other features, objects, and advantages of the present invention are apparent in the detailed description that follows. It should be understood, however, that the detailed description, while indicating preferred embodiments of the invention, is given by way of illustration only, not limitation. Various changes and modifications within the scope of the invention will become apparent to those skilled in the art from the detailed description.

### BRIEF DESCRIPTION OF THE DRAWINGS

[0021] The patent or application file contains at least one drawing executed in color. Copies of this patent or patent application publication with color drawing(s) will be provided by the Office upon request and payment of the necessary fee.

[0022] The drawings are provided for illustration, not limitation.

[0023] FIG. 1 illustrates a dendrogram-heat map showing DNA similarity between isolates using Spneumo1 array. Each column represents one strain; each row represents a gene. Red indicates a strong signal for a gene present in that strain; blue indicates the gene is absent; and intermediate orange-yellow-green color represents a weaker signal, indicating, perhaps, a gene variant.

[0024] FIG. 2 illustrates a dendrogram-heat map showing 20 qualifiers predicted to be present in serotype 1.

[0025] FIG. 3 illustrates a dendrogram-heat map showing 20 qualifiers predicted to be present in serotype 5.

[0026] FIG. 4 illustrates a dendrogram-heat map showing 28 qualifiers predicted to be present in serotype 18F.

[0027] FIG. 5 illustrates a dendrogram-heat map showing 27 qualifiers predicted to be present in serotype 18C.

[0028] FIG. 6 illustrates a dendrogram-heat map showing 39 qualifiers predicted to be present in serotypes 6A or 6B.

[0029] FIG. 7 illustrates a dendrogram-heat map showing the presence of rhamnosyltransferase unique to serotypes 6A and 6B.

[0030] FIG. 8 illustrates a dendrogram-heat map showing virulence gene pspA profile in different serotypes.

[0031] FIG. 9 illustrates a dendrogram-heat map showing virulence gene pspC profile in different serotypes.

[0032] The sequence information of qualifiers used in the Figures is shown in Table 3.

### DETAILED DESCRIPTION OF THE INVENTION

[0033] The present invention provides compositions and methods which allow concurrent or discriminable detection of different strains of Streptococcus pneumoniae. In particular, the present invention provides nucleic acid arrays capable of detecting or monitoring gene expression patterns in multiple strains of Streptococcus pneumoniae. In preferred embodiments, the nucleic acid arrays of the present invention include probes derived from genomic consensus sequences of Streptococcus pneumoniae using a probe selection algorithm. Thus, the present invention represents a significant advance in diagnosis and treatment of Streptococcus pneumoniae.

[0034] Various aspects of the invention are described in further detail in the following subsections. The use of subsections is not meant to limit the invention. Each subsection may apply to any aspect of the invention. In this application, the use of “or” means “and/or” unless stated otherwise.

[0035] Different strains of a species have different genetic properties. These genetic differences are often manifested in gene expression profiles and therefore become detectable by using the probe arrays of the present invention. The present invention contemplates discriminable detection of different strains that have distinguishable phenotypical characteristics, such as different immunological, morphological, or antibiotic-resistance properties. The present invention also contemplates discriminable detection of strains that have no distinguishable phenotypical properties. As used herein, “strain” includes subspecies.

### Identification of Open Reading Frames and Intergenic Sequences

[0036] Open reading frames (ORFs) and intergenic sequences of different Streptococcus pneumoniae strains can be derived from their genomic sequences. A number of Streptococcus pneumoniae genomes are available from a variety of public sources. Table 1 lists five exemplary Streptococcus pneumoniae strains and the sources from which their genomic sequences can be obtained.

TABLE 1
Genomes of Streptococcus pneumoniae Strains

| Strain Name | Genome Status | Source |
|---|---|---|
| R6 | Complete | GenBank ® Accession number |
| | | AE007317 |
| TIGR 4 | Complete | The Microbial Database at The |
| | | Institute for Genome Research |
| | | (TIGR) |
| 23F | Incomplete | Sanger Centre (United Kingdom) |
| ATCC 55840 | Incomplete | Human Genome Sciences, Inc. |
| TIGR 670 | Incomplete | The Microbial Database at The |
| | | Institute for Genome Research |
| | | (TIGR) |

[0037] In addition, the sequences of capsule biosynthetic operons representing 90 serotypes from the Sanger Institute, and additional sequences from GenBank® and Pathoseq™ database (Incyte™) were also included in the alignments.

[0038] ORFs can be collected as those annotated in public records and can also be predicted or isolated by various methods. Exemplary methods include, but are not limited to, GeneMark® (such as GeneMark® 1.2.4a, provided by the European Bioinformatics Institute), Glimmer (such as Glimmer 2.13, provided by TIGR), and ORF Finder (provided by the National Center for Biotechnology Information (NCBI)).

[0039] Suitable clustering algorithms for this purpose include, but are not limited to, the CAT (cluster and alignment tool, e.g., CAT 4.5) software package provided by DoubleTwist™. See Clustering and Alignment Tools User's Guide (DoubleTwist, Inc., 2000).

[0040] The CAT program can cause all similar ORFs to cluster together, and then align those similar ORFs to generate one or more sub-clusters. Each sub-cluster of two or more members generates a consensus sequence. The consensus sequences can be generated such that any base ambiguity would be identified with the respective IUPAC (International Union of Pure and Applied Chemistry) base representation, which is consistent with the WIPO Standard ST.25 (1998).

[0041] The consensus sequences, in addition to all singleton sequences that are either excluded in the initial clustering or sub-clustered into a singleton sub-cluster, can be manually curated to verify cluster membership. At this stage, some clusters can be joined or separated based on known homologies that are not identified with CAT. Moreover, filtered intergenic sequences can be added to the final set of sequences which are used for generating the nucleic acid array probes. tRNA and rRNA sequences may also be added. These consensus sequences can also be manually curated to remove highly repetitive regions, particularly those associated with surface proteins. Large transcripts can be broken into segments not exceeding 5,000 nt.

[0042] Examples of the consensus sequences identified using the above-described method are depicted in SEQ ID NOs: 1-5980 and 7782-7870. See the Sequence Listing.

Probes for Detecting Multiple Strains of Streptococcus pneumoniae

[0043] The consensus sequences can be used to prepare probes that are common to the Streptococcus pneumoniae strains from which the sequences were derived. As used herein, a polynucleotide probe is “common” to a group of strains if the polynucleotide probe can hybridize under stringent conditions to each and every strain selected from the group. A polynucleotide can hybridize to a strain if the polynucleotide can hybridize to an RNA transcript, or the complement thereof, of the strain. In many embodiments, a probe common to a group of strains can hybridize under stringent conditions to a protein-coding sequence (e.g., an exon or the protein-coding region of an mRNA), or the complement thereof, of each strain in the group. In many other embodiments, a probe common to a group of strains does not hybridize under stringent conditions to RNA transcripts, or the complements thereof, of other strains of the same species or strains of other species.

[0044] “Stringent conditions” are at least as stringent as, for example, conditions G-L shown in Table 2. In certain embodiments of the present invention, highly stringent conditions A-F can be used. In Table 2, hybridization is carried out under the hybridization conditions (Hybridization Temperature and Buffer) for about four hours, followed by two 20-minute washes under the corresponding wash conditions (Wash Temp. and Buffer).

TABLE 2
Stringency Conditions

| | Poly- | | | |
|---|---|---|---|---|
| Stringency | nucleotide | Hybrid | Hybridization | Wash Temp. |
| Condition | Hybrid | Length (bp)¹ | Temperature and Buffer^{H} | and Buffer^{H} |
| A | DNA:DNA | >50 | 65° C.; 1xSSC -or- | 65° C.; 0.3xSSC |
| | | | 42° C.; 1xSSC, 50% formamide | |
| B | DNA:DNA | <50 | T_{B}*; 1xSSC | T_{B}*; 1xSSC |
| C | DNA:RNA | >50 | 67° C.; 1xSSC -or- | 67° C.; 0.3xSSC |
| | | | 45° C.; 1xSSC, 50% formamide | |
| D | DNA:RNA | <50 | T_{D}*; 1xSSC | T_{D}*; 1xSSC |
| E | RNA:RNA | >50 | 70° C.; 1xSSC -or- | 70° C.; 0.3xSSC |
| | | | 50° C.; 1xSSC, 50% formamide | |
| F | RNA:RNA | <50 | T_{F}*; 1xSSC | T_{f}*; 1xSSC |
| G | DNA:DNA | >50 | 65° C.; 4xSSC -or- | 65° C.; 1xSSC |
| | | | 42° C.; 4xSSC, 50% formamide | |
| H | DNA:DNA | <50 | T_{H}*; 4xSSC | T_{H}*; 4xSSC |
| I | DNA:RNA | >50 | 67° C.; 4xSSC -or- | 67° C.; 1xSSC |
| | | | 45° C.; 4xSSC, 50% formamide | |
| J | DNA:RNA | <50 | T_{J}*; 4xSSC | T_{J}*; 4xSSC |
| K | RNA:RNA | >50 | 70° C.; 4xSSC -or- | 67° C.; 1xSSC |
| | | | 50° C.; 4xSSC, 50% formamide | |
| L | RNA:RNA | <50 | T_{L}*; 2xSSC | T_{L}*; 2xSSC |

¹The hybrid length is that anticipated for the hybridized region(s) of the hybridizing polynucleotides. When hybridizing a polynucleotide to a target polynucleotide of unknown sequence, the hybrid length is assumed to be that of the hybridizing polynucleotide. When polynucleotides of known sequence are hybridized, the hybrid length can be determined by aligning the sequences of the polynucleotides and identifying the region or regions of optimal sequence complementarity.
^{H}SSPE (1xSSPE is 0.15M NaCl, 10 mM NaH₂PO₄, and 1.25 mM EDTA, pH 7.4) can be substituted for SSC (1xSSC is 0.15M NaCl and 15 mM sodium citrate) in the hybridization and wash buffers.
T_{B}* − T_{R}*: The hybridization temperature for hybrids anticipated to be less than 50 base pairs in length should be 5-10° C. less than the melting temperature (Tₘ) of the hybrid, where Tₘ is determined according to the following equations. For hybrids less than 18 base pairs in length, Tₘ(° C.) = 2(# of A + T bases) + 4(# of G + C bases). For hybrids between 18 and 49 base pairs in length, Tₘ(° C.) = 81.5 + 16.6(log₁₀Na⁺) + 0.41(% G + C) − (600/N), where N is the number of bases in the hybrid, and Na⁺ is the molar concentration of sodium ions in the hybridization buffer (Na⁺ for 1xSSC = 0.165M).

[0045] Examples of the singleton sequences identified using the above-described clustering method, as well as a filtered set of intergenic sequences, are depicted in SEQ ID NOs: 5981-7757 and 7871-7915. These sequences are herein referred to as “exemplar” sequences. See the Sequence Listing.

[0046] Each of the singleton sequences is unique to only one Streptococcus pneumoniae strain. Each singleton sequence can be used to prepare probes that are specific to the Streptococcus pneumoniae strain from which the singleton sequence was derived. As used herein, a polynucleotide probe is “specific” to a strain selected from a group of strains if the polynucleotide probe is capable of hybridizing under stringent conditions to an RNA transcript, or the complement thereof, of the strain, but is incapable of hybridizing under the same conditions to RNA transcripts, or the complements thereof, of other strains in the group. In many embodiments, a probe specific for a strain can hybridize under stringent conditions to a protein-coding sequence (e.g., an exon or the protein-coding region of an mRNA), or the complement thereof, of the strain, but not RNA transcripts, or the complements thereof, of other strains of the same species or strains of other species.

[0047] As appreciated by one of ordinary skill in the art, ORFs and other expressible sequences can be similarly extracted from the genomic sequences of other Streptococcus pneumoniae strains. The extracted sequences can be clustered to obtain consensus and singleton sequences. Probes common to two or more strains or probes specific to a particular strain can be derived from the consensus or singleton sequences, respectively.

### Probe Selection

[0048] Probes may be selected from the consensus and exemplar sequences depicted in SEQ ID NOs: 1-5980, 5981-7757, 7782-7870, and 7871-7915 using a probe selection algorithm. Control sequences, such as SEQ ID NOs: 7758-7781 and 7916-7924, are also optionally included for probe selection. SEQ ID NOs. 1-7924 are collectively referred to as the “parent sequences.” The probes for each parent sequence can hybridize under stringent or nucleic acid array hybridization conditions to the parent sequence, or the complement thereof. In many embodiments, the probes for each parent sequence are incapable of hybridizing under stringent or nucleic acid array hybridization conditions to other parent sequences, or the complements thereof. In one embodiment, the probes for each parent sequence comprise or consist of a sequence fragment of the parent sequence, or the complement thereof.

[0049] As used herein, “nucleic acid array hybridization conditions” refer to the temperature and ionic conditions that are normally used in nucleic acid array hybridization. These conditions include, but are not limited to, 16-hour hybridization at 45° C., followed by at least three 10-minute washes at room temperature. The hybridization buffer comprises 100 mM MES, 1 M [Na], 20 mM EDTA, and 0.01% Tween 20. The pH of the hybridization buffer can range between 6.5 and 6.7. The wash buffer is 6×SSPET. 6×SSPET contains 0.9 M NaCl, 60 mM NaH₂PO₄, 6 mM EDTA, and 0.005% Triton X-100. Under more stringent nucleic acid array hybridization conditions, the wash buffer can contain 100 mM MES, 0.1 M [Na], and 0.01% Tween 20.

[0050] The probes of the present invention can be DNA, RNA, or PNA. Other modified forms of DNA, RNA, or PNA can also be used. The nucleotide units in each probe can be either naturally occurring residues (such as deoxyadenylate, deoxycytidylate, deoxyguanylate, deoxythymidylate, adenylate, cytidylate, guanylate, and uridylate), or synthetically produced analogs that are capable of forming desired base-pair relationships. Examples of these analogs include, but are not limited to, aza and deaza pyrimidine analogs, aza and deaza purine analogs, and other heterocyclic base analogs, wherein one or more of the carbon and nitrogen atoms of the purine and pyrimidine rings are substituted by heteroatoms, such as oxygen, sulfur, selenium, and phosphorus. Similarly, the polynucleotide backbones of the probes of the present invention can be either naturally occurring (such as through 5′ to 3′ linkage), or modified. For instance, the nucleotide units can be connected via non-typical linkage, such as 5′ to 2′ linkage, so long as the linkage does not interfere with hybridization. For another instance, peptide nucleic acids, in which the constitute bases are joined by peptide bonds rather than phosphodiester linkages, can be used.

[0051] In one embodiment, the probes have relatively high sequence complexity. In many instances, the probes do not contain long stretches of the same nucleotide. In another embodiment, the probes can be designed such that they do not have a high proportion of G or C residues at the 3′ ends. In yet another embodiment, the probes do not have a 3′ terminal T residue. Depending on the type of assay or detection to be performed, sequences that are predicted to form hairpins or interstrand structures, such as “primer dimers,” can be either included in or excluded from the probe sequences. In many embodiments, each probe employed in the present invention does not contain any ambiguous base.

[0052] Any part of a parent sequence can be used to prepare probes. For instance, probes can be prepared from the protein-coding region, the 5′ untranslated region, or the 3′ untranslated region of a parent sequence. Multiple probes, such as 5, 10, 15, 20, 25, 30, 50, 70, or more, can be prepared for each parent sequence. The multiple probes for the same parent sequence may or may not overlap each other. Overlap among different probes may be desirable in some assays.

[0053] In many embodiments, the probes for a parent sequence have low sequence identities with other parent sequences, or the complements thereof. For instance, each probe for a parent sequence can have no more than 70%, 60%, 50% or less sequence identity with other parent sequences, or the complements thereof. This reduces the risk of undesired cross-hybridization. Sequence identity can be determined using methods known in the art. These methods include, but are not limited to, BLASTN, FASTA, FASTDB, and the GCG program.

[0054] The suitability of the probes for hybridization can be evaluated using various computer programs. Suitable programs for this purpose include, but are not limited to, LaserGene® (DNAStar), Oligo® (National Biosciences, Inc.), MacVector® (Kodak/IBI), and the standard programs provided by the Genetics Computer Group® (GCG).

[0055] In one embodiment, the parent sequences with large sizes are divided into shorter sequence segments to facilitate the probe design. These shorter sequence segments, together with the remaining undivided parent sequences, are collectively referred to as the “tiling” sequences.

[0056] Polynucleotide probes can be derived from the tiling sequences. The probes for each tiling sequence can hybridize under stringent or nucleic acid array hybridization conditions to that tiling sequence, or the complement thereof. In many embodiments, the probes for each tiling sequence are incapable of hybridizing under stringent or nucleic acid array hybridization conditions to other tiling sequences, or the complements thereof.

[0057] Polynucleotide probes can be generated using a probe selection algorithm known to one skilled in the art. In one embodiment, probes may be derived from consenses sequences using a probe selection algorithm as described in Mei R. et al. (2003) “Probe selection for high-density oligonucleotide arrays,” PNAS U.S.A., 100(20):11237-42, the teachings of which are hereby incorporated by reference. Examples of the polynucleotide probes thus generated are depicted in SEQ ID NOs: 7,925-254,193.

[0058] In another embodiment, probes may be generated by using Array Designer 2.0 (Premier Biosoft International) with standard defaults selected and requesting probes 25 by in length. Additionally, probes were selected to ensure no ambiguities existed in the probe sequence, that each probe sequence was represented not more than one time for all sequences submitted for probe selection, and that the mismatch probe was not present in the sequences submitted for probe selection. From the probes remaining after these exclusions, the thirty-four probes with the best probe scores as determined by Array Designer were selected for array design. Examples of the polynucleotide probes thus generated are depicted in SEQ ID NOs: 254,194-478,375.

[0059] Other methods or software programs can also be used to prepare probes from the parent sequences of the present invention.

[0060] Probes may be designed by a perfect match-mismatch probe layout. A perfect match probe may be a 25-mer oligonucleotide that perfectly and unambiguously matches the target sequence; while a mismatch probe is the same except for a single-base mismatch at position 13 of the probe. Single-base mismatches are illustrated as follows. If the perfect match base at position 13 is an adenine, the mismatch base is represented as a thymine. If a perfect match base at position 13 is a thymine, the mismatch base is represented as an adenine. If a perfect match base at position 13 is a guanine, the mismatch base is represented as a cytosine. If a perfect match base at position 13 is a cytosine, the mismatch base is represented as a guanine.

[0061] In one embodiment, perfect mismatch probes are prepared for each probe of the present invention. A perfect mismatch probe has the same sequence as the original probe (i.e., the perfect match probe) except for a homomeric substitution (A to T, T to A, G to C, and C to G) at or near the center of the perfect mismatch probe. For instance, if the original probe has 2n nucleotide residues, the homomeric substitution in the perfect mismatch probe is either at the n or n+1 position, but not at both positions. If the original probe has 2n+1 nucleotide residues, the homomeric substitution in the perfect mismatch probe is at the n+1 position.

[0062] The polynucleotide probes of the present invention can be synthesized using a variety of methods. Examples of these methods include, but are not limited to, the use of automated or high throughput DNA synthesizers, such as those provided by Millipore®, GeneMachines®, and BioAutomation. In many embodiments, the synthesized probes are substantially free of impurities. In many other embodiments, the probes are substantially free of other contaminants that may hinder the desired functions of the probes. The probes can be purified or concentrated using numerous methods, such as reverse phase chromatography, ethanol precipitation, gel filtration, electrophoresis, or any combination thereof.

### Nucleic Acid Arrays

[0063] The polynucleotide probes of the present invention may be used to make nucleic acid arrays. In many embodiments, the nucleic acid arrays of the present invention include at least one substrate support which has a plurality of addresses. The location of each of these addresses is either known or determinable. The addresses can be organized in various forms or patterns. For instance, the addresses can be spaced regularly on a surface of the substrate. Other regular or irregular patterns, such as linear, concentric or spiral patterns, can be used.

[0064] One or more polynucleotide probes can be stably disposed on (or attached to) each address through covalent or non-covalent interactions. As used herein, a polynucleotide probe is “stably” disposed on (or attached to) an address if the polynucleotide probe retains its position relative to the address during nucleic acid array hybridization.

[0065] Any method may be used to attach polynucleotide probes to an substrate of a nucleic acid array. In one embodiment, polynucleotide probes are covalently attached to a substrate support by first depositing the polynucleotide probes to respective addresses on the surface of the substrate support and then exposing the surface to a solution of a cross-linking agent, such as glutaraldehyde, borohydride, or other bifunctional agents. In another embodiment, polynucleotide probes are covalently bound to a substrate via an alkylamino-linker group or by coating a substrate (e.g., a glass slide) with polyethylenimine followed by activation with cyanuric chloride for coupling the polynucleotides. In yet another embodiment, polynucleotide probes are covalently attached to a nucleic acid array substrate through polymer linkers. The polymer linkers may improve the accessibility of the probes to their purported targets. Generally, the polymer linkers are not involved in the interactions between the probes and their purported targets.

[0066] Polynucleotide probes can also be stably attached to a substrate of an array through non-covalent interactions. In one embodiment, polynucleotide probes are attached to the substrate through electrostatic interactions between positively charged surface groups and the negatively charged probes. In another embodiment, the substrate employed in the present invention is a glass slide having a coating of a polycationic polymer on its surface, such as a cationic polypeptide. The polynucleotide probes are bound to these polycationic polymers. Additional methods described in U.S. Pat. No. 6,440,723 can be used to stably attach polynucleotide probes to a substrate, the teachings of which are hereby incorporated by reference.

[0067] Numerous materials can be used to make the substrate support(s) of a nucleic acid array of the present invention. Suitable materials include, but are not limited to, glass, silica, ceramics, nylon, quartz wafers, gels, metals, and paper. The substrate supports can be flexible or rigid. In one embodiment, they are in the form of a tape that is wound up on a reel or cassette. Two or more substrate supports can be used in the same nucleic acid array. Typically, the substrate supports are non-reactive with reagents that are used in nucleic acid array hybridization.

[0068] The surface(s) of a substrate support can be smooth and substantially planar. The surface(s) of the substrate can also have a variety of configurations, such as raised or depressed regions, trenches, v-grooves, mesa structures, or other regular or irregular configurations. The surface(s) of the substrate can be coated with one or more modification layers. Suitable modification layers include inorganic or organic layers, such as metals, metal oxides, polymers, or small organic molecules. In one embodiment, the surface(s) of the substrate is chemically treated to include groups such as hydroxyl, carboxyl, amine, aldehyde, or sulfhydryl groups.

[0069] The addresses on a nucleic acid array of the present invention can be of any size, shape and density. For instance, they can be squares, ellipsoids, rectangles, triangles, circles, or other regular or irregular geometric shapes, or any portion or combination thereof. Addresses can also be divided into discrete regions. Each of the discrete regions may have a surface area of less than 10⁻¹ cm², such as less than 10⁻², 10⁻³, 10⁴, 10⁻⁵, 10⁻⁶, or 10⁻⁷ cm². Typically, the spacing between each discrete region and its closest neighbor, measured from center-to-center, is in the range of from about 10 to about 400 μm. The density of the discrete regions may range, for example, between 50 and 50,000 regions/cm².

[0070] In one embodiment, a nucleic acid array of the present invention is a bead array which includes a plurality of beads. Each bead is stably associated with one or more polynucleotide probes of the present invention.

[0071] A variety of methods can be used to make the nucleic acid arrays of the present invention. For instance, the probes can be synthesized in a step-by-step manner on a substrate, or can be attached to a substrate in pre-synthesized forms. Algorithms for reducing the number of synthesis cycles can be used. In one embodiment, a nucleic acid array of the present invention is synthesized in a combinational fashion by delivering monomers to the addresses through mechanically constrained flowpaths. In another embodiment, a nucleic acid array of the present invention is synthesized by spotting monomer reagents onto a substrate support using an ink jet printer (such as the DeskWriter C manufactured by Hewlett-Packard®). In yet another embodiment, polynucleotide probes are immobilized on a nucleic acid array by using photolithography techniques.

[0072] In one embodiment, a nucleic acid array of the present invention includes at least two polynucleotide probes, each of which is specific to a different strain of Streptococcus pneumoniae. Strain-specific probes can be prepared from the singleton sequences or other expressible sequences that are unique to that strain. In another embodiment, the nucleic acid array includes at least three, four, five, six, seven, eight, nine, ten, or more polynucleotide probes, each of which is specific to a different respective strain of Streptococcus pneumoniae.

[0073] In another embodiment, a nucleic acid array of the present invention includes at least one polynucleotide probe which is common to two or more different strains of Streptococcus pneumoniae. The common probe(s) can hybridize under stringent or nucleic acid array hybridization conditions to each and every strain selected from the two or more different strains. In still yet another embodiment, a nucleic acid array of the present invention includes at least one probe which is common to all of the different strains that are being investigated. This type of common probe can be derived from an ORF or a consensus sequence that is highly conserved among all of the different strains.

[0074] In a further embodiment, a nucleic acid array of the present invention includes two or more different polynucleotide probes that are specific to the same strain. For instance, a nucleic acid array can contain at least 5, 10, 20, 50, 100, 200 or more different probes, each of which is specific to the same strain. These different probes can hybridize under stringent or nucleic acid array hybridization conditions to the same RNA transcript, or different RNA transcripts of the same strain. They can be positioned in the same discrete region on a nucleic acid array. They can also be positioned in different discrete regions on a nucleic acid array.

[0075] In another embodiment, a nucleic acid array of the present invention can concurrently or discriminably detect two or more Streptococcus pneumoniae strains. Exemplary Streptococcus pneumoniae strains include, but are not limited to, R6, TIGR 4, 23F, ATCC 55840 and TIGR 670. A nucleic acid array of the present invention can include at least two probes, each of which is specific to a different respective strain selected from the above Streptococcus pneumoniae strains. In one embodiment, a nucleic acid array of the present invention includes at least two, three, four, five, or six probes, each of which is specific to a different respective Streptococcus pneumoniae strain selected from R6, TIGR 4, 23F, ATCC 55840 and TIGR 670.

[0076] Typically, a nucleic acid array of the present invention contains at least one probe common to two or more Streptococcus pneumoniae strains selected from R6, TIGR 4, 23F, ATCC 55840 and TIGR 670. In another embodiment, the common probe(s) can hybridize under stringent or nucleic acid array hybridization conditions to each and every strain selected from R6, TIGR 4, 23F, ATCC 55840 and TIGR 670.

[0077] In one embodiment, a nucleic acid array of the present invention includes polynucleotide probes which can hybridize under stringent or nucleic acid array hybridization conditions to respective sequences selected from SEQ ID NOs: 1 to 7,924 or the complements thereof. In one example, the nucleic acid array includes at least 2, 5, 10, 20, 30, 40, 50, 100, 200, 500, 1,000, 2,000, 3,000, 4,000, 5,000, or more different probes, each of which can hybridize under stringent or nucleic acid array hybridization conditions to a different respective sequence selected from SEQ ID NOs: 1 to 7,924, or the complement thereof. As used herein, two polynucleotides are “different” if they have different nucleic acid sequences.

[0078] The length of a probe can be selected to achieve the desired hybridization effect. For instance, a probe can include or consist of 15, 20, 25, 30, 35, 40, 45, 50, 60, 70, 80, 90, 100, 200, 300, 400 or more consecutive nucleotides. In one embodiment, each probe consists of about 25 consecutive nucleotides.

[0079] Multiple probes for the same gene can be included in a nucleic acid array of the present invention. For instance, at least 2, 5, 10, 15, 20, 25, 30 or more different probes can be used for detecting the same gene. Each of these different probes can be attached to a different respective region on a nucleic acid array. Alternatively, two or more different probes can be attached to the same discrete region. The concentration of one probe with respect to the other probe or probes in the same region may vary according to the objectives and requirements of the particular experiment. In one embodiment, different probes in the same region are present in approximately equimolar ratio.

[0080] In many applications, probes for different genes or RNA transcripts are attached to different respective regions on a nucleic acid array. In some other applications, probes for different genes or RNA transcripts are attached to the same discrete region.

[0081] In another embodiment, a nucleic acid array of the present invention includes probes for virulence or antimicrobial resistance genes. As used herein, a probe for a gene can hybridize under stringent or nucleic acid array hybridization conditions to an RNA transcript or a genomic sequence of that gene, or the complement thereof. In many instances, a probe for a gene is incapable of hybridizing under stringent or nucleic acid array hybridization conditions to RNA transcripts or genomic sequences of other genes, or the complements thereof. The virulence or resistance genes that are being detected may be unique for a particular strain, or shared by several strains. Examples of virulence genes include, but are not limited to, various toxin and pathogenesis genes including but not limited to pneumolysin (ply), neuraminidase (nanA), and the choline binding proteins CbpA and PspA. Examples of antimicrobial resistance genes include, but are not limited to, beta-lactamases, tetracycline-resistance genes, macrolide-resistance genes, fluoroquinolone-resistance genes, and glycopeptide drug-resistance genes.

[0082] The nucleic acid arrays of the present invention can also include control probes which can hybridize under stringent or nucleic acid array hybridization conditions to respective control sequences, or the complements thereof. Examples of control sequences are depicted in SEQ ID NOs: 7758-7781 and 7916-7924. Typical control sequences include, but are not limited to, probe sequences capable of hybridizing to known sequences under a known conditions, thereby serving as controls for hybridization conditions and the strength of hybridization signals. The control sequences are typically located in a predetermined location; therefore, they may also serve as indicators of address locations on the substrate.

[0083] The nucleic acid arrays of the present invention can further include mismatch probes as controls. In many instances, the mismatch residue is located near the center of a probe such that the mismatch is more likely to destabilize the duplex with the target sequence under hybridization conditions. In one embodiment, the mismatch probe is a perfect mismatch probe. Each polynucleotide probe and its corresponding perfect mismatch probe can be stably attached to different respective regions on a nucleic acid array of the present invention.

### Applications of Nucleic Acid Arrays

[0084] The arrays of the present invention may be used to detect, identify, distinguish, or quantitate different Streptococcus pneumoniae strains in a sample of interest. A sample of interest can be, without limitation, a food sample, an environmental sample, a pharmaceutical sample, a clinical sample, a blood sample, a human waste sample, a body fluid sample, or any other biological or chemical sample. Because the consensus sequences are derived from the most conserved regions of each ORF, the arrays of the invention are likely to recognize strains not included in the alignments. Additionally, the present invention designs a high number of probes per transcript (e.g., 34 probes each transcript); therefore, the arrays of the invention are capable of detecting novel strains because of greater ORF coverage by the probes. Furthermore, probes for the intergenic sequences allow the detection of unidentified ORFs or other expressible sequences. These intergenic probes are also useful for mapping transcription factor binding sites, identifying operons, promoter and termination sites.

[0085] The nucleic acid arrays of the present invention can be used to serotype unknown strains of Streptococcus pneumoniae. Strains can be typed according to their hybridization to specific genes, replacing immunological methods. For example, capsular serotype can be identified based on the profile of signal when DNA is hybridized to the array. In particular, the arrays of the invention can be used to classify strains, especially, epidemic strains in outbreaks. For example, during outbreak, the arrays of the invention can be used to determine if disease-causing strains are of a particular serotype despite clonal vaccination or represent diverse isolates. Typically, the presence of specific virulence markers can be associated with particular forms of invasive disease or with strains causing breakthrough disease in vaccine trials.

[0086] The nucleic acid arrays of the present invention can be used to monitor gene expression patterns in multiple strains of Streptococcus pneumoniae.

[0087] Protocols for performing nucleic acid array analysis are well known in the art. Exemplary protocols include those provided by Affymetrix® in connection with the use of its GeneChip® arrays. Samples amenable to nucleic acid array analysis include biological samples prepared from human or animal tissues, such as pus, blood, urine, or other body fluid, tissue or waste samples. In addition, food, environmental, pharmaceutical or other types of samples can be similarly analyzed using the nucleic acid arrays of the present invention.

[0088] In some embodiments, Streptococcus pneumoniae in a sample of interest are grown in culture before being analyzed by a nucleic acid array of the present invention. In other embodiments, an originally collected sample is directly analyzed without additional culturing.

[0089] In many embodiments, the nucleic acid array analysis involves isolation of nucleic acid from a sample of interest, followed by hybridization of the isolated nucleic acid to a nucleic acid array of the present invention. The isolated nucleic acid can be RNA or DNA (e.g., genomic DNA). In one embodiment, the isolated RNA is amplified or labeled before being hybridized to a nucleic acid array of the present invention. Various methods are available for isolating or enriching RNA. These methods include, but are not limited to, RNeasy kits® (provided by QIAGEN), MasterPure™ kits (provided by Epicentre Technologies), and TRIZOL® (provided by Gibco BRL). The RNA isolation protocols provided by Affymetrix® can also be employed in the present invention.

[0090] In some embodiments, bacterial mRNA is enriched by removing 16S and 25S rRNA. Different methods are available to eliminate or reduce the amount of rRNA in a bacterial sample. For instance, the MICROBExpress kit™ (provided by Ambion, Inc.) uses oligonucleotide-attached beads to capture and remove rRNA. 16S and 25S rRNA can also be removed by enzyme digestions. According to the latter method, 16S and 25S rRNA are first amplified using reverse transcriptase and specific primers to produce cDNA. The rRNA is allowed to anneal with the cDNA. The sample is then treated with RNAase H, which specifically digests RNA within an RNA:DNA hybrid.

[0091] In other embodiments, mRNA is amplified before being subject to nucleic acid array analysis. Suitable mRNA amplification methods include, but are not limited to, reverse transcriptase PCR, isothermal amplification, ligase chain reaction, and Qbeta replicase method. The amplification products can be either cDNA or cRNA.

[0092] Polynucleotides for hybridization to a nucleic acid array can be labeled with one or more labeling moieties to allow for detection of hybridized polynucleotide complexes. Example labeling moieties can include compositions that are detectable by spectroscopic, photochemical, biochemical, bioelectronic, immunochemical, electrical, optical or chemical means. Example labeling moieties include radioisotopes, chemiluminescent compounds, labeled binding proteins, heavy metal atoms, spectroscopic markers, such as fluorescent markers and dyes, magnetic labels, linked enzymes, mass spectrometry tags, spin labels, electron transfer donors and acceptors, and the like. In one embodiment, the enriched bacterial mRNA is labeled with biotin. The 5′ end of the enriched bacterial mRNA is first modified by T4 polynucleotide kinase with γ-S-ATP. Biotin is then conjugated to the 5′ end of the modified mRNA using methods known in the art.

[0093] Polynucleotides can be fragmented before being labeled with detectable moieties. Exemplary methods for fragmentation include, but are not limited to, heat or ion-mediated hydrolysis.

[0094] Hybridization reactions can be performed in absolute or differential hybridization formats. In the absolute hybridization format, polynucleotides derived from one sample are hybridized to the probes in a nucleic acid array. Signals detected after the formation of hybridization complexes correlate to the polynucleotide levels in the sample. In the differential hybridization format, polynucleotides derived from two samples are labeled with different labeling moieties. A mixture of these differently labeled polynucleotides is added to a nucleic acid array. The nucleic acid array is then examined under conditions in which the emissions from the two different labels are individually detectable. In one embodiment, the fluorophores Cy3 and Cy5 (Amersham Pharmacia Biotech, Piscataway, N.J.) are used as the labeling moieties for the differential hybridization format.

[0095] Signals gathered from nucleic acid arrays can be analyzed using commercially available software, such as those provide by Affymetrix® or Agilent Technologies. Controls, such as for scan sensitivity, probe labeling and cDNA or cRNA quantitation, may be included in the hybridization experiments. Examples of control sequences includes SEQ ID NOs: 7758-7781 and 7916-7924. The array hybridization signals can be scaled or normalized before being subject to further analysis. For instance, the hybridization signal for each probe can be normalized to take into account variations in hybridization intensities when more than one array is used under similar test conditions. Signals for individual polynucleotide complex hybridization can also be normalized using the intensities derived from internal normalization controls contained on each array. In addition, genes with relatively consistent expression levels across the samples can be used to normalize the expression levels of other genes.

### Protein Arrays

[0096] The present invention also features protein arrays for the concurrent or discriminable detection of multiple strains of Streptococcus pneumoniae. Each protein array of the present invention includes probes which can specifically bind to respective proteins of Streptococcus pneumoniae. In one embodiment, the probes on a protein array of the present invention are antibodies. Many of these antibodies can bind to the respective proteins with an affinity constant of at least 10⁴ M⁻¹, 10⁵ M⁻¹, 10⁶ M⁻¹, 10⁷ M⁻¹, or more. In many instances, an antibody for a specified protein does not bind to other proteins. Suitable antibodies for the present invention include, but are not limited to, polyclonal antibodies, monoclonal antibodies, chimeric antibodies, single chain antibodies, Fab fragments, or fragments produced by a Fab expression library. Other peptides, scaffolds, or protein-binding ligands can also be used to construct the protein arrays of the present invention.

[0097] Numerous methods are available for immobilizing antibodies or other probes on a protein array of the present invention. Examples of these methods include, but are limited to, diffusion (e.g., agarose or polyacrylamide gel), surface absorption (e.g., nitrocellulose or PVDF), covalent binding (e.g.; silanes or aldehyde), or non-covalent affinity binding (e.g., biotin-streptavidin). Examples of protein array fabrication methods include, but are not limited to, ink-jetting, robotic contact printing, photolithography, or piezoelectric spotting. The method described in MacBeath and Schreiber, Science, 289: 1760-1763 (2000) can also be used. Suitable substrate supports for a protein array of the present invention include, but are not limited to, glass, membranes, mass spectrometer plates, microtiter wells, silica, or beads.

[0098] The protein-coding sequence of a gene can be determined by a variety of methods. For instance, many protein sequences can be obtained from the NCBI or other public or commercial sequence databases. The protein-coding sequences can also be extracted from the corresponding tiling or parent sequences by using an open reading frame (ORF) prediction program. Examples of ORF prediction programs include, but are not limited to, GeneMark™ (provided by the European Bioinformatics Institute), Glimmer (provided by TIGR), and ORF Finder (provided by the NCBI). Where a parent or tiling sequence represents the 5′ or 3′ untranslated region of a gene, a BLAST search of the sequence against a genome database can be conducted to determine the protein-coding region of the gene.

[0099] In one embodiment, a protein array of the present invention includes at least 2, 5, 10, 20, 30, 40, 50, 100, 200, 300, 400, 500, 1,000, 2,000, 3,000, 4,000, or more probes, each of which can specifically bind to a different respective protein encoded by one or more sequences selected from SEQ ID NOs: 1-5980, 5981-7757, 7782-7870, and 7871-7915 or their corresponding genes.

### Other Forms of Arrays and Kits

[0100] The present invention contemplates a collection of polynucleotides. The collection of polynucleotides includes polypeptides capable of hybridizing under stringent or nucleic acid array hybridization conditions to a sequence selected from SEQ ID NOs: 1-5980, 5981-7757, 7782-7870, and 7871-7915, or the complement thereof. In one embodiment, the collection includes two or more different polynucleotides, each of which is capable of hybridizing under stringent or nucleic acid array hybridization conditions to a different respective sequence selected from SEQ ID NOs: 1-5980, 5981-7757, 7782-7870, and 7871-7915, or the complement thereof. In another embodiment, the collection includes one or more sequences depicted in SEQ ID NOs: 1-7924, or one or more tiling sequences derived from SEQ ID NOs: 1-7924, or the complement(s) thereof. In still another embodiment, the collection includes one or more oligonucleotide probes listed in SEQ ID NOs: 7925-254,193. In still another embodiment, the collection includes one or more oligonucleotide probes listed in SEQ ID NOs: 254,194-478,375. The present invention also features kits including the polynucleotides, polynucleotide probes, protein probes of the present invention as described in various embodiments above. In particular, the kits of the invention includes nucleic acid arrays including oligonucleotide probes derived from the consensus sequences and/or exemplar sequences of Streptococcus pneumoniae described above.

[0101] It should be understood that the above-described embodiments and the following examples are given by way of illustration, not limitation. Various changes and modifications within the scope of the present invention will become apparent to those skilled in the art from the present description.

### EXAMPLES

### Example 1

### Nucleic Acid Array

[0102] The parent sequences depicted in SEQ ID NOs: 1-7924 were used for probe selection using a probe selection algorithm developed by Affymetrix® (Mei R. et al. (2003) “Probe selection for high-density oligonucleotide arrays,” PNAS U.S.A., 100(20):11237-42, the teachings of which are hereby incorporated by reference). Probes with 25 non-ambiguous bases were selected. Thirty-four (34) probe-pairs were requested for each submitted ORF sequence with a minimum number of acceptable probe-pairs set to three. All intergenic sequences derived from the finished genomes based on the public ORF coordinates and greater than 50 bases in length were also submitted for probe selection. A maximal set of 12-15 probes were chosen for each submitted intergenic sequence. The final set of selected probes is depicted in SEQ ID NOs: 7925-254,193. These probes are perfect match probes. The perfect mismatch probe for each perfect match probe was also prepared. The perfect mismatch probe is identical to the perfect match probe except at position 13 where a single-base substitution is made. The substitutions are A to T, T to A, G to C, or C to G. The final custom nucleic acid array, Spneumola array, includes both the perfect match probes and the perfect mismatch probes. In addition, the custom array contains probe sets for control sequences.

### Example 2

### Assessing Genomic Relatedness of Different Serotypes

[0103] The Spneumo1 array was utilized to assess genomic relatedness of one or more representatives of some of the serotypes present in 13-valent pneumococcus vaccine as well as control strains for which the complete genome sequence has been determined (e.g., TIGR 4, labeled “T4” in the figures, and R6). The two control strains were obtained from ATCC and the remainder are from Wyeth's strain collection. DNA was extracted, labeled and hybridized to the array using standard methods known in the art. See, e.g., Dunman et al. (2004), “Uses of Staphylococcus aureus GeneChips® in Genotyping and Genetic Composition Analysis,” J. Clin. Microbiology, 42:4275-4283, the teachings of which are hereby incorporated by reference.

[0104] The dendrogram-heat map as shown in FIG. 1 shows DNA similarity between isolates, calculated using correlation methods using log-normalized signals for qualifiers representing ORFS. Each column represents one strain; each row represents a gene. Red indicates a strong signal for a gene present in that strain; blue indicates the gene is absent; and intermediate orange-yellow-green color represents a weaker signal, indicating, perhaps, a gene variant. The several blocks of solid blue are largely comprised of genes derived from capsule operons of serotypes not included in this study. 4,340 genes (rows) are represented in FIG. 1.

[0105] FIG. 1 shows that the four serotype 5 strains, the two serotype 1 strains, and the two serotype 6A strains, as well as the replicates of the genome controls, are essentially indistinguishable from one another. In contrast, the dendrogram indicates that the two serotype 6B strains are not closely related to one another. The serotype 4 strain is more closely related to the TIGR 4 strain than to any of the other strains, but it is not identical.

### Example 3

### Serotyping Isolates

[0106] FIGS. 2-7 show that the array of the invention may be used to aid in serotyping isolates, particularly, based on the DNA content of their capsule operons. The heat maps illustrated in FIGS. 2-7 show only those qualifiers predicted to be present in the capsule operons of these selected serotypes. Predictions are based on a comparison of the oligonucleotide probes used on the array and the DNA sequence of each capsule operon. A predicted Present call is made if 70% of the qualifier's probes match the sequence of the capsule operon. In each case, all or most of the qualifiers predicted to be present for a given serotype produce a hybridization signal on the array. It can be seen that some genes are shared by multiple serotypes, while others are unique to a single serotype or shared between closely related serotypes (e.g., serotypes 6A & 6B, FIG. 7).

### Example 4

### Virulence Gene Profiles

[0107] The array of the invention may also be used to detect the presence or absence of specific virulence genes. Examples are shown in FIGS. 8 (detecting the present of pspA) and 9 (detecting the present of pspC). Both of these genes are highly polymorphic and therefore are associated with multiple different qualifiers on the array. Some strains hybridize to one or more of these qualifiers, and some strains lack any of the variants represented on the array.

[0108] This method is also applicable to tracking clinical isolates, for example to determine if outbreaks are caused by a single or multiple strains, if different outbreaks are epidemiologically related to one another; and if different serotypes are found in different host backgrounds or in similar ones—the latter indicating serotype switching events.

[0109] The qualifiers used in the above experiments and shown in the figures are shown in Table 3. Each qualifier number correspondence to a sequence as listed in the Sequence Listing and identified by a SEQ ID NO.

TABLE 3
Sequence Information for Qualifiers

| | | | | | SEQ. | 6A,6B | SEQ. |
|---|---|---|---|---|---|---|---|
| Serotype 18F | SEQ. | Serotype 1 | SEQ. | Serotype 5 | ID | rhamnosyl- | ID |
| (FIG. 4) | ID NO. | (FIG. 2) | ID NO. | (FIG. 3) | NO. | transferase | NO. |
| WAN024AUI_at | 6322 | WAN024AW9_at | 1364 | WAN024AWB_s_at | 6606 | WAN024CD4_at | 2528 |
| WAN024AW9_at | 1364 | WAN024AWB_s_at | 6606 | WAN024AWE_x_at | 4290 | | |
| WAN024AWB_s_at | 6606 | WAN024AWE_x_at | 4290 | WAN024B4K_at | 6817 | | |
| WAN024AWE_x_at | 4290 | WAN024AXY_at | 909 | WAN024B4M_s_at | 2739 | | |
| WAN024AXE_s_at | 16 | WAN024B4M_s_at | 2739 | WAN024B8I_x_at | 7647 | | |
| WAN024AXS_at | 2777 | WAN024B8I_x_at | 7647 | WAN024BHZ_at | 6725 | | |
| WAN024AXZ_at | 907 | WAN024BI7_s_at | 2003 | WAN024BI7_s_at | 2003 | | |
| WAN024B3I_s_at | 2360 | WAN024BI9_s_at | 6258 | WAN024BI9_s_at | 6258 | | |
| WAN024B4L_at | 1736 | WAN024BIJ_x_at | 1704 | WAN024BIG_s_at | 1703 | | |
| WAN024B4N_s_at | 1733 | WAN024BJC_s_at | 6057 | WAN024BIJ_x_at | 1704 | | |
| WAN024BFY_x_at | 3184 | WAN024BRF_at | 6577 | WAN024BRR_at | 7027 | | |
| WAN024BIC_s_at | 6257 | WAN024BRG_at | 6430 | WAN024BRS_at | 6960 | | |
| WAN024BII_at | 1890 | WAN024BRH_at | 6463 | WAN024BRT_at | 6642 | | |
| WAN024BPN_at | 7150 | WAN024BRI_at | 6398 | WAN024BRU_at | 7225 | | |
| WAN024BPO_at | 6719 | WAN024BRJ_at | 6490 | WAN024BRV_at | 6805 | | |
| WAN024ERR_at | 743 | WAN024BRK_at | 6509 | WAN024CK7_at | 775 | | |
| WAN024F8Z-3_at | 46 | WAN024BRL_at | 7374 | WAN024CK8_at | 1771 | | |
| WAN024F8Z-5_at | 1458 | WAN024DJC_at | 6337 | WAN024CKI_at | 6365 | | |
| WAN024FNZ_at | 7023 | WAN024F8Z-3_at | 46 | WAN024CKL_at | 6948 | | |
| WAN024FO2_x_at | 2734 | WAN024F8Z-5_at | 1458 | WAN024CMJ_at | 4931 | | |
| WAN024FOT_at | 1710 | | | WAN024CVZ_at | 7029 | | |
| WAN024FV4_at | 721 | | | WAN024DJE_at | 6336 | | |
| WAN024FV5_at | 990 | | | | | | |
| WAN024FV6_at | 1084 | | | | | | |
| WAN024FV8_at | 2590 | | | | | | |
| WAN024FV9_at | 6728 | | | | | | |
| WAN024FYM_at | 5352 | | | | | | |
| WAN024FYX_at | 3868 | | | | | | |

| | | | SEQ. | | | | |
|---|---|---|---|---|---|---|---|
| Serotypes 6A + 6B | SEQ. | Serotype 18C | ID | pspA | SEQ. | pspC | SEQ. |
| (FIG. 6) | ID NO. | (FIG. 5) | NO. | (FIG. 8) | ID NO. | (FIG. 9) | ID NO. |
| WAN024AW9_at | 1364 | WAN024AUK_at | 684 | WAN024DRN_at | 6470 | WAN024DSR_at | 3092 |
| WAN024AWB_s_at | 6606 | WAN024AUL_s_at | 683 | WAN024DRO_at | 6469 | WAN024DSQ_at | 3097 |
| WAN024AWE_x_at | 4290 | WAN024AW9_at | 1364 | WAN024DRQ_at | 6474 | WAN024DSP_at | 3091 |
| WAN024AY3_at | 913 | WAN024AWB_s_at | 6606 | WAN024DRS_at | 6471 | WAN024DSO_s_at | 3093 |
| WAN024B3E_at | 2838 | WAN024AWE_x_at | 4290 | WAN024DRU_at | 6473 | WAN024DSN_at | 3094 |
| WAN024B3J_at | 1292 | WAN024AXB_at | 2538 | WAN024DRV_at | 6475 | WAN024DSM_at | 3096 |
| WAN024B4N_s_at | 1733 | WAN024AY2_at | 908 | WAN024DRW_at | 6481 | WAN024DSF_at | 3095 |
| WAN024B8I_x_at | 7647 | WAN024B3I_s_at | 2360 | WAN024DRY_at | 6250 | WAN024DSD_at | 2274 |
| WAN024BFY_x_at | 3184 | WAN024B4M_s_at | 2739 | WAN024DRZ_at | 6477 | WAN024DSC_at | 3102 |
| WAN024BI8_at | 3120 | WAN024BFY_x_at | 3184 | WAN024DS2_s_at | 6297 | WAN024DS3_at | 7025 |
| WAN024BIC_s_at | 6257 | WAN024BI7_s_at | 2003 | WAN024DS4_at | 6296 | WAN024DRX_at | 7043 |
| WAN024BIG_s_at | 1703 | WAN024BI9_s_at | 6258 | WAN024DS5_at | 6478 | WAN024DRT_at | 7044 |
| WAN024BJC_s_at | 6057 | WAN024BIJ_x_at | 1704 | WAN024DS6_at | 6480 | WAN024DRR_at | 7041 |
| WAN024BQU_at | 7325 | WAN024CPN_at | 2129 | WAN024DS7_at | 6472 | WAN024DRP_at | 7046 |
| WAN024CCY_at | 985 | WAN024ERQ_at | 745 | WAN024DS8_at | 6479 | WAN024DRM_at | 7042 |
| WAN024CCZ_at | 2131 | WAN024F85_at | 4389 | WAN024DS9_at | 6476 | | |
| WAN024CD4_at | 2528 | WAN024F8Z-3_at | 46 | WAN024DSB_at | 1177 | | |
| WAN024CD7_at | 4142 | WAN024F8Z-5_at | 1458 | WAN024DSG_at | 1183 | | |
| WAN024CDD_at | 1211 | WAN024FNZ_at | 7023 | WAN024DSH_at | 1182 | | |
| WAN024CDF_at | 4289 | WAN024FO2_x_at | 2734 | WAN024DSI_at | 1180 | | |
| WAN024F85_at | 4389 | WAN024FV4_at | 721 | WAN024DSJ_at | 1181 | | |
| WAN024F8V_at | 7657 | WAN024FV5_at | 990 | WAN024DSL_at | 1178 | | |
| WAN024F8Z-3_at | 46 | WAN024FV6_at | 1084 | | | | |
| WAN024F8Z-5_at | 1458 | WAN024FV8_at | 2590 | | | | |
| WAN024FRI_at | 3086 | WAN024FVB_at | 1779 | | | | |
| WAN024FS4_at | 3814 | WAN024FYM_at | 5352 | | | | |
| WAN024AWD_at | 1611 | WAN024FYX_at | 3868 | | | | |
| WAN024B3D_at | 1682 | | | | | | |
| WAN024B3H_at | 1664 | | | | | | |
| WAN024B4L_at | 1736 | | | | | | |
| WAN024B8E_s_at | 37 | | | | | | |
| WAN024BI6_at | 1979 | | | | | | |
| WAN024BIE_at | 49 | | | | | | |
| WAN024BII_at | 1890 | | | | | | |
| WAN024BX5_at | 6850 | | | | | | |
| WAN024C4Z_at | 910 | | | | | | |
| WAN024CCV_s_at | 2863 | | | | | | |
| WAN024CD6_at | 4905 | | | | | | |
| WAN024CDC_at | 2748 | | | | | | |

[0110] The foregoing description of the present invention provides illustration and description, but is not intended to be exhaustive or to limit the invention to the precise one disclosed. Modifications and variations consistent with the above teachings may be acquired from practice of the invention. Thus, it is noted that the scope of the invention is defined by the claims and their equivalents.

### INCORPORATION BY REFERENCE

[0111] All sequence access numbers, publications and patent documents cited in this application are incorporated by reference in their entirety for all purposes to the same extent as if the contents of each individual publication or patent document were incorporated herein.

We claim:

1. An array comprising a substrate having a plurality of addresses, each address comprising a probe disposed thereon, wherein the array is capable of monitoring gene expression patterns of multiple strains of Streptococcus pneumoniae.

2. The array of claim 1, wherein the probe is an oligonucleotide derived from genomic consensus sequences of Streptococcus pneumoniae using a probe selection algorithm.

3. The array of claim 2, wherein the oligonucleotide has a length of 10-50 bases.

4. The array of claim 2, wherein the probe is a perfect match probe.

5. The array of claim 2, wherein the probe is a mismatch probe comprising at least one mismatch position located at the approximate thermodynamic center of the probe.

6. The array of claim 2, wherein the genomic consensus sequences comprise one or more sequences selected from the group consisting of SEQ ID NOs: 1-5980 and 7782-7870.

7. The array of claim 6, wherein the genomic consensus sequences comprise ten or more sequences selected from the group consisting of SEQ ID NOs: 1-5980 and 7782-7870.

8. The array of claim 7, wherein the genomic consensus sequences comprise one hundred or more sequences selected from the group consisting of SEQ ID NOs: 1-5980 and 7782-7870.

9. The array of claim 2, wherein the genomic consensus sequences comprise SEQ ID NOs: 1-5980 and 7782-7870.

10. The array of claim 1, wherein the array further comprises at least one additional probe derived from exemplar sequences of Streptococcus pneumoniae using a probe selection algorithm.

11. The array of claim 10, wherein the exemplar sequences comprise one or more sequences selected from the group consisting of SEQ ID NOs: 5981-7757 and 7871-7915.

12. The array of claim 10, wherein the exemplar sequences comprise ten or more sequences selected from the group consisting of SEQ ID NOs: 5981-7757 and 7871-7915.

13. The array of claim 10, wherein the exemplar sequences comprise one hundred or more sequences selected from the group consisting of SEQ ID NOs: 5981-7757 and 7871-7915.

14. The array of claim 10, wherein the exemplar sequences comprise SEQ ID NOs: 5981-7757 and 7871-7915.

15. The array of claim 1, wherein the probe is an oligonucleotide derived from SEQ ID NOs: 1-7924 using a probe selection algorithm.

16. The array of claim 1, wherein the array is capable of monitoring gene expression patterns of one or more Streptococcus pneumoniae strains selected from the group consisting of R6, TIGR4, 23F, ATCC55840 and TIGR 670.

17. A method for identifying a serotype of a strain of Streptococcus pneumoniae in a sample, the method comprising the steps of:
exposing the sample to the array of claim 1; and
detecting a gene expression pattern indicative of the serotype.

18. A method for identifying a serotype of a strain of Streptococcus pneumoniae in a sample, the method comprising the steps of:
exposing the sample to the array of claim 6; and
detecting a gene expression pattern indicative of the serotype.

19. A method for detecting the presence of Streptococcus pneumoniae in a sample, the method comprising the steps of:
exposing the sample to the array of claim 1; and
detecting a gene expression pattern indicative of the presence of Streptococcus pneumoniae.

20. A method for detecting the presence of Streptococcus pneumoniae in a sample, the method comprising the steps of:
exposing the sample to the array of claim 6; and
detecting a gene expression pattern indicative of the presence of Streptococcus pneumoniae.

21. The method of claim 20, wherein the sample is a biological sample from a patient and the Streptococcus pneumoniae is a disease-associated strain.

22. The method of claim 20, wherein the sample is from a culture of Streptococcus pneumoniae.

23. A method for monitoring gene expression of Streptococcus pneumoniae, the method comprising the steps of:
exposing a sample derived from a strain of Streptococcus pneumoniae to the array of claim 1; and
detecting a signal indicative of a gene expression pattern of the strain.

24. A method for monitoring gene expression of Streptococcus pneumoniae, the method comprising the steps of:
exposing a sample derived from a strain of Streptococcus pneumoniae to the array of claim 6; and
detecting a signal indicative of a gene expression pattern of the strain.

The application's sequence listing, which the Patent Office published only in electronic form, follows.

SEQUENCE LISTING (478375 sequences)

SEQ ID NO: 1 - DNA, 93 bp, Streptococcus pneumoniae
  misc_feature (1)..(93): tiling:Spneumo1:WAN024BBV; Cluster includes WAN023SJJ NC_0 03098.1_1595||||1256881..1256973|-|93 bp|Glimmer 2.02 orf prediction|S.pneumoniae|R6|NC_003098.1|ORF|111
atgaaaatcaaagagcaaactaggaagctagccatagatagctcaaaacactggtttgaagagattttcaaagagtacaagaagtttagttat

SEQ ID NO: 2 - DNA, 84 bp, Streptococcus pneumoniae
  misc_feature (1)..(84): tiling:Spneumo1:WAN024B9O; Cluster includes WAN023V6D AX57 1761.1_212||||182182..182265|+|84 bp|Glimmer 2.02 orf pred iction|S.pneumoniae||AX571761.1|ORF|000
atgaaaatcaaagagcaaactaggaagctagccgtaggttgctcaaagcacagctttgaggttgcagataaagctgacgtggtt

SEQ ID NO: 3 - DNA, 75 bp, Streptococcus pneumoniae
  misc_feature (1)..(75): tiling:Spneumo1:WAN024B9E; Cluster includes WAN023OTI pne7 2_22||||17226..17300|+|75 bp|Type 33D1 capsule operon, Gli mmer 2.02 orf prediction|S.pneumoniae||WAN01UCDK|ORF|000
atgaaaattaaagagcaaactaggaagctagccacaggttgctcaaaacactgttttgaggttgcagatggaagc

SEQ ID NO: 4 - DNA, 93 bp, Streptococcus pneumoniae
  misc_feature (1)..(93): tiling:Spneumo1:WAN024B4B; Cluster includes WAN023SDJ NC_0 03028.1_918||||698364..698456|-|93 bp|Glimmer 2.02 orf pre diction|S.pneumoniae|TIGR4|NC_003028.1|ORF|020
atgaaatcaactaaagaagaaatccaaaccatcaaaacacttttaaaagactctcgtacagctaaatatcataaacgccttcaaatcgttcta

SEQ ID NO: 5 - DNA, 93 bp, Streptococcus pneumoniae
  misc_feature (1)..(93): tiling:Spneumo1:WAN024B49; Cluster includes WAN023SB5 NC_0 03028.1_1622||||1232168..1232260|-|93 bp|Glimmer 2.02 orf prediction|S.pneumoniae|TIGR4|NC_003028.1|ORF|011
atgaaatcaactaaagaagaaatccaaaccatcaaaacacttttaaaagactctcgtacagctaaatattataaacgccttcaaatcgttcta

SEQ ID NO: 6 - DNA, 93 bp, Streptococcus pneumoniae
  misc_feature (1)..(93): tiling:Spneumo1:WAN024B3Z; Cluster includes WAN023SLL NC_0 03098.1_818||||652959..653051|-|93 bp|Glimmer 2.02 orf pre diction|S.pneumoniae|R6|NC_003098.1|ORF|101
atgaaatcaactaaagaagaaatccaaaccatcaaaacactttttaaagactctcgtacagctaaatatcataaacgccttcaaatcgttcta

SEQ ID NO: 7 - DNA, 93 bp, Streptococcus pneumoniae
  misc_feature (1)..(93): tiling:Spneumo1:WAN024B3K; Cluster includes WAN023SJS NC_0 03098.1_1487||||1179037..1179129|-|93 bp|Glimmer 2.02 orf prediction|S.pneumoniae|R6|NC_003098.1|ORF|100
atgaaatcaactaaagaagaaatccaagccatcaaaacacttttaaaagactctcgtacagctaaatatcataaacgccttcaaatcgttcta

SEQ ID NO: 8 - DNA, 99 bp, Streptococcus pneumoniae
  misc_feature (1)..(99): tiling:Spneumo1:WAN024AX6; Cluster includes WAN023S95 NC_0 03028.1_2150||||1622203..1622301|-|99 bp|Glimmer 2.02 orf prediction|S.pneumoniae|TIGR4|NC_003028.1|ORF|011
atgaacttgtttcttataaaaatgttgtctgaaactattagcctttttccagaagttttagaggaagaaaactttacgaggaaaaaggagttactcaaa

SEQ ID NO: 9 - DNA, 93 bp, Streptococcus pneumoniae
  misc_feature (1)..(93): tiling:Spneumo1:WAN024AYQ; Cluster includes WAN023SBI NC_0 03028.1_1508||||1141697..1141789|-|93 bp|Glimmer 2.02 orf prediction|S.pneumoniae|TIGR4|NC_003028.1|ORF|010
atgaagcaatttaaaattctttcagataaatatttagagtccattacaggttctgatgggaacttaggcccaggatttggtgtgataattcca

SEQ ID NO: 10 - DNA, 75 bp, Streptococcus pneumoniae
  misc_feature (1)..(75): tiling:Spneumo1:WAN024AYX; Cluster includes WAN023SGG NC_0 03028.1_152||||118221..118295|+|75 bp|Glimmer 2.02 orf pre diction|S.pneumoniae|TIGR4|NC_003028.1|ORF|010
atgaaggaagatgatgctatgtttaaaaagagaatcgaaaagggcaaaagtagtatctttatctattttttggag

SEQ ID NO: 11 - DNA, 99 bp, Streptococcus pneumoniae
  misc_feature (1)..(99): tiling:Spneumo1:WAN024B2J; Cluster includes WAN023VE0 AX57 1760.1_322||||265187..265285|-|99 bp|Glimmer 2.02 orf pred iction|S.pneumoniae||AX571760.1|ORF|000
atgactgaattttcgttagctcttcttctaaaagtcattaaactagctcgttcgacctactactatcacttgaaacagctagataaaccagataaggac

SEQ ID NO: 12 - DNA, 75 bp, Streptococcus pneumoniae
  misc_feature (1)..(75): tiling:Spneumo1:WAN024B8T; Cluster includes WAN023SBB NC_0 03028.1_1568||||1193499..1193573|-|75 bp|Glimmer 2.02 orf prediction|S.pneumoniae|TIGR4|NC_003028.1|ORF|010
atgagaatcaaagagcaaattagaaagctagtcgcaggttgctcaaagcactactttgaggttgaagatggaagc

SEQ ID NO: 13 - DNA, 99 bp, Streptococcus pneumoniae
  misc_feature (1)..(99): tiling:Spneumo1:WAN024BAU; Cluster includes WAN023MWZ spn1 75g07_5||||4967..5065|-|99 bp|Glimmer 2.02 orf prediction| S.pneumoniae|23F-1|WAN01UCLL|ORF|001
atgatactgactctgtcagttctatccacaacctcaaaacagtgttttgagcaacctgcggctagcttcctagtttgctctttgattttcattgagtat

SEQ ID NO: 14 - DNA, 87 bp, Streptococcus pneumoniae
  misc_feature (1)..(87): tiling:Spneumo1:WAN024B8D; Cluster includes WAN023SVJ BD00 3817.1_13||||8552..8638|-|87 bp|Glimmer 2.02 orf predictio n|S.pneumoniae|ATCC55840|BD003817.1|ORF|000
atgatttatccgcttgcttgggggggcgcttcaaaaaacttccttctcacatgcgcccaacatccaacaagttcagcttcttccagt

SEQ ID NO: 15 - DNA, 81 bp, Streptococcus pneumoniae
  misc_feature (1)..(81): tiling:Spneumo1:WAN024BI4; Cluster includes WAN023PQL pne1 8_8||||4745..4825|+|81 bp|Type 10B capsule operon, Glimmer 2.02 orf prediction|S.pneumoniae||WAN01UCJE|ORF|000
atgggggatatgggaactatggaaataaatagtcttacagtaccaagattatttgagatgattactatgggagggggagtt

SEQ ID NO: 16 - DNA, 81 bp, Streptococcus pneumoniae
  misc_feature (1)..(81): tiling:Spneumo1:WAN024AXE; Cluster includes WAN023OM2 pne8 3_22||||21141..21221|+|81 bp|Type 41F2 capsule operon, Gli mmer 2.02 orf prediction|S.pneumoniae||WAN01UCDZ|ORF|000
atgtacgattatcttgttgttggtgcagtctttgcccatgaagcagtcttaaaaggaaaaaaagtaaaagttattgaaaaa

SEQ ID NO: 17 - DNA, 87 bp, Streptococcus pneumoniae
  misc_feature (1)..(87): tiling:Spneumo1:WAN024BCO; Cluster includes WAN023S86 NC_0 03028.1_2414||||1831416..1831502|-|87 bp|Glimmer 2.02 orf prediction|S.pneumoniae|TIGR4|NC_003028.1|ORF|010
atgtcagccccatccgcaacctcaaaacagtgttttgagcaacctgaggctagctttctagtttgctctttgatttttattgagtat

SEQ ID NO: 18 - DNA, 81 bp, Streptococcus pneumoniae
  misc_feature (1)..(81): tiling:Spneumo1:WAN024BIX; Cluster includes WAN023SK6 NC_0 03098.1_1334||||1053819..1053899|-|81 bp|Glimmer 2.02 orf prediction|S.pneumoniae|R6|NC_003098.1|ORF|110
atgtggtttcttggacatattgatcctggatcattctcatcaggattactctttactgctattttagaaactggggtggtt

SEQ ID NO: 19 - DNA, 75 bp, Streptococcus pneumoniae
  misc_feature (1)..(75): tiling:Spneumo1:WAN024B9P; Cluster includes WAN023T3C BD00 3709.1_11||||4344..4418|-|75 bp|Glimmer 2.02 orf predictio n|S.pneumoniae|ATCC55840|BD003709.1|ORF|000
atgttactgacttcgtcagttctatctgcaacctcaaaacagtgttttgagcagcccgtagctagtttcctagtt

SEQ ID NO: 20 - DNA, 93 bp, Streptococcus pneumoniae
  misc_feature (1)..(93): tiling:Spneumo1:WAN024BBU; Cluster includes WAN023SLM NC_0 03098.1_809||||644846..644938|-|93 bp|Glimmer 2.02 orf pre diction|S.pneumoniae|R6|NC_003098.1|ORF|111
ctgacttcgtcagtcttatctaaaacctcaaggcagtactttgagcaacctgcgactagctttctagtttactctttgattttcattgagtat

SEQ ID NO: 21 - DNA, 96 bp, Streptococcus pneumoniae
  misc_feature (1)..(96): tiling:Spneumo1:WAN024B8V; Cluster includes WAN023SF2 NC_0 03028.1_499||||382291..382386|+|96 bp|Glimmer 2.02 orf pre diction|S.pneumoniae|TIGR4|NC_003028.1|ORF|010
ctgacttcgtcagttctatccacaacctcaaaacactgttttaagcagcctacggctagcttcctagtttgttctttgattttcattgagtatttg

SEQ ID NO: 22 - DNA, 93 bp, Streptococcus pneumoniae
  misc_feature (1)..(93): tiling:Spneumo1:WAN024BC4; Cluster includes WAN023SAO NC_0 03028.1_1765||||1336061..1336153|+|93 bp|Glimmer 2.02 orf prediction|S.pneumoniae|TIGR4|NC_003028.1|ORF|010
ctgacttcgtcagttctatctacaacctcaaagcagtactttgagcaacctgcgactagttttctagtttgctctttgattttcattgagtat

SEQ ID NO: 23 - DNA, 84 bp, Streptococcus pneumoniae
  misc_feature (1)..(84): tiling:Spneumo1:WAN024BCJ; Cluster includes WAN023SPG BD00 3973.1_2||||1692..1775|-|84 bp|Glimmer 2.02 orf prediction |S.pneumoniae|ATCC55840|BD003973.1|ORF|000
ctgggcaaaaactcaatctcaggagaaaatgaagtaaatctccccacaactatagaaaaagatttgattctgctcctcacacaa

SEQ ID NO: 24 - DNA, 84 bp, Streptococcus pneumoniae
  misc_feature (1)..(84): tiling:Spneumo1:WAN024BBS; Cluster includes WAN023UBN AX57 1764.1_166||||118937..119020|-|84 bp|Glimmer 2.02 orf pred iction|S.pneumoniae||AX571764.1|ORF|000
gtgatacttcacataattttctttagaaaatattatcagaagaaagttgagaaaaatggcagaaaaaacatatcctatgaccct

SEQ ID NO: 25 - DNA, 75 bp, Streptococcus pneumoniae
  misc_feature (1)..(75): tiling:Spneumo1:WAN024BG8; Cluster includes WAN023S6P NC_0 03028.1_2795||||2131635..2131709|-|75 bp|Glimmer 2.02 orf prediction|S.pneumoniae|TIGR4|NC_003028.1|ORF|010
gtggaaactctcgtaaacaaagaggttttagaggcctatttaccatggactaaagttgtacaagaaaagtgcaaa

SEQ ID NO: 26 - DNA, 69 bp, Streptococcus pneumoniae
  misc_feature (1)..(69): tiling:Spneumo1:WAN024B2B; Cluster includes WAN023W8M AX57 0104.1_2||||317..409|+|93 bp|Glimmer 2.02 orf prediction|S .pneumoniae||AX570104.1|ORF|000
tacctgagagcggagaatgccatcctaaaaaagttaagagaactccgattgaaggaggaaaaagagaaa

SEQ ID NO: 27 - DNA, 96 bp, Streptococcus pneumoniae
  misc_feature (1)..(96): tiling:Spneumo1:WAN024B26; Cluster includes WAN023SD3 NC_0 03028.1_1068||||796560..796679|+|120 bp|Glimmer 2.02 orf p rediction|S.pneumoniae|TIGR4|NC_003028.1|ORF|010
tacctgagagcggagaatgccatcctaaaaaagttaagagaactccgattgaaggaggaaaaagagaaagaagaaagacagaaattgtttaagaat

SEQ ID NO: 28 - DNA, 99 bp, Streptococcus pneumoniae
  misc_feature (1)..(99): tiling:Spneumo1:WAN024BCZ; Cluster includes WAN023Z8N AL44 9925.1_30||||23026..23205|+|180 bp|Glimmer 2.02 orf predic tion|S.pneumoniae||AL449925.1|ORF|000
tcatctacaacctcaaaacagtgttttgagcaacctgaggctagcttcctagtttgttctttgattttgagtattagatttactcaaaatcaaggattt

SEQ ID NO: 29 - DNA, 93 bp, Streptococcus pneumoniae
  misc_feature (1)..(93): tiling:Spneumo1:WAN024BBX; Cluster includes WAN023SHB NC_0 03098.1_2491||||1929721..1929813|+|93 bp|Glimmer 2.02 orf prediction|S.pneumoniae|R6|NC_003098.1|ORF|110
ttgaaaccagataattcttctgtttcacgcgaaacaccctgcgccaagcaaggtgttcttgtttttatactcaatgaaaatcaaagagcaaac

SEQ ID NO: 30 - DNA, 96 bp, Streptococcus pneumoniae
  misc_feature (1)..(96): tiling:Spneumo1:WAN024B8R; Cluster includes WAN023SCS NC_0 03028.1_1179||||887361..887456|+|96 bp|Glimmer 2.02 orf pr ediction|S.pneumoniae|TIGR4|NC_003028.1|ORF|010
ttgactgcctcttttatggtggctgaaatgagaagacacaaaaagattgtcacaaacccctatttttttgatagaatagaagtagtaaaaaagaaa

SEQ ID NO: 31 - DNA, 90 bp, Streptococcus pneumoniae
  misc_feature (1)..(90): tiling:Spneumo1:WAN024AT6; Cluster includes WAN023SE8 NC_0 03028.1_668||||513246..513335|-|90 bp|Glimmer 2.02 orf pre diction|S.pneumoniae|TIGR4|NC_003028.1|ORF|011
ttgagcaagaacatttacactgctagtatagcacttattttgaccttggatcactcaaatcataaatggtcatcaaaacctcttgaattg

SEQ ID NO: 32 - DNA, 84 bp, Streptococcus pneumoniae
  misc_feature (1)..(84): tiling:Spneumo1:WAN024BA6; Cluster includes WAN023SHC NC_0 03098.1_2490||||1929711..1929794|-|84 bp|Glimmer 2.02 orf prediction|S.pneumoniae|R6|NC_003098.1|ORF|110
ttgagtataaaaacaagaacaccttgcttggcgcagggtgtttcgcgtgaaacagaagaattatctggtttcaaatgctacagt

SEQ ID NO: 33 - DNA, 93 bp, Streptococcus pneumoniae
  misc_feature (1)..(93): tiling:Spneumo1:WAN024AYJ; Cluster includes WAN023SA2 NC_0 03028.1_1906||||1439479..1439571|-|93 bp|Glimmer 2.02 orf prediction|S.pneumoniae|TIGR4|NC_003028.1|ORF|010
ttgattttttggaaaaaacaattgactaaacaaaccaagagttgtataataaaacaaatatttaaagcaggaggttccggaaatgaaaaagtc

SEQ ID NO: 34 - DNA, 90 bp, Streptococcus pneumoniae
  misc_feature (1)..(90): tiling:Spneumo1:WAN024B67; Cluster includes WAN023NSN spn0 88c08_6||||3398..3487|+|90 bp|Glimmer 2.02 orf prediction| S.pneumoniae|23F-1|WAN01UCRO|ORF|001
ttgcgagatgagtttgtggcggaaggtgttgagagccgcaaacatccagcaacgaccagacgctttctggttagtgaccttgtccttggt

SEQ ID NO: 35 - DNA, 84 bp, Streptococcus pneumoniae
  misc_feature (1)..(84): tiling:Spneumo1:WAN024BA5; Cluster includes WAN023SJ6 NC_0 03098.1_1705||||1326828..1326911|-|84 bp|Glimmer 2.02 orf prediction|S.pneumoniae|R6|NC_003098.1|ORF|110
ttgcttggcaaggttctttttttagatattgaactaatactcaatgaaaatcaaagagcaaactataatatattgaaactagaa

SEQ ID NO: 36 - DNA, 96 bp, Streptococcus pneumoniae
  misc_feature (1)..(96): tiling:Spneumo1:WAN024B8W; Cluster includes WAN023SVE BD00 3817.1_21||||11088..11183|+|96 bp|Glimmer 2.02 orf predict ion|S.pneumoniae|ATCC55840|BD003817.1|ORF|000
ttgctttaccgtactcaagtacagcctgcggctcgcttcctagtttgctctttgattttcattgagtataaaaagggtcaagtaagtatagtaaat

SEQ ID NO: 37 - DNA, 90 bp, Streptococcus pneumoniae
  misc_feature (1)..(90): tiling:Spneumo1:WAN024B8E; Cluster includes WAN023SVI BD00 3817.1_14||||8683..8772|+|90 bp|Glimmer 2.02 orf predictio n|S.pneumoniae|ATCC55840|BD003817.1|ORF|000
ttggaaagagactgggaggctttgccagctgatgaacgactacagaaacgtcaagaacatctccagcccttaatggaagacttctttgct

SEQ ID NO: 38 - DNA, 90 bp, Streptococcus pneumoniae
  misc_feature (1)..(90): tiling:Spneumo1:WAN024BBM; Cluster includes WAN023P7D pne5 3_11||||4067..4156|+|90 bp|Type 25F capsule operon, Glimme r 2.02 orf prediction|S.pneumoniae||WAN01UCCQ|ORF|000
ttggaagttagctcaaagtacagctttaaggtggtagatagaactgacgaagtcagctcaaaatactgttttgaggttgcagatggacgc

SEQ ID NO: 39 - DNA, 81 bp, Streptococcus pneumoniae
  misc_feature (1)..(81): tiling:Spneumo1:WAN024B6M; Cluster includes WAN023SNN BD00 4064.1_1||||114..194|+|81 bp|Glimmer 2.02 orf prediction|S .pneumoniae|ATCC55840|BD004064.1|ORF|000
ttgggcggttactttcgaaactttgaaaacttcaaaaaacggatttttatcgctttcaaattcttttggggtcaaactcag

SEQ ID NO: 40 - DNA, 81 bp, Streptococcus pneumoniae
  misc_feature (1)..(81): tiling:Spneumo1:WAN024B7A; Cluster includes WAN023OU1 pne7 2_3||||717..797|-|81 bp|Type 33D1 capsule operon, Glimmer 2.02 orf prediction|S.pneumoniae||WAN01UCDK|ORF|000
ttggttgcaggtctaacaaatggtgagttaatcgctccaatgacttacgaagagacgatgacgagcgacttttttgaagct

SEQ ID NO: 41 - DNA, 81 bp, Streptococcus pneumoniae
  misc_feature (1)..(81): tiling:Spneumo1:WAN024B76; Cluster includes WAN023NDJ spn1 40a09_2||||2725..2805|-|81 bp|Glimmer 2.02 orf prediction| S.pneumoniae|23F-1|WAN01UCRH|ORF|001
ttggttgcaggtctaaccaatggtgagttaatcgctccaatgacttacgaagagacgatgacgagcgacttttttgaagct

SEQ ID NO: 42 - DNA, 81 bp, Streptococcus pneumoniae
  misc_feature (1)..(81): tiling:Spneumo1:WAN024B9S; Cluster includes WAN023U3D AX57 1765.1_51||||39291..39371|+|81 bp|Glimmer 2.02 orf predict ion|S.pneumoniae||AX571765.1|ORF|000
ttgtacaagattttcttttctatctatttatactcaatgaaaatcaaagagcaaactaggaaactagccgcaggctgtact

SEQ ID NO: 43 - DNA, 610 bp, Streptococcus pneumoniae
  misc_feature (1)..(610): tiling:Spneumo1:WAN024GLK; Cluster includes WAN0244H9 spr0 437|rpoE|15902481|NP_358031.1|436031..436633|+|603 bp|RNA polymerase (delta subunit)|S.pneumoniae|R6|NC_003098.1|ORF |221
atgaggagaaacgctttggaattagaagtatttgctgggcaagaaaaaagtgaactatctatgattgaggtagcgcgtgctatmttrgaacytcgtggtcgcgatcatgagatgcattttagcgatcttgtaaacgaaattcaaaactaccttggaacatcaaacagcgatatccgcgaagctttgcctytgttctacacagagttgaactttgacggtagcttcatctcacttggggacaacaaatggggtcttcgttcatggtatggtgtggacgaaatcgacgaagaaatcatcgctcttgaagaaaatgacgacgatgaagtagcaccaaaagctaagaaaaaacgtgtyaatgcctttatggatggtgattcagatgccattgactacaatgcagatgatccagaagacgaagatgcatacgaagcagatccagctctttcatacgatgatgaaaatccagatgatgaaaaaaatgaagtggaagcttatgatgcagaaatcaacgaaatcgctccagatgacttgggagaagatgtggatctcaacgaagacgacgacgagttttcagatgacgaygctgaaaccagcgaggaataasarttag

SEQ ID NO: 44 - DNA, 941 bp, Streptococcus pneumoniae
  misc_feature (1)..(941): tiling:Spneumo1:WAN024C8E; Cluster includes WAN0244NF spr0 215|rpoA|15902259|NP_357809.1|209011..209946|+|936 bp|RNA polymerase alpha subunit|S.pneumoniae|R6|NC_003098.1|ORF|1 11
atgatcgagtttgaaaaaccaaatataacaaaaattgatgaaaataaagattatggcaagtttgtaatcgaaccacttgaacgtggctacggtacaactcttggtaactctcttcgtcgtgtacttctagcttctctaccaggagcagctgtgacatctatcaacattgatggtgtgttacatgagtttgacacagttccaggtgttcgtgaagacgtkatgcaaatcattctgaacattaaaggaattgcagtgaaatcgtacgttgaagacgaaaaaatcatcgaactggatgttgaaggtcctgctgaagtaacagctggtgacattttgacagatagcgatattgaaattgtaaatccagatcattatctctttacaatyggtgaaggttcttctctaaaagcgactatgactgttaacagtggtcgtggatatgtacctgctgaygaaaataaaaaggataatgcaccagttggaacacttgctgtagattctatttatacaccagttacaaaagtcaactatcaagtggaacctgctcgtgtaggtagcaatgatggtttcgacaaattaacccttgaaatcttgacaaatggaacaattattccagaagatgctttagggctttcagcacgtattttgacagaacatcttgatttgtttacaaatcttactgagatygctaagtcaactgaagtgatgaaagaagctgatactgaatctgacgaccgtattttagatcgtacgattgaggaactggacttgtctgtgcgttcatacaactgtttaaaacgtgccggtatcaatactgtgcatgatttgacagaaaaatctgaagcagagatgatgaaagtacgaaatcttggacgcaagagtttggaagaagtgaaactcaaactcattgatttgggtcttggattaaaagataaataactaat

SEQ ID NO: 45 - DNA, 1115 bp, Streptococcus pneumoniae
  misc_feature (1)..(1115): tiling:Spneumo1:WAN024G6F; Cluster includes WAN024427 spr0 979|rpoD|15903023|NP_358573.1|965281..966390|+|1110 bp|RNA polymerase sigmA FACTOR 70|S.pneumoniae|R6|NC_003098.1|OR F|111
atggcaacaaaacaaaaagaagtaacaacatttgacgtacaggtagcagaatttatccgtaatcataagcaaaaagggacagcaacagatgatgaaatcaatgcaagtytggttattccttttaccttggacgctgatgggattgaagatctcttgcaacggattcaggatgcaggvatttctatcacagataacgaaggaaatccaagtgcgcgtgttctyagcaatgaagaagaaccagaactcagcgatgaggacttgattgggtcaacttctgctaaggtcaatgaccctgtccgtatgtacttgaaagaaataggggtcgttcctctcttgaccaatgaagaggagaaagagttggcactggctgttgaagctggygatatcgaagccaaacaacgtcttgcggaagccaatcttcgtttggttgtttcyattgccaaacgctatgtcggtcgtggyatgcagttccttgacttgattcaagaaggaaatatgggcttgatgaaggcggttgacaagtttgactattctaaagggttcaagttttcaacttatgcaacttggtggattcgtcaggctatcactcgtgctattgcrgaycaagctcgtaccatccgtatcccagttcacatggttgaaactatcaataaattggttcgtgaacagcggaatctccttcaagaattggggcaagatccgacaccagaacagattgctgaacgaatggatatgacacctgataaggttcgtgaaatcttgaagattgcccaagaaccagtatctcttgaaactcctatcggtgaagaggacgatagccaccttggagactttatcgaagatgaagtrattgaaaatccagtggattatacgactcgtatcgtcttgcgtgagcaattggatgaaatcttagatactcttacagaccgtgaagaaaatgttctgcgtctacgttttggactagatgatggaaaaatgcgcacacttgaagatgtggggaamgtmwytaaygtaactcgtgagcgtatccgtcagattgaagcaaaggctttgagaaaaytacgccaaccaagycgyagcaaaccgcttcgtgattttattgaagactaactaat

SEQ ID NO: 46 - DNA, 917 bp, Streptococcus pneumoniae
  misc_feature (1)..(917): tiling:Spneumo1:WAN024F8Z-3; Cluster includes WAN0244Kf sp r0323|cpsO|15902367|NP_357917.1|322855..323706|+|852 bp|dT DP-L-rhamnose synthase|S.pneumoniae|R6|NC_003098|ORF|302
aaagcaggaaatagctgctttttattgctatattgggaagagttacatattagaaaggtctagagatgattttaattacagggrcaaatggccaattaggaacggaacttcgctatttattggatgaacgtaatgaagaatacgtggcagtagatgtgryyragatggayattaycratgmagaaatggttgaraaagtttttgaagaggtgaaaccgactttagtctaccaytgtgcagcctacaccgctgttgatgcagcagaggatgaaggaaragagttgracttcgccatcaatgtgacggggacaaaaaatgtcgcaaragcatctgaaaarcatggtgcaactctagtttatatttctacdgactatgtctttgayggtaaraaaccagttggrcaagagtgggaagttgatgaccgaccagatccacagacagaatatggvcgyactaagcgtatgggggragagttagttgagaagcatgtgtctaatttctatattatycgtactgcctgggtatttggaaattatggyaaaaacttygtttttaccatgcaaaatcttgcgaaaacycataagactttaacagttgtaaatgaycagtacggtcgtccgacttggactcgtaccttggctgmgttcatgacctacctagctraaaaycgyaaggaatttgrttmkyatcatttgtcaaatgatgcgacagaagayacaacatggtatgattttgcagttgaaattttgaaagrtacagatgtcgaagtcaakccagtagattccagtcaatttccagycaaagctaaacgtccgctaaactcaacgatgagyctggycaaagccaaagctactggatttgtyattccaacttggcaagatgcattgcaagaattttacaaacaagaagtgagataa

SEQ ID NO: 47 - DNA, 1413 bp, Streptococcus pneumoniae
  misc_feature (1)..(1413): tiling:Spneumo1:WAN024FYK; Cluster includes WAN023ZQC |wzx ||AAO60479.1|||387 bp|Wzx|S.pneumoniae|01S333|AY163206|ORF |000
atgaaagtactaaaaaattacgcctacaatctttcttaccaattgttggtgatyatactccctatcattacgackccctatgtaacragggtcttttcttcggatgatttagggacgtatggttattttaattccatcgttacttattttatcctcttagcgacgctaggagttgctaactatgggaccaaggtcatttcagggcatcgaaagcaaattcaaaaaaactttttgggaatctattctctgcaattaggtgcaacagttctttctctgtccttgtatgctcttctttgtctaactcttccctttatgcaaaatccggtagcctatattctaggcttgagtttagtttctaaaggtttagacatctcctggctctttcaagggttrgargattttcgwaarattackgtcmgaaatatmacagtkaarctwgttggkgtmaktkccatyttcytstttgtwaaatcakcrartgayctwtacytstatgtytttytkctaacmrywtttgaaytsttkggtcarttmagtatgtggwtwccagcycgwgaatwtattggwaraccwcattttgayatagaatatgctagrcatcatytgaarccagtyatmttrytrttcytwccrcaartkgckatytcgctttatgtkackytagatcgtacwatgytwggrgcgytagcttctacaaaagatgtmggsatttatgaycaggctttraagytggtwaatatyytwctgaccttggtaacttccttgggaagygttatgytrccwcgmgtygckcatttgttagcgacagrtgatcataaggyagtcaatargatgcatgarrtrtcyttcttmatttataatttrgtkatttttccratkatggcaggratsttgattgtsaatgatgattttgttcartttttccttggkcaagaytttcaagatgcrcgytatgcaatykccattatgatcttccgtatgttctttatcggttggaccaatatcatgggaattcagatgctgatacctyataatcaaaataaagaattcatgatttcaacaacagctcccgcaattatcagtgtaggtttgaacttactattccttcctaaactgggatatatcggggcagccattgtctctgttttaacagaggcacttgtatgggcaatccaattattctatactcgcagatatttaaaagaagttcctataatcggatcaatgtcaaaaattatactagcatctgccattatgtatggccttttactaagttcaaaaacagttatacatttttcaccgaccttaaatgttctagcatttgcagcgcttggtggaatcatttatctttttgcaattctatctctgaaagtggtagatgtgaaagaattaaaacaaattattaggaaaaac

SEQ ID NO: 48 - DNA, 729 bp, Streptococcus pneumoniae
  misc_feature (1)..(729): tiling:Spneumo1:WAN024BID; Cluster includes WAN0241IO |wzh ||AAQ10203.1|||302 bp|putative phosphotyrosine protein pho sphatase Wzh|S.pneumoniae|01S333|AF532686|ORF|000
atgatagacatccattcgcacatcgtctttgatgtagatgatggtcccaagtcaagrgaggaaagcaaggctctcttggcrgaakcctacagacagggggtgcgaaccattgtctctacctctcaccgtcgcaagggcatgtttgaaactccggaagagaagatagcagaaaactttcttcaggttcgggaaatagctaargaagtggcgagtgacttgrtcattgcttacggggctgaaatttactacacaccagatgttctggataagctggaaaaaaagcggattccgaccctcaatgatagtcgttatgctctcattgagtttagtatggatacaccatatcgtgacattcatagtgcattaagcaaaatcttgatgttgggtattaccccagtcattgcccatatcgagcgctacgatgctcttgaacaaaatgaaaagcgtgttcgtgagctgattgcaatggggtgttacacacaagtaaatagttcacacgtcctcaaacccaagctatttggagaacgctacaagttcatgaaaaaaagagctcagtattttttggagcatgatctggttcatgtgattgcaagtgatatgcacaatctagacggtagacctcctcacatgttcgaagcttatagcatagttgccaaaaagtacggggaagagaaggcgagagaactctttgaagaaaatcctcgacaaattgtaatgaatcaactaatt

SEQ ID NO: 49 - DNA, 730 bp, Streptococcus pneumoniae
  misc_feature (1)..(730): tiling:Spneumo1:WAN024BIE; Cluster includes WAN0241IY |wzh ||AAQ10225.1|||302 bp|putative phosphotyrosine protein pho sphatase Wzh|S.pneumoniae|00S023|AF532697|ORF|000
atgatagacatccattcgcatatcgtttttgatgtagatgacggtcccaagtcaagagaggaaagcaaggctctcttgryagaatcctacaggcarggggtrcgaaycattgtctctacctctcaccgtcgcaagggcatgtttgaaactccggaagagaagatagcagaaaactttcttcaggttcgggaaatwgcwaargaagtrgcgagatgayttrgtcattgcttatggcgcagagatatactatactctggatgctctagaaaagctagaaaaaaaagaaattcctacccttaatgatagtcgttatgccttgattgagtttagcatgcatacttcctatcgtcagattcatacgggattgagcaatattttgatgttgggaatcacgccagtaattgctcatattgaacgttatgatgctttagagaataacgaaaaacgtgttcgtgaactgattgatatggggtgttacacgcaagtaaatagttcacatgtcctcaaacccaaactttttggcgaacgttataaattcatgaaaaaaagagctcagtattttttagagcaggatttggttcatatcattgcaagtgatatgcacaatctagacggtagacctcctcatatggcagaagcatatgaccttgttacccaaaaatacggagaagcgaaggctcaggaactttttatagacaatcctcgaaaaattgtaatggatcaactaatt

SEQ ID NO: 50 - DNA, 729 bp, Streptococcus pneumoniae
  misc_feature (1)..(729): tiling:Spneumo1:WAN024BIH; Cluster includes WAN0241JA |wzh ||AAQ10249.1|||302 bp|putative phosphotyrosine protein pho sphatase Wzh|S.pneumoniae|00S059|AF532709|ORF|000
atgatagacatccattcgcatatcgtttttgatgtagatgayggtccmaagtcaatagaggawagcaaggcacttttaagagaagcttataatcaaggarttcgaatgattgtgtctacttcgcatcgtcgaaaagggmtgtttgaaactccrgaagaraaratwgyarmaaaytttmttmaggttcgkgaaattgcaaaagaagtagcagatgatttagtcatwgcttatggcgcagagatatactatactctggatgctctagaaaagctagaaaaaaaagaaattcctacccttaatgatagtcgttatgctttgattgagtttagcatgcatacttcctatcgtgagattcatgcgggattgagcaatattttgatgttgggaatcacgccagtaattgctcatattgaacgttatgatgccttagagaataacgaaaaacgtgttcgtgaactgattgatatggggtgctatactcagataaatagttatcatgttttaaaacctaagttctttggtgaaaaatataaattcatgaaaaagagagctcgrtattttttggaacgtgatttagttcatgtagttgcaagtgacatgcacaatttagacagtagacctccatatatgcaacaggcatatgataycattgctaagaaatatggagcgaaaaaagcgaaagaattttttgtagataatcccagaaaaattataatggatcaattaatt

SEQ ID NO: 51 - DNA, 1440 bp, Streptococcus pneumoniae
  misc_feature (1)..(1440): tiling:Spneumo1:WAN024CDE; Cluster includes WAN023ZZA |wzg ||AAQ10252.1|||489 bp|putative regulatory protein Wzg|S.pn eumoniae|MA059287|AF532711|ORF|000
atgagtagagagaaaaaaagaggaacagcagtccacttgaaatcttatatcaatagtgtgctgctaatcctgtacacaggaatagcgagcctatttctttttcagatattccgatacaatattttaaattttaggaatctcaatttattagtagctctgctagtagtattggtatttattttaggagtgagtttgattgtccgaaaaaaagctgaaaagttgacaatgcttctcctaatcttagctgtcgcaagtagttcaatatcgcttttggctgttcaacaatttatcggttttacaagtcgcttaaatgcaacttcaaacgtttcagaatatgctattagtcttgtagttttgaaagatagcgaaattagtgaactagaacaagtatcacatgtgatggcgcctaccgatacagattatgaagctattcaaagtttgttagcagatataaaagaaaagcaaggtaaagatctaatagtagataaaagcaaatcttatttagaagcctataagagtttgatttcaggtgacaccaaggtgatttttttaaatagtatttttgaacatatgattgagtcggattttcctgactttagagacaaaattaagaaaatatatacaaaagaaatgacaaagaaagtagaagctccaaaggtttcaaaggggcagrcttttactatttatttcagtgggattgatacttatggaccaattaactctgtatcacgttcggatgtcaatattttgatgacagtcaatagcgagaccaaaaaaattcttttgacaactacacctcgtgactcctatgtcgcaattgcagatggaggaaagaatcaaaaagataaattgactcatgctggaatttatggtattgattcttccattcataccttggaacatttatatggtgtagagattaactactatgttcgtgtaaatttcacttctttcttaaagatagttgatttattgaatggtattgatgtggacaatagtcaagaatttacaattgacgggaacgactatcctgttggaaatctccatctaaattctaagtcagcacttggtttcgttcgagaacgtcattctctagcagatggagatcgtgatcgaggacggaatcaacagaaggtgctcgctgcaattattcaaaaattaacctcaatagaatcattgaaaaattatcgtcaaatcatgcaaggattagaggattcaatacaaacaaatctctctccaacaactatcatggacttagccaatactcaattggaaagtggagggaattataaaataaattctcaagatttaaaagggacagggcggatggatcttccttcttatgcaatgcctgatagtcagttgtatatgatggaaattgatgagaatagcctctcagctatcaaagaaaatattcaggctgttctggagggtaggtaa

SEQ ID NO: 52 - DNA, 729 bp, Streptococcus pneumoniae
  misc_feature (1)..(729): tiling:Spneumo1:WAN024FYY; Cluster includes WAN0241M3 |wzh ||AAQ10253.1|||301 bp|putative phosphotyrosine protein pho sphatase Wzh|S.pneumoniae|MA059287|AF532711|ORF|000
atgatagatgttcattctcacattatttttgatgtggatgatgggccaaagtccatagaagatagtagagctttgttgttagaagcctatgatcaaggaattcggacaattgtttcaacatcccaccgccgtcaaggtatgtttgaaacaccagaagacaagattgcggaaaattttcgtgcggtacagaaaatagctagagatattgcagatgatttaacaattttatatggtgcagaaatctactatactcaagacattatcaataaacttgaaaagaaaactttcccaactttaaatgggagtcgatatgccttgattgaatttagtagcgagacttcttatcgttctattcatagcgctcttcagcagttgcttttgtcaggaattaccccgcttatcgcccatatcgaacgttatgatgctcttgaaaacaataaacaagcagttctcgaattgattcgtatgggctgttatacacagattaatagttcccatctactcaaaaaaaaattatttaaagatgatgcaaaaatcatgaagaaacgagttcactattttttgaaacatgatttagtccatattgtagcaagtgacatgcataatcttgatactagaccgccttatatggcggaagcttatgaaatcatttctaaaagatacggaaaagaaaaagctgaagaattttttataaaaaatccgcaacgaatcctaatggatcaattgatt

SEQ ID NO: 53 - DNA, 729 bp, Streptococcus pneumoniae
  misc_feature (1)..(729): tiling:Spneumo1:WAN024BIF; Cluster includes WAN0241HX |wzh ||AAQ10149.1|||302 bp|putative phosphotyrosine protein pho sphatase Wzh|S.pneumoniae|NZSPN00/353|AF532659|ORF|000
atgatagacatccattcgcayatcgtytttgatgtagatgayggtcccaagtcaagagaggaaagyaaggctctcttggcagaakcctacagrcagggggtgcgaaccattgtctctacctctcaycgtcgcaagggcatgtttgaaactccrgaagaraaratwgcarmaaaytttmttmaggttcgkgaaattgcaaaagaagtagcagatgatttagtcattgcttatggygcagagatatactatactctggatgcwctagaaaagctagaaaaaaaagaaattcctacccttaatgatagtcgttatgccttgattgagtttagcatgcatacttcctatcgtsagattcatacgggattgagcaatattttgatgttgggaatyackccagtcattgcccacatcgagcgytatgatgctctwgaraataaygaaaaacgygttcgkgarctgattgatatggggtgctatactcagataaatagttatcatgttttaaaayctaagctctttggtgaaagatataaatttatgaaaaagagagctcggtattttttggaacgtgatttagttcatgtagttgcaagtgayatgcacaatttgaacaaacgtcccccttatatraaagaagcctatgaacttatctcaaaacaatacggtgaaagaagagcgagagaattatttattgaaaatcctcgcttaatcttatctgatcaaattatt

SEQ ID NO: 54 - DNA, 495 bp, Streptococcus pneumoniae
  misc_feature (1)..(495): tiling:Spneumo1:WAN024AWC; Cluster includes WAN023ZX7 |wzg ||AAQ10148.1|||495 bp|putative regulatory protein Wzg|S.pn eumoniae|NZSPN00/353|AF532659|ORF|000
ttcttgaaaatgattgacttattgggaggggtagatgttcataatgatcaagagttttcagwtctacatgggaagttccatttcccagtagggaatgcccatctagactctgagcaagctttaggttttgtacgtgaacgctactcactagccgatggagaccgtgaccgtggtcgcaatcaacaaaaggtcattgtagcgattattcagaagttaacttctacagaggtcttgaaagactatagtagtattcttcaaggattgcaggattctcttcaaacaaatatgccgattgagactatgatggatttagtgaatacccagttggaaagcggagggaattataaagtaaattctcaagatttaaaagggacaggtcggatggatcttccttcctatgcaatgccagacagtaacctctatgtgatggaaatagatgatagtagtttagctgtagttaaagcagctatacaggatgtgatggagggtagatga

SEQ ID NO: 55 - DNA, 692 bp, Streptococcus pneumoniae
  misc_feature (1)..(692): tiling:Spneumo1:WAN0249X9; Cluster includes WAN024EAW R6.I G_1513.1||||1448856..1449546|+|691 bp|Between spr1466 (cad D) (- strand) and spr1467 (rpsO) (- strand)|S.pneumoniae|R 6|NC_003098.1|IG|110
aaaaaaaamctcctgtattagtcagtaataaatcagcagattttaggagagcacagacacattaatttagctatcgctagtgggtaatrtcgaacgtaggaaagcattttactcctcctcaaaacgtagttacaaagtaatttctaactggaattcagtgactacttccatgtaaagtataacatactatactttactttgtaaagagtgggctcttctagggggcttgcatacagctactcggcttgaaaagccgagtaactgcgcacctttatggtgtaattagctgataccgtttgaggtttttgtagtctccaaaattgttaccgataaaacctcaataaaaaagccctctgaagtcagagagctgatttgagcccgggctaaaatcctagtgaaaaagatgaaactccttgtgctcatcgaacactgtgtcatttccctattttcatacggatttttgacgcccttagcatcatgattcttgctagataaatcgtttatagactaggcgacgaggcgaagatcgtacgaaactttcagtgaaacaaaaaaaatctccccgaagggagaaaagctggtttattttaccttacagtgctaggaaccgtaaccaaagattatacttgagtatakcgaggtaaggtgacaacgcaaaaaagctacccaatttagagtagcttyattatcaa

SEQ ID NO: 56 - DNA, 154 bp, Streptococcus pneumoniae
  misc_feature (1)..(154): tiling:Spneumo1:WAN024ABU; Cluster includes WAN024EI5 R6.I G_949||||901952..902105|+|154 bp|Between spr0913 (pepT) (- strand) and spr0914 (hemH) (+ strand)|S.pneumoniae|R6|NC_ 003098.1|IG|110
aaaaaaactccttttgaatttattttttccattgtatcatagaaagaagagaaaaacaaaagacagaagattgagaatgtccctatgytagcgtttacttatcgatgaattaatgataaaataaacttgataaaaacatcacaaggaagcagtc

SEQ ID NO: 57 - DNA, 122 bp, Streptococcus pneumoniae
  misc_feature (1)..(122): tiling:Spneumo1:WAN024AGH; Cluster includes WAN024EKC R6.I G_750.2||||726725..726846|+|122 bp|Between spr0726 (- stra nd) and spr0727 (glnP) (+ strand)|S.pneumoniae|R6|NC_00309 8.1|IG|110
aaaaaactaagatttctcgctaattctgctagtttaaakatttttaaataaattggataaaaaatttaaattttaattcaaaacatgttataatcatacagtattctattttagaaagcagt

SEQ ID NO: 58 - DNA, 243 bp, Streptococcus pneumoniae
  misc_feature (1)..(243): tiling:Spneumo1:WAN0249MQ; Cluster includes WAN024E87-rc R 6.IG_1720||||1644378..1644620|-|243 bp|Between spr1671 (- strand) and spr1672 (czcD) (- strand)|S.pneumoniae|R6|NC_0 03098.1|IG-rc|110
aaaaaagtgaaaaatacttgggtactatcttatttggaatagagtaatttctttattatttaaatatttcaaaaattggtaagagaagagcattgtataaactccagatatatgattgttaatgataaaaatttttcgattagatacaaaatgcttgacttggagtcaactcaaagttatataataagataagtgagttagaatagcgtgaattcagtgaatgaaatgagaggaggttagcgt

SEQ ID NO: 59 - DNA, 218 bp, Streptococcus pneumoniae
  misc_feature (1)..(218): tiling:Spneumo1:WAN0249ST; Cluster includes WAN024EF7-rc R 6.IG_1173.2||||1136808..1137025|-|218 bp|Between spr1132 ( - strand) and spr1133 (- strand)|S.pneumoniae|R6|NC_003098 .1|IG-rc|110
aaaaaatagaaaaggaaatatagtaaactgaaataagatgtaaacaaatgaattggtgcttaacatccatttccagcaattttttagaaactacagtggactattctggattcaacacattataaaattatgacaaaacacattcacaagaaggctacgacattttaaaaggtgagggcggatgtatcgtttgccctactaaagttggttacattatc

SEQ ID NO: 60 - DNA, 63 bp, Streptococcus pneumoniae
  misc_feature (1)..(63): tiling:Spneumo1:WAN0249JM; Cluster includes WAN024E6E-rc R 6.IG_1930.2||||1783264..1783326|-|63 bp|Between spr1812 (a nsB) (+ strand) and spr1813 (ccpA) (- strand)|S.pneumoniae |R6|NC_003098.1|IG-rc|110
aaaaaatcagggaatcgagaagatttcctgatttkgtgctcttaaacaagagatgttgactta

SEQ ID NO: 61 - DNA, 95 bp, Streptococcus pneumoniae
  misc_feature (1)..(95): tiling:Spneumo1:WAN0249WN; Cluster includes WAN024EAH R6.I G_1542||||1472230..1472324|+|95 bp|Between spr1495 (tpx) ( + strand) and spr1496 (- strand)|S.pneumoniae|R6|NC_003098 .1|IG|110
aaaaaatcctctgtcacaaagagttccctgctctttgaaacggaggatttttgaatattagtaaatagaagttcaatcagctaaaaataactacc

SEQ ID NO: 62 - DNA, 134 bp, Streptococcus pneumoniae
  misc_feature (1)..(134): tiling:Spneumo1:WAN024AGZ; Cluster includes WAN024EKR-rc R 6.IG_715.1||||691391..691524|-|134 bp|Between spr0691 (bio Y) (- strand) and spr0692 (gor) (- strand)|S.pneumoniae|R6 |NC_003098.1|IG-rc|110
aaaaaattatccaacttgactagtcacgaaaatcggctgttacagtttttgttaccttgtttttaaaaaatggttgacatcgactcctatatgagtataatagttastatacattagaaaagaggttaactatt

SEQ ID NO: 63 - DNA, 148 bp, Streptococcus pneumoniae
  misc_feature (1)..(148): tiling:Spneumo1:WAN024APX; Cluster includes WAN0247T0 R6.I G_55||||35675..35810|+|136 bp|Between spr0034 (- strand) a nd spr0035 (aspC) (+ strand)|S.pneumoniae|R6|NC_003098.1|I G|110
aaaaacctccaaataaaatctattaccattatagacctataaacaggaaaagtaaaatagaaagtggaaagctattctctaatgtatttttgcggtcggggggcttttgtagtataatagagatacgttttgaaagtaggaggtatct

SEQ ID NO: 64 - DNA, 95 bp, Streptococcus pneumoniae
  misc_feature (1)..(95): tiling:Spneumo1:WAN0249NJ; Cluster includes WAN024E8K R6.I G_1689||||1613466..1613560|+|95 bp|Between spr1640 (- stra nd) and spr1641 (mgtC) (- strand)|S.pneumoniae|R6|NC_00309 8.1|IG|110
aaaaacctctgagcaaaaatctactcaaaaattagatgattaaaacatctaaaaarcaaaaggacaaaaacatctgtccctttgtttactaaatt

SEQ ID NO: 65 - DNA, 89 bp, Streptococcus pneumoniae
  misc_feature (1)..(89): tiling:Spneumo1:WAN024A7H; Cluster includes WAN024EFR R6.I G_1119.2.2||||1077280..1077368|+|89 bp|Between spr1081 (- strand) and spr1082 (lepA) (- strand)|S.pneumoniae|R6|NC_0 03098.1|IG|110
aaaaactaaaaaagcagaccatctaagcctgctttactattgattcttatataaatttcctgtgaacaaggaaaggcatttctgataac

SEQ ID NO: 66 - DNA, 123 bp, Streptococcus pneumoniae
  misc_feature (1)..(123): tiling:Spneumo1:WAN024AB7; Cluster includes WAN024EHS-rc R 6.IG_972.2||||920116..920238|-|123 bp|Between spr0933 (+ s trand) and spr0934 (+ strand)|S.pneumoniae|R6|NC_003098.1| IG-rc|110
aaaaactccttaaacatatttcaagtctattgtatcgataataattatcattgtcaatagatacagttacaaatttaataatataattttttcaaaaaaggatctagtttttatttttagtta

SEQ ID NO: 67 - DNA, 52 bp, Streptococcus pneumoniae
  misc_feature (1)..(52): tiling:Spneumo1:WAN024AD7; Cluster includes WAN0247H1-rc R 6.IG_117.1||||104415..104466|-|52 bp|Between spr0096 (+ st rand) and spr0097 (- strand)|S.pneumoniae|R6|NC_003098.1|I G-rc|310
aaaaagccgagggatttcctcgactctttacatattatttgttcgttagttc

SEQ ID NO: 68 - DNA, 55 bp, Streptococcus pneumoniae
  misc_feature (1)..(55): tiling:Spneumo1:WAN0249EO; Cluster includes WAN024E3L-rc R 6.IG_2208||||1995917..1995971|-|55 bp|Between spr2001 (cts R) (- strand) and spr2002 (- strand)|S.pneumoniae|R6|NC_00 3098.1|IG-rc|110
aaaaatagggagttggtgaagattatcctttaccagcgccctttttcttttaaaa

SEQ ID NO: 69 - DNA, 136 bp, Streptococcus pneumoniae
  misc_feature (1)..(136): tiling:Spneumo1:WAN0249LK; Cluster includes WAN024E7F-rc R 6.IG_1844||||1707556..1707691|-|136 bp|Between spr1729 (- strand) and spr1730 (- strand)|S.pneumoniae|R6|NC_003098.1 |IG-rc|110
aaaaatcttcacttcaaccatcaaaatagacgtactaagagtaggaaattgatgccttgctctgatttcagttctatggttgttagactttaaaaaatgaaatgctgcctttaaaagttgtatatttttcgatatt

SEQ ID NO: 70 - DNA, 214 bp, Streptococcus pneumoniae
  misc_feature (1)..(214): tiling:Spneumo1:WAN024AHJ; Cluster includes WAN024EL3-rc R 6.IG_694||||675905..676118|-|214 bp|Between spr0670 (rheB) (+ strand) and spr0671 (metK) (+ strand)|S.pneumoniae|R6| NC_003098.1|IG-rc|110
aaaaatgtccccccttaaaaaatattgttatagagttacaaagtactgataggaaaactcttcgtaataaatacctaccatcttatcgggactatataactttatcattataccatttttaatcgcaatttgcagtctttaatgtagtgtttcggtttagatagttcgttctcataaakmaaaaagttggagctcartactccaacaatttcta

SEQ ID NO: 71 - DNA, 50 bp, Streptococcus pneumoniae
  misc_feature (1)..(50): tiling:Spneumo1:WAN0249DW; Cluster includes WAN024E3A-rc R 6.IG_2239||||2023498..2023547|-|50 bp|Between spr2032 (rec F) (+ strand) and spr2033 (imdH) (- strand)|S.pneumoniae|R 6|NC_003098.1|IG-rc|110
aaaacaatgaaaagaactccagtgaaaacaggagttcttttacaatgttg

SEQ ID NO: 72 - DNA, 189 bp, Streptococcus pneumoniae
  misc_feature (1)..(189): tiling:Spneumo1:WAN0249XL; Cluster includes WAN024EB6 R6.I G_1488||||1426788..1426976|+|189 bp|Between spr1441 (oxlT) (- strand) and spr1442 (merA) (+ strand)|S.pneumoniae|R6| NC_003098.1|IG|110
aaaacctcctattttcgaacatttattctatcttatataaaaatagataggattttagtttatcaagcttgtcaaaaaattactagttttttgcctagaaagcgttttcattttttgtctttttcgtagcagaattgtgcaaaagtttttttcttgtgctagaatgtaattcgaataggaggaagataa

SEQ ID NO: 73 - DNA, 172 bp, Streptococcus pneumoniae
  misc_feature (1)..(172): tiling:Spneumo1:WAN0249DC; Cluster includes WAN0246M1-rc R 6.IG_237||||210345..210515|-|171 bp|Between spr0216 (rplQ) (+ strand) and spr0217 (+ strand)|S.pneumoniae|R6|NC_0030 98.1|IG-rc|110
aaaacgcctgcttacgaagttgttcttaagaaaaaaacaatttcgtaaacaagcgtctactatcccaacttatgatgagtgttcccgctaggaccgaaatcctagcggtagaccagagctagactaagagcacaagactccatcatcataacactcaacaaaattgatgatt

SEQ ID NO: 74 - DNA, 217 bp, Streptococcus pneumoniae
  misc_feature (1)..(217): tiling:Spneumo1:WAN024AME; Cluster includes WAN0247Q0-rc R 6.IG_79.2||||65631..65844|-|214 bp|Between spr0058 (- stra nd) and spr0059 (bgaC) (+ strand)|S.pneumoniae|R6|NC_00309 8.1|IG-rc|110
aaaactaccttccgaccgcgaaagtttgcgctttcatttgttgttatattaattataaaccaatctgtttgaattgtcaatagaaattgtcgggatatttactgcatttttactattatacacacattcaattagtttcaaacatttttagacccatttcaaacgctctttaaattcggaatataggacctaaaataattttgtatagaatrcattt

SEQ ID NO: 75 - DNA, 68 bp, Streptococcus pneumoniae
  misc_feature (1)..(68): tiling:Spneumo1:WAN024AO2; Cluster includes WAN024EOF-rc R 6.IG_448||||423604..423671|-|68 bp|Between spr0424 (lacG) (+ strand) and spr0425 (+ strand)|S.pneumoniae|R6|NC_00309 8.1|IG-rc|110
aaaactcctcctataaaaaattcaacctcatatttaaaacatattaaacatcagtcaaatcgctaacc

SEQ ID NO: 76 - DNA, 74 bp, Streptococcus pneumoniae
  misc_feature (1)..(74): tiling:Spneumo1:WAN0249JW; Cluster includes WAN024E6K-rc R 6.IG_1908||||1762518..1762591|-|74 bp|Between spr1790 (+ s trand) and spr1791 (pflC) (- strand)|S.pneumoniae|R6|NC_00 3098.1|IG-rc|110
aaaagaagcctgatggaaacatcgggcttttgacttgcaaaaagacttagcaaatcagctaagcctttttcttc

SEQ ID NO: 77 - DNA, 259 bp, Streptococcus pneumoniae
  misc_feature (1)..(259): tiling:Spneumo1:WAN024A2U; Cluster includes WAN024ED2-rc R 6.IG_1331.1||||1281808..1282066|-|259 bp|Between spr1287 ( spnIM) (+ strand) and spr1288 (- strand)|S.pneumoniae|R6|N C_003098.1|IG-rc|110
aaaagagatattatattaaaacaatatttctccggtactgggactgggacgggactaaaaatctgaaaacgtcctataattaggtggatttagtgatattataaaaaatagaatctagtattttgaatggttttggatatattgtaygtttggaaaagaagaatgggagtaattttaaactaacaaaaaatgcyttgaaatcagtgtttcagagcattttttgttctttctgtaaataatttgcaaactatagtaactg

SEQ ID NO: 78 - DNA, 203 bp, Streptococcus pneumoniae
  misc_feature (1)..(203): tiling:Spneumo1:WAN024A97; Cluster includes WAN024EGS-rc R 6.IG_1055.1||||995435..995636|-|202 bp|Between spr1016 (+ strand) and spr1017 (mreA) (+ strand)|S.pneumoniae|R6|NC_0 03098.1|IG-rc|110
aaaagcactttattctatcgttgcttaactatgaactttgcaatattcttctcaaaaacttgtaggacatcttcaaaattttgcaaggagtgattagacttgttcggtaaccataaagtgtcatactatgcttatgtatgaaaaagcaatgcaactaactcctgagaactttaaattactaattggtgccgaaaaggtagaat

SEQ ID NO: 79 - DNA, 98 bp, Streptococcus pneumoniae
  misc_feature (1)..(98): tiling:Spneumo1:WAN024AQ7; Cluster includes WAN024EPL R6.I G_360||||341859..341955|+|97 bp|Between spr0336 (csrR) (+ strand) and spr0337 (cbpF) (+ strand)|S.pneumoniae|R6|NC_0 03098.1|IG|110
aaaagcagttgcagttgtgtaactgcttttttgaggagtttttatatattgacatrcartckrgtytttrctacaatcgttttaggaggatatatara

SEQ ID NO: 80 - DNA, 83 bp, Streptococcus pneumoniae
  misc_feature (1)..(83): tiling:Spneumo1:WAN0249OI; Cluster includes WAN024E95-rc R 6.IG_1648.2||||1578716..1578796|-|81 bp|Between spr1602 (t rxA) (+ strand) and spr1603 (+ strand)|S.pneumoniae|R6|NC_ 003098.1|IG-rc|110
aaaagctcccattagggagctaaaaaataccaaatcgaggtttttttagcgatggcatatcccaaacatcgtaatattctact

SEQ ID NO: 81 - DNA, 68 bp, Streptococcus pneumoniae
  misc_feature (1)..(68): tiling:Spneumo1:WAN0249ZH; Cluster includes WAN024761 R6.I G_154.2.2||||141977..142040|+|64 bp|Between spr0133 (- str and) and A (transposase) (- strand)|S.pneumoniae|R6|NC_003 098.1|IG|110
aaaagggcattagtacttctataacagtatcgcaatctctggtgtgcgttgtctcgatcttaattcaa

SEQ ID NO: 82 - DNA, 164 bp, Streptococcus pneumoniae
  misc_feature (1)..(164): tiling:Spneumo1:WAN024A72; Cluster includes WAN024EFI-rc R 6.IG_1139||||1102752..1102915|-|164 bp|Between spr1101 (- strand) and spr1102 (- strand)|S.pneumoniae|R6|NC_003098.1 |IG-rc|110
aaaagtatttttatttgacaaatagtgctcaatgatctaaaatgactatataggattaggtcaggaagcatacgatgccctgaccctttttgtacttatgagatgagaaagtcatttgttagataaattgacttcgttagcaaacgttcaaaaaaggaaaactt

SEQ ID NO: 83 - DNA, 105 bp, Streptococcus pneumoniae
  misc_feature (1)..(105): tiling:Spneumo1:WAN024A92; Cluster includes WAN024EGP R6.I G_1058||||998562..998666|+|105 bp|Between spr1019 (+ stran d) and spr1020 (hlpA) (+ strand)|S.pneumoniae|R6|NC_003098 .1|IG|110
aaaataaataaaatkggaagaaatagcgtttttaacttgacctaaaagggattttaggatatgattatatttgttaattagaaattatytggaggaatcattaac

SEQ ID NO: 84 - DNA, 335 bp, Streptococcus pneumoniae
  misc_feature (1)..(335): tiling:Spneumo1:WAN024AMQ; Cluster includes WAN024D10 TIGR 4.IG_504.2||||513073..513184|+|112 bp|Between SP0533 (+ st rand) and SP0534 (+ strand)|S.pneumoniae|TIGR4|NC_003028.1 |IG|020
aaaataaatttctcccctgtatttgctagcttaatttacaggggagtttctttaatattgtttcgcctgtcaaaatgatatgtgatagcaggatgaaaagtctacaaacaagttggtatcaatacaatataaagaggaaagtatgtttttaatgcttactttttaaattttttaacaattcaagatgtttcgatgacaattcaagatttggatgaaaaattttaaaaaacaatgatatactaaacttgtcaaagttgcaacgggtgctgctacattatgttaaaaatcgctcttgattgataagctggatttgttaggaaaggagtaaataatta

SEQ ID NO: 85 - DNA, 55 bp, Streptococcus pneumoniae
  misc_feature (1)..(55): tiling:Spneumo1:WAN024AGQ; Cluster includes WAN024EKL R6.I G_739||||717765..717818|+|54 bp|Between spr0715 (gyrB) (+ strand) and spr0716 (ezrA) (+ strand)|S.pneumoniae|R6|NC_0 03098.1|IG|110
aaaatagggagaagtagttcccttggtctaaaaaatatgatataatcgttacgat

SEQ ID NO: 86 - DNA, 58 bp, Streptococcus pneumoniae
  misc_feature (1)..(58): tiling:Spneumo1:WAN0249E6; Cluster includes WAN024E3E-rc R 6.IG_2227.2.1||||2012704..2012761|-|58 bp|Between spr2020 (rpsB) (- strand) and spr2021 (- strand)|S.pneumoniae|R6|N C_003098.1|IG-rc|110
aaaatattggaaaagtatggtaraatgaaaattgtcgtgtgaacgataatactcattc

SEQ ID NO: 87 - DNA, 120 bp, Streptococcus pneumoniae
  misc_feature (1)..(120): tiling:Spneumo1:WAN024A4K; Cluster includes WAN024EDU R6.I G_1282||||1237223..1237342|+|120 bp|Between spr1238 (- str and) and spr1239 (amy) (+ strand)|S.pneumoniae|R6|NC_00309 8.1|IG|110
aaaatcaatactttattttaagyagttaaaatagtttccttctatcttacgcaaacgtttgcgctaatagatactttatgatagaataaagaacaagattgacaagtaagaggaaacatt

SEQ ID NO: 88 - DNA, 51 bp, Streptococcus pneumoniae
  misc_feature (1)..(51): tiling:Spneumo1:WAN0249Z5; Cluster includes WAN024EC4 R6.I G_1396.1||||1335825..1335875|+|51 bp|Between spr1352 (bta) (+ strand) and spr1353 (glnH) (- strand)|S.pneumoniae|R6| NC_003098.1|IG|110
aaaatcagctaacaagtcttaaaatcacaaaaacgcataatgtaaggtgca

SEQ ID NO: 89 - DNA, 100 bp, Streptococcus pneumoniae
  misc_feature (1)..(100): tiling:Spneumo1:WAN024A9B; Cluster includes WAN024EGV-rc R 6.IG_1049.2.1||||992602..992701|-|100 bp|Between spr1010 ( - strand) and spr1011 (+ strand)|S.pneumoniae|R6|NC_003098 .1|IG-rc|110
aaaatcattattttaatttatttctaatcactccttgacataaataactctcaccaataaaagactatgtcttaaaaaaatggtataataaaatcaatac

SEQ ID NO: 90 - DNA, 86 bp, Streptococcus pneumoniae
  misc_feature (1)..(86): tiling:Spneumo1:WAN0249KR; Cluster includes WAN02471R R6.I G_195||||184266..184351|+|86 bp|Between spr0174 (+ strand) and spr0175 (+ strand)|S.pneumoniae|R6|NC_003098.1|IG|110
aaaatccaaataaatagactgcctgaattgtagaaggtaaggaattatgctataatggtactattctaaggaaagagggtgttaga

SEQ ID NO: 91 - DNA, 151 bp, Streptococcus pneumoniae
  misc_feature (1)..(151): tiling:Spneumo1:WAN0249HL; Cluster includes WAN024E57 R6.I G_2096||||1868904..1869050|+|147 bp|Between spr1889 (argR) (- strand) and spr1890 (argS) (+ strand)|S.pneumoniae|R6| NC_003098.1|IG|110
aaaatcctcttgcgtgmawatcytmtwrcgtgcatatttataactatatttataaccatattataccaaaaaaacaggagatttcaaaaattttttcttctttctttaaaattgtgataaaatagtagaaaagtccaaaaaggagctctta

SEQ ID NO: 92 - DNA, 258 bp, Streptococcus pneumoniae
  misc_feature (1)..(258): tiling:Spneumo1:WAN0249QR; Cluster includes WAN024ENW-rc R 6.IG_468.1.2||||450073..450330|-|258 bp|Between spr0444 (g lnA) (+ strand) and spr0445 (hsdS) (+ strand)|S.pneumoniae |R6|NC_003098.1|IG-rc|110
aaaatcgacaagcacaaacaaaacagtcgccatcatcatttattgagataatatagtagattgaaataagatgtaaacaaatcgattaggaaagttaaattagtttctagaaatttttagcagatgtagtgtactattctagtctcaatttactatggyttcaaatatatctttcgaaaaaatatttacagatgtgtaattttgaagcttgcaaaagttagtaaacttgtagatttcgatttgaagtaacttgttttc

SEQ ID NO: 93 - DNA, 1553 bp, Streptococcus pneumoniae
  misc_feature (1)..(1553): tiling:Spneumo1:WAN024CRK-3; Cluster includes WAN0243R8 sp r1375|snf|15903418|NP_358968.1|1356038..1359136|-|3099 bp| SWF/SNF family ATP-dependent RNA helicase|S.pneumoniae|R6| NC_003098.1|ORF|111
aaaatctacaggaactggggcaatttgaattaaaagatgggaccttgcaggctcggaaatccttggcctacagtttagctcatctctttgaagggcgagaccgtgtttctttttcacaagaattccagaatctggcccaggatttgacrcatccagaggactttcctykrcargcaactcaggtymaggctgacttgcgagattatcaggaaaagggaattggctggttgcagatgctccatcattatgrttttggtgggattttggctgatgatatgggacttgggaaaacccttcaraccattgcttttttgactagtcaagtgacaaaagaaagtcgrgtyttgattctcgctccgtcrggtttgatttacaactgggcrgatgagtttcagaaatttgcyccacagttggatgtgrctgttgttcatggtttgaaagcaagtcgtgaggagattcttgccgagagccatcaaatctatgtgactagctatgccaccttccgtcaggacagtgagytttatcargggatggcctttgacttccttttcttagatgargctcaggtcatgaaaaatgcccagaccaagattgcccagaccttgagacaatttgtggtgccgtcggtctttgccttgtcaggaactccgattgaaaaccatctgggtgagttgtggtctattttycaaatcgtcatgccyggacttttgccaagcaagaaagaatttatgaaattgccagcagagcgagtggctcagtttatcaagcctttcgtgatgcgacgcaagaaagaagaagttctgactgaattgccagacttgattgaggtggtttataaaaatgaactggaagaccagcaaaaggctatttaccttgcccagttacaacagatgcgagaccatctggctcaagtgtcagaacaggaatttcagcgaagtcgtgtggaaattttatctggtttgatgcgcttgcgtcaaatatgtgacactcctgccctgtttatggaagattatcagggagccagcggcaaactagatagtctccgagacctactggtacaggtggcagacggcggacaccgtgtcttgattttctctcagttcaagggaatgttggaaaaaattgaacaagaactrccagacttgggcctgacwtcctttaaaattacgggttcaaccccakccaaggaaagacaagacatgaccaaggcctttaaycaaggagaaagagatgcctttctgatttccctcaaggctggtggggtcggtctgaacctgacaggtgcagatacagtratcttggttgacctttggtggaatcctgcggtggaagcgcaagccattggccgtgcccatcggatgggtcaggaagaaacggttgaggtctatcgcttggtgaccaagggaaccattgaagaaaaaattcaggaactccaagaacaaaagaaacatctggtgtcacaagtattggayggcacagagtcacgtggtagtctgaccctagcagaaattagagaaattttgggaatttctgaagccagcactykaactaat

SEQ ID NO: 94 - DNA, 67 bp, Streptococcus pneumoniae
  misc_feature (1)..(67): tiling:Spneumo1:WAN024AMD; Cluster includes WAN024ENP R6.I G_482||||466802..466868|+|67 bp|Between spr0458 (- strand) and spr0459 (+ strand)|S.pneumoniae|R6|NC_003098.1|IG|110
aaaatctacctctactgtactgaattttgatataatatagctacattataccagatttggagaaaat

SEQ ID NO: 95 - DNA, 203 bp, Streptococcus pneumoniae
  misc_feature (1)..(203): tiling:Spneumo1:WAN024ANM; Cluster includes WAN024EOA R6.I G_456.1||||433386..433588|+|203 bp|Between spr0432 (cspR) (+ strand) and spr0433 (+ strand)|S.pneumoniae|R6|NC_00309 8.1|IG|110
aaaatgaaaatgaaaatgaacaaaatgcttgcgcttgcaagcgttttttgttatgataaaagagtcttcagggcagggtgwrattcccgaccggcggtgactttaactaggaaatgatcttttccttttatactttgttgacaagctttgcctaaccagaagttatgcctacagcttgtcgcctagtctaaaagaaaaatctc

SEQ ID NO: 96 - DNA, 138 bp, Streptococcus pneumoniae
  misc_feature (1)..(138): tiling:Spneumo1:WAN024AAK; Cluster includes WAN024EHH-rc R 6.IG_989.2||||934689..934825|-|137 bp|Between spr0950 (+ s trand) and spr0951 (+ strand)|S.pneumoniae|R6|NC_003098.1| IG-rc|110
aaaatggtgcgttatttcttgtktttctatcctaaactttacttctataaaagtcacctaaagagcyataaatatttattcttgtattaattttttcgatgcgcaaacgatatctacaaatacatctataacgattca

SEQ ID NO: 97 - DNA, 75 bp, Streptococcus pneumoniae
  misc_feature (1)..(75): tiling:Spneumo1:WAN024AM7; Cluster includes WAN024ENL R6.I G_497.2||||477231..477305|+|75 bp|Between spr0473 (blpZ) ( + strand) and spr0474 (pncP) (+ strand)|S.pneumoniae|R6|NC _003098.1|IG|110
aaaatggtttgttttggaaaggctagaactaaagaatgacgtgtaggaagtctgtttgttgaggaggataatttt

SEQ ID NO: 98 - DNA, 93 bp, Streptococcus pneumoniae
  misc_feature (1)..(93): tiling:Spneumo1:WAN024APB; Cluster includes WAN024EP5 R6.I G_399||||376547..376639|+|93 bp|Between spr0375 (phaB) (+ strand) and spr0376 (+ strand)|S.pneumoniae|R6|NC_003098.1 |IG|110
aaaatmcttgcatcattctttgaattttgatataattctttctgtcaaatgttttgattgtaaaagttttttgaagaaggagggatatgaaaa

SEQ ID NO: 99 - DNA, 194 bp, Streptococcus pneumoniae
  misc_feature (1)..(194): tiling:Spneumo1:WAN024APT; Cluster includes WAN024EPF R6.I G_385.2||||359750..359943|+|194 bp|Between spr0361 (+ stra nd) and spr0362 (ropA) (+ strand)|S.pneumoniae|R6|NC_00309 8.1|IG|110
aaaattagataaattagttttggaaaatgactaaccaaaagatatccaaagtagtctaaaattgtctatactttatgagtgttttagttaggaaaaaggcttgttgtctataattgkctgcattagtctagattttatttatagaaaatgttataatagactgtatttaaaaaattttaaggagaaatgacaga

SEQ ID NO: 100 - DNA, 75 bp, Streptococcus pneumoniae
  misc_feature (1)..(75): tiling:Spneumo1:WAN024AM6; Cluster includes WAN024ENL-rc R 6.IG_497.2||||477231..477305|-|75 bp|Between spr0473 (blpZ ) (+ strand) and spr0474 (pncP) (+ strand)|S.pneumoniae|R6 |NC_003098.1|IG-rc|110
aaaattatcctcctcaacaaacagacttcctacacgtcattctttagttctagcctttccaaaacaaaccatttt

SEQ ID NO: 101 - DNA, 258 bp, Streptococcus pneumoniae
  misc_feature (1)..(258): tiling:Spneumo1:WAN024EYN; Cluster includes WAN023L1E 3138 33_2565||||1368741..1369088|+|348 bp|EGAD orf prediction|S .pneumoniae|R6|NC_003098.1|ORF|110
aaaattatttataagaatagaaaaaatcaagggaaaatgaaacccttgattttttcctattmtttagtaaaaacgtttttcaaaccttcaacggcaccttctacagcaccttttgcgtcttctacaacgtcttttgccttagcaactgttttttcaacagctccttcaagttctgtcttgctgtctccagtaactttaccaaaaccttctttgacagcgcctgttgcttgttccaatttgttttcaagtgacatatga

SEQ ID NO: 102 - DNA, 101 bp, Streptococcus pneumoniae
  misc_feature (1)..(101): tiling:Spneumo1:WAN024ART; Cluster includes WAN024EQK R6.I G_272||||255466..255566|+|101 bp|Between spr0251 (polC) (+ strand) and spr0252 (+ strand)|S.pneumoniae|R6|NC_003098. 1|IG|110
aaaattgcttaataatctattaraagaggctaacgtatatccaatagatttacattagctttcttttttgttaaaatagtctatggaaagagggtgagagt

SEQ ID NO: 103 - DNA, 52 bp, Streptococcus pneumoniae
  misc_feature (1)..(52): tiling:Spneumo1:WAN0249WI; Cluster includes WAN024EAF-rc R 6.IG_1545||||1478398..1478449|-|52 bp|Between spr1498 (- s trand) and spr1499 (gpmA) (- strand)|S.pneumoniae|R6|NC_00 3098.1|IG-rc|110
aaaattgtaagyctagrattgatttctaggctttttatgttagtatggaagt

SEQ ID NO: 104 - DNA, 80 bp, Streptococcus pneumoniae
  misc_feature (1)..(80): tiling:Spneumo1:WAN024A7Q; Cluster includes WAN024EFX-rc R 6.IG_1103||||1062207..1062286|-|80 bp|Between spr1064 (nrd H) (+ strand) and spr1065 (nrdE) (+ strand)|S.pneumoniae|R 6|NC_003098.1|IG-rc|110
aaaatttcccttatctaattacaaaagaaaggcttctaagttagccctaaaagcagtttcttctggatgatgtactaaga

SEQ ID NO: 105 - DNA, 189 bp, Streptococcus pneumoniae
  misc_feature (1)..(189): tiling:Spneumo1:WAN024ALM; Cluster includes WAN024ENC-rc R 6.IG_527.2||||500683..500871|-|189 bp|Between spr0503 (+ s trand) and spr0504 (licT) (+ strand)|S.pneumoniae|R6|NC_00 3098.1|IG-rc|110
aaaatttcccttttaamataaaaggaacctacttaaaaaacatcaagaaacttcttctgatgtgattaaataggttcctgctcacttgtattagtgataacatccttttatttcaatttttaatggtgacatgaagcttaaataattaataactctgtaaccgtttttattttatgatatttcaatcta

SEQ ID NO: 106 - DNA, 95 bp, Streptococcus pneumoniae
  misc_feature (1)..(95): tiling:Spneumo1:WAN0249GN; Cluster includes WAN024E4P R6.I G_2125||||1901359..1901453|+|95 bp|Between spr1918 (malX) (+ strand) and spr1919 (malC) (+ strand)|S.pneumoniae|R6|N C_003098.1|IG|110
aaaatttgttcaaggggggtggaaatcaaatccccctttgaatttatcaatagagacacaaataatttagctttcttataaaaaagtagtatcct

SEQ ID NO: 107 - DNA, 1827 bp, Streptococcus pneumoniae
  misc_feature (1)..(1827): tiling:Spneumo1:WAN024G4Y-3; Cluster includes WAN02440I sp r1040|rexA|15903084|NP_358634.1|1024754..1028404|+|3651 bp |First subunit of major exonuclease|S.pneumoniae|R6|NC_003 098.1|ORF|551
aaacaattatctccaatccctagaagtgcaagtcatgctagacacycttcgtgtcattcacaatcccctgcaagactacgccttggttgcccttatgaagtctccaatgtttggttttgatgaggatgagctagcacgtttgtcccttcagaaagcagaggataaagyccacgaaaatctctatgagaaactrgtcaatgcacaaaaaawggcaagtagtcaaaaaggcttgattcacacagctctagctgaaaaactaaagcaattcatggatatcctagcttcttggcgcttgtatgccaaamcccactctctctatgacttgatttggaagatttacaacgaccgtttttattatgactatgttggggctttgccgaatggtcctgctaggcaggccaatctctatgccctagcactgcgtgctgatcaatttgaaaagagcaatttcaaaggtttgtcgcgttttattcgtatgattgaccaagtcttagaagcccagcacgatttggcaagcgtggccgtcgcaccgccaaaagatgcagtagagctcatgaccatccacaagagtaaagggctggagtttccttacgtctttatcctcaatatggatcaagatttcaacaarcaagactctatgtcagaagtcattctcagtcgtcagaatggtcttggtgtcaaatatattgccaagatggagacaggggcagtagaagaccactatcctaaaaccatcaaactctccattcctagtctgacctataggcagaacgaagaggaattacagctagcaagctattctgagcagatgcgtttgctgtatgttgctatgacgcgggctgagaaaaagctctatcttgtcggcaagggttctcgtgaaaagctggaakycaagsaatacccagcagccaaaaatgggaaactaaatagcaatactagactgcaagcacggaatttccaagattggctttgggctatcagtaaagtgtttactaaggacaagctcaactttagttatcgttttattggcgaagatcagttgaccagagaagctatcggagagttggaaaccaagagtcctctccaagatagctcccaagcagacaatcgtcagtcagataccatcaaagaagctctggaaatgctgaaggaggtggaagtttataatactcttcaccgcgcagctattgaacttcctagtgttcaaaccccaagtcaaatcaagaaattctacgaaccagttatggatatggaaggtgtcgagattgctggtcaaggtcagtcagtaggcaagaaaatcagcttcgatttgccagatttttcaaccaaagaaaaggtaactggagctgagattggtagygctactcacgaactcatgcagagaattgacctcagccagcwrstaasccttgctagcctaacagaaacactcaaacaagttcaaactagccaagctgtcagagacaagatcaatcttgataaaattcttgctttctttgacacagyactcggtcaggaaattyttgctaataccgaccatctytatcgcgagcaacctttctccatgctcaaacgagaccaaaagagtcaggaagactttgttgtccgtggtatccttgatggctatctgctttacgaaaacaaaattgttytgttcgactacaagacagaccgctatgatgaaccaagtcaactcgtagaccgctatcgtggtcagttagctctatackaasaggctttatcacgagcctattcgattgaaaatattgaaaaatacttgattttactcggtaaagacgaggttcaagttgtaaaagtataactaat

SEQ ID NO: 108 - DNA, 56 bp, Streptococcus pneumoniae
  misc_feature (1)..(56): tiling:Spneumo1:WAN024A56; Cluster includes WAN024EEH-rc R 6.IG_1221||||1176853..1176908|-|56 bp|Between spr1177 (rpm E) (+ strand) and spr1178 (- strand)|S.pneumoniae|R6|NC_00 3098.1|IG-rc|110
aaacagcagttgatttcaagaaacaaaaaagaacagccraaactgttctcttatca

SEQ ID NO: 109 - DNA, 75 bp, Streptococcus pneumoniae
  misc_feature (1)..(75): tiling:Spneumo1:WAN024AC8; Cluster includes WAN024EIA R6.I G_940.2||||889835..889897|+|63 bp|Between spr0904 (+ stran d) and spr0905 (yfnA) (+ strand)|S.pneumoniae|R6|NC_003098 .1|IG|110
aaacattttataaatattcacatatctcctatatttatggtaaaatagaattatcagtttattttggagtcaaag

SEQ ID NO: 110 - DNA, 56 bp, Streptococcus pneumoniae
  misc_feature (1)..(56): tiling:Spneumo1:WAN024AHD; Cluster includes WAN024EKX-rc R 6.IG_702||||684452..684507|-|56 bp|Between spr0678 (+ stra nd) and spr0679 (ppiA) (- strand)|S.pneumoniae|R6|NC_00309 8.1|IG-rc|110
aaaccaaaaaaaatacagtatccacattcggtactgtatttcttttactctcattc

SEQ ID NO: 111 - DNA, 782 bp, Streptococcus pneumoniae
  misc_feature (1)..(782): tiling:Spneumo1:WAN024G3U; Cluster includes WAN0243ZR spr1 067|lacR|15903111|NP_358661.1|1065778..1066539|+|762 bp|La ctose phosphotransferase system repressor|S.pneumoniae|R6| NC_003098.1|ORF|111
aaacgaggtgataatatgctcaaacaagaaaaattarccaaaattttagagatagtaaatagtaaaggaaccataacagttaaacagattatggacgaaatagccgtttcagatatgactgcaaggcgctatttacaggaattagctgataaagatttgctgattcgtgtgcatggtggagctgaaaaacttcgaaccaactcccttttgactaatgagcgatcaaatattgaaaaacaagccctccaaacggcagaaamacaagaaatagcccattttgcaggcagtctagtagaagamagagaaactattttcattggaccaggaacaacattagagttttttgcgcgtgagttgcctattgacaatatccgcgtcgtaaccaacagtctacctgtttttctgattttaagcgaacgaaaattaacagatttgattttrataggtggaaattatcgcgatattacaggtgcttttgttggyacattgaccctacaaaatctctctaatctccaattttctaaagctttcgttagctgtaatggtattcaaaacggagctctagctacttttagcgaggaagagggagaggctcaacgcatcgctttaaataattctaataaaaaatatttactcgcagatcatagyaagttcaataagtttgatttttatactttttataatrtatcaaatcttgatactattgtttcagattctaaactaagtgattcaatcctttttaagctatctaaacacattaaagtcatcaagccttaactaat

SEQ ID NO: 112 - DNA, 128 bp, Streptococcus pneumoniae
  misc_feature (1)..(128): tiling:Spneumo1:WAN0249ZW; Cluster includes WAN024ECJ-rc R 6.IG_1373.2||||1317614..1317740|-|127 bp|Between spr1329 ( glyQ) (- strand) and spr1330 (- strand)|S.pneumoniae|R6|NC _003098.1|IG-rc|120
aaactaaaggagtaaacaatgtctaagaaattaacatttcactgcrtcagtggcagaracctccttacagtcggrctgcycyacgctcagcactagrgtgcctgagctagacgcagtactaactcgtc

SEQ ID NO: 113 - DNA, 79 bp, Streptococcus pneumoniae
  misc_feature (1)..(79): tiling:Spneumo1:WAN0249VR; Cluster includes WAN024EA2 R6.I G_1576.2||||1507028..1507098|+|71 bp|Between spr1529 (nanE ) (- strand) and spr1530 (- strand)|S.pneumoniae|R6|NC_003 098.1|IG|110
aaactagcmaagtcaaacagctcctctaaaagtactttcagaggagcaagtcgacctataaataggagaataccaaaat

SEQ ID NO: 114 - DNA, 59 bp, Streptococcus pneumoniae
  misc_feature (1)..(59): tiling:Spneumo1:WAN024A9W; Cluster includes WAN024EH7 R6.I G_1022.1||||969440..969498|+|59 bp|Between spr0983 (+ stra nd) and spr0984 (obg) (+ strand)|S.pneumoniae|R6|NC_003098 .1|IG|110
aaactagctcaattcatgctaagataatagaaaatagaatgtaacgaaggagagaaaaa

SEQ ID NO: 115 - DNA, 99 bp, Streptococcus pneumoniae
  misc_feature (1)..(99): tiling:Spneumo1:WAN024AS9; Cluster includes WAN024EQR R6.I G_264||||238628..238726|+|99 bp|Between spr0243 (proS) (+ strand) and spr0244 (bglA) (+ strand)|S.pneumoniae|R6|NC_0 03098.1|IG|110
aaactataatcagaagaaaaacaaggaaaaaatgtaactagtttttaccttgttttttctgtataatgggagaaatgagtagataaagaggtaaatgtt

SEQ ID NO: 116 - DNA, 624 bp, Streptococcus pneumoniae
  misc_feature (1)..(624): tiling:Spneumo1:WAN024AIL; Cluster includes WAN024ELO-rc R 6.IG_650||||634341..634964|-|624 bp|Between spr0626 (lysS) (+ strand) and spr0627 (lctO) (+ strand)|S.pneumoniae|R6| NC_003098.1|IG-rc|120
aaactgtcctcctygattaagtaagcgtttgctttttactatacaactataataactcttttttcaatcattttcaagagttttgcttaaaaaccatcttattttttcatacaatatactagccctactttccttaaactctaaacyttagtctatattaagtgaatcgttgagattttttgctgccaggcatttgaactacttttttatttgctgattctatctactaatactataaaaaaacaagtgaataagacaccagaacatcctctaataggacctatggacttatatcartcccatatatactgtttaagcaagatactatcctagttgacgctaacttcctatcccacttattaattttttatttatagtgaatctgaacaaatcaattggggaatccaagtcaatttctagtactttttgaaaagtttcagcgtactatcgtaaaatgaaataaaacatgcacaaattgmttagggaatttaaaccaatttctaacaatgtcttagaaatcaaagtgtactatttcaayttcaatatactacacttcattttctccttaaattcagtctctttttgaatcaaaaaatccyctgataagasccagaggataagaat

SEQ ID NO: 117 - DNA, 230 bp, Streptococcus pneumoniae
  misc_feature (1)..(230): tiling:Spneumo1:WAN0249PV; Cluster includes WAN024EAI-rc R 6.IG_1538.2||||1468857..1469086|-|230 bp|Between spr1491 ( pepO) (- strand) and spr1492 (psaB) (+ strand)|S.pneumonia e|R6|NC_003098.1|IG-rc|110
aaacttgtattcctcctgtctcttaatatacattaaaaaaaaaattaagtcaagttaatttttgaaaaaattaaaataataactgaaaaatagattctaaagataactttcaggataaatttctaaattataaaacgcatagtatcaagtgtaaaaaacttggaattatgcgttttatcatggaaagattttttataatagctaaaaaataatagttaaatggttattaa

SEQ ID NO: 118 - DNA, 63 bp, Streptococcus pneumoniae
  misc_feature (1)..(63): tiling:Spneumo1:WAN024A6F; Cluster includes WAN024EFA R6.I G_1168||||1131618..1131680|+|63 bp|Between () (- strand) a nd spr1128 (guaC) (- strand)|S.pneumoniae|R6|NC_003098.1|I G|110
aaacttgttttattataacagaaatttgctctaataacaagttttttggtcaaagaccccgtc

SEQ ID NO: 119 - DNA, 149 bp, Streptococcus pneumoniae
  misc_feature (1)..(149): tiling:Spneumo1:WAN024APC; Cluster includes WAN024EP7-rc R 6.IG_396||||373549..373697|-|149 bp|Between spr0372 (serS) (- strand) and spr0373 (- strand)|S.pneumoniae|R6|NC_0030 98.1|IG-rc|110
aaactttagtataatcatagcaacggataagtaggttatcttcttctttcagaaagtctgcgggtrctgcgagcagataggagggataggtgaaattctaccgttagtgacaattacatacacaatcaagtgcacacctgtgaagttgg

SEQ ID NO: 120 - DNA, 207 bp, Streptococcus pneumoniae
  misc_feature (1)..(207): tiling:Spneumo1:WAN0249O7; Cluster includes WAN024E8X-rc R 6.IG_1662.2||||1590332..1590538|-|207 bp|Between spr1616 ( cshA) (+ strand) and () (+ strand)|S.pneumoniae|R6|NC_0030 98.1|IG-rc|110
aaagaaaaaagctgtattggtgccgaaacttcacggtttgtattgaacccgcgcaattaagcaggtgggcaactcgctctaactgaagctgtttccgtgtgagacggcctacatgctgttagaagacttttgtttccctaataatacaaaaaatagtcggtcaacacttaagtgtgaagtcgtacaccacagcgtttctatatttat

SEQ ID NO: 121 - DNA, 359 bp, Streptococcus pneumoniae
  misc_feature (1)..(359): tiling:Spneumo1:WAN024AB4; Cluster includes WAN024EHQ R6.I G_977.2||||924271..924629|+|359 bp|Between spr0938 (+ stra nd) and spr0939 (+ strand)|S.pneumoniae|R6|NC_003098.1|IG| 110
aaagaaagtacaacgactagttcaaaagctaaaacttcaagtaaaaagttattcaagaaaatctagaaaatactcatcctacaaaggacaggtaggaaaaatatcagacaacaaaataaaaagaaatatttattaccgaaaaaaaggggaaatcgagtyaagtaccaacaggctcatctattccaaaaagatatttactcgatggaaaaactcctagaattagtgctacaaatattgacaatggtatcttaggttactacgaagatatagatgataaaaattatagagtttttgaaaattttatatctgtttcatttttaggagcagtcttttatcataaatataaagcaagcctagat

SEQ ID NO: 122 - DNA, 53 bp, Streptococcus pneumoniae
  misc_feature (1)..(53): tiling:Spneumo1:WAN024AJM; Cluster includes WAN024EM6 R6.I G_616||||606837..606889|+|53 bp|Between spr0592 (+ strand) and spr0593 (cpsY) (- strand)|S.pneumoniae|R6|NC_003098.1 |IG|110
aaagaaccaatgtgcaggttgttgctagcctacatattggttcttatcatttc

SEQ ID NO: 123 - DNA, 59 bp, Streptococcus pneumoniae
  misc_feature (1)..(59): tiling:Spneumo1:WAN024A74; Cluster includes WAN024EFJ-rc R 6.IG_1138.2||||1099438..1099496|-|59 bp|Between spr1100 (l dh) (+ strand) and spr1101 (- strand)|S.pneumoniae|R6|NC_0 03098.1|IG-rc|110
aaagaaggccgagtcaaaattctttgaaatcagaaaaaacgcataatattgagtgcttt

SEQ ID NO: 124 - DNA, 61 bp, Streptococcus pneumoniae
  misc_feature (1)..(61): tiling:Spneumo1:WAN0249XC; Cluster includes WAN024EAZ-rc R 6.IG_1505||||1439711..1439771|-|61 bp|Between spr1458 (fer ) (+ strand) and spr1459 (gtrB) (- strand)|S.pneumoniae|R6 |NC_003098.1|IG-rc|110
aaagactataattttacatggaaatgtgctaaactagagggagtggattatcgccattgat

SEQ ID NO: 125 - DNA, 92 bp, Streptococcus pneumoniae
  misc_feature (1)..(92): tiling:Spneumo1:WAN024A95; Cluster includes WAN024EGR-rc R 6.IG_1056||||996640..996731|-|92 bp|Between spr1017 (mreA) (+ strand) and spr1018 (- strand)|S.pneumoniae|R6|NC_0030 98.1|IG-rc|110
aaagaggtaatgtcgtgacctcaaaagttagactaaatcatctatcttttgggttacagacaacctcttttttrttttatttactcaagctc

SEQ ID NO: 126 - DNA, 74 bp, Streptococcus pneumoniae
  misc_feature (1)..(74): tiling:Spneumo1:WAN024ARZ; Cluster includes WAN0247V0 R6.I G_45.1||||25737..25810|+|74 bp|Between spr0024 (+ strand) and spr0025 (radA) (+ strand)|S.pneumoniae|R6|NC_003098.1| IG|110
aaagaggtttgtcatcgcaaagaaaaaagcgacatttgtatgtcaaaattgtgggtataattcccctaaatatc

SEQ ID NO: 127 - DNA, 80 bp, Streptococcus pneumoniae
  misc_feature (1)..(80): tiling:Spneumo1:WAN024AH8; Cluster includes WAN024EKU R6.I G_707.1.2||||687165..687244|+|80 bp|Between spr0683 (+ str and) and spr0684 (+ strand)|S.pneumoniae|R6|NC_003098.1|IG |110
aaagattgaacgtttaggcaattccaagactacttaatcgaacattaacagcagtctcggactgatgaaggtctctttat

SEQ ID NO: 128 - DNA, 114 bp, Streptococcus pneumoniae
  misc_feature (1)..(114): tiling:Spneumo1:WAN0249FE; Cluster includes WAN024E44-rc R 6.IG_2179||||1962518..1962616|-|99 bp|Between spr1972 (fuc A) (- strand) and spr1973 (fcsK) (- strand)|S.pneumoniae|R 6|NC_003098.1|IG-rc|110
aaagattgagagtttgtaaatttgcctccctcccccttcttagcttttgtgcaggaaggggggataattggtgaattgaaaaatatttagtgttttgatatgaggaggacaagg

SEQ ID NO: 129 - DNA, 59 bp, Streptococcus pneumoniae
  misc_feature (1)..(59): tiling:Spneumo1:WAN024A75; Cluster includes WAN024EFJ R6.I G_1138.2||||1099438..1099496|+|59 bp|Between spr1100 (ldh) (+ strand) and spr1101 (- strand)|S.pneumoniae|R6|NC_0030 98.1|IG|110
aaagcactcaatattatgcgttttttctgatttcaaagaattttgactcggccttcttt

SEQ ID NO: 130 - DNA, 306 bp, Streptococcus pneumoniae
  misc_feature (1)..(306): tiling:Spneumo1:WAN0249PJ; Cluster includes WAN024E73 R6.I G_1871||||1724772..1725077|+|306 bp|Between spr1756 (dinF) (- strand) and spr1757 (recA) (- strand)|S.pneumoniae|R6| NC_003098.1|IG|110
aaagctattatatcagctttccagaggagcgacaagaaacagcaaacttatatatagcggaatgaaataaggacagtcaaatcgatttttaacaatgttttagaagtagatgtgtactattctagtttcgatctattatagttggttgagtttggaatagtacgctgtagctgctaaaacatttctagaaattaatttgactttcctaataaagttgttcatatcttatttcaagctactatatataatctaaaaacttgaatcaaaaatcgaaaaagtagcggatttctccactgctttaacagc

SEQ ID NO: 131 - DNA, 772 bp, Streptococcus pneumoniae
  misc_feature (1)..(772): tiling:Spneumo1:WAN024DHZ; Cluster includes WAN02445B-3 sp r0867|lytB|15902911|NP_358461.1|858971..861136|+|2166 bp|E ndo-beta-N-acetylglucosaminidase|S.pneumoniae|R6|NC_003098 .1|ORF|111
aaagctttcctatatatcgcaaggtagtgtcgtatggctagataaggatagaaaaagtgatgacaagcgcttggctattactatttctggtttgtcaggctatatgaaaacagaagatttacaagcgctagatgctagtaaggactttatcccttattatgagagtgatggccaccgtttttatcactatgtggctcagaatgctagtatcccagtagcttctcatctttctgatatggaagtaggcaagaaatattattcggcagatggcctgyattttgatggttttaagcttgagaatcccttccttttcaaagatttaacagaggctacaaactacagtgctgaagaattggataaggtatttagtttgctaaacattaayaatagccttttggagaacaagggcgctacttttaaggaagccgaagaacattaycatatcaatgcyctttatctccttgcccatagtgccctagaaagtaactggggaagaagtaaaattgccaaagataagaataatttctttggcattacagcctatgatacgaccccttacctttctgcyaagacatttgatgatgtggataagggaattttaggtgcaaccaagtggattaaggaaaattatatcgataggggaagaactttccttggaaacaaggcttctggtatgaatgtggaatatgcttcagacccttattggggcgaaaaaattgctagtgtgatgatgaaaatcaatgagaagstaggtggcaaagatctarctaat

SEQ ID NO: 132 - DNA, 193 bp, Streptococcus pneumoniae
  misc_feature (1)..(193): tiling:Spneumo1:WAN0249UH; Cluster includes WAN024ECW R6.I G_1337.2.1.2||||1290204..1290269|+|66 bp|Between spr1293 ( + strand) and spr1294 (- strand)|S.pneumoniae|R6|NC_003098 .1|IG|230
aaaggaaaattgatttatagaaatrttttagyagtcgatgcgtactgttatagattcaacgmactataaaatctgaagaaagcaattttaaccagatcttagaagcagttgtgtactactctaacttcaatagactatatcatatagataaaaaacaactccctgatgattcaaggagttgtctatagttaaa

SEQ ID NO: 133 - DNA, 192 bp, Streptococcus pneumoniae
  misc_feature (1)..(192): tiling:Spneumo1:WAN024AS7; Cluster includes WAN024EQQ R6.I G_265||||240107..240297|+|191 bp|Between spr0244 (bglA) (+ strand) and spr0245 (glmS) (+ strand)|S.pneumoniae|R6|NC_ 003098.1|IG|110
aaaggactctgactgattatcccaatcggtcagagtttttatgcttacaggagcttaatttgaactataccaatttttactcttgacaagtgaaagaaacaagtatatactgtttttgctgattctataaaagatgaattagactataccaattttaaggagaaagcacagcttgcctgtgtcgtatatact

SEQ ID NO: 134 - DNA, 345 bp, Streptococcus pneumoniae
  misc_feature (1)..(345): tiling:Spneumo1:WAN0249TZ; Cluster includes WAN024EGT R6.I G_1053||||994770..995114|+|345 bp|Between spr1014 (rpmA) ( + strand) and spr1015 (- strand)|S.pneumoniae|R6|NC_003098 .1|IG|220
aaaggtycattgaaccttttatcccgaaccttgaaatgtaaaggtgaggaagctagaaacagcttaaaataaggctttccgagttttcggagagcctgtttttttrttttgrtacccatactttttaatatgtatagtggattgatactctkcgaaaatcraatkcaaacyaygtcaryttcaccttgccrtactyaagtaywgcctgcggytarcttcctagtttgywcttyaattttcattgagtatgaatctggaatagaacactgttaaamattgatatgagtttcctactcgatttcttcagattttatttcaattgactataagaactgctatctggtt

SEQ ID NO: 135 - DNA, 130 bp, Streptococcus pneumoniae
  misc_feature (1)..(130): tiling:Spneumo1:WAN0249HC; Cluster includes WAN024E52-rc R 6.IG_2114.2||||1884930..1885059|-|130 bp|Between spr1907 ( dapD) (- strand) and spr1908 (- strand)|S.pneumoniae|R6|NC _003098.1|IG-rc|110
aaagtcttttcttaattctaaaagtgtgctatactggaatagtcaataaaacacggggagatagttgtgaagagtgtttttaggttgtatcggtaggggcttgcttttaccgacagcacgttttatctca

SEQ ID NO: 136 - DNA, 133 bp, Streptococcus pneumoniae
  misc_feature (1)..(133): tiling:Spneumo1:WAN0249N2; Cluster includes WAN024E8C-rc R 6.IG_1708.2||||1633088..1633220|-|133 bp|Between spr1659 ( - strand) and spr1660 (exoA) (+ strand)|S.pneumoniae|R6|NC _003098.1|IG-rc|110
aaagttacctttttcattcagattatagattttattataccaaaaaaagatctatttccccaacgtatggtttgaaaaattactctctttcgtttataattaagaatgattttatgaaagggagtgaaaatay

SEQ ID NO: 137 - DNA, 210 bp, Streptococcus pneumoniae
  misc_feature (1)..(210): tiling:Spneumo1:WAN024AJW; Cluster includes WAN024EMB-rc R 6.IG_598||||585424..585633|-|210 bp|Between spr0574 (+ str and) and spr0575 (ccdA) (+ strand)|S.pneumoniae|R6|NC_0030 98.1|IG-rc|110
aaagttcctcctatcattttattgatagatttattatactccttccattttcgaaaaaacagggacaatgataggggaaaataggaatttaatcagatgatttagaaatcttggacaaaaactatacaaaaaactgtcaaagcacaaaagcgcatagtatcaagattctataaagccttgatactatgcgcttttgtaatggataaatag

SEQ ID NO: 138 - DNA, 240 bp, Streptococcus pneumoniae
  misc_feature (1)..(240): tiling:Spneumo1:WAN024A7L; Cluster includes WAN024EFT-rc R 6.IG_1110||||1071533..1071765|-|233 bp|Between spr1072 (la cT) (- strand) and spr1073 (lacD) (- strand)|S.pneumoniae| R6|NC_003098.1|IG-rc|110
aaasaragtcctcctagtttgakgaaywtkagawcatarwwaarttttaaaaaaagttgtatgtaaaggtttacaaaayaacykacttgtgctatacttaaatcacaagttaatacaaggtgagtgttactaagtaatattaggcatgatcacaggtgaattagaaatcagctgattttctagttcatttgtggtcattttttgtactyatatacctttaagatataaaaggaggttgac

SEQ ID NO: 139 - DNA, 121 bp, Streptococcus pneumoniae
  misc_feature (1)..(121): tiling:Spneumo1:WAN024A3U; Cluster includes WAN024EDI-rc R 6.IG_1315||||1266220..1266334|-|115 bp|Between spr1271 (rp sU) (- strand) and spr1272 (nagB) (- strand)|S.pneumoniae| R6|NC_003098.1|IG-rc|110
aaataaaaaagcaatgttctattgaacgctttcaactcttgtataaatggaagaaaaaatcaaaattaaaccgcatttttgcttgacaattattccttttacgtgtaraatrraatagatm

SEQ ID NO: 140 - DNA, 50 bp, Streptococcus pneumoniae
  misc_feature (1)..(50): tiling:Spneumo1:WAN0249KH; Cluster includes WAN024E6T R6.I G_1886||||1741390..1741439|+|50 bp|Between spr1771 (nisP) (+ strand) and spr1772 (+ strand)|S.pneumoniae|R6|NC_00309 8.1|IG|110
aaataaaatttggagccctctgaaaaagtaagtcctacagttcaactaaa

SEQ ID NO: 141 - DNA, 156 bp, Streptococcus pneumoniae
  misc_feature (1)..(156): tiling:Spneumo1:WAN024A47; Cluster includes WAN024EDN R6.I G_1295||||1251431..1251586|+|156 bp|Between spr1251 (glnH) (- strand) and spr1252 (phoU) (- strand)|S.pneumoniae|R6| NC_003098.1|IG|110
aaataaacaacctctctgttaattttgtataattataacgatatccaagttacttgtcaagtgttttttaaatttttatctcaaaaatatkttttcgttcaaaaaaaggagccatcagttgatttcaagctccyttttatacagaattaaactatt

SEQ ID NO: 142 - DNA, 111 bp, Streptococcus pneumoniae
  misc_feature (1)..(111): tiling:Spneumo1:WAN024AOX; Cluster includes WAN024EOX R6.I G_424.2||||397246..397356|+|111 bp|Between spr0400 (+ stra nd) and spr0401 (ilvB) (+ strand)|S.pneumoniae|R6|NC_00309 8.1|IG|110
aaataaacgttaaaatagaaaattcagaaaatttcttcttttatcttgaaaaattttgaaaaaatggtatgatagtaacaagttatttttaagaggaaagaaaggggaata

SEQ ID NO: 143 - DNA, 342 bp, Streptococcus pneumoniae
  misc_feature (1)..(342): tiling:Spneumo1:WAN024ABL; Cluster includes WAN024EHZ-rc R 6.IG_956||||904937..905278|-|342 bp|Between () (+ strand) and spr0918 (asd) (+ strand)|S.pneumoniae|R6|NC_003098.1|I G-rc|110
aaataacctctttcggaattttctaaaaatttctataatagaagtattatactactttttccatgaattgcaaagctttttcatcattttttggaaaataaaaatcccagtcgctagactagggactaagaggcatcttcatgtgatgagcaggttcacacaactcatcaaggtccgctcctgcgttatgacctcctyatgctcaatagtagtccgaagactacctatcgactcatcgcatattctatattactagagatacttgattttgtcaataagaaatttttymgatcgagtataacaaaaaaactcycgtattcaagagtttccctatacatatca

SEQ ID NO: 144 - DNA, 134 bp, Streptococcus pneumoniae
  misc_feature (1)..(134): tiling:Spneumo1:WAN0249QG; Cluster includes WAN024E74 R6.I G_1870.2||||1723267..1723400|+|134 bp|Between spr1755 (- s trand) and spr1756 (dinF) (- strand)|S.pneumoniae|R6|NC_00 3098.1|IG|110
aaatactatactttattatatcatataaaagaagtcaaaagtctgttaaactattttcaacaccaaactaaagamgagaacacaagttttttcgattttcactagaggaaatggattttattcagtaaatccaa

SEQ ID NO: 145 - DNA, 171 bp, Streptococcus pneumoniae
  misc_feature (1)..(171): tiling:Spneumo1:WAN0249S2; Cluster includes WAN024EBS R6.I G_1425||||1363339..1363509|+|171 bp|Between spr1381 (- str and) and spr1382 (aliB) (- strand)|S.pneumoniae|R6|NC_0030 98.1|IG|110
aaatactccttataatatttcaacggataaagtcgggaataactcaatttgaggataaaatctaataaatcttcctataacaaaacgcataacatctaggattttatatacctgatattatgcgtttttaagcacaaagacttcttacacaaacttatctacaattagatt

SEQ ID NO: 146 - DNA, 215 bp, Streptococcus pneumoniae
  misc_feature (1)..(215): tiling:Spneumo1:WAN024AIQ; Cluster includes WAN024ELQ R6.I G_648||||632362..632575|+|214 bp|Between spr0624 (glnP) (- strand) and spr0625 (+ strand)|S.pneumoniae|R6|NC_003098. 1|IG|110
aaatagaacctcccatctagaaataatacagttattgtagcacttaaaatcttctttggataatatctattttttattgccgttataaggattttttaycatagacataaaatttctgaaatttccaaacaaaatatttkaaaagttttgaaaaagagttaagatatttttgtaatayacaaagtraacgcttacttattaaggaggrcatttta

SEQ ID NO: 147 - DNA, 203 bp, Streptococcus pneumoniae
  misc_feature (1)..(203): tiling:Spneumo1:WAN024AFB; Cluster includes WAN024EJS-rc R 6.IG_807.1||||772962..773164|-|203 bp|Between spr0777 (+ s trand) and () (+ strand)|S.pneumoniae|R6|NC_003098.1|IG-rc |110
aaataggtttcattcgaactttaatagactatgaaaaccagtggaacttaccctgacacrgaattccactggttttttcgatttttatcagattaacttctactattcttagctgtgaaaattagtttaagactttaacttattttcagtcttctaatctaaaggccacttccagtaaagaaaaatcagggttctcctgactt

SEQ ID NO: 148 - DNA, 81 bp, Streptococcus pneumoniae
  misc_feature (1)..(81): tiling:Spneumo1:WAN024A63; Cluster includes WAN024EF3 R6.I G_1183.1||||1145005..1145085|+|81 bp|Between spr1142 (- st rand) and spr1143 (- strand)|S.pneumoniae|R6|NC_003098.1|I G|110
aaatatcttcctttcccagctaactagtcgctaaaatcctaacaaactcaatactttagtagtctgatatgccaatctcac

SEQ ID NO: 149 - DNA, 72 bp, Streptococcus pneumoniae
  misc_feature (1)..(72): tiling:Spneumo1:WAN024A4H; Cluster includes WAN024EDS R6.I G_1285.1||||1242025..1242096|+|72 bp|Between spr1241 (- st rand) and spr1242 (- strand)|S.pneumoniae|R6|NC_003098.1|I G|110
aaatcaaaagacaagctcatatcacgaagggcgaaaaaccgcggtaccaccttcattcaatgaacttgtcat

SEQ ID NO: 150 - DNA, 96 bp, Streptococcus pneumoniae
  misc_feature (1)..(96): tiling:Spneumo1:WAN024A4F; Cluster includes WAN024EDR R6.I G_1285.2||||1242191..1242286|+|96 bp|Between spr1241 (- st rand) and spr1242 (- strand)|S.pneumoniae|R6|NC_003098.1|I G|110
aaatcaattctcaactttcttattataacgtttttttaagcttgcgtcaactggaaatgatctccgttgaattagaccaattccctacatctctga

SEQ ID NO: 151 - DNA, 304 bp, Streptococcus pneumoniae
  misc_feature (1)..(304): tiling:Spneumo1:WAN0249SB; Cluster includes WAN024A0N-rc T IGR4.IG_1453||||1454049..1454324|-|276 bp|Between SP1546 ( + strand) and SP1547 (- strand)|S.pneumoniae|TIGR4|NC_0030 28.1|IG-rc|020
aaatcagatattttgtatttggcaatatgtatcatcagctattttagtttataaatgagaaaaaagcgaacaagctagtcttctgagtgtcagaaaagtagtcttgttcgcttttattatkttatactcttygaaaatctcttcaarccacgtcarygtcgccttrsmktatatatgtwactgacttcgtcagtyytatctacaacctcaaagcagtgctttgagyarcttgcggctagyttcctagtttgctytttgattttyattgagtrttakattactttctatttgtaggaggtggctt

SEQ ID NO: 152 - DNA, 81 bp, Streptococcus pneumoniae
  misc_feature (1)..(81): tiling:Spneumo1:WAN024AL2; Cluster includes WAN024EN2-rc R 6.IG_542||||519553..519633|-|81 bp|Between spr0518 (+ stra nd) and spr0519 (cysS) (+ strand)|S.pneumoniae|R6|NC_00309 8.1|IG-rc|110
aaatcataatcaggaaagctgaaatccaagaacaattagtttcatcactaaaagttcaagtaaatttcagtccgaatatct

SEQ ID NO: 153 - DNA, 190 bp, Streptococcus pneumoniae
  misc_feature (1)..(190): tiling:Spneumo1:WAN024AEJ; Cluster includes WAN024EJG-rc R 6.IG_833.2.2||||802675..802864|-|190 bp|Between spr0797 (p ykF) (+ strand) and spr0798 (- strand)|S.pneumoniae|R6|NC_ 003098.1|IG-rc|110
aaatcatcagactggacgactacagacagactacttactctcgtgttaggtagtttatctctgcaggtagccgctygatgcaggacracgatttagwtatggagtttccattatcccagacgactacgacccaatcgcttatgtcgtcagcaagtccatggagccaaagataagaaacagcgactaccta

SEQ ID NO: 154 - DNA, 92 bp, Streptococcus pneumoniae
  misc_feature (1)..(92): tiling:Spneumo1:WAN0249YN; Cluster includes WAN024EBU-rc R 6.IG_1419||||1359137..1359228|-|92 bp|Between spr1375 (snf ) (- strand) and spr1376 (patB) (- strand)|S.pneumoniae|R6 |NC_003098.1|IG-rc|110
aaatccagccttctaggagaaaagtcttcctagaaggctattttcataggcgaaaatatggtataataaaaagataaggtaaaggtgaaaat

SEQ ID NO: 155 - DNA, 135 bp, Streptococcus pneumoniae
  misc_feature (1)..(135): tiling:Spneumo1:WAN024AC3; Cluster includes WAN024EI8-rc R 6.IG_943.2||||895005..895139|-|135 bp|Between spr0907 (pht D) (+ strand) and spr0908 (phtE) (+ strand)|S.pneumoniae|R 6|NC_003098.1|IG-rc|110
aaatccctcatttcaataaatgatgaagttttttctcaacttcttttactttattaaatagttttctaaacyggttatttaaccatttaattaaccagtaaatagtttactatttaaaattacttttgtcaagtt

SEQ ID NO: 156 - DNA, 57 bp, Streptococcus pneumoniae
  misc_feature (1)..(57): tiling:Spneumo1:WAN024A4V; Cluster includes WAN024EDZ R6.I G_1260||||1213554..1213610|+|57 bp|Between spr1216 (- stra nd) and spr1217 (msrA) (- strand)|S.pneumoniae|R6|NC_00309 8.1|IG|110
aaatcccttctattcatattctagaaatgaagaaagtgggaagccccactctctgtt

SEQ ID NO: 157 - DNA, 164 bp, Streptococcus pneumoniae
  misc_feature (1)..(164): tiling:Spneumo1:WAN0249MS; Cluster includes WAN024E88-rc R 6.IG_1717||||1641770..1641932|-|163 bp|Between spr1668 (ga lK) (- strand) and spr1669 (galR) (+ strand)|S.pneumoniae| R6|NC_003098.1|IG-rc|110
aaatcctccttgattaggttagtatatcatrtttttctkctttttactgataktttastaaaattttagtaaaaaggattgaccttggraaatyccttggatayaatagaaagaaaacgattacacgttaagrtggcttaacggacagtcaaaggagaawtcat

SEQ ID NO: 158 - DNA, 157 bp, Streptococcus pneumoniae
  misc_feature (1)..(157): tiling:Spneumo1:WAN0249KF; Cluster includes WAN024E6S R6.I G_1888||||1742842..1742998|+|157 bp|Between spr1773 (+ str and) and spr1774 (+ strand)|S.pneumoniae|R6|NC_003098.1|IG |110
aaatccttgtttttaattgcacgatgagttactgaaatattatcatgaatcaagaattggagttaatttagaattgtacttaatttagaattgtactttattaatattgaggtaactttttcttgataaaggaagaaataatggagaggaagttaga

SEQ ID NO: 159 - DNA, 101 bp, Streptococcus pneumoniae
  misc_feature (1)..(101): tiling:Spneumo1:WAN024AE9; Cluster includes WAN024EJB-rc R 6.IG_843||||809650..809732|-|83 bp|Between spr0807 (+ stra nd) and spr0808 (tex) (+ strand)|S.pneumoniae|R6|NC_003098 .1|IG-rc|110
aaatctattataccacaagctaaacgtttcaaattaactcgtagaacrtttaaaaaatatgtaggaaatagatttatatgctacagcgcaataacttgcac

SEQ ID NO: 160 - DNA, 151 bp, Streptococcus pneumoniae
  misc_feature (1)..(151): tiling:Spneumo1:WAN024A26; Cluster includes WAN024ECN-rc R 6.IG_1366||||1309262..1309394|-|133 bp|Between spr1322 (pd x1) (- strand) and spr1323 (nox) (- strand)|S.pneumoniae|R 6|NC_003098.1|IG-rc|110
aaatgaatgagctatctggccttaagttaaggtcagatagtttttagctaatytgtccccatacaattatagtttttttatcttgtgcttcattctgttctgacttaaaatgaaaaggtagctaccaatacaaatgatgaggataaaacaa

SEQ ID NO: 161 - DNA, 97 bp, Streptococcus pneumoniae
  misc_feature (1)..(97): tiling:Spneumo1:WAN024A5Y; Cluster includes WAN024EEZ-rc R 6.IG_1184.2||||1145797..1145893|-|97 bp|Between spr1143 (- strand) and spr1144 (smf) (- strand)|S.pneumoniae|R6|NC_0 03098.1|IG-rc|110
aaatgacctaagctagaattctaagaaaaaatcaattttaagagaaaatgaacccaacatttccataataaaacgcatattagcaagtttttaacac

SEQ ID NO: 162 - DNA, 194 bp, Streptococcus pneumoniae
  misc_feature (1)..(194): tiling:Spneumo1:WAN0249D2; Cluster includes WAN024EQZ R6.I G_249||||220249..220442|+|194 bp|Between spr0228 (+ strand ) and spr0229 (+ strand)|S.pneumoniae|R6|NC_003098.1|IG|11 0
aaatgatagactgattcagtttatcgtttttctttttagttgattgcacatttgtgcttatataaacaaaaatagtttatctgttgtttttggattgacaactttattatgtagttgtattctatagttacaaaagaaaattttaaaatttcaaatgaaaaaagctttttacatagtgaaatgaggaggaattt

SEQ ID NO: 163 - DNA, 240 bp, Streptococcus pneumoniae
  misc_feature (1)..(240): tiling:Spneumo1:WAN0249SZ; Cluster includes WAN024EIK R6.I G_922.1.1||||876821..876901|+|81 bp|Between spr0886 (- str and) and spr0887 (gpmB) (- strand)|S.pneumoniae|R6|NC_0030 98.1|IG|200
aaatggtcctcttttctcgttgtaattattattattacaactattatataatttccatcaagaaagtcaagccagataactcaaaaataacaccatttcaggataatataaagtaaatcatttcataataaaacgcatattatcaaacttttcatcacctgayawkatgcgttattwtaattttaaagactttttgaccagcytywttttttaacttgatactcagtgaaaagcaaagat

SEQ ID NO: 164 - DNA, 307 bp, Streptococcus pneumoniae
  misc_feature (1)..(307): tiling:Spneumo1:WAN024ALP; Cluster includes WAN024ENF R6.I G_512.2||||489426..489731|+|306 bp|Between spr0488 (+ stra nd) and spr0489 (+ strand)|S.pneumoniae|R6|NC_003098.1|IG| 110
aaatgtgtcaaaactggttgctaatgrmtgaaaaawtgaaatawwwstgtctttttrytttaaagackaragwtgcgggcwwstgcccgaaattgggtggtaccgcggataaacacattcgtccctgtcatgtagatggcagggcttttcttttrygtcttagtcaaaggrggttgttatraarcaatcwtttaamacwartaaactatattatggttttcctgtttttattttaggatatcaagattagaattttggctataacatcacgacctgtagttcctcttatagtctaggagattgggtt

SEQ ID NO: 165 - DNA, 217 bp, Streptococcus pneumoniae
  misc_feature (1)..(217): tiling:Spneumo1:WAN024AMF; Cluster includes WAN0247Q0 R6.I G_79.2||||65631..65844|+|214 bp|Between spr0058 (- strand) and spr0059 (bgaC) (+ strand)|S.pneumoniae|R6|NC_003098.1 |IG|110
aaatgyattctatacaaaattattttaggtcctatattccgaatttaaagagcgtttgaaatgggtctaaaaatgtttgaaactaattgaatgtgtgtataatagtaaaaatgcagtaaatatcccgacaatttctattgacaattcaaacagattggtttataattaatataacaacaaatgaaagcgcaaactttcgcggtcggaaggtagtttt

SEQ ID NO: 166 - DNA, 209 bp, Streptococcus pneumoniae
  misc_feature (1)..(209): tiling:Spneumo1:WAN0249O5; Cluster includes WAN024E8W-rc R 6.IG_1665||||1590612..1590820|-|209 bp|Between () (+ stran d) and spr1617 (sacA) (- strand)|S.pneumoniae|R6|NC_003098 .1|IG-rc|110
aaattaagttatttctcctaaagaaaaagttctctttctaaaatagtggaaagaggactttttgtgttttgggtatataagcttagtttatggtatttgtaaaattggtgttggattatgatttaarctagttttctaaagaatttgaaaaaaattttatttaagcaaaaaaagccytrkattmyaagrcttttcctgttgtatttata

SEQ ID NO: 167 - DNA, 70 bp, Streptococcus pneumoniae
  misc_feature (1)..(70): tiling:Spneumo1:WAN024ASP; Cluster includes WAN024800 R6.I G_4||||4116..4185|+|70 bp|Between spr0004 (+ strand) and s pr0005 (pth) (+ strand)|S.pneumoniae|R6|NC_003098.1|IG|110
aaattaataaatggtgtcaattaggttggaaaaaaattccaacccttttggcttttgaaaggaaaaataa

SEQ ID NO: 168 - DNA, 141 bp, Streptococcus pneumoniae
  misc_feature (1)..(141): tiling:Spneumo1:WAN024AKG; Cluster includes WAN024EMK-rc R 6.IG_580.2.2.1.2||||558284..558424|-|141 bp|Between spr055 6 (rplA) (+ strand) and spr0557 (+ strand)|S.pneumoniae|R6 |NC_003098.1|IG-rc|110
aaattaggatttctctcatraaataatacttttaatcaaaaattctgtttaatagtttaaattaccaacctactcatcttctcaccagagggcggtattaactttgatcataaaatcggatactccctctatccagaaaat

SEQ ID NO: 169 - DNA, 332 bp, Streptococcus pneumoniae
  misc_feature (1)..(332): tiling:Spneumo1:WAN024A2X; Cluster includes WAN024ED3 R6.I G_1328.2.1||||1279676..1280007|+|332 bp|Between spr1284 (- strand) and spr1285 (+ strand)|S.pneumoniae|R6|NC_003098. 1|IG|110
aaattagtccttagatgactactcccactctgttgctcctataatggaaaaggattgatacagtctagaatatcgcttttttatttattattctgatataaaactgttagaattgattttttgttttatacccaaatatgaatagagacrtagctaataagttgaataacatatttggaaaaatgagaaatagcaatattactagaayttttagaaacaatcaatatttaaaaagaaaaaagctcaaagaatttattaaaccatgttataatagatatagctataattttatttataacaagaggatagaaatgaccgaattagaaagaaaa

SEQ ID NO: 170 - DNA, 88 bp, Streptococcus pneumoniae
  misc_feature (1)..(88): tiling:Spneumo1:WAN024AI4; Cluster includes WAN024ELB R6.I G_678||||660545..660611|+|67 bp|Between spr0654 (comEB) (+ strand) and spr0655 (upp) (+ strand)|S.pneumoniae|R6|NC_0 03098.1|IG|110
aaattatcaaaaataaatggtttagaaagatttttaaaccgttttttggtataataagaagaataaattgaaagaaggaattccaaaa

SEQ ID NO: 171 - DNA, 94 bp, Streptococcus pneumoniae
  misc_feature (1)..(94): tiling:Spneumo1:WAN024AM5; Cluster includes WAN024ENK R6.I G_498.1||||477918..478011|+|94 bp|Between spr0474 (pncP) ( + strand) and spr0475 (+ strand)|S.pneumoniae|R6|NC_003098 .1|IG|110
aaattatgaaaaggtaagcagaagacggtgcttacctttttcaagctataatgatacccaagccaatccagaggcttttctttgagaatcgggt

SEQ ID NO: 172 - DNA, 179 bp, Streptococcus pneumoniae
  misc_feature (1)..(179): tiling:Spneumo1:WAN024AKW; Cluster includes WAN024EMY-rc R 6.IG_550||||527019..527197|-|179 bp|Between spr0526 (vex3) (+ strand) and spr0527 (pep27) (+ strand)|S.pneumoniae|R6 |NC_003098.1|IG-rc|110
aaattccatarctttagtatattatatttaagcamtaaagtacaaagaaarcaactgaaagcaatgattttcaccactgctttcggatttattttgaattgttaaatagccattcctatccactattcttgaatagaaacacaagatgcaatctttattcyagactcattttttcaaat

SEQ ID NO: 173 - DNA, 83 bp, Streptococcus pneumoniae
  misc_feature (1)..(83): tiling:Spneumo1:WAN024A2H; Cluster includes WAN024ECS R6.I G_1348||||1297632..1297699|+|68 bp|Between spr1304 (cppA) (- strand) and spr1305 (- strand)|S.pneumoniae|R6|NC_00309 8.1|IG|110
aaattcctccgtcactttttattttaaaggattttagaattttttacaagatattatgctcaaatttaacattatttagctat

SEQ ID NO: 174 - DNA, 194 bp, Streptococcus pneumoniae
  misc_feature (1)..(194): tiling:Spneumo1:WAN0249D3; Cluster includes WAN024EQZ-rc R 6.IG_249||||220249..220442|-|194 bp|Between spr0228 (+ str and) and spr0229 (+ strand)|S.pneumoniae|R6|NC_003098.1|IG -rc|110
aaattcctcctcatttcactatgtaaaaagcttttttcatttgaaattttaaaattttcttttgtaactatagaatacaactacataataaagttgtcaatccaaaaacaacagataaactatttttgtttatataagcacaaatgtgcaatcaactaaaaagaaaaacgataaactgaatcagtctatcattt

SEQ ID NO: 175 - DNA, 164 bp, Streptococcus pneumoniae
  misc_feature (1)..(164): tiling:Spneumo1:WAN0249FS; Cluster includes WAN024E4C-rc R 6.IG_2164||||1943786..1943949|-|164 bp|Between spr1957 (ar cB) (+ strand) and spr1958 (arcC) (+ strand)|S.pneumoniae| R6|NC_003098.1|IG-rc|110
aaattctcctttatcacactcaatagaatgcgtttagatttcaatttaatgatttttcacatattttataagaaataatagattaccattayataaaagaggaccggactaaagctattagtcgcagccctcatagctgttggtagacggtttattatctaaaa

SEQ ID NO: 176 - DNA, 96 bp, Streptococcus pneumoniae
  misc_feature (1)..(96): tiling:Spneumo1:WAN0249FR; Cluster includes WAN02471I R6.I G_223.2.2||||202644..202736|+|93 bp|Between spr0202 (rpsN) (+ strand) and spr0203 (rpsH) (+ strand)|S.pneumoniae|R6| NC_003098.1|IG|110
aaattgtctatttttgctcgtgctgttacgctctttgtatcatgtattaactagcaagtgcaacttgcaaactactagtaagaggagaaaaacaaa

SEQ ID NO: 177 - DNA, 104 bp, Streptococcus pneumoniae
  misc_feature (1)..(104): tiling:Spneumo1:WAN024A7A; Cluster includes WAN024EFN-rc R 6.IG_1132||||1092177..1092271|-|95 bp|Between spr1094 (- s trand) and spr1095 (- strand)|S.pneumoniae|R6|NC_003098.1| IG-rc|110
aaatttaaagtaaaagaagataaacagtgggyttygactcactgtttttgattttccctcaggcatgatataatggttacagaagtctagaaagaggaaygtat

SEQ ID NO: 178 - DNA, 251 bp, Streptococcus pneumoniae
  misc_feature (1)..(251): tiling:Spneumo1:WAN024A7Z; Cluster includes WAN024EG5-rc R 6.IG_1096.1||||1052979..1053227|-|249 bp|Between spr1057 ( - strand) and spr1058 (- strand)|S.pneumoniae|R6|NC_003098 .1|IG-rc|110
aaatttaaggcaatcaattacttggaagagtatgaaagcatttagtttataggaattctaggtctagaattacayatatatatttatgaakacggggtgytcgatagttagtattgttctattctgaaagatttgagctgtcagttgtatagaaagtgttcgaatttttttaagtgattaaattagttrattgtatgaggtgctttatgatataatgttcttaatgaattttcagaaaggaaaacctcaaa

SEQ ID NO: 179 - DNA, 132 bp, Streptococcus pneumoniae
  misc_feature (1)..(132): tiling:Spneumo1:WAN024ACB; Cluster includes WAN024EE6-rc R 6.IG_1244.2||||1196239..1196370|-|132 bp|Between spr1200 ( - strand) and spr1201 (- strand)|S.pneumoniae|R6|NC_003098 .1|IG-rc|110
aaatttgtaagttttcgctatataaaatagttaaatctattttgtatcattgcttgcattttactggtggagagagtatatgagggtggataaagtacttaatcccaaaaatttaaataggaggagctagct

SEQ ID NO: 180 - DNA, 164 bp, Streptococcus pneumoniae
  misc_feature (1)..(164): tiling:Spneumo1:WAN0249WF; Cluster includes WAN024EAD R6.I G_1548.2.1||||1480148..1480311|+|164 bp|Between spr1501 (- strand) and spr1502 (ileS) (- strand)|S.pneumoniae|R6|NC_ 003098.1|IG|110
aaatttgtataatatgaaataaaatataatacttttcagaaaccagaaataactatataaatttattgttgtaaaaatattacactatttaccaatcttatccctaatatcaaattcctattttatcttactactgttagcttgctaagtttctctttgattct

SEQ ID NO: 181 - DNA, 111 bp, Streptococcus pneumoniae
  misc_feature (1)..(111): tiling:Spneumo1:WAN024AF3; Cluster includes WAN024EJP-rc R 6.IG_820||||783349..783458|-|110 bp|Between spr0784 (thiI) (+ strand) and spr0785 (+ strand)|S.pneumoniae|R6|NC_0030 98.1|IG-rc|110
aaattttatatcattatatcataaaaataaaaaaagttagttttttacctgtttttagagaaaaaactaactttttttactgattttcgctattcttttggattttctgaa

SEQ ID NO: 182 - DNA, 137 bp, Streptococcus pneumoniae
  misc_feature (1)..(137): tiling:Spneumo1:WAN024AK2; Cluster includes WAN024EMD R6.I G_589.1.1.1||||578810..578905|+|96 bp|Between spr0565 (bga A) (+ strand) and spr0566 (- strand)|S.pneumoniae|R6|NC_00 3098.1|IG|110
aaattttgataccttctttatcattaaagaccaaagaaaaactcttgtcctaaatagaagataaagagyctgrracaaaatagttctcaaccacaaaaaagctagatatttccaattgtggaactctagctttttaa

SEQ ID NO: 183 - DNA, 220 bp, Streptococcus pneumoniae
  misc_feature (1)..(220): tiling:Spneumo1:WAN024AHY; Cluster includes WAN024EL8 R6.I G_687.1.1||||667187..667406|+|220 bp|Between spr0663 (livF ) (+ strand) and spr0664 (+ strand)|S.pneumoniae|R6|NC_003 098.1|IG|110
aacaatccagtggattgttttagtcggcagatgaagattacgaagtaatcatcattatagtctgggagactagtttaggttgcagataaagattgcgaagcaatcawcaaatccagwggattgttttagycggcagatggagattacgaagtaatcatcaatatagtcckggggacctttttagtcggtrgatwgagattgcaaacaaatmtgcatctac

SEQ ID NO: 184 - DNA, 49 bp, Streptococcus pneumoniae
  misc_feature (1)..(49): tiling:Spneumo1:WAN024A5Q; Cluster includes WAN024EEU-rc R 6.IG_1195||||1159318..1159366|-|49 bp|Between spr1154 (car A) (- strand) and spr1155 (pyrB) (- strand)|S.pneumoniae|R 6|NC_003098.1|IG-rc|110
aacacaagacgttaaaagacgccagtgagcgtccacgagaggtgaaaat

SEQ ID NO: 185 - DNA, 153 bp, Streptococcus pneumoniae
  misc_feature (1)..(153): tiling:Spneumo1:WAN024A2O; Cluster includes WAN024ECY R6.I G_1332||||1283327..1283479|+|153 bp|Between spr1288 (- str and) and spr1289 (+ strand)|S.pneumoniae|R6|NC_003098.1|IG |110
aacacactatcccttttagacaatattccaattagccttattaattcaaaactattgtattagtaattataacagatgtataatagaaaagcaatgatagatattatcaattaagcgaatttatatctaaaagggatattaaagaaaggagat

SEQ ID NO: 186 - DNA, 102 bp, Streptococcus pneumoniae
  misc_feature (1)..(102): tiling:Spneumo1:WAN0249NA; Cluster includes WAN02471W-rc R 6.IG_181.2||||170244..170345|-|102 bp|Between spr0160 (hex B) (+ strand) and spr0161 (ribE) (- strand)|S.pneumoniae|R 6|NC_003098.1|IG-rc|110
aacagactctacttttagacgaataaagaaacttggcaaaatcgcaatttaatrctctgtgaaaatcatagagcaaactaggaaaccagtcgcagagtggtc

SEQ ID NO: 187 - DNA, 57 bp, Streptococcus pneumoniae
  misc_feature (1)..(57): tiling:Spneumo1:WAN024A4U; Cluster includes WAN024EDZ-rc R 6.IG_1260||||1213554..1213610|-|57 bp|Between spr1216 (- s trand) and spr1217 (msrA) (- strand)|S.pneumoniae|R6|NC_00 3098.1|IG-rc|110
aacagagagtggggcttcccactttcttcatttctagaatatgaatagaagggattt

SEQ ID NO: 188 - DNA, 661 bp, Streptococcus pneumoniae
  misc_feature (1)..(661): tiling:Spneumo1:WAN0249QB; Cluster includes WAN024EJ7-rc R 6.IG_851||||818002..818662|-|661 bp|Between spr0815 (- str and) and spr0816 (cad) (+ strand)|S.pneumoniae|R6|NC_00309 8.1|IG-rc|110
aacatactcctttcaatatttttaggaccttatgaaaactaaggaactaaaggttgactcatgaaaaaagagcaggttttcacctgctctgcaatcttctgacgtgtttattttggtttctgttgagtatgtctgttcccgatgtttcctaactctctagtagcaaatattacgtactttattgatcgtttcacaagatgacgtgtgctttcaccacactaaaaatttatgaattaggacaagtgtcctaacatcaacttataaaagtaggcttttaaccctatcaataatgtggcttttcaaccacgcttcggcattcaaccctgcctgtccgtargcattttttactcgggtttatatttgctagaaaacatcatctcattttctaagctttattactatatcatgtttttaagaacttgtaaagtattttttgataaaaaacaaaaatataatagattgaaactagaatagtacacctctgcttctaaaacattgttagaaatagattttactgtcctgatcgatttgttctgttcttgtttcattttactatatgttcgtaaatgaaagttctataatgaagttagccacccagccctcctaaaaattagatggttcaattagctgatagctcttgtaggcataagaaaacacctct

SEQ ID NO: 189 - DNA, 139 bp, Streptococcus pneumoniae
  misc_feature (1)..(139): tiling:Spneumo1:WAN024AHP; Cluster includes WAN024EL4-rc R 6.IG_693||||674422..674560|-|139 bp|Between spr0669 (+ str and) and spr0670 (rheB) (+ strand)|S.pneumoniae|R6|NC_0030 98.1|IG-rc|110
aacatcctcgattctatctaycttatcaattataccatattttattccattacagtagtctcacttatttaggctatttccagtagcttctctagtaagaaaaggctggaattttatagttccaacctcttttcagtta

SEQ ID NO: 190 - DNA, 50 bp, Streptococcus pneumoniae
  misc_feature (1)..(50): tiling:Spneumo1:WAN024ACK; Cluster includes WAN024EID R6.I G_938.1||||888031..888080|+|50 bp|Between spr0902 (+ stran d) and spr0903 (ccdA) (+ strand)|S.pneumoniae|R6|NC_003098 .1|IG|110
aacatgatttatgaaatgtcagacctaaaagacattttcgttcacaaaag

SEQ ID NO: 191 - DNA, 1385 bp, Streptococcus pneumoniae
  misc_feature (1)..(1385): tiling:Spneumo1:WAN024AWH; Cluster includes WAN02443U spr0 920|thdF|15902964|NP_358514.1|907393..908832|-|1440 bp|Thi ophene and furan oxidation protein|S.pneumoniae|R6|NC_0030 98.1|ORF|210
aacattatgattacacgtgaatttgataccatcgctgctatctctactccactaggtgaaggggctattggtattgtccgcctgagcggaacagacagttttgctattgcgcaaaagatttttaaaggaaaagacttgaacaaggttgccagccacactctcaactacggtcacattattgatcctctgactggtaaagtcatggacgaggttatggttggggctatgaagtctccaaagaccttcactcgtgaggatattatcgagattaacacccacggtgggattgcggtgaccaatgaaattctccagctagctattcgtgaaggggctcggttggcagaacctggtgaatttaccaaacgtgcttttttaaacggtcgcgtagacttgacacaggcagaggctgtgatggatatcatccgtgccaagactgacaaggccatgaacattgcggtcaaacaattagacggctccctttctgacctcattaacaatacccgtcaagaaatcctcaatacacttgcccaagttgaggtcaatatcgactatcctgagtatgacgatgttgaggaagccactactgctgttgtccgagagaagacaatggagtttgagcaattactaaccaaactccttaggacagcacgtcgtggtaaaatccttcgtgaaggaatttcaacggctatcattggacgtcccaacgttgggaaatcaagccttctcaacaacctcttgcgtgaggacaaggctatcgtaacagatatcgctgggacaacacgagatgtcatcgaagagtacgtcaacatcaatggtgtacctctcaaattgattgatacagccggtattcgtgaaacrgatgayatmgtkgaacaaatyggwgttgagcgttcgaaaaaagcyctyaaggaagcygacytrgttctrctagtrctaaaygcyagtgaaccactracygcscaagaymgmcaactyctwgaaatyagycargakacyaatcgcattattctwcttaayaaaacygacctgccwgaaacgattgaaacttcgraactacctgaagaygtyatccgyatttcagtycttaaaaaycaaaacatcgayaaratygaagagmgaatcaacaacctcttctttgaaaatgctggyttggtygagcaagatgctacytacttgtcaaacgcccgtcacatttccytgattgaraargcmgttgaaagcctacaagcygttaaycaaggtcttgarctrgggatgccagttgayttgcttcaagttgacttgacycgtacttgggaaatyctmggagaaatcactggrgatgctrctccagatgaactcatcacccaactctttagccaattctgtttaggaaaataactaat

SEQ ID NO: 192 - DNA, 99 bp, Streptococcus pneumoniae
  misc_feature (1)..(99): tiling:Spneumo1:WAN024AS8; Cluster includes WAN024EQR-rc R 6.IG_264||||238628..238726|-|99 bp|Between spr0243 (proS) (+ strand) and spr0244 (bglA) (+ strand)|S.pneumoniae|R6|N C_003098.1|IG-rc|110
aacatttacctctttatctactcatttctcccattatacagaaaaaacaaggtaaaaactagttacattttttccttgtttttcttctgattatagttt

SEQ ID NO: 193 - DNA, 376 bp, Streptococcus pneumoniae
  misc_feature (1)..(376): tiling:Spneumo1:WAN024AA7; Cluster includes WAN0247E1 R6.I G_129||||117583..117727|+|145 bp|Between spr0108 (+ strand ) and spr0109 (+ strand)|S.pneumoniae|R6|NC_003098.1|IG|20 0
aaccagaataatatttgccattataggggcaagttgcatattagtcagtatgtatcttattccacttattaaaactgagaataaattttgggaaatacttttatttatattaggtgtattgctaattggaattgcgttactaagtcaaaaaaaataaattttgaaatagtattagtgagttcgcaatcatttattgctagtggtttagaactgttaagtttcaaacaataattgrttttaaacmttargtmacctataaaawmaartaagrtaragraargatatcttatctaggtarctaagtgmtawaaacamagtcrwckatcacttgttaggaaactatcctaacyatgcttaataaaaaaggagaawwtwa

SEQ ID NO: 194 - DNA, 345 bp, Streptococcus pneumoniae
  misc_feature (1)..(345): tiling:Spneumo1:WAN0249TE; Cluster includes WAN024EGT-rc R 6.IG_1053||||994770..995114|-|345 bp|Between spr1014 (rpmA ) (+ strand) and spr1015 (- strand)|S.pneumoniae|R6|NC_003 098.1|IG-rc|120
aaccagatagcagttcttatagtcaattgaaataaaatctgaagaaatcgagtaggaaactcatatcaatktttaacagtgttctattccagattcatactcaatgaaaattaaagtgcaaactaggaagytagccgcargctgtacttgagtacggyaaggygamrytgacrtggtttgaatttgattttcgaagagtatmaatccactatacatattaaaaagtatgggtaycaaaayaaaaaaacaggctctccgaaaactcggaaagccttattttaagctgtttctagcttcctcacctttacatttcaaggttcgggataaaaggttcaatgraccttt

SEQ ID NO: 195 - DNA, 307 bp, Streptococcus pneumoniae
  misc_feature (1)..(307): tiling:Spneumo1:WAN024ALO; Cluster includes WAN024ENF-rc R 6.IG_512.2||||489426..489731|-|306 bp|Between spr0488 (+ s trand) and spr0489 (+ strand)|S.pneumoniae|R6|NC_003098.1| IG-rc|110
aacccaatctcctagactataagaggaactacaggtcgtgatgttatagccaaaattctaatcttgatatcctaaaataaaaacaggaaaaccataatatagtttaytwgtkttaaawgattgyttyataacaaccycctttgactaagacryaaaagaaaagccctgccatctacatgacagggacgaatgtgtttatccgcggtaccacccaatttcgggcmrwtgcccgcawctytmgtctttaaaryaaaaagacaswwwtatttcawtttttcakycattagcaaccagttttgacacattt

SEQ ID NO: 196 - DNA, 194 bp, Streptococcus pneumoniae
  misc_feature (1)..(194): tiling:Spneumo1:WAN024AHM; Cluster includes WAN0247L1 R6.I G_98||||85586..85779|+|194 bp|Between spr0077 (hk08) (+ st rand) and spr0078 (rpsD) (+ strand)|S.pneumoniae|R6|NC_003 098.1|IG|110
aacccctttacaaatccagctattcatggtagaatagattttgtgtgaaatatcagcaggaaagcatgaagctcgtcaacaggtgtcttatgacaagtaaccttggctgtttaggcgaagggcatctgcacgaatcagggctttctaagtgactatttccaccgaaatattatttatatcaggaggacattcat

SEQ ID NO: 197 - DNA, 102 bp, Streptococcus pneumoniae
  misc_feature (1)..(102): tiling:Spneumo1:WAN0249KN; Cluster includes WAN024E6W R6.I G_1879||||1731930..1732031|+|102 bp|Between spr1764 (+ str and) and spr1765 (+ strand)|S.pneumoniae|R6|NC_003098.1|IG |110
aacccgatattttgcacgagaatgagagaattataatttatctgaaaaaacgaaaaatatagagcaacttatttaactttttataaggaggagttattactt

SEQ ID NO: 198 - DNA, 181 bp, Streptococcus pneumoniae
  misc_feature (1)..(181): tiling:Spneumo1:WAN0249XZ; Cluster includes WAN024EBE R6.I G_1478||||1418541..1418721|+|181 bp|Between spr1434 (metA) (- strand) and spr1435 (apt) (- strand)|S.pneumoniae|R6|N C_003098.1|IG|110
aaccctctcctaactgtactctttcaggaataattgcatatgtttgaagacaaatctcaaacacttagtccttttattatactgcaagaagatatagttttcaattatagtttttctctaactagttatagtctatttttatatcctagtgtagagaaaacagccctagggactgttttca

SEQ ID NO: 199 - DNA, 63 bp, Streptococcus pneumoniae
  misc_feature (1)..(63): tiling:Spneumo1:WAN024A87; Cluster includes WAN024EG8-rc R 6.IG_1086||||1042211..1042273|-|63 bp|Between spr1047 (lpl A) (- strand) and spr1048 (acoL) (- strand)|S.pneumoniae|R 6|NC_003098.1|IG-rc|110
aacgaagatagattagactggaaggttatttccagtttctatcatataaagtaaagggatatc

SEQ ID NO: 200 - DNA, 52 bp, Streptococcus pneumoniae
  misc_feature (1)..(52): tiling:Spneumo1:WAN0249JB; Cluster includes WAN024E64 R6.I G_1982||||1796677..1796728|+|52 bp|Between spr1822 (rpmG) (- strand) and spr1823 (pbp2a) (- strand)|S.pneumoniae|R6| NC_003098.1|IG|110
aacgcctccatcttatccattataacaagaaagctaggctttgacaagcatc

SEQ ID NO: 201 - DNA, 75 bp, Streptococcus pneumoniae
  misc_feature (1)..(75): tiling:Spneumo1:WAN024AGS; Cluster includes WAN024EKM R6.I G_737||||715156..715230|+|75 bp|Between spr0713 (thiJ) (+ strand) and spr0714 (gph) (+ strand)|S.pneumoniae|R6|NC_00 3098.1|IG|110
aacgggagttattctctcgttttttatgtggaaaactcagggaaatcatcgcttttttcataaaaaaatgctata

SEQ ID NO: 202 - DNA, 202 bp, Streptococcus pneumoniae
  misc_feature (1)..(202): tiling:Spneumo1:WAN024AAU; Cluster includes WAN024EHM R6.I G_982.1.2||||928619..928820|+|202 bp|Between spr0943 (+ st rand) and spr0944 (+ strand)|S.pneumoniae|R6|NC_003098.1|I G|110
aacgttataacgaaggggggkaagaaaacccttgagtgtaagtctttttcttgtttagagggaaagtattagagtagccgctcataatttatactagatttgataactgatttgagacagattttatttctataaatattgtgaaaattttttaataccaaagatttaaagttactgtgtwaaaaatcctctccacttttaa

SEQ ID NO: 203 - DNA, 88 bp, Streptococcus pneumoniae
  misc_feature (1)..(88): tiling:Spneumo1:WAN0249LS; Cluster includes WAN024E7J-rc R 6.IG_1833||||1699734..1699821|-|88 bp|Between spr1718 (+ s trand) and spr1719 (+ strand)|S.pneumoniae|R6|NC_003098.1| IG-rc|110
aactaaccaactttctacaatttataagtttatcatttactattgtaccataaaattaccyaaaatctgtgaatttcacttggaaata

SEQ ID NO: 204 - DNA, 158 bp, Streptococcus pneumoniae
  misc_feature (1)..(158): tiling:Spneumo1:WAN024A4P; Cluster includes WAN024EDW R6.I G_1280.1.2||||1234312..1234469|+|158 bp|Between spr1236 (- strand) and spr1237 (- strand)|S.pneumoniae|R6|NC_003098. 1|IG|110
aactagcctcaggttaactgtgagattataggtagagaggttgtatcagcaatatgtgtctgtcaaatttagtgacaaaggtagtagaagaaagatraagaaataaatcwgcttcartaggtatctggaaaatttgattttatagaraagccttttgt

SEQ ID NO: 205 - DNA, 135 bp, Streptococcus pneumoniae
  misc_feature (1)..(135): tiling:Spneumo1:WAN024AC4; Cluster includes WAN024EI8 R6.I G_943.2||||895005..895139|+|135 bp|Between spr0907 (phtD) (+ strand) and spr0908 (phtE) (+ strand)|S.pneumoniae|R6|N C_003098.1|IG|110
aacttgacaaaagtaattttaaatagtaaactatttactggttaattaaatggttaaataaccrgtttagaaaactatttaataaagtaaaagaagttgagaaaaaacttcatcatttattgaaatgagggattt

SEQ ID NO: 206 - DNA, 145 bp, Streptococcus pneumoniae
  misc_feature (1)..(145): tiling:Spneumo1:WAN0249FI; Cluster includes WAN024E46-rc R 6.IG_2170||||1951485..1951629|-|145 bp|Between spr1963 (ad h2) (- strand) and spr1964 (fucI) (- strand)|S.pneumoniae| R6|NC_003098.1|IG-rc|110
aacttgtttatataggaggtgaacttacgtccctcctatccttttaaaaagatttgttaaacaattcacaaataattraaaacgaatacaaaaagtaatataatgatgttaaatagatagcgcggaggcgcaggaggaaaattat

SEQ ID NO: 207 - DNA, 227 bp, Streptococcus pneumoniae
  misc_feature (1)..(227): tiling:Spneumo1:WAN0249JH; Cluster includes WAN024E6D-rc R 6.IG_1931.1||||1784368..1784594|-|227 bp|Between spr1813 ( ccpA) (- strand) and spr1814 (rr11) (- strand)|S.pneumonia e|R6|NC_003098.1|IG-rc|110
aactttaggagggcttagtttcctcctttttgtttagtctaaggtggtagcaaggagctaaacctaggttttctatgaaattttttcaatcaatcttcaaaaaacacttgaaagtgtttacaattagtgatagaatggaataagtagaaatatgaaaacgaaattttcacatcttcacttttgtaagtagatatagagcttcaatcagtacctctacttgtaaaaga

SEQ ID NO: 208 - DNA, 63 bp, Streptococcus pneumoniae
  misc_feature (1)..(63): tiling:Spneumo1:WAN024APZ; Cluster includes WAN024EPI R6.I G_379.2||||353697..353759|+|63 bp|Between spr0355 (- stran d) and spr0356 (mtlA) (+ strand)|S.pneumoniae|R6|NC_003098 .1|IG|110
aactttagttttaaaggtttttaactttgtatatactagttttaagaaaaggaggatgatcta

SEQ ID NO: 209 - DNA, 1678 bp, Streptococcus pneumoniae
  misc_feature (1)..(1678): tiling:Spneumo1:WAN024GA4-3; Cluster includes WAN02447E sp r0792|hsdR|15902836|NP_358386.1|788951..792301|+|3351 bp|T ype 1 restriction modification system endonuclease R|S.pne umoniae|R6|NC_003098.1|ORF|221
aagaaaaggaacattttgatagcaaatttgaagacratagctgtgaaaaagatattgatgggagtgtatttaattcctttrttttcaataaaagtacagtagaaattgttttaaatgaactcatgacaagaggaattcagacagcctcgggtgatgaaattggtaaaactattatttttgctaaaaatcatgatcatgcrgaatatatcagagrtatttttaacaaccgctatcctgaaaaagggagcgactatgctcaggtrattgattatagtattaagcattatcagaccttgattgatgattttaaaattraggagaagtatcctcaaattgcgatttctgtmgatatgttagatacaggtattgatgtaccagaggttgttaatttagtcttcttcaagaaagtacgctctaaaactaagttttggcagatgattggtcgaggaacccgtctatgtaaagatttatttggacctgagcaggataaggaaaacttcttggtatttgattatggggayaattttgattattttcgtgcagatccaagagatggagagggtcgtcacattgtttcgytgactcagcgtttatttaatatcaaagtggacttgattcgagaacttcagggactccaataccaagaagawcagtttgcgagagcataccgtcagcagcttgtctcggaacttcaaggtcgtatagagagcttaaatgagttggacttcagggttcgtatggttttagatacagtttatagctataggaaattggaaagttggcagaatctaactgctgttacaagtgaaaccattcaaaaaaatctctctccgcttttatttgatgaagataaagaagatgagatggcsaggagatttgatttgtggttgcttcatattcagttggggcaactgacagctaaatcttccactgttcatatttcccaagtgatgaagacggctagagctctttctgctattggcaatatcccgcaggtttttgagcaggctgaaattatcaggaaagtacaggagcctgaattttggaaagaagttaacttgtctgatttggaaaaaattcgtcttgctattcgagatttattacagtttttggataaaacagaccgtaaaccctactatgttaacyttgaagatcgtatactctccactgttcacgagaccacagcatttttgcaggtcaacgatcttcggtcttacaatgaaaaagttgagcattatttgaaaactcatctggatgaggagtccatttctaagctataccataataaaaagttgacatctgatgatatgcttgcacttgaaaaattgctytgggaaaaattaggtagtaaagcagactaccaaagtcattatgaaaataaggcaattccgagattggttcgtgagattattggcttagatagagagtctgccaatcgtattttttctaaatttttgtcggatgagaatcttaatgccaggcagatttcatttgtaaaattgattgtagactacattgtagaaaatggttttttagagacgaaagtgttaacgcaagagccgtttaaatcttatggttctgttcaactactcttccaacaccaactaccagtacttcgtaatattgttcaaatcattgaacttatcaataatcgagctggagaagcggcttaactaat

SEQ ID NO: 210 - DNA, 294 bp, Streptococcus pneumoniae
  misc_feature (1)..(294): tiling:Spneumo1:WAN0249TF; Cluster includes WAN024E8G R6.I G_1701.1.2||||1625318..1625505|+|188 bp|Between spr1652 (- strand) and spr1653 (+ strand)|S.pneumoniae|R6|NC_003098. 1|IG|210
aagaaaatattaaaatttatactcttcggaaatctcttcaaactaggtcagtgccgccttgccctaagtctaggttactgacttggtcagttctatagtagactgaaactataatagtacacctctacttctaaaacattgttagaaatcgatttractgtcccgatcrattygtcctrttmttrtttcattttaytatacattatgaaaaaggggagatagaaagcaaacagccttgaaatcaatgttractgcgattatgaacctgaatcagcccctcaaaagagactgtat

SEQ ID NO: 211 - DNA, 69 bp, Streptococcus pneumoniae
  misc_feature (1)..(69): tiling:Spneumo1:WAN024AET; Cluster includes WAN0247J0 R6.I G_110.2||||96725..96793|+|69 bp|Between spr0089 (- strand) and spr0090 (- strand)|S.pneumoniae|R6|NC_003098.1|IG|110
aagaaagccctgtcaagagaaatgtgtaaaatttttatatataaaaaacttctagctaaaactagaagt

SEQ ID NO: 212 - DNA, 324 bp, Streptococcus pneumoniae
  misc_feature (1)..(324): tiling:Spneumo1:WAN0249RT; Cluster includes WAN024EP6 R6.I G_398||||375437..375760|+|324 bp|Between spr0374 (lysC) (- strand) and spr0375 (phaB) (+ strand)|S.pneumoniae|R6|NC_ 003098.1|IG|110
aagaactcctaaagtaagtattttatacgattatagcagaaagaaaggcttttttcaatgaagaaaataagatgctttctagcctaaagcgagcctttcttatcggctgagacactttcagtcgattttttcttgctttctgatcctaaaaaagatatactttgacagtgaaataatttaacactcaataaaaattaaagagcaaactaagaagctagacgaagtcagctcaaaatactgttttgaggttgcagatggaagctgacgcggtttgaagagattttcgaagagtataaactgcttataaaataaaaaggagccctg

SEQ ID NO: 213 - DNA, 177 bp, Streptococcus pneumoniae
  misc_feature (1)..(177): tiling:Spneumo1:WAN0249QM; Cluster includes WAN024EJF-rc R 6.IG_834.1||||803120..803296|-|177 bp|Between spr0798 (- s trand) and spr0799 (+ strand)|S.pneumoniae|R6|NC_003098.1| IG-rc|110
aagaagagattgcgattgttagaggtgaaaaayatartagattgaaataagatatgaacaactctattaggaaaggcaaattaattcctagaaatgttttagcagctacagcgtactattccaaactcaatcaactataaaacaatatagactagtaatggttggactcaataagaa

SEQ ID NO: 214 - DNA, 99 bp, Streptococcus pneumoniae
  misc_feature (1)..(99): tiling:Spneumo1:WAN024ABO; Cluster includes WAN024EI2 R6.I G_953||||904765..904863|+|99 bp|Between spr0917 (ccl) (+ s trand) and () (+ strand)|S.pneumoniae|R6|NC_003098.1|IG|11 0
aagaagataagctaggtagttyttacctggctttttcctatggaaaatttctaaggaaacttgacaagtttttctgaatatagtatacttcttaagtaa

SEQ ID NO: 215 - DNA, 76 bp, Streptococcus pneumoniae
  misc_feature (1)..(76): tiling:Spneumo1:WAN024A6L; Cluster includes WAN024EFD R6.I G_1156||||1118456..1118531|+|76 bp|Between spr1118 (uvrB) (- strand) and spr1119 (- strand)|S.pneumoniae|R6|NC_00309 8.1|IG|110
aagaatcctctctccatgtgctattcctattttagcatacttatagtattttcacgaagaaaaggacggaccgaag

SEQ ID NO: 216 - DNA, 191 bp, Streptococcus pneumoniae
  misc_feature (1)..(191): tiling:Spneumo1:WAN0249GC; Cluster includes WAN024E4L-rc R 6.IG_2147||||1923404..1923593|-|190 bp|Between spr1940 (- strand) and spr1941 (+ strand)|S.pneumoniae|R6|NC_003098.1 |IG-rc|110
aagaatgacctccyrttatttgatatctaaatgatatcactttrwtttwwaaagtcaatagaaagttgaaaaataatcactaaaaactttcagcccaataatttcttttaaaaggtgagattatattgtgctcaaatactcttttattcttataatttttacactataattgtagttagaaaggaagagaa

SEQ ID NO: 217 - DNA, 67 bp, Streptococcus pneumoniae
  misc_feature (1)..(67): tiling:Spneumo1:WAN0249OK; Cluster includes WAN024E96-rc R 6.IG_1644||||1576336..1576402|-|67 bp|Between spr1598 (dct A) (+ strand) and spr1599 (+ strand)|S.pneumoniae|R6|NC_00 3098.1|IG-rc|110
aagaatttcctaataagttagaataaaagcgtaaaagacaagacatgagcagrcttgccttgatgag

SEQ ID NO: 218 - DNA, 92 bp, Streptococcus pneumoniae
  misc_feature (1)..(92): tiling:Spneumo1:WAN024A8T; Cluster includes WAN024EGL-rc R 6.IG_1062||||1003394..1003485|-|92 bp|Between spr1023 (+ s trand) and spr1024 (ligA) (+ strand)|S.pneumoniae|R6|NC_00 3098.1|IG-rc|110
aagaccattttaccataaaacaagccctcctcacaaacgagaagggcggaaaaaacacttagtttgaaattatttttgaaactcaagcaacc

SEQ ID NO: 219 - DNA, 634 bp, Streptococcus pneumoniae
  misc_feature (1)..(634): tiling:Spneumo1:WAN0249MX; Cluster includes WAN024E8A-rc R 6.IG_1710.2||||1634686..1635319|-|634 bp|Between spr1661 ( + strand) and spr1662 (xpt) (+ strand)|S.pneumoniae|R6|NC_ 003098.1|IG-rc|110
aagacctcctaaagtctaaaagttaatttacttgttgtttaaatatttctatagtgatcccttttgctaatactatatatttgataaaactattacgagcgaagcgagtcttatcaaatatttcccgttgtagtggtatcatagacaataatcttgttattgtctatgacgggatttttgagagtaaaatagttcggggaactattttagcctaagcctagaaatgaaagagctaggggctcaaaaattagggatgaaattccctggattcctgaaattattcacaggataatttcacctcccgtccgcactaattaagggaaatattaaaaatattcaaaaaagacctacttaatctctaagtaagtcccctaaatagacatggcaaaaacggccatatctcactgctgacttacttattgttaggtgttccggcaccttgtagaaacgtcgtgccaattcacgacataaacaagtaaaacgatattcaattttaaataggcttgagccaatgtttttattttacactaaataactttagaaatcaactattttgttagtgttttggtttaaaaarcgaacaaaaagaagagagggtgaacaaaaactccattgtaagctaacakttatacta

SEQ ID NO: 220 - DNA, 411 bp, Streptococcus pneumoniae
  misc_feature (1)..(411): tiling:Spneumo1:WAN0249TV; Cluster includes WAN024E9J-rc R 6.IG_1607.1||||1540721..1540817|-|97 bp|Between spr1560 (+ strand) and spr1561 (natB) (- strand)|S.pneumoniae|R6|NC_ 003098.1|IG-rc|210
aagagccttgcgaaagcgaggtttttaaaggtgaaaagggtggaatcacgaacctaattatgtacacattatgtaaacargttgcttgaaaactcaattgtatagtgaactgaatctggaataggataatattacttctaaaacattcttayaaattgatttgaattccaaaatcccatcgttccgttcttatttcattttgcgatatagtgaaaggaaataagtcagctcacaaaaaacgcatawtaycaaggwtyttwtgaactgcccccaaaagttagacagaaaaaatctaacttttggggggcagtacatattcaacacytgatactatgcgttttctaattktaaagactttttgcctggtctcttttgttctatgagtatgttacatatctaggtaaaaattat

SEQ ID NO: 221 - DNA, 65 bp, Streptococcus pneumoniae
  misc_feature (1)..(65): tiling:Spneumo1:WAN0249WY; Cluster includes WAN024EAT-rc R 6.IG_1521.2||||1455606..1455670|-|65 bp|Between spr1474 (r r01) (- strand) and spr1475 (+ strand)|S.pneumoniae|R6|NC_ 003098.1|IG-rc|110
aagagctcctttctttttatttatcttagcaaatttccctcaaattagctagtagcatagcctgt

SEQ ID NO: 222 - DNA, 125 bp, Streptococcus pneumoniae
  misc_feature (1)..(125): tiling:Spneumo1:WAN024AHN; Cluster includes WAN0247Z0 R6.I G_13||||14734..14826|+|93 bp|Between spr0013 (comX1) (+ st rand) and () (+ strand)|S.pneumoniae|R6|NC_003098.1|IG|440
aagagtcagtataattctggctttttttactataagtcatgcaaaaaawatraaaaaaattagaaaaagtagttgacaaarywtraaaagrctgtataatagtaagagttgaaaatarcaactca

SEQ ID NO: 223 - DNA, 64 bp, Streptococcus pneumoniae
  misc_feature (1)..(64): tiling:Spneumo1:WAN0249VK; Cluster includes WAN024E9X-rc R 6.IG_1582.2.1.1||||1514338..1514401|-|64 bp|Between spr153 5 (- strand) and spr1536 (nanA) (- strand)|S.pneumoniae|R6 |NC_003098.1|IG-rc|110
aagagtctattagtgctagaataatagattagaattattttagaaaaacgaagtgagcagctta

SEQ ID NO: 224 - DNA, 74 bp, Streptococcus pneumoniae
  misc_feature (1)..(74): tiling:Spneumo1:WAN0249D5; Cluster includes WAN024ER2 R6.I G_247||||218388..218460|+|73 bp|Between spr0226 (pflE) (- strand) and spr0227 (deoR) (+ strand)|S.pneumoniae|R6|NC_0 03098.1|IG|110
aagagttcctcctcttcataagtctatcctatcacaaaaacgaaagaaaaacaattacgaacgaaagkttaatt

SEQ ID NO: 225 - DNA, 228 bp, Streptococcus pneumoniae
  misc_feature (1)..(228): tiling:Spneumo1:WAN024ACF; Cluster includes WAN024E6N-rc R 6.IG_1896||||1753648..1753875|-|228 bp|Between spr1778 (hl yX) (- strand) and spr1779 (endA) (- strand)|S.pneumoniae| R6|NC_003098.1|IG-rc|110
aagataagcctaaactcctatgtcacttatggatgtaggagttctttttactagtttaagcaggrctagaacaggtactaagaaaaaatagcaacttctaaaactaacttccagttttgggagagagatggaagttactttgagaagttacggtaagaaaaaataatatgtattggattaaattttgtgatataataaaggataagatactattttaggagaagaact

SEQ ID NO: 226 - DNA, 217 bp, Streptococcus pneumoniae
  misc_feature (1)..(217): tiling:Spneumo1:WAN024APJ; Cluster includes WAN024EP9-rc R 6.IG_393||||370412..370628|-|217 bp|Between spr0369 (dagA) (+ strand) and spr0370 (mip) (+ strand)|S.pneumoniae|R6|N C_003098.1|IG-rc|110
aagatacctcttttcttattattgacactaatattattggaaaatcttataaaatcctgattcctaagtttatctaagataaagctttattctctcataagattttcgttgttatattagtttatcacacttccaatcacttgyataatatatattatatatcaggctgataaaaattatttataggcaaaaaaatcacacgagctgtgtgattcca

SEQ ID NO: 227 - DNA, 102 bp, Streptococcus pneumoniae
  misc_feature (1)..(102): tiling:Spneumo1:WAN0249OO; Cluster includes WAN024E99-rc R 6.IG_1634||||1569054..1569155|-|102 bp|Between spr1588 (- strand) and spr1589 (- strand)|S.pneumoniae|R6|NC_003098.1 |IG-rc|110
aagatgaactcagttgtagtcaactgggtttctttgcttattttagaaaaattgatagaaaggtaaagggctagtggtgtttaccatggagctcttagtatc

SEQ ID NO: 228 - DNA, 267 bp, Streptococcus pneumoniae
  misc_feature (1)..(267): tiling:Spneumo1:WAN0249U5; Cluster includes WAN024E48 R6.I G_2168.2.2||||1949240..1949303|+|64 bp|Between spr1961 (- strand) and spr1962 (- strand)|S.pneumoniae|R6|NC_003098.1 |IG|310
aagattcactctttctatttataattccgagggttttccctcactttttgwtakrwtcttatactcaatgaaaatcaaagagcaaactagraarctagccgcargytgctcaaarcactgytttgaggttgtagataagactgacgaagtcagtmacatmyatamksyaagrcgacgytgacgyrgtttgaagagattttcgaagagtattarmtatcgaaacagggagtgagtcaaaggctcattccctatttcaacatttttcta

SEQ ID NO: 229 - DNA, 52 bp, Streptococcus pneumoniae
  misc_feature (1)..(52): tiling:Spneumo1:WAN024AFJ; Cluster includes WAN0247J1-rc R 6.IG_104.2.2||||91626..91677|-|52 bp|Between spr0083 (+ st rand) and spr0084 (+ strand)|S.pneumoniae|R6|NC_003098.1|I G-rc|110
aagatttgttctcttttctattcttaaattttctaaattttttatttatcta

SEQ ID NO: 230 - DNA, 395 bp, Streptococcus pneumoniae
  misc_feature (1)..(395): tiling:Spneumo1:WAN0249UI; Cluster includes WAN0247K1-rc R 6.IG_100||||86736..87043|-|308 bp|Between A (transposase) (+ strand) and spr0080 (+ strand)|S.pneumoniae|R6|NC_00309 8.1|IG-rc|230
aagattttctaaggtttgagtctgcttactaatactagactaaaatcaaaaagtattatataacagtgatatgaaatcaactaaagaagaaatccaaaccatcaaaacacttttaaaagactctcgtacagctaaatatcataaacgccttcaaatcgttctattttgtctgatgggcaaatcttataaagagattatagaacttttatagtagtttgaaataagatgtgaacawctctatcaggaaagtcaaattratttatagaaatattttagcagccaaggtgyactgttatagattcaattacactataatttagtgtaattgagaaaggagaaatgattgtgattgatgttggctaggttatgttcaatgattcctaccgtctcaaatc

SEQ ID NO: 231 - DNA, 55 bp, Streptococcus pneumoniae
  misc_feature (1)..(55): tiling:Spneumo1:WAN024ARP; Cluster includes WAN024EQI R6.I G_279||||260364..260418|+|55 bp|Between spr0258 (pepC) (+ strand) and spr0259 (manN) (- strand)|S.pneumoniae|R6|NC_0 03098.1|IG|110
aagcatagaaaaaaggaatcagattttagaacctggttcctttttagttgcttga

SEQ ID NO: 232 - DNA, 94 bp, Streptococcus pneumoniae
  misc_feature (1)..(94): tiling:Spneumo1:WAN024ACV; Cluster includes WAN024EIJ-rc R 6.IG_925||||879328..879421|-|94 bp|Between spr0889 (- stra nd) and spr0890 (- strand)|S.pneumoniae|R6|NC_003098.1|IG- rc|110
aagcatttgtttatcatttgctttttctttttgtgtctgattgtgatacaatatagtaaggattttttgaaatagaaatagttggaggaaatat

SEQ ID NO: 233 - DNA, 304 bp, Streptococcus pneumoniae
  misc_feature (1)..(304): tiling:Spneumo1:WAN0249TS; Cluster includes WAN024EAL R6.I G_1535||||1465476..1465567|+|92 bp|Between spr1488 (- stra nd) and spr1489 (+ strand)|S.pneumoniae|R6|NC_003098.1|IG| 120
aagccacctcctacaaatagaaagtaatmtaayactcaatraaaatcaaaragcaaactaggaarctagccgcargytrctcaaagcacygctttgaggttgtagatarractgacraagtcagthacatatatamksyaaggcgacrytgacgtggyttgaagagattttcraagagtataamataataaaagcgaacaagactacttttctgacactcagaagactagcttgttcgcttttttctcatttataaactaaaatagctgatgatacatattgccaaatacaaaatatctgattt

SEQ ID NO: 234 - DNA, 223 bp, Streptococcus pneumoniae
  misc_feature (1)..(223): tiling:Spneumo1:WAN024ALY; Cluster includes WAN024ENI-rc R 6.IG_505||||484706..484928|-|223 bp|Between spr0481 (infB) (+ strand) and spr0482 (rbfA) (+ strand)|S.pneumoniae|R6| NC_003098.1|IG-rc|110
aagctaggccagcagacctagctattttaaacttcttgattttcagtttaaattgaaacgaagttcaatttgaagtcatctgcttctttcgccgtggtgaaagtgatggaactgatttatcagtcccatcacaggggatttttgagaccctaggctcaaaaataagcaatgaaaccatcggtttgcttgcgtccctcaccacctaagaaaggagcaaaaaatc

SEQ ID NO: 235 - DNA, 130 bp, Streptococcus pneumoniae
  misc_feature (1)..(130): tiling:Spneumo1:WAN0249FC; Cluster includes WAN024E43-rc R 6.IG_2180||||1964066..1964195|-|130 bp|Between spr1973 (fc sK) (- strand) and spr1974 (fcsR) (+ strand)|S.pneumoniae| R6|NC_003098.1|IG-rc|110
aagctcctcctaatttatcatttcaactatattatagcacaaattggaggaatttgaattatttttatgaatattgggttaacatttgaacattattcaagtaagcgttcacatattgaaaaaataaaac

SEQ ID NO: 236 - DNA, 66 bp, Streptococcus pneumoniae
  misc_feature (1)..(66): tiling:Spneumo1:WAN0249JV; Cluster includes WAN024E6J R6.I G_1910||||1764763..1764828|+|66 bp|Between spr1792 (lysA) (- strand) and spr1793 (purR) (- strand)|S.pneumoniae|R6|N C_003098.1|IG|110
aagcttccttctattctgtttgcaaagaaaggctgggacaatcgttccaacctttagttctatctc

SEQ ID NO: 237 - DNA, 135 bp, Streptococcus pneumoniae
  misc_feature (1)..(135): tiling:Spneumo1:WAN024AFY; Cluster includes WAN024EK4-rc R 6.IG_779||||749752..749886|-|135 bp|Between spr0755 (- str and) and spr0756 (parE) (+ strand)|S.pneumoniae|R6|NC_0030 98.1|IG-rc|110
aaggaacctcctattcgttcatctttactattctacaggttttccaaggattttgcaaaatttttctttctccgatgtgacaatttcagcagagattctctgcttttctttcccaattcatgatataataggagt

SEQ ID NO: 238 - DNA, 51 bp, Streptococcus pneumoniae
  misc_feature (1)..(51): tiling:Spneumo1:WAN0249XA; Cluster includes WAN024EAY-rc R 6.IG_1511.2||||1447104..1447153|-|50 bp|Between spr1464 (c tpE) (- strand) and spr1465 (+ strand)|S.pneumoniae|R6|NC_ 003098.1|IG-rc|110
aaggagggctggcaaacttttcccttgactagatrcatatttrggatgaaa

SEQ ID NO: 239 - DNA, 99 bp, Streptococcus pneumoniae
  misc_feature (1)..(99): tiling:Spneumo1:WAN0249F3; Cluster includes WAN024E3R-rc R 6.IG_2198.2||||1983784..1983882|-|99 bp|Between spr1991 (g lpK) (- strand) and spr1992 (- strand)|S.pneumoniae|R6|NC_ 003098.1|IG-rc|110
aaggcttggttaatccaggtcttttttgtgaaattcacacaatctcctcacatttttttaaaaattaaaaaaagttgataaacaagaaagcgctttatt

SEQ ID NO: 240 - DNA, 107 bp, Streptococcus pneumoniae
  misc_feature (1)..(107): tiling:Spneumo1:WAN0249I6; Cluster includes WAN024E5I-rc R 6.IG_2031.2.1.2||||1843306..1843412|-|107 bp|Between spr18 72 (- strand) and spr1873 (- strand)|S.pneumoniae|R6|NC_00 3098.1|IG-rc|110
aaggtcgattctaatctcgctaatcctttttaatccagaataagggaaatatgttatacttgtttttaagaaaaaagtctcattgaattggttttgaggagttagaa

SEQ ID NO: 241 - DNA, 147 bp, Streptococcus pneumoniae
  misc_feature (1)..(147): tiling:Spneumo1:WAN024A79; Cluster includes WAN024EFM R6.I G_1134||||1093532..1093678|+|147 bp|Between spr1096 (- str and) and spr1097 (nirC) (- strand)|S.pneumoniae|R6|NC_0030 98.1|IG|110
aaggtgacctccatattattttattaaggatattgtagcaccttgagttatagtttacaaatatcagttttctatattttgatataagaaatagctattaccttattttgaaaatgaaaaaagcacgactcaatcgtgctcattttc

SEQ ID NO: 242 - DNA, 102 bp, Streptococcus pneumoniae
  misc_feature (1)..(102): tiling:Spneumo1:WAN0249KM; Cluster includes WAN024E6W-rc R 6.IG_1879||||1731930..1732031|-|102 bp|Between spr1764 (+ strand) and spr1765 (+ strand)|S.pneumoniae|R6|NC_003098.1 |IG-rc|110
aagtaataactcctccttataaaaagttaaataagttgctctatatttttcgttttttcagataaattataattctctcattctcgtgcaaaatatcgggtt

SEQ ID NO: 243 - DNA, 206 bp, Streptococcus pneumoniae
  misc_feature (1)..(206): tiling:Spneumo1:WAN024AIE; Cluster includes WAN024ELH R6.I G_665||||649239..649444|+|206 bp|Between spr0641 (ctpA) (+ strand) and spr0642 (spxB) (+ strand)|S.pneumoniae|R6|NC_ 003098.1|IG|110
aagtaatgactagatttctttgttataaaacagaaatgacarmactttcaaaactgtattagaatagagaatagagagttttgagcagatttttagaaaagtcagcataaatatgatacagtggaatagtaaaaatttggagaacgtttccaattctatgtaatcgtattctccaagtttaaaaaaattgaaggagagttatcatt

SEQ ID NO: 244 - DNA, 99 bp, Streptococcus pneumoniae
  misc_feature (1)..(99): tiling:Spneumo1:WAN0249T4; Cluster includes WAN02471X R6.I G_181.1||||170022..170120|+|99 bp|Between spr0160 (hexB) ( + strand) and spr0161 (ribE) (- strand)|S.pneumoniae|R6|NC _003098.1|IG|110
aagtataaaaaagtctgggaaaaattttcaaaatcaraaaaacgcataaaatcaggtgttcaaaaaccttgattttatgcgttttatcatrgaaatatt

SEQ ID NO: 245 - DNA, 150 bp, Streptococcus pneumoniae
  misc_feature (1)..(150): tiling:Spneumo1:WAN0249EB; Cluster includes WAN02471F R6.I G_230||||206920..207069|+|150 bp|Between spr0209 (secY) (+ strand) and spr0210 (adk) (+ strand)|S.pneumoniae|R6|NC_0 03098.1|IG|110
aagtatttactgaatcagtaaatactgagggagtggaggtttaaactctgacatttgtaagagttggatctcccctcttctattttgtttttaaatcggggtgaaaaractttttgcttctatttaaaaayaaaataaggagatcaaatc

SEQ ID NO: 246 - DNA, 203 bp, Streptococcus pneumoniae
  misc_feature (1)..(203): tiling:Spneumo1:WAN024AFC; Cluster includes WAN024EJS R6.I G_807.1||||772962..773164|+|203 bp|Between spr0777 (+ stra nd) and () (+ strand)|S.pneumoniae|R6|NC_003098.1|IG|110
aagtcaggagaaccctgatttttctttactggaagtggcctttagattagaagactgaaaataagttaaagtcttaaactaattttcacagctaagaatagtagaagttaatctgataaaaatcgaaaaaaccagtggaattcygtgtcagggtaagttccactggttttcatagtctattaaagttcgaatgaaacctattt

SEQ ID NO: 247 - DNA, 1593 bp, Streptococcus pneumoniae
  misc_feature (1)..(1593): tiling:Spneumo1:WAN024DAB-3; Cluster includes WAN0243Z2 sp r1093||15903136|NP_358686.1|1087705..1090890|-|3186 bp|Con served hypothetical protein|S.pneumoniae|R6|NC_003098.1|OR F|100
aagtccaaaaaattatttattgaagaggaaaagtttttagaaagtgattctgaagacttaataagtactatattaattcaaaaattgcttgttcaattggataatgaaattaatttggatttagaatttatcaagaggttaattgataaaattgatttttcaaatattcactttggagaggaattaaacacttttatcaaagaacatagaagtattattagagaaaaaaatattgaaataccaaaaaaaccttatagaaattggatatcttcactagaaggaggttttgtttcacaattttcatatttaactcaagaaaatcttgtagagtacgatgaatctagagtattagagatattagtcaacgccgaaaaggaacaaagaggttcttcatttttggaagaaaagacgataaatgaaacggaaaatttctttattactgttttaaaagaatcaaatgaaatatctaaaaaagtttctgatttattgaaaaatcatatagatgacttatatccaaaatataagagattatatgtaaaaattatcagttttcctgaaatagaagaaaatttgagaaagattgttagagaaaaatatttaaaaagatttaacaaagaaagttttgattctaacgatcggaaattctttgaatatcatataaaacaacaaaatacggatatagatatttttgaaaaattacttagtatcaatgtgaatgaactctcaacaccaaaaggtgataataaacaattagatatacttcattttataaatagtgaaatgggatcatattttcaatgtttaatatcattatttataaatcattcaagttatagagatgtaattattcmaataataaattcagtaacagataccgattatagggagtttgctcaaggtattttattaaatgaatacaatccaaacagaatcaatgtaacttacaacacctttttaggatttgcgtattatcattctayaattactatcgaagctgcggatgttttcacagatgtagtaaggratattctaaacaaaaaaattgaggacaatcaaattcttaataaagtttatctagttgctttagagagggtagatccaactattgaatcattttctttatcaaagaataactatagtcaaatgataaacatcatttttacaggagactatgaatttagatattctaaagaatggttgggagcattattcaaatttgactcaagtgcaaattatttggtgacaattttttatttattatataatgaaaatcttaaaaaaaatagatttgctttgtttatagaggaattgagtgattacttaacaacttataaccagaaattatctttacgagggatgaattataaattgaatcatgaagaacttaacaattttgatttgttgaaaaaaatgtttctgaaattaatggagaccgataaaatagagaatgatattttttatttagatggcatcaaaagtatactcccattattatctttagatgacagacgaaatgtattacaacatattcaaaaacagaacaattgtcctcctccagagattgaggaattacaaagaattatagttaattaa

SEQ ID NO: 248 - DNA, 157 bp, Streptococcus pneumoniae
  misc_feature (1)..(157): tiling:Spneumo1:WAN024ALD; Cluster includes WAN024B80 TIGR 4.IG_995||||999262..999418|+|157 bp|Between SP1063 (+ stra nd) and SP1064 (+ strand)|S.pneumoniae|TIGR4|NC_003028.1|I G|020
aagttgggtcatccaacttttttgttgtctcccgaaaaccactagctatgctagtggttccatagagcttttagcgtggtaacaaaaagaacctcctaaaatgataagatagaagtggtttctccgccactacaacatatcatacaggaggtacctc

SEQ ID NO: 249 - DNA, 164 bp, Streptococcus pneumoniae
  misc_feature (1)..(164): tiling:Spneumo1:WAN024A73; Cluster includes WAN024EFI R6.I G_1139||||1102752..1102915|+|164 bp|Between spr1101 (- str and) and spr1102 (- strand)|S.pneumoniae|R6|NC_003098.1|IG |110
aagttttccttttttgaacgtttgctaacgaagtcaatttatctaacaaatgactttctcatctcataagtacaaaaagggtcagggcatcgtatgcttcctgacctaatcctatatagtcattttagatcattgagcactatttgtcaaataaaaatactttt

SEQ ID NO: 250 - DNA, 80 bp, Streptococcus pneumoniae
  misc_feature (1)..(80): tiling:Spneumo1:WAN0249YP; Cluster includes WAN024EBV R6.I G_1414||||1352983..1353062|+|80 bp|Between spr1370 (- stra nd) and spr1371 (- strand)|S.pneumoniae|R6|NC_003098.1|IG| 110
aagtttttcctccttgttgataatccataatattatatcttaaaagtccaaaaaaagcaatctatgatacttttcctaac

SEQ ID NO: 251 - DNA, 2196 bp, Streptococcus pneumoniae
  misc_feature (1)..(2196): tiling:Spneumo1:WAN024C77-3; Cluster includes WAN0244MF sp r0251|polC|15902295|NP_357845.1|251074..255465|+|4392 bp|D NA polymerase III, alpha subunit|S.pneumoniae|R6|NC_003098 .1|ORF|111
aarccygttytggctacsggaaatgttcactatatcgaaccggaagaagagatttaycgtgaaattatcgtccgtagtttgggacagggkgcgatgattaaycgaactatyggtcatggygaacatgcccaaccmgcwccwcttccaaargctcattttmgaacgactaatgaratgttggatgaatttgccttyttgggagaggaaytrgctcgyaaaytggttattgaaaayaccaatgccttggcagawatmtttgaaycygttgargtmgttaagggtgayttgtatacgcctttcatcgacaaggckgaagaaacrgtygctgarttgacctataagaargcytttgagatttatggwaatccgctgccagatatygttgatttgcggattgaaaaagaaytaacmtcyatwctggggaatggatttgctgtgatttatctggcmtcgcagatgctggtkcaacgttcyaatgaacggggytayttggttggttctcgtgggtctgtcggatctagtttcgttgcgaccatgattgggattacrgaggtcaatcctctctctcctcactatgtctgtggtcagtgtcagtacagygagtttatcacmgatggttcktayggttcaggwtttgatatgcccmataaggactgtccaaactgtggtcayaaactcagyaaaaacggacaggatattcckttygagaccttccttggttttgatggggataaggttcctgatattgacttgaacttctcgggagaagatcagcctagcgcccacttggatgtgcgtgatatctttggtgaagaatatgccttccgtgcrggaacrgttggtacggtagctgcyaaractgcytatggmtttgtmaarggytaygagcgagattatggcaagttttatcgtgatgcagargtrgaacgyctygctcaaggwgcggckggtgtcaagcggacaacrggmcaacacccggggggaatcgttgttattcckaactacatggatgtytacgattttacgcctgtccagtatccagcagatgaygtsacggctgaatggcagaccactcactttaacttycacgatatcgatgagaacgtyctcaaactcgatgtrctgggrcatgatgatccgacyatgattcgraaactkcaggatttgtctggkattgaycctaatraaatycctatggatgaygaaggygtgatggcwctcttttctgggactgaygtrctwggggtaacacctgaacaaatyggaacgccwacgggyatgytrggrattccagagtttggaacmaayttygtacgtggratggtagaygaracscatccgacracctttgcggarttgcttcagctgtctggwytrtcccayggtacygaygtytggttgggraatgctcaggatytratyaagcaaggratwgcggayctatcgacygttatcggttgtcgggacgacatcatggtttacctcatgcatgckggtctrgaacctaagatggcctttacyatyatggaacgggtacgtaagggyttgtggytraagatttcagaagaggarmgaaatggctatatcgaagcmatgaargctaayaaggtgccagagtggtatatcgaatcctgtgggaaaatyaagtayatgttccctaargcccatgcggcagcctacgttatgatggccttgcgtgtrgcytacttcaaggttcaccatccyatttattactactgtgcttacttctcmatycgygcyaaggcttttgatatcaagaccatgggwgcrggcttggakgyyatyaagcgyagaatggaagaaatctctgaaaaacggaagaacaatgaagcctctaatgtggaaatygayctctatacaacycttgagattgtcaatgaratgtgggaacgmggtttcaagtttggbaarttagayctctacygtagtsakgcgacwgarttcmtcatygacggrgatacsctkatyccaccatttgtagcaatggatggtctgggagagaacgttgccaagcaaytggtgcgrgcgcgwgaagagggagaattyctctctaaaacagaactacgcaagcgtggtggactctcatcaaccttggttgaaaagatggatgaratgggkattctkggmaatatgccagaggayaaycagttgagtttgtttgatgagttgttttaa

SEQ ID NO: 252 - DNA, 56 bp, Streptococcus pneumoniae
  misc_feature (1)..(56): tiling:Spneumo1:WAN024AFS; Cluster includes WAN024EJZ R6.I G_782||||755874..755928|+|55 bp|Between spr0758 (ilvE) (+ strand) and deletion (+ strand)|S.pneumoniae|R6|NC_003098. 1|IG|110
aataaaccaaaggagattytttatgaaatagaaaaagtggctcttaacagcaggag

SEQ ID NO: 253 - DNA, 99 bp, Streptococcus pneumoniae
  misc_feature (1)..(99): tiling:Spneumo1:WAN0249F4; Cluster includes WAN024E3R R6.I G_2198.2||||1983784..1983882|+|99 bp|Between spr1991 (glpK ) (- strand) and spr1992 (- strand)|S.pneumoniae|R6|NC_003 098.1|IG|110
aataaagcgctttcttgtttatcaactttttttaatttttaaaaaaatgtgaggagattgtgtgaatttcacaaaaaagacctggattaaccaagcctt

SEQ ID NO: 254 - DNA, 405 bp, Streptococcus pneumoniae
  misc_feature (1)..(405): tiling:Spneumo1:WAN0249TJ; Cluster includes WAN024EBC-rc R 6.IG_1480.1.2||||1420176..1420282|-|107 bp|Between spr1436 (- strand) and spr1437 (msmK) (- strand)|S.pneumoniae|R6| NC_003098.1|IG-rc|210
aataaataaaattcaaagcactacaagaaaagatatctctttatcaattgtagtggagagatatcagttratctagggagagaaacaaaatgcttctctcctttttgctagrgaagtcatattatgcatctatattgtgatgctctttaatactcttcgaaaatctcttcaaaccacgtcaacgtcgccttgccgtacgtatgattactgatttcgtcagttttatctgcaacctcaaagatgtactttgagcagcttacggctagtttcctagtttgctctttgatttccattgagtattatttgtgggtaccatctacaagtgaagctatatgcgtaaactacgtgagcaattgaattcgaactagagaggtaataataaatttatgctatagttatggtgac

SEQ ID NO: 255 - DNA, 125 bp, Streptococcus pneumoniae
  misc_feature (1)..(125): tiling:Spneumo1:WAN0249LX; Cluster includes WAN024E7P R6.I G_1764.1||||1689932..1690017|+|86 bp|Between spr1715 (birA ) (+ strand) and spr1716 (+ strand)|S.pneumoniae|R6|NC_003 098.1|IG|210
aataacacaattataatataaacgatataaaaataacttcagattagtaattcaattaagttttacggatctgaagytttattgkctctaaaaataaaaaagagagttacaractctcattaaaa

SEQ ID NO: 256 - DNA, 150 bp, Streptococcus pneumoniae
  misc_feature (1)..(150): tiling:Spneumo1:WAN024AR6; Cluster includes WAN024EQ9-rc R 6.IG_303.1.2||||281078..281227|-|150 bp|Between spr0282 (+ strand) and spr0283 (+ strand)|S.pneumoniae|R6|NC_003098. 1|IG-rc|110
aataacagcagttccctgtttatcaactattcgaactactttctattttgcttcataccctacatagcraaaaaataaaatgaaaaagcagagaagaatatcttaaaaagayctcttcactgctaatrttaacactcattatttaaacta

SEQ ID NO: 257 - DNA, 98 bp, Streptococcus pneumoniae
  misc_feature (1)..(98): tiling:Spneumo1:WAN024AJH; Cluster includes WAN024EM4-rc R 6.IG_621.1||||609593..609690|-|98 bp|Between spr0597 (rsuA ) (- strand) and spr0598 (typA) (+ strand)|S.pneumoniae|R6 |NC_003098.1|IG-rc|110
aataacataactcaagcaagtgtaaatgttttcactcygcttttcttttcacgtcaagccttttcaaagcragcgacttatgataagataggcacagt

SEQ ID NO: 258 - DNA, 58 bp, Streptococcus pneumoniae
  misc_feature (1)..(58): tiling:Spneumo1:WAN024AKO; Cluster includes WAN024EMR-rc R 6.IG_565.1||||542777..542834|-|58 bp|Between spr0541 (murN ) (+ strand) and spr0542 (+ strand)|S.pneumoniae|R6|NC_003 098.1|IG-rc|110
aataagaattattttactaaaagaagctaaaagaaatctaaatactgactttttcatc

SEQ ID NO: 259 - DNA, 131 bp, Streptococcus pneumoniae
  misc_feature (1)..(131): tiling:Spneumo1:WAN0249RG; Cluster includes WAN024ECF-rc R 6.IG_1378.2||||1321734..1321863|-|130 bp|Between spr1334 ( - strand) and spr1335 (mocA) (+ strand)|S.pneumoniae|R6|NC _003098.1|IG-rc|110
aataagctattagctttcttttccgaataaatagatagaagcatagaatctagcaaacctagatttaaaaatgtgctataatagaaggaggaaaaggaggattctcagacatctaggtatcagcccaacta

SEQ ID NO: 260 - DNA, 298 bp, Streptococcus pneumoniae
  misc_feature (1)..(298): tiling:Spneumo1:WAN024A8F; Cluster includes WAN024EGD-rc R 6.IG_1077.1.2||||1021073..1021370|-|298 bp|Between A (tran sposase) (- strand) and spr1039 (rexB) (+ strand)|S.pneumo niae|R6|NC_003098.1|IG-rc|110
aatacttagctttacttgtattagatagaataagtctggctactgaaaatcacataataaaaaagcctcggtaacaaggctttgagttttatgattgtttcttaggtacggaatacacttcaatgtgttgtcccagtatcttaatgtcgactggtagattgtctgatttatcgccatcaacatcggactctaattcgatatcagaagaagttttaatattacgtgcctttatatattcaatattcttgatagaatgattgaactatagtaaattgaaactataatagtacaccgtgga

SEQ ID NO: 261 - DNA, 69 bp, Streptococcus pneumoniae
  misc_feature (1)..(69): tiling:Spneumo1:WAN024A9U; Cluster includes WAN024EH6 R6.I G_1022.2||||969633..969695|+|63 bp|Between spr0983 (+ stra nd) and spr0984 (obg) (+ strand)|S.pneumoniae|R6|NC_003098 .1|IG|110
aatagattcaagaaaatttagtgactgggatttcccagcccttttttaaagtgagaagaaataatgagt

SEQ ID NO: 262 - DNA, 308 bp, Streptococcus pneumoniae
  misc_feature (1)..(308): tiling:Spneumo1:WAN0249GQ; Cluster includes WAN024E4R R6.I G_2124.1||||1899538..1899845|+|308 bp|Between spr1917 (mal M) (- strand) and spr1918 (malX) (+ strand)|S.pneumoniae|R 6|NC_003098.1|IG|110
aatagcacctcgtgtgttaaaataatggaacgttgcgtattttkcagacgcaaacgtttgcgttacttataagtatactccttttcaagcataattgcaagcgtttttaaaaaacttttttgattatttttaaggagactaactcattttagcaaagataacttaaaactatctaatcctaargtttgactctcacgagacagtmtacaaagtacaaaacctccttagggagcttgaatttatatgyaacaaagcacaaacgtcyatagaaaatagatakrgattagaamyaggraggtagcccctcc

SEQ ID NO: 263 - DNA, 76 bp, Streptococcus pneumoniae
  misc_feature (1)..(76): tiling:Spneumo1:WAN0249GZ; Cluster includes WAN024E4V R6.I G_2121||||1894043..1894118|+|76 bp|Between spr1914 (- stra nd) and spr1915 (+ strand)|S.pneumoniae|R6|NC_003098.1|IG| 110
aatagcatatttttttgactataataacagtatatgataaaatgtaagcagatrcaaataaaaaggagaaaagctc

SEQ ID NO: 264 - DNA, 201 bp, Streptococcus pneumoniae
  misc_feature (1)..(201): tiling:Spneumo1:WAN024ACD; Cluster includes WAN024EE4-rc R 6.IG_1249.2||||1204951..1205151|-|201 bp|Between spr1205 ( - strand) and spr1206 (- strand)|S.pneumoniae|R6|NC_003098 .1|IG-rc|110
aataggtgacctgatttttaggtaacttctaaaactaacttccagttttgggagagagatggaagttactttgaaaagttacggaaacattattttctatgtgacaacattgtataattgcttgcattttactggtggagagagtataatgagggtggataaagtacttaatcccaaaaatttaaataggaggagctagct

SEQ ID NO: 265 - DNA, 127 bp, Streptococcus pneumoniae
  misc_feature (1)..(127): tiling:Spneumo1:WAN024AK8; Cluster includes WAN024EMG-rc R 6.IG_585.1.1||||568853..568974|-|122 bp|Between spr0561 (p rtA) (+ strand) and spr0562 (+ strand)|S.pneumoniae|R6|NC_ 003098.1|IG-rc|110
aatagtatcamtagtaaagtaaagtaaactaaataattgagttataaatggctrttttcacaaaactatgtcatcacctcactatctaatctcagtacataaaccatttttttctatagcttttrtc

SEQ ID NO: 266 - DNA, 134 bp, Streptococcus pneumoniae
  misc_feature (1)..(134): tiling:Spneumo1:WAN024AH2; Cluster includes WAN024EKR R6.I G_715.1||||691391..691524|+|134 bp|Between spr0691 (bioY) (- strand) and spr0692 (gor) (- strand)|S.pneumoniae|R6|NC _003098.1|IG|110
aatagttaacctcttttctaatgtatastaactattatactcatataggagtcgatgtcaaccattttttaaaaacaaggtaacaaaaactgtaacagccgattttcgtgactagtcaagttggataatttttt

SEQ ID NO: 267 - DNA, 156 bp, Streptococcus pneumoniae
  misc_feature (1)..(156): tiling:Spneumo1:WAN024A46; Cluster includes WAN024EDN-rc R 6.IG_1295||||1251431..1251586|-|156 bp|Between spr1251 (gl nH) (- strand) and spr1252 (phoU) (- strand)|S.pneumoniae| R6|NC_003098.1|IG-rc|110
aatagtttaattctgtataaaarggagcttgaaatcaactgatggctcctttttttgaacgaaaamatatttttgagataaaaatttaaaaaacacttgacaagtaacttggatatcgttataattatacaaaattaacagagaggttgtttattt

SEQ ID NO: 268 - DNA, 245 bp, Streptococcus pneumoniae
  misc_feature (1)..(245): tiling:Spneumo1:WAN024AB9; Cluster includes WAN024EHT-rc R 6.IG_971.2||||919383..919627|-|245 bp|Between spr0932 (+ s trand) and spr0933 (+ strand)|S.pneumoniae|R6|NC_003098.1| IG-rc|110
aatatccctctttttttcttcattaratttatttaattatagcataaatattgatttcattcaatcttacattgatttagtgatttgttttagagaatttgttgtgttattccgtccttattttgccataaattgttttaagtgggacctcttatccttaccatttttacctcctaattttgagtataaaaaagacgatagagtttttaatttctatcgtctgagatttacatattaaattttca

SEQ ID NO: 269 - DNA, 76 bp, Streptococcus pneumoniae
  misc_feature (1)..(76): tiling:Spneumo1:WAN024ACR; Cluster includes WAN024EIH-rc R 6.IG_930||||883336..883411|-|76 bp|Between spr0894 (pfs) ( + strand) and spr0895 (+ strand)|S.pneumoniae|R6|NC_003098 .1|IG-rc|110
aatatcctctgaaacgttttctagcttttctttacttaaatcttatcataagctagaaaaactgtcaaatttccgc

SEQ ID NO: 270 - DNA, 136 bp, Streptococcus pneumoniae
  misc_feature (1)..(136): tiling:Spneumo1:WAN0249LL; Cluster includes WAN024E7F R6.I G_1844||||1707556..1707691|+|136 bp|Between spr1729 (- str and) and spr1730 (- strand)|S.pneumoniae|R6|NC_003098.1|IG |110
aatatcgaaaaatatacaacttttaaaggcagcatttcattttttaaagtctaacaaccatagaactgaaatcagagcaaggcatcaatttcctactcttagtacgtctattttgatggttgaagtgaagattttt

SEQ ID NO: 271 - DNA, 65 bp, Streptococcus pneumoniae
  misc_feature (1)..(65): tiling:Spneumo1:WAN024AGW; Cluster includes WAN024EKO R6.I G_729.2||||704572..704636|+|65 bp|Between spr0705 (+ stran d) and spr0706 (pepN) (+ strand)|S.pneumoniae|R6|NC_003098 .1|IG|110
aatatgatataataagtttgtttgaagaagagcagcagctcttaaacttagaataggagaaaact

SEQ ID NO: 272 - DNA, 115 bp, Streptococcus pneumoniae
  misc_feature (1)..(115): tiling:Spneumo1:WAN0249KL; Cluster includes WAN024E6V R6.I G_1881||||1732452..1732566|+|115 bp|Between spr1766 (+ str and) and spr1767 (cylM) (+ strand)|S.pneumoniae|R6|NC_0030 98.1|IG|110
aatattcaattttaaaaataaaagttgctctttattttcctctctcgtaactaataattttgagagaggtttttttttwaaacaatagtaagtcgtataggtttgaggtaagtaa

SEQ ID NO: 273 - DNA, 257 bp, Streptococcus pneumoniae
  misc_feature (1)..(257): tiling:Spneumo1:WAN0249UJ; Cluster includes WAN024EKG R6.I G_744||||722195..722358|+|164 bp|Between spr0720 (- strand ) and spr0721 (- strand)|S.pneumoniae|R6|NC_003098.1|IG|33 0
aatatttcctccgattttctaattctattatarcactttttgaataragtcgcttgatttatactcaatgaaaatyraagarcaaactaggaagctarccgcargcwrtacttragtayggyaagrygamgctkacgtrrtttgmakhkattttcgmagagtataagtctctacggaccaaccattatcctgtagtaacaaaaaagaagytgagacagactgaactcaacttcttttttagtgtcgtatcagcaatg

SEQ ID NO: 274 - DNA, 99 bp, Streptococcus pneumoniae
  misc_feature (1)..(99): tiling:Spneumo1:WAN0249Q5; Cluster includes WAN02471X-rc R 6.IG_181.1||||170022..170120|-|99 bp|Between spr0160 (hexB ) (+ strand) and spr0161 (ribE) (- strand)|S.pneumoniae|R6 |NC_003098.1|IG-rc|110
aatatttcyatgataaaacgcataaaatcaaggtttttgaacacctgattttatgcgtttttytgattttgaaaatttttcccagacttttttatactt

SEQ ID NO: 275 - DNA, 297 bp, Streptococcus pneumoniae
  misc_feature (1)..(297): tiling:Spneumo1:WAN024B63; Cluster includes WAN023M5U 3153 18_556b||||288851..289108|+|258 bp|EGAD orf prediction|S.p neumoniae|R6|NC_003098.1|ORF|120
aatcaatatagaagtagtttaggcgaaatatttcatcgcttgtgtagttataaaggtgttgaaatgatcgagggtcacttaatgccagaccatgtacacatgttagtcagtattccryyraggctaagtgtttcragtttyatggggtatttaaaaggcaaaagtgcactcatgatgtttgacaaacacgccaatctcaagtacaagtttgggaatcggcatttctggghggaaggttattatgtaagtmcagtagggcttaatraagcyacaattaagaaatatagtcaagattaa

SEQ ID NO: 276 - DNA, 172 bp, Streptococcus pneumoniae
  misc_feature (1)..(172): tiling:Spneumo1:WAN0249DD; Cluster includes WAN0246M1 R6.I G_237||||210345..210515|+|171 bp|Between spr0216 (rplQ) (+ strand) and spr0217 (+ strand)|S.pneumoniae|R6|NC_003098. 1|IG|110
aatcatcaattttgttgagtgttatgatgatggagtcttgtgctcttagtctagctctggtctaccgctaggatttcggtcctagcgggaacactcatcataagttgggatagtagacgcttgtttacgaaattgtttttttcttaagaacaacttcgtaagcaggcgtttt

SEQ ID NO: 277 - DNA, 264 bp, Streptococcus pneumoniae
  misc_feature (1)..(264): tiling:Spneumo1:WAN024ACG; Cluster includes WAN024EIB R6.I G_940.1||||889537..889800|+|264 bp|Between spr0904 (+ stra nd) and spr0905 (yfnA) (+ strand)|S.pneumoniae|R6|NC_00309 8.1|IG|110
aatcgataaaatctgattacaagatgtagtcagattttggtaacttctaaaactaacttccagtttcccacaacctagcttttagtatgagaaaaacgcgtgacatcagtggaaatccgtcttagactaacttccactggttttctttttcttgatatataagggttcaaaagcgaaaagactcagaaaaagtgcacgacaaatagccctaaaacagagtcgtcttagagtaacttccagttttgggagagagatggaagttac

SEQ ID NO: 278 - DNA, 303 bp, Streptococcus pneumoniae
  misc_feature (1)..(303): tiling:Spneumo1:WAN0249Q6; Cluster includes WAN024EML-rc R 6.IG_580.2.1||||557546..557848|-|303 bp|Between spr0556 (r plA) (+ strand) and spr0557 (+ strand)|S.pneumoniae|R6|NC_ 003098.1|IG-rc|110
aatcgattgggaaagtaaaattaatttctataaatgttttagcaattgtttcgtactattttagattcagtctactatacataaactaacctcctcattattagcaaggcttctactgattataacctaattcttagactacttcaagactaactgtccaataataatctacagataaatcatccactcttaatcaaattttattcaatccatcyactcattcccaaaaggttgctgtataatgcaagacatttttcttactgcttttacttttccttaccctcaatttagtgagctaataaa

SEQ ID NO: 279 - DNA, 193 bp, Streptococcus pneumoniae
  misc_feature (1)..(193): tiling:Spneumo1:WAN0249PY; Cluster includes WAN024EGO-rc R 6.IG_1059.1||||998943..999135|-|193 bp|Between spr1020 (hl pA) (+ strand) and spr1021 (+ strand)|S.pneumoniae|R6|NC_0 03098.1|IG-rc|110
aatcgattgggaaagtaaaattaatttctataaatgttttagcaattgtttcgtactattttagattcagtctactatatacaatattttcggaacattcaactttttaactctatttattactagatttcataattaaaaaacctactgaccaagctagaaagcttgatacaataggctttttaaagactga

SEQ ID NO: 280 - DNA, 171 bp, Streptococcus pneumoniae
  misc_feature (1)..(171): tiling:Spneumo1:WAN0249S9; Cluster includes WAN024EBS-rc R 6.IG_1425||||1363339..1363509|-|171 bp|Between spr1381 (- strand) and spr1382 (aliB) (- strand)|S.pneumoniae|R6|NC_0 03098.1|IG-rc|110
aatctaattgtagataagtttgtgtaagaagtctttgtgcttaaaaacgcataatatcaggtatataaaatcctagatgttatgcgttttgttataggaagatttattagattttatcctcaaattgagttattcccgactttatccgttgaaatattataaggagtattt

SEQ ID NO: 281 - DNA, 135 bp, Streptococcus pneumoniae
  misc_feature (1)..(135): tiling:Spneumo1:WAN024AN2; Cluster includes WAN024ENZ-rc R 6.IG_465||||447379..447513|-|135 bp|Between spr0441 (pgk) (+ strand) and spr0442 (+ strand)|S.pneumoniae|R6|NC_00309 8.1|IG-rc|110
aatctcaactttctatttccattttatcataaatcggtgatttttatgagtaatagttgagaggaagcgtttttattttaagcaaaagaaaagaggaactytcatccctctcttctttgatttrtttataaaatc

SEQ ID NO: 282 - DNA, 68 bp, Streptococcus pneumoniae
  misc_feature (1)..(68): tiling:Spneumo1:WAN0249HG; Cluster includes WAN024E55-rc R 6.IG_2106||||1878460..1878526|-|67 bp|Between spr1899 (pho U) (+ strand) and spr1900 (+ strand)|S.pneumoniae|R6|NC_00 3098.1|IG-rc|110
aatgaacttttttacaaccataaaaaagagyacttaatcgtactcttctcttttaaggattagttgaa

SEQ ID NO: 283 - DNA, 110 bp, Streptococcus pneumoniae
  misc_feature (1)..(110): tiling:Spneumo1:WAN024AQV; Cluster includes WAN024EQ2 R6.I G_319.1||||299915..300024|+|110 bp|Between spr0298 (regR) (+ strand) and spr0299 (- strand)|S.pneumoniae|R6|NC_00309 8.1|IG|110
aatgaaggaaaatgacttgcaatctctgttaagaaataaaataatcccacctagaacaagctaggtgggattatttgcctatgaaatgagaaattatgggagcaagctcc

SEQ ID NO: 284 - DNA, 206 bp, Streptococcus pneumoniae
  misc_feature (1)..(206): tiling:Spneumo1:WAN024AID; Cluster includes WAN024ELH-rc R 6.IG_665||||649239..649444|-|206 bp|Between spr0641 (ctpA) (+ strand) and spr0642 (spxB) (+ strand)|S.pneumoniae|R6| NC_003098.1|IG-rc|110
aatgataactctccttcaatttttttaaacttggagaatacgattacatagaattggaaacgttctccaaatttttactattccactgtatcatatttatgctgacttttctaaaaatctgctcaaaactctctattctctattctaatacagttttgaaagtkytgtcatttctgttttataacaaagaaatctagtcattactt

SEQ ID NO: 285 - DNA, 187 bp, Streptococcus pneumoniae
  misc_feature (1)..(187): tiling:Spneumo1:WAN024AS3; Cluster includes WAN024EQO R6.I G_268.1||||247145..247331|+|187 bp|Between spr0247 (pulA) (- strand) and spr0248 (rpsL) (+ strand)|S.pneumoniae|R6|N C_003098.1|IG|110
aatgattctccaatcaataaatttctatatcagtatagcatgtagtaaaacaatatgcaagcgttttctttgatttgtgaaaraaattcttacttttgagaagttttcygtactattttatatatcagtataaatgacggagataaaaatgtcacrtaagccaagccgtrttattaggaagatgatg

SEQ ID NO: 286 - DNA, 206 bp, Streptococcus pneumoniae
  misc_feature (1)..(206): tiling:Spneumo1:WAN0249VW; Cluster includes WAN024EA6-rc R 6.IG_1569.2||||1499887..1500092|-|206 bp|Between spr1522 ( - strand) and spr1523 (- strand)|S.pneumoniae|R6|NC_003098 .1|IG-rc|110
aatgcgagaatgaaagcactttgtatttttttattgaatatgttagcttggacagtgcttgcaatgatartycgtggagggctagatggatttratrrgcatacttggagtactattttaattgcttcgctgtycgggrtatatatagattatawgyccatagataaaartagaaaaaagtccaaaagaaaaaakarawaatagat

SEQ ID NO: 287 - DNA, 129 bp, Streptococcus pneumoniae
  misc_feature (1)..(129): tiling:Spneumo1:WAN0249FL; Cluster includes WAN024E47 R6.I G_2169||||1950204..1950332|+|129 bp|Between spr1962 (- str and) and spr1963 (adh2) (- strand)|S.pneumoniae|R6|NC_0030 98.1|IG|110
aatggaacctccacaagtatttttctagtattatagcacatttaaagaaggctgtgccgtttttactgcgatttttcctgaaatgtcaataattagaggtgaattgtcctattgtcgtcyaatctcttg

SEQ ID NO: 288 - DNA, 97 bp, Streptococcus pneumoniae
  misc_feature (1)..(97): tiling:Spneumo1:WAN0249IB; Cluster includes WAN024E5K-rc R 6.IG_2027||||1840434..1840530|-|97 bp|Between spr1868 (- s trand) and spr1869 (tgt) (- strand)|S.pneumoniae|R6|NC_003 098.1|IG-rc|110
aatggaattgatataaaaaaatcctaagttttctcttaggatttttcttctttttttgatagaataaagtgtacaatgaaaggaagaataaactcgt

SEQ ID NO: 289 - DNA, 330 bp, Streptococcus pneumoniae
  misc_feature (1)..(330): tiling:Spneumo1:WAN024FH8; Cluster includes WAN02436I-3 SP 0082||15900026|NP_344630.1|86298..88871|+|2574 bp|cell wal l surface anchor family protein|S.pneumoniae|TIGR4|NC_0030 28.1|ORF|011
aatgttaaagaaacatcagacacagcaaatggttcattatcaccttctaactctggttctggcgtgactccgatgaatcacaatcatgctacaggtactacagatagcatgcctgctgacaccatgacaagttctaccaacacgatggcaggtgaaaacatggctgcttctgctaacaagatgtctgatacgatgatgtcagaggataaagctatgctamcwaatactggtgagactcaaacatcaatggcaagtattggtttccttgggcttgcgcttgcaggtttactcggtggtctaggtttgaaaaacaaaaaagaagaaaactaa

SEQ ID NO: 290 - DNA, 120 bp, Streptococcus pneumoniae
  misc_feature (1)..(120): tiling:Spneumo1:WAN024A4L; Cluster includes WAN024EDU-rc R 6.IG_1282||||1237223..1237342|-|120 bp|Between spr1238 (- strand) and spr1239 (amy) (+ strand)|S.pneumoniae|R6|NC_00 3098.1|IG-rc|110
aatgtttcctcttacttgtcaatcttgttctttattctatcataaagtatctattagcgcaaacgtttgcgtaagatagaaggaaactattttaactrcttaaaataaagtattgatttt

SEQ ID NO: 291 - DNA, 74 bp, Streptococcus pneumoniae
  misc_feature (1)..(74): tiling:Spneumo1:WAN0249D4; Cluster includes WAN024ER2-rc R 6.IG_247||||218388..218460|-|73 bp|Between spr0226 (pflE) (- strand) and spr0227 (deoR) (+ strand)|S.pneumoniae|R6|N C_003098.1|IG-rc|110
aattaamctttcgttcgtaattgtttttctttcgtttttgtgataggatagacttatgaagaggaggaactctt

SEQ ID NO: 292 - DNA, 119 bp, Streptococcus pneumoniae
  misc_feature (1)..(119): tiling:Spneumo1:WAN0249T3; Cluster includes WAN024EIL-rc R 6.IG_920.1||||876165..876283|-|119 bp|Between spr0884 (ppm A) (+ strand) and spr0885 (- strand)|S.pneumoniae|R6|NC_00 3098.1|IG-rc|110
aattaattgtctaacttttttggggggcagtacaaaccttgtactatgcgttttattgtgggaatgtttgcttcattttttcctgaagtcgagttttttccctgactcattgatttgga

SEQ ID NO: 293 - DNA, 106 bp, Streptococcus pneumoniae
  misc_feature (1)..(106): tiling:Spneumo1:WAN0249T8; Cluster includes WAN024EO4 R6.I G_462.2.1.2||||438910..438989|+|80 bp|Between spr0438 (pyr G) (+ strand) and spr0439 (- strand)|S.pneumoniae|R6|NC_00 3098.1|IG|210
aattaatttatagaaatattttagcagtcaagrtgkactgttatagattcaatayaytatacttwwtwaakttaaksmamtaaggaggaaagtctatgggagaaga

SEQ ID NO: 294 - DNA, 111 bp, Streptococcus pneumoniae
  misc_feature (1)..(111): tiling:Spneumo1:WAN0249SI; Cluster includes WAN024E9W-rc R 6.IG_1582.2.2.1||||1514643..1514753|-|111 bp|Between spr15 35 (- strand) and spr1536 (nanA) (- strand)|S.pneumoniae|R 6|NC_003098.1|IG-rc|110
aattaatttatagaawwattttagcagtcaaggtgtactgttatagattcaatatattatrygactattaaccttgtcttctcctaaaattgactttcttgttttcttatc

SEQ ID NO: 295 - DNA, 107 bp, Streptococcus pneumoniae
  misc_feature (1)..(107): tiling:Spneumo1:WAN0249NK; Cluster includes WAN024E8L-rc R 6.IG_1688||||1612990..1613096|-|107 bp|Between spr1639 (cc pA) (- strand) and spr1640 (- strand)|S.pneumoniae|R6|NC_0 03098.1|IG-rc|110
aattaattttgtgaatttgtggatcttaaataatttactaaattctcttgttaaaaaaaattaaatattgtatagtaatattagaatgttcgtaatggaggactgaa

SEQ ID NO: 296 - DNA, 189 bp, Streptococcus pneumoniae
  misc_feature (1)..(189): tiling:Spneumo1:WAN024ARJ; Cluster includes WAN024EQE R6.I G_296||||274310..274498|+|189 bp|Between spr0275 (+ strand ) and spr0276 (bglA) (+ strand)|S.pneumoniae|R6|NC_003098. 1|IG|110
aattattgtgagagtttttgtagtttgaaagtattgaaaatcgtaaagatatcattacgagaatacaagaagatattgttctatttccattaaaaattacttctttccttaacaataaggaaaaagaatgcgttttyatcttttggtttaaggtttataataagagtatcaaagtcaggaggaaaaaag

SEQ ID NO: 297 - DNA, 158 bp, Streptococcus pneumoniae
  misc_feature (1)..(158): tiling:Spneumo1:WAN0249DY; Cluster includes WAN024E3B-rc R 6.IG_2237||||2021871..2022028|-|158 bp|Between spr2030 (- strand) and spr2031 (+ strand)|S.pneumoniae|R6|NC_003098.1 |IG-rc|110
aattcacctcaatctttggtattataccatattttcctaaaaatagtgagagagacagcgagaaatgtaagcgatttttatttcaaaagtgttacagggaacaagaaaatttcaggttttcgtgatataatagaagtctgtatataaggaggtaaatc

SEQ ID NO: 298 - DNA, 65 bp, Streptococcus pneumoniae
  misc_feature (1)..(65): tiling:Spneumo1:WAN024AQD; Cluster includes WAN024EPO R6.I G_351||||335616..335680|+|65 bp|Between spr0330 (recU) (- strand) and spr0331 (+ strand)|S.pneumoniae|R6|NC_003098.1 |IG|110
aattctccttattggtacaataacatcactttattataccataatttgcacagaaagggttaaaa

SEQ ID NO: 299 - DNA, 136 bp, Streptococcus pneumoniae
  misc_feature (1)..(136): tiling:Spneumo1:WAN0249NP; Cluster includes WAN024E8N R6.I G_1679.1||||1604241..1604376|+|136 bp|Between spr1630 (- s trand) and spr1631 (trpA) (- strand)|S.pneumoniae|R6|NC_00 3098.1|IG|110
aattcttcctcctccaaatactttttaatgaattataycattttcttaaagaaattactacaataattatctttttcttaaagttctgtgtcagrgtaatttagaaaattatatcttctatagtaaaatcaattaa

SEQ ID NO: 300 - DNA, 51 bp, Streptococcus pneumoniae
  misc_feature (1)..(51): tiling:Spneumo1:WAN0249G6; Cluster includes WAN024E4I-rc R 6.IG_2154||||1929197..1929247|-|51 bp|Between spr1947 (IS1 381) (+ strand) and spr1948 (- strand)|S.pneumoniae|R6|NC_ 003098.1|IG-rc|110
aattgaaatcagtctgtgtaggcttagtatttcaatagacttcctgcaaaa

SEQ ID NO: 301 - DNA, 188 bp, Streptococcus pneumoniae
  misc_feature (1)..(188): tiling:Spneumo1:WAN024A2F; Cluster includes WAN024ECR R6.I G_1353.2.1||||1300585..1300642|+|58 bp|Between spr1309 (+ strand) and spr1310 (fms) (+ strand)|S.pneumoniae|R6|NC_00 3098.1|IG|110
aattgaattgaacttccyatctattttctataaatcctaaatgccataatgctttcaattcttgtcattttgtgatatcatgtagaggtaatgaaagaaaatgaactaatccacagtggcttattccaagtataccacttgggctttggcagtagctaactgcactaaacataatataaggagagaaa

SEQ ID NO: 302 - DNA, 95 bp, Streptococcus pneumoniae
  misc_feature (1)..(95): tiling:Spneumo1:WAN0249NI; Cluster includes WAN024E8K-rc R 6.IG_1689||||1613466..1613560|-|95 bp|Between spr1640 (- s trand) and spr1641 (mgtC) (- strand)|S.pneumoniae|R6|NC_00 3098.1|IG-rc|110
aatttagtaaacaaagggacagatgtttttgtccttttgytttttagatgttttaatcatctaatttttgagtagatttttgctcagaggttttt

SEQ ID NO: 303 - DNA, 76 bp, Streptococcus pneumoniae
  misc_feature (1)..(76): tiling:Spneumo1:WAN024ALI; Cluster includes WAN024EN9-rc R 6.IG_532||||507143..507218|-|76 bp|Between spr0508 (+ stra nd) and spr0509 (pheT) (+ strand)|S.pneumoniae|R6|NC_00309 8.1|IG-rc|110
aatttagttctccagaatgacmrttgycacwctrgttcttttcctttcctatcatttcaatagaagaatcctcttc

SEQ ID NO: 304 - DNA, 215 bp, Streptococcus pneumoniae
  misc_feature (1)..(215): tiling:Spneumo1:WAN024AG5; Cluster includes WAN024EK7-rc R 6.IG_761.2.2||||736290..736504|-|215 bp|Between spr0737 (+ strand) and spr0738 (deoD) (+ strand)|S.pneumoniae|R6|NC_ 003098.1|IG-rc|110
aatttatgatacaaagagcgagaagaaaacgactgaaaattaggaacctgacgagaaatcctgatttttcagtcagattatctattttccgagttttccgctcgtgttcaaatcaaaacacacgctctacctttctttattttatattttatattgagaaagataccaaacccatcaaaaagcgaagggaaaataggagttgggcgcagtgagcg

SEQ ID NO: 305 - DNA, 379 bp, Streptococcus pneumoniae
  misc_feature (1)..(379): tiling:Spneumo1:WAN024A2Q; Cluster includes WAN024ECX-rc R 6.IG_1337.1.1||||1289588..1289962|-|375 bp|Between spr1293 (+ strand) and spr1294 (- strand)|S.pneumoniae|R6|NC_0030 98.1|IG-rc|110
aatttattatatgaaaatcccatatyattctccaattctatattttacctttctaaatgtatagattaactacctaattatagcatataacgcagattcctttcaatcgtatgatttactgcattaaattaagtaaaaaaataaaggcagtccgaagactgccgatatttatctctcatctctttaattatggtaagtaaataaataatttccctaaagatatggaaattaytaatactataaatacatattataaagtttataaatactgtaaaaatcctgaagttaattttctaataaatatcaatatgtgttagtatcttttaaatttttagacaatttactagttctatagacatgtttaacagactctatttta

SEQ ID NO: 306 - DNA, 120 bp, Streptococcus pneumoniae
  misc_feature (1)..(120): tiling:Spneumo1:WAN024AED; Cluster includes WAN024EJC R6.I G_841.2.1||||808137..808256|+|120 bp|Between spr0805 (- st rand) and spr0806 (+ strand)|S.pneumoniae|R6|NC_003098.1|I G|110
aatttcaaattgagtagctaagagataatatagcttgatattacctgatatatatcataattgtgctataattaaataaaaagaaaatcattatcagaaaattatgggaggtagtcaaac

SEQ ID NO: 307 - DNA, 95 bp, Streptococcus pneumoniae
  misc_feature (1)..(95): tiling:Spneumo1:WAN0249MA; Cluster includes WAN024E7W-rc R 6.IG_1735||||1658693..1658787|-|95 bp|Between spr1686 (fec E) (+ strand) and spr1687 (fatB) (+ strand)|S.pneumoniae|R 6|NC_003098.1|IG-rc|110
aatttctcctttttaaaatgtgataacgatttagggagtctcttaatcttattgactaagagactgaaggttctctaacttgagcttttatgtta

SEQ ID NO: 308 - DNA, 121 bp, Streptococcus pneumoniae
  misc_feature (1)..(121): tiling:Spneumo1:WAN024AN7; Cluster includes WAN024E65 R6.I G_1979||||1795626..1795746|+|121 bp|Between spr1819 (comX2 ) (- strand) and spr1820 (nusG) (- strand)|S.pneumoniae|R6 |NC_003098.1|IG|220
aattttcccctttctagatacagtctaacagattagaaaacacatttgttccattttctccattctgttccctttagctcctaaactgcacaaaaaagagargctccagcctctctcaggg

SEQ ID NO: 309 - DNA, 260 bp, Streptococcus pneumoniae
  misc_feature (1)..(260): tiling:Spneumo1:WAN024ADH; Cluster includes WAN024EIU-rc R 6.IG_887.2||||847782..848040|-|259 bp|Between spr0851 (+ s trand) and spr0852 (- strand)|S.pneumoniae|R6|NC_003098.1| IG-rc|110
aattttgaaaagaaaagggtgacttcgcaagtcctacccactgtgctttgtgtcatcagctattacatcgttggtttattgtactgtatactttgcaactggagactttcgttccagactcaattgtgcataagaaactctaaattgaataaagtcaacagagtttcgcccaaccacttcgtcttgtaatgacaattatataaaccaaaggaagctgagctctttagtcccagcttctttttatatataaaattttaccc

SEQ ID NO: 310 - DNA, 155 bp, Streptococcus pneumoniae
  misc_feature (1)..(155): tiling:Spneumo1:WAN024AKL; Cluster includes WAN024EMP R6.I G_574||||550513..550667|+|155 bp|Between spr0550 (+ strand ) and spr0551 (brnQ) (+ strand)|S.pneumoniae|R6|NC_003098. 1|IG|110
aattttgcatttctcctacttggtgtggactgggtaggagagttttatttttagataattcttatttttaagaaarttgaaaacatttaatatttgcmtcgtgatgcttttttcagactcctaatcgtggtatactaggtcagtattttataaat

SEQ ID NO: 311 - DNA, 90 bp, Streptococcus pneumoniae
  misc_feature (1)..(90): tiling:Spneumo1:WAN0249Z8; Cluster includes WAN024EC6-rc R 6.IG_1394.2.1||||1333448..1333537|-|90 bp|Between A (trans posase) (- strand) and spr1351 (pgm) (+ strand)|S.pneumoni ae|R6|NC_003098.1|IG-rc|110
aattttggggttatatgatgttgaggctaggaaaaattcaatttcagtaaaaaaagtaagtcttctcataacaaaacattgatatagtta

SEQ ID NO: 312 - DNA, 97 bp, Streptococcus pneumoniae
  misc_feature (1)..(97): tiling:Spneumo1:WAN024AGB; Cluster includes WAN024EK9-rc R 6.IG_761.1.1||||735848..735944|-|97 bp|Between spr0737 (+ strand) and spr0738 (deoD) (+ strand)|S.pneumoniae|R6|NC_0 03098.1|IG-rc|110
aattttgttctttcayagagagctacctgagtcctattcaagctcaggtagtactttcttataaactagacaaactaactrtcattstaccatcaga

SEQ ID NO: 313 - DNA, 217 bp, Streptococcus pneumoniae
  misc_feature (1)..(217): tiling:Spneumo1:WAN024AXW; Cluster includes WAN0246PO 2036 69-21-0_1||||403..780|+|378 bp|Glimmer 2.02 orf prediction from Patent Sequences|S.pneumoniae||WAN0246ZJ|ORF|001
aayacagytgctacaactcttaatggaggagctactgcaggggctttttcaggtgttgycttactcttgaatgccttgaarattgcaaatcttgttcttggtatcattgctattgtttactataaaggagataakcgtgtaggtgcagctccgtmtgtactaatgattgtttytggtgrarttagtctcattccattcttaggatgggttgggggga

SEQ ID NO: 314 - DNA, 158 bp, Streptococcus pneumoniae
  misc_feature (1)..(158): tiling:Spneumo1:WAN024A4O; Cluster includes WAN024EDW-rc R 6.IG_1280.1.2||||1234312..1234469|-|158 bp|Between spr1236 (- strand) and spr1237 (- strand)|S.pneumoniae|R6|NC_0030 98.1|IG-rc|110
acaaaaggcttytctataaaatcaaattttccagatacctaytgaagcwgatttatttcttyatctttcttctactacctttgtcactaaatttgacagacacatattgctgatacaacctctctacctataatctcacagttaacctgaggctagtt

SEQ ID NO: 315 - DNA, 220 bp, Streptococcus pneumoniae
  misc_feature (1)..(220): tiling:Spneumo1:WAN024F54; Cluster includes WAN023MFK 3134 45_60||||34272..34502|-|231 bp|EGAD orf prediction|S.pneum oniae|R6|NC_003098.1|ORF|120
acaaaaggtagcccatcagctacctttttcttatgcttcctcaatcaagcgagtatgttctctcttgatacagcgattcatcacgatatcatcacatccaccatcacgcaaaatctctttcgcttctaaactttcaagtcctagctgtgcccaaaaaatcttggcatcagctttgagaaaatcacgcgccacatcgggcagaaattcactgcgacgataa

SEQ ID NO: 316 - DNA, 125 bp, Streptococcus pneumoniae
  misc_feature (1)..(125): tiling:Spneumo1:WAN0249XJ; Cluster includes WAN024EB5 R6.I G_1491||||1430518..1430642|+|125 bp|Between spr1444 (cobQ) (+ strand) and spr1445 (pepQ) (+ strand)|S.pneumoniae|R6| NC_003098.1|IG|110
acaaaggaaaatgatatcaaagaactccgttatcttgtcggagttttttgtcttttcttttacccttctcccttgcattttctctcattttttgccaaaatagaggggtagaaagaaggtagcat

SEQ ID NO: 317 - DNA, 214 bp, Streptococcus pneumoniae
  misc_feature (1)..(214): tiling:Spneumo1:WAN0249W5; Cluster includes WAN024EA8 R6.I G_1564||||1496274..1496472|+|199 bp|Between spr1517 (pbp2b ) (- strand) and spr1518 (+ strand)|S.pneumoniae|R6|NC_003 098.1|IG|110
acaaatcagtctcatttctaacttaaaatcttactcttaattgtaccacaatttgagtagaaaattatggaaaagagagaagctttttcgattttttcgtttttaaaacagagatgcgtttttatttatctatccttatattatgtgttataatgaagtgtgactattcyctgatctagtcttccagtatgactcatgtaaaggagctttccct

SEQ ID NO: 318 - DNA, 1569 bp, Streptococcus pneumoniae
  misc_feature (1)..(1569): tiling:Spneumo1:WAN024DLR-3; Cluster includes WAN0244MJ sp r0247|pulA|15902291|NP_357841.1|243374..247144|-|3771 bp|A lkaline amylopullulanase|S.pneumoniae|R6|NC_003098.1|ORF|2 00
acaacccaccatatgaccaaacggctcctagttgactctatcaaatacctagttgatacctacaaagtggatggmttccgcttcgatatgatgggagaccatgacgccgcttctatcgaagaagcttacaaggctgcacgcgccctcaatccaaayctmatcatgytwggygaaggttggagaacctatgccggtgatgaaaacatgcctactaaagctgctgaccaagattggatgaaacataccgatactgtcgctgtcttttcagatgacatccgtaacaacctcaaatctggttatccaaacgaaggtcaacctgcctttatcacaggtggcaagcgtgatgtcaacaccatctttaaaaatctcattgctcaaccaactaactttgaagctgacagccctggagatgtcatccaatacatmgcagcccatgataacttgaccctctttgacatcattgcccagtctatcaaaaaagacccaagcaaggctgagaactatgctgaaatccaccgtcgtttacgacttggaaatctcatggtcttgacagctcaaggaactccatttatccactccggtcaggaatatggacgtactaaacaattccgtgacccagcctacaagactccagtagcagaggataaggttccaaacaaatctcacttgttgcgtgataaggacggcaacccatttgactatccttacttcatccatgattcttacgattctagcgacgcagtcaacaagtttgactggactaaggctacagatggtaaagcttatcctgaaaatgtcaagagccgtgactatatgaaaggtttgattgcccttcgtcaatctacagatgccttccgacttaagagtctccaagatatcaaagaccgtgtccacctcatcactgtcccaggccaaaatggtgtggaaaaagaggatgtagtgattggctaccaaatcactgctccaaacggcgatatctacgcagtctttgtcaatgcggatgaaaaagctcgcgaatttaatttgggaactgcctttgcacatctaagaaatgcggaagttttggcagatgaaaaccaagcaggatcagtcggaattgccaacccgaaaggacttgaatggactgaaaaaggcttgaaattgaatgcccttacagctactgttcttcgagtctctcaaaatggaactagccatgagtcaactgcagaagagaaaccagactcaaccccttccaagcctgaacatcaagacccwrctccagaagctagacctgattctactaaaccagatgccaaagtagctgatgcggaaaataaacctagccaagctacagctgattcacaagctgaacaaccagcacaagaagcacaagcatcatctgtaaaagaagcggttcaaaacgaatcggtagaaaactctagcaagaaaaatatacctgcaaccccagatagacaagctgaacttccaaatacaggaatcaaaaacgaaaacaaactcctatttgcaggaatcagcctccttgcgctccttggtctcggtttcttactaaaaaataaaaaagagaactaa

SEQ ID NO: 319 - DNA, 74 bp, Streptococcus pneumoniae
  misc_feature (1)..(74): tiling:Spneumo1:WAN024ABW; Cluster includes WAN024E7L R6.I G_1825||||1695582..1695654|+|73 bp|Between () (- strand) a nd RNA (ribosomal) (- strand)|S.pneumoniae|R6|NC_003098.1| IG|440
acaagacctctcaagactaaacaagaccaatgcgcagttccttatccttagaaaggaggtgatccagccgcacc

SEQ ID NO: 320 - DNA, 204 bp, Streptococcus pneumoniae
  misc_feature (1)..(204): tiling:Spneumo1:WAN024A8X; Cluster includes WAN024EGN-rc R 6.IG_1059.2||||999164..999367|-|204 bp|Between spr1020 (hl pA) (+ strand) and spr1021 (+ strand)|S.pneumoniae|R6|NC_0 03098.1|IG-rc|110
acaagtagtatagcatgtttccctaaggcattcaagataatcgtaagtcttttagtacaacttttataacataaaataaactaaattatgtatattttatattagattmcttcactatcttgttggattttctaaccagctaatcttgtttcaaatagttatcgcacaagtctattatttaattcttttcatcatttacgtacg

SEQ ID NO: 321 - DNA, 454 bp, Streptococcus pneumoniae
  misc_feature (1)..(454): tiling:Spneumo1:WAN0249Q3; Cluster includes WAN024EQX R6.I G_255||||226815..227268|+|454 bp|Between spr0234 (gldA) (+ strand) and spr0235 (leuS) (+ strand)|S.pneumoniae|R6|NC_ 003098.1|IG|110
acaataaggactactgttttccaaatggtagtcttttattgatcycygtattgaattctatagaagattgaaataggatgagaacaaatcgattgggaaagtaaaattaatttctataaatgttttagcaattgtttcgtactatttcagattcagtctactataygttcttcataaatcaaaaagcgacataggttgtcggctatttattgtgaatacattaattagcattccagttttatcttcggtctaaaataagtattttgtgctatacgagataagcktcttgacttactccttgatttactgcataacaatgggataaaaagtgggagatagagcaattcatagtcatcaaaattaatgagatacagtatacagtttttyctttaaacacatttcaaattccctcaaaaatggtataatagtaacatcacaaaattggagagagacc

SEQ ID NO: 322 - DNA, 95 bp, Streptococcus pneumoniae
  misc_feature (1)..(95): tiling:Spneumo1:WAN0249ZV; Cluster includes WAN024ECI R6.I G_1375.1||||1318520..1318614|+|95 bp|Between spr1331 (- st rand) and spr1332 (- strand)|S.pneumoniae|R6|NC_003098.1|I G|110
acaatagactgaataagcaaaagaaccacatctgacaatcctaggttgatttaacctaggggcgtcagaaacgcggttccaccctaatttattac

SEQ ID NO: 323 - DNA, 162 bp, Streptococcus pneumoniae
  misc_feature (1)..(162): tiling:Spneumo1:WAN0249YL; Cluster includes WAN024EBT R6.I G_1421||||1361498..1361654|+|157 bp|Between spr1377 (metB) (- strand) and spr1378 (- strand)|S.pneumoniae|R6|NC_0030 98.1|IG|110
acaatwcctccaaatctatagtaactattgtaccacttattttstatcamytcrttttcttsttttcaagagctagttatagtttcaaactatataaaaagggagtttttcctgctccctttaatagactataaaatggtgaatctcaaaagacaccttcac

SEQ ID NO: 324 - DNA, 89 bp, Streptococcus pneumoniae
  misc_feature (1)..(89): tiling:Spneumo1:WAN024A9X; Cluster includes WAN024EH8-rc R 6.IG_1016||||963429..963502|-|74 bp|Between spr0977 (+ str and) and spr0978 (dnaG) (+ strand)|S.pneumoniae|R6|NC_0030 98.1|IG-rc|110
acacaatacctccatgttatcatagtttactttatatagtatactttatttcagaaaaaaagtaaaccatttcactcattttccctact

SEQ ID NO: 325 - DNA, 173 bp, Streptococcus pneumoniae
  misc_feature (1)..(173): tiling:Spneumo1:WAN0249K4; Cluster includes WAN02471Q-rc R 6.IG_198.2.2||||185646..185812|-|167 bp|Between spr0177 (+ strand) and spr0178 (folC) (+ strand)|S.pneumoniae|R6|NC_ 003098.1|IG-rc|110
acacatctccttgacaaaagtccaatcaattatcgcattaaagtatggttactaataaaaacaaggccaggattttcgtcccgacctcttacctggttagctaatmactagcwactatgaatattaacgtggagtaaaacatccactgaatgtcccaattcttctttatttca

SEQ ID NO: 326 - DNA, 228 bp, Streptococcus pneumoniae
  misc_feature (1)..(228): tiling:Spneumo1:WAN0249UE; Cluster includes WAN0247U0-rc R 6.IG_52.2.1||||31115..31270|-|156 bp|Between spr0031 (- st rand) and spr0032 (polA) (+ strand)|S.pneumoniae|R6|NC_003 098.1|IG-rc|220
acacccattataaaggaaagaatcaaaaaataccattgggaagagctagagcaagtatttttcaaactttttccgaataaatagatagagccagagaatttagtaaacctagatkkawaaatgtrmwawartatartrtattgaatctataayagtmcaycttgactgctaaaatatttctataaattaatttgactttcctgatagagttattcacatcttatttca

SEQ ID NO: 327 - DNA, 87 bp, Streptococcus pneumoniae
  misc_feature (1)..(87): tiling:Spneumo1:WAN024AFW; Cluster includes WAN024EK3 R6.I G_780.2.1.2||||752077..752163|+|87 bp|Between spr0756 (par E) (+ strand) and spr0757 (parC) (+ strand)|S.pneumoniae|R 6|NC_003098.1|IG|110
acacgggasgaattcccgtaaaatatcttttactgcataaaaacctactctacattctttgaaaggagttgaacacgccctagatac

SEQ ID NO: 328 - DNA, 86 bp, Streptococcus pneumoniae
  misc_feature (1)..(86): tiling:Spneumo1:WAN0249J6; Cluster includes WAN024E63-rc R 6.IG_1983||||1798925..1799010|-|86 bp|Between spr1823 (pbp 2a) (- strand) and spr1824 (rluD) (+ strand)|S.pneumoniae| R6|NC_003098.1|IG-rc|110
acagatattgtaacaaaaaaagccctatttggataggaaatagctaaattcttgtcttcctatgatgaagatgataaaataaacgc

SEQ ID NO: 329 - DNA, 82 bp, Streptococcus pneumoniae
  misc_feature (1)..(82): tiling:Spneumo1:WAN0249ES; Cluster includes WAN024E3N-rc R 6.IG_2203||||1990256..1990337|-|82 bp|Between spr1996 (- s trand) and spr1997 (hk06) (- strand)|S.pneumoniae|R6|NC_00 3098.1|IG-rc|110
acagattagttttttattaaagttcatatagggttaacataagtgtgttattctttgtgtagataaaagaaaggatactaat

SEQ ID NO: 330 - DNA, 65 bp, Streptococcus pneumoniae
  misc_feature (1)..(65): tiling:Spneumo1:WAN0249WZ; Cluster includes WAN024EAT R6.I G_1521.2||||1455606..1455670|+|65 bp|Between spr1474 (rr01 ) (- strand) and spr1475 (+ strand)|S.pneumoniae|R6|NC_003 098.1|IG|110
acaggctatgctactagctaatttgagggaaatttgctaagataaataaaaagaaaggagctctt

SEQ ID NO: 331 - DNA, 4221 bp, Streptococcus pneumoniae
  misc_feature (1)..(4221): tiling:Spneumo1:WAN024DDO; Cluster includes WAN0242EX-3 SP 1154||15901019|NP_345623.1|1083878..1089892|+|6015 bp|immu noglobulin A1 protease|S.pneumoniae|TIGR4|NC_003028.1|ORF| 010
acagtagaaggtacctcaaatcaagaaacagaaaaaccagttcaacctgcagaagaaacacaaacaaactctgggaaaatagctaacgaaaatactggagaagtatccaataaacctagtgattcaaaaccaccagttgaagaatcaaatcaaccagaaaaaaacggaactgcaacaaaaccagaaaattcaggtaatacaacatcagagaatggacaaacagaaccagaaccatcaaacggaaattcaactgaggatgtttcaaccgaatcaaacacatccaattcaaatggaaacgaagaaattaaacaagaaaatgaactagaccctgataaaaaggtagaagaaccagagaaaacacttgaattaagaaatgtttccgacctagagttatacagtttgtcaaatggtacttataaacaacacatttcgttagagcaagttccaagcaatccaaatagctactttgttaaagtgaaatcttcttcattcaaagatgtatacctaccagtagcatcaatatcagaggaaagaaaaaatgataaaatcctttataaaatcacagcaaaagtagagaagcttcagcaggagatagaaagcagatataaagataattttaccttctatctagctaagaagggaacagaagaaacaacaaactttacttcctttagtaatctggtcaaagctataaaccaaaatccctctggaacctatcatttagcggccagcctgaatgctaacgaagtggagcttggtcctgatgaaagatcctatatcaaggacacctttactggtcgtttaatcggtgaaaaagatggcaagaattatgctatctataatttgaaaaaacctctgtttgaaaacttgagtggtgctacagtagaaaaactgagtctaaaaaatgttgctatttcagggaaagatgatatcggttcactggcaaatgaagctcagaataacacaaaaattaagcaagttcacgtcgatggtgttctggctggtgaacgtggtatcggtggtttgctggctaaggctgagcaatcaagcatcacagagagcagtttcaagggaagaattatcaacacttatgaaacgactgctgcctacaatatcggtggtatggtcggtcatttgacaggtgacaaggctttacttactaagtcaaaagcgacagtagccatttcatctaacacaaatacttcagatcagactgtgggtggacttgcaggcctagtagaccgagatgcacagatccaagatagctatgctgaaggtgatatcaacaatgtcaagcactttggtagagtcgctggagtggcaggcaatttgtgggatcgaacttctggtgatgttaggcatgctggaagtttgaccaatgttctcagcgatgttaatgtaaccaacggaaatgccatcactggttaccactataacgaaatgaaggtaaaggacacattcagcagcaaggccaacagagtctacaatgtcaccttggtcaaggatgaggtcgtcagcaaggaatcctttgaagaaagaggaacaatgctagatgcttctcaaattgcaagcaaaaaagcagaaatcaatcctctcattttaccaacagtggagccactttcaacaagtggcaaaaaagacagtgatttttctaaggtggcctattatcaagctaagcgcaacttgacttataaaaacattgaaaaattgctacctttctacaacaaggcaaccatcgtcaaatacggaaacctggtcaatgagaacagtcttttatatcaaaaagaactcttgtcagcagtcatgatgaaggacaaccaagtcatcacagacattgtttctaacaaacagactgcaaacaaactcttgcttcactacaaggatgatttatctgagaagctggatctcaaataccagaatgatttcgccaaattagcagaatatagtctgggcaatactggacttctctatacgccaaaccaattcctgtatgaccaaacctctatcatcaagcaagtcttacctgacttacaaaaggttgactatcattcagaagccatcagaaagacgctgggtatttctccaaacgtcaagcaaactgagctctatctagaagaccagttcgccaaaacaaaacaacaactggaagacagtttgaaaaaactcttgtcagcggatgctggactggctagtgctaaccccgtcactgaaggttatcttgtagataaaatcaaacgcaacaaggaagccttgctacttggcttgacctatctggaacggtggtataactttagctatggtcaggtgaatgtcaaagacctagttctgtaccatttggacttctttggtaaggggaatgcttcaccattagatactctgattgagttgggtaaatctggctttaacaatcttctagctaagaataatgtcgatacttatggtatcagtcttgccagtcaacatggaacgacagatttgtttagcacgctggaacattaccgaaaagtctttttaccaaatacaagcaataatgactggtttaaatcagagactaaggcttacattgtcgaagaaaaatccactatcgaagaggtgaaaacgaagcaagggttagctggcaccaagtattctatcggtgtttatgatcgtatcacgagtgccacatggaaataccgcaatatggtcttgcctctcctgaccttgccagagagatccgtatttgtcatctcgaccatgtctagtctaggatttggagcttatgatcgctaccgcagtagtgaccataaagcgggcaaggctctcaatgattttgttgaagaaaatgcgcgtgaaacagccaaacgtcagcgagatcactacgattattggtatcgtattttagacgacaatgcacgtgaaaaactttatagaaatattttgctttacgatgcttataaatttggcgatgataataccgtagggaaagctacagaagtggcagattttgataatccaaatcctgcaatgcaacatttctttggacctgttggaaataaagttgggcataatcaacacggtgcttatgctacaggtgatgcagtttattatatgggttatcgaatgttggataaggatggagctattacttatacgcatgagatgacacatgactcagatcaggacatttatcttggaggatatggtcgaagaagtggcttgggaccagagttctttgctaaaggattattacaagcaccagaccatccagatgatgcgaccattaccatcaactccatcttgaaacattcaaaatctgatagtacagaaagtcgacgattacaagtacttgatccaactacaagatttaataatgcagatgatttgaagcaatatgtccacaacatgtttgacgttgtttatatgttggaatatctcgaaggaaattcaattcttaaattggatacgaatcaaaaacaacaacttcttagaaaagttacaaatgagtaccatcctgatcctgatggaaataaggtctatgcaacaaatgttgtcagaaatctaacagtagaagaagttgaaagactacgttcattcaatgatttgattgataataatattctttcgtctagggaatatgcctcaggtaaatacgaaagaaatggctacttcactattaagttatttgcaccgatttatgctgcattaagtaatgatataggaacaccaggtgacctgatgggacgtcgtatagcctatgaactactagctgctaaaggctttaaagatggtatggtaccatatatctcaaaccaatacgaagaagaagccaaacaaaagggcaagacaatcaatctctacggtaaaacaagaggtttggttacagatgacttggttttggaaaaggtatttaataaccaatatcatacttggagtgagtttaagaaagctatgtatcaagaacgacaagatcagtttgatagattgaacaaagttacttttaatgatacaacacagccttggcaaacatttgccaagaaaactacaagcagtgtagatgaattacagaaattaatggacgttgctgttcgtaaggatgcagaacacaattactaccattggaataactacaatccagacatagatagtgaagtccacaagctcaagagagcaatctttaaagcctatcttgaccaaacaaatgattttagaagttcaatttttgagaataaaaaactarctaat

SEQ ID NO: 332 - DNA, 4093 bp, Streptococcus pneumoniae
  misc_feature (1)..(4093): tiling:Spneumo1:WAN024DDP; Cluster includes WAN02440G-3 sp r1042|iga|15903086|NP_358636.1|1029961..1035852|+|5892 bp| Immunoglobulin A1 protease|S.pneumoniae|R6|NC_003098.1|ORF |100
acagtagaaggtacctcaaatcaagaaacagaaaaaccagttcaacctgcagaagaaacacaaacaaactctgggaaaatagctaacgaaaatactggagaagtatccaataaacctagtgattcaaaaccaccagttgaagaatcaaatcaaccagaaaaaaacggaactgcaacaaaaccagaaaattcaggtaatacaacatcagagaatggacaaacagamccagagaaaaaactcgaattaagaaatgtttctgatattgagttgtatagtcagacgaatggaacctacagacaacatgtttcattggatggaattccagagaatacggatacttactttgtcaaggtaaaatcttcagcatttaaagatgtctatataccagtagcttcaataacygaagagaaaagaaatgggcagtcagtttataaaatcacagccaaagctgagaaactccagcaagaactagaaaataaatatgtcgacaatttcwccttctacctcgataagaaggctaaagaggaaaatacaaactttacttcctttagcaacctggtcaaagctataaaccaaaatccctctggaacctatcatttagcggccagcctgaatgctaacgaagtggagcttrgtmctgatgawaratcctatatcaaggrmacctttactggtcrkttratyggtgaaaaagatggyaagmwttatgctatytayaayttgaaaaarcctctktttgaaaacttgagtggtgctacagtagaaaaactgagtctaaaaaatgttgctatttcagggaaaaatgatattggttcactggcaaatgaagctacgaatggcacaaagattaaacaagttcatgttgatggtgttctggctggagaacgtggtgtcggtggtttgttggctaaggcagaccaatcaagcatcgcagagagcagtttcaagggaagaattgtcaatacctatgaaacgactgatkcctacaatattggcggtctggtcggtcatttaacaggaaaaaatgcgtctattgctaaatccaaagcgacagtaaccatttcgtcaaacaccaataggtcagatcagactgtcggtggtcttgcaggtctagtagaccragaygcrcakatmcarrayagytatgckgaaggtgatatyaayaatgtcaagcactttggtaragtcgctggwgtggcaggmwatttgtgggatcgaacttctggtgakgwwarrcaygctggwrrwttgaccaatgttctyagcgatgtyaatgtaacaaacggaaatgccatcactggataccactatacaggaatgaaggtagctaatacatttagtagtaaggctaatagagttttcaatgtcactttagagaaggatgaggtcgtcagcaaggaatcctttgaagaaagaggaacaatgctagatgcttctcaaattgtaagcaaaaaagcagaaataartcctctcactctaccaacggtggaacccctctcaacaagtggcaagaaagacagtgatttttctaagatagcccattatcaagctaaccgtgctttggtttataagaacattgaaaaattgttacctttttataataagtcaaccatcgtsaaatacggaaacctggttaaggagaacmgtctcttataccaaaaagaactcttatctgcagttatgatgaaggatgaccaagtaatcacagatattgtttccaacaaacagactgcaaacaaactcttacttcactataatgaccattcatctgagaaatttgatctcaagtaccagactgattttgccaatctascagaatataatctaggtaatacgggacttctctacactcctaaccaattcttatatgatcgagactctattgttaaggaagtcttgcctgagttgcagaagcttgattaccagtcagatgctatcagaaagacacttggtatttctccagmagttaagttaaccgagctctatttagaagascagttctccaaaacaaaacaaaatctgggagrcagcttgaaaaaacttttgtcagcagatgccggtctagctagcgataactcagtcaccagaggctatcttgtagataaaatcaagaataataaggaagccttgctactcggtttaacttatttagaacgttggtataactttaactatggtcaagtgaatgtcaaagacytagttatgtatcatccagacttctttggtaaaggaaatacttccccactagatactctgattgagttaggtaaatctggctttaacaatcttctwgcyaagaayaatgtcgatacttatggtatcagtctwgccagycawcatggarcgacagatttgtttagcrcrctkgaammttaccgaaaagtctttttaccaaayacwagcaayaatgactggtttaaawmasagacyaargcttwcattgtcgaagaaaaatccactatygmagaggtsaaarcsaagcaarrgywagcwggmacyaagtaytctatcggtgtttatgaycgwatyackagtrmyacwtggaartaccgsaatatggtcttgcctctcctkaccttgccagaragatcygtatttgtcatctcraccwtgtctagtctaggatttggwgcttaygatcgctaccgyartagtgamcataaagcrggcaaggmyctcaatratttygttgaagaaaatgcgmgtgaaacwgccaaacgtcagcgagatcactacgattattggtatcgyattttagatrawsagksacgygaaaaactmtatcgtacgattctcctttatgatgcctataagtttggkgatgacacaacatcwggaaaagctacagyggaggctaagtttgatagctccaatccagcyatgaagaayttctttggwccagttggyaataaggtwgtwcayaaycakcayggwgcctacgcwacaggrgayggygtctactatatgtcttaccgcatgctsgacaaggatggagccattamytatacccatgaratgacccatgattcggatcargatatttaccttggyggctatggtcgaagaartggcttggkaccwgagttyttygcwaaaggyttattrcaagcsccwgaccawccaagtgacgcaaccattaccattaattytatyttgaaacactcaaaatcagatagtacagagggatcccgtcttcaagtcttggatccgacagagagattccaaaacgcagcagatyttcagaactatgtccataacatgtttgaccttatctacatgatggaatatctcgaagggcagtcaatcgttaataaactaagtgtttaccagaaaatggcggctctcagaaaaattgagaacaagtatgtgaaagatccagcagatggaaatgaggtttatgccactaacgtagtcaaagaattgacagaagcagaggcccgaaacctgaatagttttgaaagtttgattgaccacaacatcttatcagctcgtgagtaccagtctggcgactatgaacgaaatggctactataccatcaaactctttgccccaatctattcagctctcagcagtgagaaaggcacaccaggggaccttatgggacgtaggattgcgtacgaacttttggctgccaaaggctttaaggatggaatggtaccttatatctcaaaccaatacgaagaagatgctaaacaacaagggcaaactatcaatctttatggtaaagaacggggcttggtgaccgatgagcttgttttgaaaaaggtatttgacggtaagtataaaacttgggcagaatttaagacagctatgtaccaagaacgggtggatcagtttgggaaacttgaagcaggtgacctttaaagatccgacaaaaccatggccaagctatggcacaaagactatcaataatgtggatgaattgcaagccctcatggaccaagctgttctcaaggatgctgaaggtccacgttggagtaattatgatccagaaatcgacagtgccgttcataagttgaagagagcaatctttaaagcctatcttgaccaaacaaatgattttagaagttcaatttttgagaataaaaaatag

SEQ ID NO: 333 - DNA, 115 bp, Streptococcus pneumoniae
  misc_feature (1)..(115): tiling:Spneumo1:WAN024A5B; Cluster includes WAN024EEJ R6.I G_1218||||1174917..1175031|+|115 bp|Between spr1174 (- str and) and spr1175 (flaV) (- strand)|S.pneumoniae|R6|NC_0030 98.1|IG|110
acagtctcctcctttatttgaattattgtatcaaaaagccatcaattaggctagtaaaatcccaactctcgataagaaaaatgcactgattgattacatcagcgcacttttatgt

SEQ ID NO: 334 - DNA, 115 bp, Streptococcus pneumoniae
  misc_feature (1)..(115): tiling:Spneumo1:WAN024A5A; Cluster includes WAN024EEJ-rc R 6.IG_1218||||1174917..1175031|-|115 bp|Between spr1174 (- strand) and spr1175 (flaV) (- strand)|S.pneumoniae|R6|NC_0 03098.1|IG-rc|110
acataaaagtgcgctgatgtaatcaatcagtgcatttttcttatcgagagttgggattttactagcctaattgatggctttttgatacaataattcaaataaaggaggagactgt

SEQ ID NO: 335 - DNA, 136 bp, Streptococcus pneumoniae
  misc_feature (1)..(136): tiling:Spneumo1:WAN024AO7; Cluster includes WAN024EOH R6.I G_444.2||||418323..418455|+|133 bp|Between spr0420 (xylR) (- strand) and spr0421 (+ strand)|S.pneumoniae|R6|NC_00309 8.1|IG|110
acataagaaaaaatcaattaaaattattattctatacaaagaaaaaaatattgtaaaaacaacaaaaaatatattgacaacgctttctgttagtggtatatttaatttataaaaaataaaaaaaggagttccggtg

SEQ ID NO: 336 - DNA, 265 bp, Streptococcus pneumoniae
  misc_feature (1)..(265): tiling:Spneumo1:WAN0249JS; Cluster includes WAN024E6I-rc R 6.IG_1920||||1774274..1774529|-|256 bp|Between spr1802 (- strand) and spr1803 (plcR) (- strand)|S.pneumoniae|R6|NC_0 03098.1|IG-rc|110
acatagtgaatcagtgacaaaratgtccttgtcctcgtatcaaaacagttctaaagttcgtctttagrrmtgtttttttagatataagctaaaaatrayaygaaatrgttagattttaaggacattgatgtccttgatagttcttgaaaaaacggatataatgtatttgaagatgttgctagcagaaagaacttaataagcttcttaacatcgcagtgactgtggtcaccttctcackaagtgaccaagtaactttttggaggaa

SEQ ID NO: 337 - DNA, 182 bp, Streptococcus pneumoniae
  misc_feature (1)..(182): tiling:Spneumo1:WAN024AL6; Cluster includes WAN024EN4-rc R 6.IG_539.1||||515126..515307|-|182 bp|Between spr0515 (met F) (+ strand) and spr0516 (pnpA) (+ strand)|S.pneumoniae|R 6|NC_003098.1|IG-rc|110
acatcgatttgactcactcgtgtcgttaaatcttacagtttaaatgcattgtattatttaataccttcatctttgtatcaagtacgtacagaatttattttatcatatttttcttaaaaagtgaggtctttaccattaaaaaggaaccattcccctcacctgagaagaatggtttgctttta

SEQ ID NO: 338 - DNA, 131 bp, Streptococcus pneumoniae
  misc_feature (1)..(131): tiling:Spneumo1:WAN024AGK; Cluster includes WAN024EKD R6.I G_749.1||||726205..726335|+|131 bp|Between spr0725 (clpE) (- strand) and spr0726 (- strand)|S.pneumoniae|R6|NC_00309 8.1|IG|110
acatctacctcatttctttctttagcctgacttgtttaaaggtcaaaaatagtcaaattctatactctcattataacaggattggggtgtaaagcaagtaaaaagattgaagctttgagaagttgttacaa

SEQ ID NO: 339 - DNA, 90 bp, Streptococcus pneumoniae
  misc_feature (1)..(90): tiling:Spneumo1:WAN024AIS; Cluster includes WAN024ELR R6.I G_643||||629329..629407|+|79 bp|Between spr0619 (+ strand) and spr0620 (- strand)|S.pneumoniae|R6|NC_003098.1|IG|110
acatcttagatagactcaggatgttataggtaaaatcttaaaaagggattggagcttaaaatccagtyccttttaagagttaatgactaa

SEQ ID NO: 340 - DNA, 366 bp, Streptococcus pneumoniae
  misc_feature (1)..(366): tiling:Spneumo1:WAN024F32; Cluster includes WAN0242S9 SP06 33||15900539|NP_345143.1|598657..599019|+|363 bp|hypotheti cal protein|S.pneumoniae|TIGR4|NC_003028.1|ORF|111
acattgttagaagttggtttaaattycctaatcagtttgttcacatttaccttcgatatattatatcccatagttaaggttggtcatacagatgattatagycatggagccgtaaaacttagtrtttctttagttgacaaagatgccatgaaaaaaatatytgtaactgtaataggatattttgaaataaatatagatgaaaatatcaccgatattctatacgtaaatggtactgctattctttatcyttatttacgttcwattgtttcaatagtttcggcaattgatagcagtgaagcaatgttgctacctaycattaatgttttagagttactagataaatctcaaccttttgaagaagaataa

SEQ ID NO: 341 - DNA, 61 bp, Streptococcus pneumoniae
  misc_feature (1)..(61): tiling:Spneumo1:WAN024AGU; Cluster includes WAN024EKN R6.I G_734.1.2||||710714..710774|+|61 bp|Between spr0710 (+ str and) and spr0711 (dinG) (+ strand)|S.pneumoniae|R6|NC_0030 98.1|IG|110
acatttcttctctcaatttttcgtatttcttcactattttamaaaaatcagcaggctagaa

SEQ ID NO: 342 - DNA, 385 bp, Streptococcus pneumoniae
  misc_feature (1)..(385): tiling:Spneumo1:WAN024A35; Cluster includes WAN024ED7 R6.I G_1325.2||||1276466..1276850|+|385 bp|Between spr1281 (- s trand) and spr1282 (- strand)|S.pneumoniae|R6|NC_003098.1| IG|110
acattttttattcctccattaatattcatggtttgctctttgattcttattraktttaaaaagttgcgcctctttttaacaayattatatcatatatctaacttaatgcaatatataaatgtcattttgtraaattttattaacaaaaaactctctacaacaaaataatagagagttttctgcttattaatttttttcaaaatatctaagacatcrcttctttgtttaatttgataggctttgatrcctaarctccgactttatcacttaaaaaataaaaaaggacagctaatctcttgcgcatcaagggatttcgccattctttaatctcgtttaagtgttgtatatggagctttgcatarttttttaaaactaaacaactaca

SEQ ID NO: 343 - DNA, 128 bp, Streptococcus pneumoniae
  misc_feature (1)..(128): tiling:Spneumo1:WAN024AR5; Cluster includes WAN024EQ8 R6.I G_304.2.2||||281875..282001|+|127 bp|Between spr0283 (+ st rand) and spr0284 (xylS) (+ strand)|S.pneumoniae|R6|NC_003 098.1|IG|110
acatttttttcaattgactattatttgtcatagatataacagatagaacattgcattcagaataatgaaaaacgcatcaaaaatggtgcgttctgtttttatgctaccataaaaggaggaaaacaaat

SEQ ID NO: 344 - DNA, 182 bp, Streptococcus pneumoniae
  misc_feature (1)..(182): tiling:Spneumo1:WAN024A6H; Cluster includes WAN024EFB R6.I G_1165||||1131364..1131545|+|182 bp|Between spr1127 (rncS) (- strand) and () (- strand)|S.pneumoniae|R6|NC_003098.1| IG|110
accaacytctttctaactgataatagtcctttttattatatcaaaaaaagccccctgagtcactctaaaacgggactggaaagcatttgggaattctttagacagagattctcagttttagcggcaaatttgggtcaggataaagaaaaaagccctattaaaggctttttaggatgtttaca

SEQ ID NO: 345 - DNA, 130 bp, Streptococcus pneumoniae
  misc_feature (1)..(130): tiling:Spneumo1:WAN024AEV; Cluster includes WAN024EJM-rc R 6.IG_828.1.1||||792302..792431|-|130 bp|Between spr0792 (h sdR) (+ strand) and spr0793 (argR) (- strand)|S.pneumoniae |R6|NC_003098.1|IG-rc|110
accacttaacaactgatactgtattctaggaaaacgatgacattcttcctaataaaacttctcatatatagcataaatttctactctttttaattttaaatgagtctcagcatggcaatcactttagaat

SEQ ID NO: 346 - DNA, 73 bp, Streptococcus pneumoniae
  misc_feature (1)..(73): tiling:Spneumo1:WAN024ABE; Cluster includes WAN024EHV R6.I G_969||||916138..916210|+|73 bp|Between spr0930 (+ strand) and spr0931 (+ strand)|S.pneumoniae|R6|NC_003098.1|IG|110
accaggtgtttttgttataagttttctttaagatagatatattactctaaagaagtaaaggaggaaattccct

SEQ ID NO: 347 - DNA, 167 bp, Streptococcus pneumoniae
  misc_feature (1)..(167): tiling:Spneumo1:WAN024AG4; Cluster includes WAN024EK6 R6.I G_765||||739070..739236|+|167 bp|Between spr0741 (coaA) (- strand) and spr0742 (+ strand)|S.pneumoniae|R6|NC_003098. 1|IG|110
accataaaaakctaaaaaaataaagcggtttcttgaatgtggtaagtcaatggtatatagtataagtgatcaatttattgatgaaataggagatagattctactgatttataagtttataagcttataaagggggctttttagttcacaacttataggaggtgtact

SEQ ID NO: 348 - DNA, 134 bp, Streptococcus pneumoniae
  misc_feature (1)..(134): tiling:Spneumo1:WAN024ANX; Cluster includes WAN024EOD-rc R 6.IG_451.2||||428299..428432|-|134 bp|Between spr0427 (trk A) (- strand) and spr0428 (+ strand)|S.pneumoniae|R6|NC_00 3098.1|IG-rc|110
accatatttcagagaaagtcgctaatagctatttcaattggttagggtatagttttaccttatagcraatttyctactaaaarytcttgttattagctagtaggtgcwttttttcttgaaaaagggtatgatag

SEQ ID NO: 349 - DNA, 50 bp, Streptococcus pneumoniae
  misc_feature (1)..(50): tiling:Spneumo1:WAN024A3Y; Cluster includes WAN024EDK-rc R 6.IG_1310.2||||1263334..1263383|-|50 bp|Between spr1266 (h emN) (- strand) and spr1267 (- strand)|S.pneumoniae|R6|NC_ 003098.1|IG-rc|110
accatcaccatctccggacggactatgtatctggggatggtgatttttat

SEQ ID NO: 350 - DNA, 207 bp, Streptococcus pneumoniae
  misc_feature (1)..(207): tiling:Spneumo1:WAN024CN5; Cluster includes WAN02436V SP00 68||15900013|NP_344617.1|72456..72653|+|198 bp|hypothetica l protein|S.pneumoniae|TIGR4|NC_003028.1|ORF|020
accatggatcatacccgtctttctagcaaagatctttggagtgcctttccaacttctaatagtataatgggagaaaatttggcatggaatcatgacggttttctaaaagctattgaacaatggcgtgctgaaaaagcagattatgtggagamaaaaatagtggttcagacaacgggaaatctggtcactatgagtcgcctaactaat

SEQ ID NO: 351 - DNA, 2236 bp, Streptococcus pneumoniae
  misc_feature (1)..(2236): tiling:Spneumo1:WAN024CTY-3; Cluster includes WAN0244DP sp r0565|bgaA|15902609|NP_358159.1|572123..578809|+|6687 bp|b eta-galactosidase precursor|S.pneumoniae|R6|NC_003098.1|OR F|331
acccagtttcaaatgttaatgacaagctcatttcctacaataaccaaccagccaatcgttggacaaactggaatcgtastaatccagaagcttcagtcggtgtyctrttyggagattcaggtatyttgagcaaacgytcmgttgataayytaagygtyggmttccaygaagaccatggagttggtgyaccgaagtcttatgtgattgagtattatgttggtaagactgtcccaacagctcctaaaaaccctagttttgttggtaatgaggaccatgtctttaatgattctgccaactggaaaccagttactaatctaaaagcccctgctcaactcaaggctggagaaatgaaccactttagctttgataaagttgaaacctatgctrttcgtattcgcatggtkaragcagayaacaarckwggaacgtctatcacagaggtacaaatctttgcgaaacaagttgcggcagccaarcaaggacaaacaagaatccaagttgacggyaaagacttagcaaacttcaaccctgatytgacagactactaccttgagtctgyagatggaaaagttmcggcagtcacagcaartgttagcaacaatggyctcgctaccgtcgttccaagcgttcgtgaaggtgagccrgttcgtgtcatcgcgaaagctgaaaatggcgacatcttaggagaataccgtctgcacttcactaaggataagarcttactttctcataaaccagttgctgcggttaaacaagctcgcttgctacaagtaggtcaagcacttgaattgccgactaaggttccagtttacttcacaggtaaagacggctacgaaacaaaarayytgwcagttgaatgggaagaagttccagcrgaaaatctgayaaaagcaggtcaatttacygttcgaggccrtgtccttggtagtraycttgttgctgagrtcactgtacgagtgacagacaaactwggygarrctctttcagataaccctaactatgatgaaaacagtaaccaggcctttgcttcagcaaccaatgatattgacaaaaactctcatgaccgcgttgactatctcaatgacggagatcattcagaaaatcgtcgttggacaaactggtcwccaacaccatcttctaatccagaagtatcagcgggtgtgatyttccgtgaaaatggtaagattgtagaacggactgttrcdcaagsmaaasttcrbttctttgcagatagtggtacggatgcaccawctaaactcgttttagaacgctatgtcggyccagrstttgaagtrccwacctactattcaaactaccaagcctacgamkcwgrmcatccattyaacaatccagaaaattgggaagctgtkccttatcgtgcggataaagacatygcagctggtgatgaaatcaacgtaacatttaaagmtrtcaaagccaaagyyatgagatggcgtatggagcgtaaagcwgayaagagcggtgttgcgatgattgagatgaccttccttgcaccragtgaattgcctcaagaaagyackcaatcraagattcttgtagatggaaaagaacttgctgatttcgctgaaaatcgtcaagactatcaaattacctataaaggtcaacggccaaaagtctcagttgaagaaaacaatcaagtagcttcaactgtggtagatagtggagaagatagcyttccagtacttgttcgcctcgtttcagaaagtggaaaacaagtcaaggaataccgtatccasttgactaaggaaaaaccagtttctgakaagacagttgctgctgtacaagaagatcttccamaamtcgaatttgttgaaaaagatttggcmtwcaagacagttgagaaaaaagattcaacactgtwtctaggtgaaactcgtgtagaacaagaaggaaaarytggwaaagaacgtatctttacagygattaatcctgatggaagtaaggaagaaaaactccgtgaagtggtagaagytccgacagaccgcatcgtcttggttggaaccaaaccagtagctcaagaagctaaaaaaccacaagtgtcagaaaaagcagatacaaaaccaattgattcaagtgaagctrrtcaaactaataaagcccagttaccaartacaggtagtgcggcargccaagcagcagtagcagcaggtttarctcttctaggtttgagtgcaggattagtagttactaaaggtaaaaaagaagactarctaat

SEQ ID NO: 352 - DNA, 94 bp, Streptococcus pneumoniae
  misc_feature (1)..(94): tiling:Spneumo1:WAN024AM4; Cluster includes WAN024ENK-rc R 6.IG_498.1||||477918..478011|-|94 bp|Between spr0474 (pncP ) (+ strand) and spr0475 (+ strand)|S.pneumoniae|R6|NC_003 098.1|IG-rc|110
acccgattctcaaagaaaagcctctggattggcttgggtatcattatagcttgaaaaaggtaagcaccgtcttctgcttaccttttcataattt

SEQ ID NO: 353 - DNA, 150 bp, Streptococcus pneumoniae
  misc_feature (1)..(150): tiling:Spneumo1:WAN0249EW; Cluster includes WAN024E3P-rc R 6.IG_2201.2||||1987394..1987543|-|150 bp|Between spr1994 ( + strand) and spr1995 (pspC) (- strand)|S.pneumoniae|R6|NC _003098.1|IG-rc|110
acctaatataactagttaatactgacttcctgtaagaactytttaaagtattccctacaaataccatatcctttcagtagataatatacccttgtaggaagtttagattaaaaaataactctgtaatctctagccggatttatagcgcta

SEQ ID NO: 354 - DNA, 128 bp, Streptococcus pneumoniae
  misc_feature (1)..(128): tiling:Spneumo1:WAN024A3D; Cluster includes WAN024EDB R6.I G_1319.2||||1271302..1271410|+|109 bp|Between spr1275 (- s trand) and spr1276 (nadE) (- strand)|S.pneumoniae|R6|NC_00 3098.1|IG|110
acctagtcatcgttgcaggggtaagacgatgaaatcgaactcttcgagttacygaatctgcctcattttcttatttctaaactcggggttcaagatcccccrgaccttytctcactttcttatttcaa

SEQ ID NO: 355 - DNA, 359 bp, Streptococcus pneumoniae
  misc_feature (1)..(359): tiling:Spneumo1:WAN024AIF; Cluster includes WAN024ELI-rc R 6.IG_662||||645843..646177|-|335 bp|Between spr0638 (thiD) (- strand) and spr0639 (copY) (+ strand)|S.pneumoniae|R6| NC_003098.1|IG-rc|110
acctccaaaatctacatttgtcaattacactcatcagtatactcttaaaatctacatttgtcaattatagaaataatattttcttcgaaaaatagaattttaatcatttgaaaaacgatttgcagtcaaatattactatataaacaataaaaatatgctatactaaagaaaaaagaaaacaaccactaggggtgcgtaaagctgagattaacgactgttagatccctctgactcaatctaggtaatgctagctgatggaagtggaaatgataatggggactagcagtcttctattgcctttctaaaacagactagcttgttcttaagaatacaaacttcagttggttgggaggttttag

SEQ ID NO: 356 - DNA, 504 bp, Streptococcus pneumoniae
  misc_feature (1)..(504): tiling:Spneumo1:WAN0249QJ; Cluster includes WAN024E42 R6.I G_2181.2.1.2||||1965244..1965747|+|504 bp|Between spr1974 (fcsR) (+ strand) and spr1975 (adcA) (- strand)|S.pneumoni ae|R6|NC_003098.1|IG|110
acctgatattatgcgtttttytgattttaaagaytttgtckcytagaycykatatttcaagaattaagtgaccttgatgatctaaatgtattgtggtatactatttttgtcatcggttaccgattacgttcctatgggttcgtgagaggaggtgaaactaatgagccttatcatagagctcgctcttactattatagcggatgttatagctggaattatcttgtatttcgtctgcagatggctagatagtaaggagtagaccgastgactagcctataaacacccgttaaatcgctaagatacgtcaaaaaagcccttaactacggccatagttaggggctttggtgttctaatgaaccttatcaattaactacattytagcatataatctacaatagttcaagyattaagtraggttgatgayctraatktagtgtgrtatactatttttgtcatcggttaccgattacgttcctwwsggttcgtgagaggaggtgaaactaa

SEQ ID NO: 357 - DNA, 133 bp, Streptococcus pneumoniae
  misc_feature (1)..(133): tiling:Spneumo1:WAN024AVC; Cluster includes WAN0243YZ spr1 096|metY-truncation|15903139|NP_358689.1|1093409..1093531| -|123 bp|O-acetylhomoserine sulfhydrylase, truncation|S.pn eumoniae|R6|NC_003098.1|ORF|111
accttatgactygtgattttaaatttgaaactctacaactacatgctggtcaagttgtgrctccagctactaagtctcgtgcagtgccgatttatcaaacaacatyttttgtttttgatgacacgtarstaat

SEQ ID NO: 358 - DNA, 95 bp, Streptococcus pneumoniae
  misc_feature (1)..(95): tiling:Spneumo1:WAN0249ID; Cluster includes WAN024E5L R6.I G_2026.2||||1838521..1838615|+|95 bp|Between spr1867 (nagA ) (- strand) and spr1868 (- strand)|S.pneumoniae|R6|NC_003 098.1|IG|110
acctttcttttttatttgtaaatggtatagacctattttttggagatattttaaaagagctggatttctccaactcttctcttttttaatacaag

SEQ ID NO: 359 - DNA, 128 bp, Streptococcus pneumoniae
  misc_feature (1)..(128): tiling:Spneumo1:WAN0249L5; Cluster includes WAN024E77 R6.I G_1865||||1720811..1720938|+|128 bp|Between spr1750 (- str and) and spr1751 (- strand)|S.pneumoniae|R6|NC_003098.1|IG |110
acgacaactcccccctcttcatctagcccatatacaatatcatatctgaaagcatctagtaacagttcctcatacttcccttgcgaaattctgttattttctaaaagttgttcagttgaattaatata

SEQ ID NO: 360 - DNA, 95 bp, Streptococcus pneumoniae
  misc_feature (1)..(95): tiling:Spneumo1:WAN024ALV; Cluster includes WAN024ENG R6.I G_511||||488830..488924|+|95 bp|Between spr0487 (+ strand) and spr0488 (+ strand)|S.pneumoniae|R6|NC_003098.1|IG|110
acgagaaagattcttgatttttcactaaaatcttgatagaatgtttatgttaaatccttgtcagagcagggattttttattgaaaggattttatc

SEQ ID NO: 361 - DNA, 97 bp, Streptococcus pneumoniae
  misc_feature (1)..(97): tiling:Spneumo1:WAN0249IA; Cluster includes WAN024E5K R6.I G_2027||||1840434..1840530|+|97 bp|Between spr1868 (- stra nd) and spr1869 (tgt) (- strand)|S.pneumoniae|R6|NC_003098 .1|IG|110
acgagtttattcttcctttcattgtacactttattctatcaaaaaaagaagaaaaatcctaagagaaaacttaggatttttttatatcaattccatt

SEQ ID NO: 362 - DNA, 156 bp, Streptococcus pneumoniae
  misc_feature (1)..(156): tiling:Spneumo1:WAN0249F8; Cluster includes WAN024E3X-rc R 6.IG_2190.1||||1975661..1975816|-|156 bp|Between spr1983 ( - strand) and H (transposase) (- strand)|S.pneumoniae|R6|N C_003098.1|IG-rc|110
acgataatcataattcctcctaaaattaggaataataaaggcaatagtttttgttttttcatgtaaaaaacctcacttttgttttctgctattttatgctaaaatattaaaaatcaaatttaattccaaagtttgtaactaaagggggagcgctac

SEQ ID NO: 363 - DNA, 67 bp, Streptococcus pneumoniae
  misc_feature (1)..(67): tiling:Spneumo1:WAN024ALH; Cluster includes WAN024EN8 R6.I G_533||||509622..509688|+|67 bp|Between spr0509 (pheT) (+ strand) and spr0510 (- strand)|S.pneumoniae|R6|NC_003098.1 |IG|110
acgatagtakgatacaaattccccctctagtttatgaacaytagaggggtgattttatataaaataa

SEQ ID NO: 364 - DNA, 285 bp, Streptococcus pneumoniae
  misc_feature (1)..(285): tiling:Spneumo1:WAN024B87; Cluster includes WAN023MAV 3132 19_268b||||135653..136057|+|405 bp|EGAD orf prediction|S.p neumoniae|R6|NC_003098.1|ORF|110
acgatgcaagtccgcaggttctccaactggagtaaagtcgaacttaaagtcacccgtacagacgattttcccttgaggagtatgaatgacaatccccaaaggctctggaatagagtgagtcgttctaaagaaagttgccttgagatttttaaaggtcaactcggtgttgtggttgatttcgtaaagtttggcgttgcgcaagaggccgtgttcttcgagtttcccacggatcaaagccaaggcaagcggtccagcataaatagggacatttgcttgcttgagtag

SEQ ID NO: 365 - DNA, 243 bp, Streptococcus pneumoniae
  misc_feature (1)..(243): tiling:Spneumo1:WAN0249MR; Cluster includes WAN024E87 R6.I G_1720||||1644378..1644620|+|243 bp|Between spr1671 (- str and) and spr1672 (czcD) (- strand)|S.pneumoniae|R6|NC_0030 98.1|IG|110
acgctaacctcctctcatttcattcactgaattcacgctattctaactcacttatcttattatataactttgagttgactccaagtcaagcattttgtatctaatcgaaaaatttttatcattaacaatcatatatctggagtttatacaatgctcttctcttaccaatttttgaaatatttaaataataaagaaattactctattccaaataagatagtacccaagtatttttcactttttt

SEQ ID NO: 366 - DNA, 71 bp, Streptococcus pneumoniae
  misc_feature (1)..(71): tiling:Spneumo1:WAN024DZE; Cluster includes WAN023HYX tRNA -Trp|tRNA-Trp|||1851004..1851074|-|71 bp|tRNA-Trp|S.pneumo niae|R6|NC_003098.1|RNA|110
acgggcatagtttaaaggtagaactaaggtctccaaaaccttcagtgtgggttcaattcctactgcccgtg

SEQ ID NO: 367 - DNA, 65 bp, Streptococcus pneumoniae
  misc_feature (1)..(65): tiling:Spneumo1:WAN024AQR; Cluster includes WAN024EPY R6.I G_327.1||||305821..305885|+|65 bp|Between spr0306 (+ stran d) and spr0307 (clpL) (+ strand)|S.pneumoniae|R6|NC_003098 .1|IG|110
acgtaaggtaaatgaaagccttactagaacacttatttaaagtaaaatagaaagaggtgggtcta

SEQ ID NO: 368 - DNA, 176 bp, Streptococcus pneumoniae
  misc_feature (1)..(176): tiling:Spneumo1:WAN024ADF; Cluster includes WAN024EIT-rc R 6.IG_890||||849153..849328|-|176 bp|Between spr0854 (- str and) and spr0855 (+ strand)|S.pneumoniae|R6|NC_003098.1|IG -rc|110
acktttccctccattagagcttgattttcactagtctagcataaaaaaattkggatgacaagtttttcttgatttttgaagcggtttcatatacaatgaaaccgtcacatttttgatttatgaactggaatgtgacaaccaaaacaagaccgtcaattgaaaggtaggttatctca

SEQ ID NO: 369 - DNA, 196 bp, Streptococcus pneumoniae
  misc_feature (1)..(196): tiling:Spneumo1:WAN024AAG; Cluster includes WAN024EHF R6.I G_993.2||||937942..938135|+|194 bp|Between spr0954 (+ stra nd) and spr0955 (+ strand)|S.pneumoniae|R6|NC_003098.1|IG| 110
actaagttatcttatcgttagctgtcaaaactggtaggttttgataggctggcgatatgatttttgggatattgtggacacaatatctgagctcgcaaagacckwacaagragaramtsagktsttkrrraakygtactgacawtgtrwggyagcctyacattgtcagacaagtataatgttgaaagaatggtaag

SEQ ID NO: 370 - DNA, 120 bp, Streptococcus pneumoniae
  misc_feature (1)..(120): tiling:Spneumo1:WAN0249K6; Cluster includes WAN024E6O-rc R 6.IG_1895.2||||1752196..1752315|-|120 bp|Between () (+ str and) and spr1778 (hlyX) (- strand)|S.pneumoniae|R6|NC_0030 98.1|IG-rc|110
actagaggcttttgtcaccaggcgtgacgaagcttttttcaattgatttcaaaagggaattatgccatggaaagaactctgccacaaactcgctccaaaagtttttaaagttatacgtat

SEQ ID NO: 371 - DNA, 99 bp, Streptococcus pneumoniae
  misc_feature (1)..(99): tiling:Spneumo1:WAN024AS4; Cluster includes WAN024EQP-rc R 6.IG_267||||243275..243373|-|99 bp|Between spr0246 (+ stra nd) and spr0247 (pulA) (- strand)|S.pneumoniae|R6|NC_00309 8.1|IG-rc|110
actagccctcctatagaaaaatcccccaagcattatagctcgggggattaattttygtacaatatttgttgtcctaataaacttgattaggatttttta

SEQ ID NO: 372 - DNA, 62 bp, Streptococcus pneumoniae
  misc_feature (1)..(62): tiling:Spneumo1:WAN024ACP; Cluster includes WAN024EIG-rc R 6.IG_931||||883904..883964|-|61 bp|Between spr0895 (+ stra nd) and spr0896 (dnaQ) (+ strand)|S.pneumoniae|R6|NC_00309 8.1|IG-rc|110
actatactattcacaaacaaaagaagccatcaggttagcatttaacctaaacagctccttga

SEQ ID NO: 373 - DNA, 433 bp, Streptococcus pneumoniae
  misc_feature (1)..(433): tiling:Spneumo1:WAN024APE; Cluster includes WAN0247S1-rc R 6.IG_61.2.1||||39839..40184|-|346 bp|Between spr0040 (thmA ) (+ strand) and spr0041 (IS1167) (- strand)|S.pneumoniae| R6|NC_003098.1|IG-rc|210
actatcttaccccaatcactaaacaaaaactggacttccttcccaaatgagcctatctccctcccaactgcactttttggataaaaaaatrgkcagaacaagagtcctgcccactaaaaatatgctattgaaaggaaawtgattttttactgtcaccctaggcaagcttgaaacaaataaatcattgatagtaacacttacgacatcctatttattacttcaatttctaatgtctctgctatttctaagctacctctggtatgatctattcctagtcagaatagataacaccgttctaaattacgattcatagttactccttttttgactcgttactataagactcctctttacatgcgcaaaataattttgattcagattcatcatttatagttttgattattttttaacagatttttctgttttcttctcc

SEQ ID NO: 374 - DNA, 77 bp, Streptococcus pneumoniae
  misc_feature (1)..(77): tiling:Spneumo1:WAN0249H9; Cluster includes WAN024E4Y R6.I G_2117||||1889900..1889976|+|77 bp|Between spr1910 (tyrS) (+ strand) and spr1911 (ctpC) (- strand)|S.pneumoniae|R6|N C_003098.1|IG|110
actattcaacatttatctataaacaaaggagttaacctcgagaaaggtaactcctttttgctgttaataactctcat

SEQ ID NO: 375 - DNA, 148 bp, Streptococcus pneumoniae
  misc_feature (1)..(148): tiling:Spneumo1:WAN024A6J; Cluster includes WAN024EFC R6.I G_1159||||1122564..1122711|+|148 bp|Between spr1121 (glnQ) (+ strand) and spr1122 (zwf) (+ strand)|S.pneumoniae|R6|N C_003098.1|IG|110
actcaaactgtaaggatttccttgcagtttttctacctcgtattggaatttttgatttttcggaaaattatgttagaattaagtttatgaaatgaggtttcctcatacctagcaagactaggaataaaaatagaaattaggtagctag

SEQ ID NO: 376 - DNA, 69 bp, Streptococcus pneumoniae
  misc_feature (1)..(69): tiling:Spneumo1:WAN024A9T; Cluster includes WAN024EH6-rc R 6.IG_1022.2||||969633..969695|-|63 bp|Between spr0983 (+ s trand) and spr0984 (obg) (+ strand)|S.pneumoniae|R6|NC_003 098.1|IG-rc|110
actcattatttcttctcactttaaaaaagggctgggaaatcccagtcactaaattttcttgaatctatt

SEQ ID NO: 377 - DNA, 886 bp, Streptococcus pneumoniae
  misc_feature (1)..(886): tiling:Spneumo1:WAN0249QC; Cluster includes WAN0247A0-rc R 6.IG_140.2||||126670..127502|-|833 bp|Between spr0119 (+ s trand) and spr0120 (+ strand)|S.pneumoniae|R6|NC_003098.1| IG-rc|110
actccatattttctcaaaataaaaagcacggggcagttaccactactgcccaaagtggttgattagagtcggcttctctaactccctatgttgtgcttattaggcttatcgcaagggaacagtttttagmtctgccaagccacatagtgtgcttactactatgtgtccatgtcaccatgaattrccgaacggtttaacgagaaagtatagtagattgaaacaagatgtgaacaaatcgattaggaaagtcaaattaatttctagaaatattttaacrgtcataacggactattccagattcaatctactatattayttttaggtttatcccaactcaattatgacatctttttttcaaaagtcaatatatctcactcttttcaacgacaagaaagaggctgataatcgaccaacctctgtttttagatacagttcaagtccaaactattctttatagaaaagtccgataaattcgagcaatagttaacatacttacaaatataactcccaaaatagataacactattttcacaaaactcagttccgaacctatgacatatatatgaaaaagaggggctagtcctacacatatatacaataagtagccaacaagttttatctcaccaattcctgcaaaaaaatgtttcatgtaacgattctccatttactccattaaatcaattttattttagactatcataacacaatcacctcttcaataaaaaccattggcgaaatactattctgaagcattgatagctcagatttctcagaatagagctgtcctaactatcgagcagctcaaatacatatatatgagcaattctaagcttagaattgccataaaataaatgttttcaggctattctaagtctttgactgctta

SEQ ID NO: 378 - DNA, 106 bp, Streptococcus pneumoniae
  misc_feature (1)..(106): tiling:Spneumo1:WAN0249HV; Cluster includes WAN024E5E R6.I G_2038||||1850636..1850741|+|106 bp|Between spr1879 (- str and) and () (- strand)|S.pneumoniae|R6|NC_003098.1|IG|110
actcccctacactttcttaatctaaataaaatttgaataactataattataccaaaaataatataaaaaaggaacgaagaataacaacgttcctaacactatacta

SEQ ID NO: 379 - DNA, 135 bp, Streptococcus pneumoniae
  misc_feature (1)..(135): tiling:Spneumo1:WAN024AFX; Cluster includes WAN024EK4 R6.I G_779||||749752..749886|+|135 bp|Between spr0755 (- strand ) and spr0756 (parE) (+ strand)|S.pneumoniae|R6|NC_003098. 1|IG|110
actcctattatatcatgaattgggaaagaaaagcagagaatctctgctgaaattgtcacatcggagaaagaaaaattttgcaaaatccttggaaaacctgtagaatagtaaagatgaacgaataggaggttcctt

SEQ ID NO: 380 - DNA, 113 bp, Streptococcus pneumoniae
  misc_feature (1)..(113): tiling:Spneumo1:WAN0249EY; Cluster includes WAN02471G R6.I G_228.1||||205012..205089|+|78 bp|Between spr0207 (rpmD) ( + strand) and spr0208 (rplO) (+ strand)|S.pneumoniae|R6|NC _003098.1|IG|220
actcgcctatacgatgtcatcatagatgactatatswagttttaggggatgtgyacwgtrcacatcccctaaaactwsatatagtcatctatgatgacatcgtataggcgagt

SEQ ID NO: 381 - DNA, 232 bp, Streptococcus pneumoniae
  misc_feature (1)..(232): tiling:Spneumo1:WAN024F7D; Cluster includes WAN0243QI spr1 401||15903444|NP_358994.1|1379194..1379388|+|195 bp|Hypoth etical protein|S.pneumoniae|R6|NC_003098.1|ORF|111
actcgtctattttaccatctattaagctttattacaagtgaatataagaatactcttcgaaaatctcttcaaaccaygtcagctttatctgcaacctcaaagctgtgctttgagcaaccaattctatttctcccttcaaacaaaaccgattttgaaagtgaaacagttcttactttttcagtcacaaatgaytagagtttccgaaattttacaattttcaaataaactctga

SEQ ID NO: 382 - DNA, 101 bp, Streptococcus pneumoniae
  misc_feature (1)..(101): tiling:Spneumo1:WAN024ARS; Cluster includes WAN024EQK-rc R 6.IG_272||||255466..255566|-|101 bp|Between spr0251 (polC) (+ strand) and spr0252 (+ strand)|S.pneumoniae|R6|NC_0030 98.1|IG-rc|110
actctcaccctctttccatagactattttaacaaaaaagaaagctaatgtaaatctattggatatacgttagcctcttytaatagattattaagcaatttt

SEQ ID NO: 383 - DNA, 77 bp, Streptococcus pneumoniae
  misc_feature (1)..(77): tiling:Spneumo1:WAN0249ZJ; Cluster includes WAN024E7N R6.I G_1819||||1692406..1692482|+|77 bp|Between RNA (ribosomal) (- strand) and RNA (ribosomal) (- strand)|S.pneumoniae|R6 |NC_003098.1|IG|440
actctgagtaatacctactcaaaattgaatatctattcaayttaagaaaaccgttcgctttcatattctcagttact

SEQ ID NO: 384 - DNA, 68 bp, Streptococcus pneumoniae
  misc_feature (1)..(68): tiling:Spneumo1:WAN0249JD; Cluster includes WAN024E6A R6.I G_1936.2.2||||1788987..1789054|+|68 bp|Between spr1818 (- strand) and () (- strand)|S.pneumoniae|R6|NC_003098.1|IG|1 10
actgattccctcttaatgtatataatatctagttttaaaaatacacactcacatatctctgtaatgaa

SEQ ID NO: 385 - DNA, 122 bp, Streptococcus pneumoniae
  misc_feature (1)..(122): tiling:Spneumo1:WAN024AGI; Cluster includes WAN024EKC-rc R 6.IG_750.2||||726725..726846|-|122 bp|Between spr0726 (- s trand) and spr0727 (glnP) (+ strand)|S.pneumoniae|R6|NC_00 3098.1|IG-rc|110
actgctttctaaaatagaatactgtatgattataacatgttttgaattaaaatttaaattttttatccaatttatttaaaaatmtttaaactagcagaattagcgagaaatcttagtttttt

SEQ ID NO: 386 - DNA, 1561 bp, Streptococcus pneumoniae
  misc_feature (1)..(1561): tiling:Spneumo1:WAN024DVW-3; Cluster includes WAN0243AW sp r1965||15904006|NP_359556.1|1953453..1956569|-|3117 bp|Hyp othetical protein|S.pneumoniae|R6|NC_003098.1|ORF|111
actggataagcaaaaattattccatcaatcctgtagataatgactttaggacaacaacacttacattaaaagggcatactggtcataaacctcagataaatataagtggcgataaaaatcattatacttatacagaaaattgggatgagaatacccatgtttataccattacggttaatcataatggaatggtagagatgtctataaatactgargggacaggyccagtcyctttcccaacaccagataaatttaatgatggtaatttgaatatagcatatgcaaaaccaacaacacaaagttctgtagattacaatggagaccctaatagagctgtggatggtaacagaaatggtaattttaactctggttckgtaacacacactagggcagataatccctcttggtgggaagtcgatttgaaaaaaatggataaagttgggcttgttaaaatttataatcgcacagatgctgagactcaacgtctatctaattttgatgtgattctatatgacaataatagaaacgaagttgctaagaaacatgttaataatttgtcrggtgaatctgttagtctagatttcaaagaaaaaggagcaaggtatattaaagttaaattactaacgagtggagtgcctttgagtttagcagaagtagaggtttttagagaatcagatggtaagcaatctgaagaggatatagataaaataacagaagataaagtagtctctacaaataaggtagctactcaaagttcaaccaattatgagggtgtagctgctttagcagttgatggtaataaagatggagattacggacatcattcggtgactcatactaaggcagattctaacgcttggtggcaggtcgatctgggagaagagtttacggtttctaaagttgatatttataatagaacagatgccgaacctcagcgtttatctaattttgatgttatttttctatcttcatcaggagaagaagtttttagaagacattttgataaagtagttgatggtttgttatctttaaaagtaccttctgtaggggctaagctagtcaaaatagaattaaaatcagcagctattccgttaagtttagcggaagttgaagtctatggttcaaagagaactccgaagaaactttctaatattgcattaacmaaagaaactcgacagagttcaacggattacaatggtttttctcgtctagcagttgatggaaataaaaacggagattatggtcatcattcagtgactcataccaaagragattctccttcatggtgggagatagatttagcacaaaccgaagaattagaaaagttaattatttataatagaacagatgctgaaattcagagattatcaaattttgatattattatatatgattcaaatratyatgaagtttttamacaacatattgacagtttagaaagcaataatctatccatagacttaaaaggrctgaagggaaaaaaggttagaatttctttgagaarcgcaggaattcctttaagtttrgcagaggtagaggtttatacttataagtaactaat

SEQ ID NO: 387 - DNA, 98 bp, Streptococcus pneumoniae
  misc_feature (1)..(98): tiling:Spneumo1:WAN024AJI; Cluster includes WAN024EM4 R6.I G_621.1||||609593..609690|+|98 bp|Between spr0597 (rsuA) ( - strand) and spr0598 (typA) (+ strand)|S.pneumoniae|R6|NC _003098.1|IG|110
actgtgcctatcttatcataagtcgctygctttgaaaaggcttgacgtgaaaagaaaagcrgagtgaaaacatttacacttgcttgagttatgttatt

SEQ ID NO: 388 - DNA, 64 bp, Streptococcus pneumoniae
  misc_feature (1)..(64): tiling:Spneumo1:WAN0249K3; Cluster includes WAN024E6M R6.I G_1902||||1758554..1758617|+|64 bp|Between spr1784 (- stra nd) and spr1785 (asnA) (- strand)|S.pneumoniae|R6|NC_00309 8.1|IG|110
actgtttattataccaaattatagacaaaaagagaaagaaaaccgaaccttgcggttcgattct

SEQ ID NO: 389 - DNA, 81 bp, Streptococcus pneumoniae
  misc_feature (1)..(81): tiling:Spneumo1:WAN024ABS; Cluster includes WAN024EI4 R6.I G_951||||903620..903700|+|81 bp|Between spr0915 (mscL) (- strand) and spr0916 (mesH) (- strand)|S.pneumoniae|R6|NC_0 03098.1|IG|110
actgttttcctttcaatgtttcgtgtttcattgtatcctaaatcattatagaaggcaattaaaaggctcataaatggagca

SEQ ID NO: 390 - DNA, 155 bp, Streptococcus pneumoniae
  misc_feature (1)..(155): tiling:Spneumo1:WAN024A6X; Cluster includes WAN024EE5 R6.I G_1249.1||||1204662..1204816|+|155 bp|Between spr1205 (- s trand) and spr1206 (- strand)|S.pneumoniae|R6|NC_003098.1| IG|110
acttaatatatctatagctagacagacttatttaaataaaaagggagaatcctttggattctccccatataagcactaacattccaacgtgcacatattggaacgacatccataactccagagaatctctaaagtttacaatttaaatgaattaa

SEQ ID NO: 391 - DNA, 75 bp, Streptococcus pneumoniae
  misc_feature (1)..(75): tiling:Spneumo1:WAN0249IH; Cluster includes WAN024E5N R6.I G_2023||||1835500..1835574|+|75 bp|Between spr1864 (cglA) (- strand) and spr1865 (- strand)|S.pneumoniae|R6|NC_00309 8.1|IG|110
acttacctcctcacctatactattcgcaaagagttagaaaaataaaaaaagcaactccaaaaaagttacttttct

SEQ ID NO: 392 - DNA, 342 bp, Streptococcus pneumoniae
  misc_feature (1)..(342): tiling:Spneumo1:WAN024AJ9; Cluster includes WAN024ELY-rc R 6.IG_631||||620574..620915|-|342 bp|Between spr0607 (+ str and) and spr0608 (+ strand)|S.pneumoniae|R6|NC_003098.1|IG -rc|110
acttagacttagagatatataacatcctaagrctcctgctcctaatactaatactgttttattctgtattttattatactcttcattataaaataacgaatagtaacctttagttctagaatatctactatcaatatctatctcatccgaaattaaaatttgttcatttatagttcaaatgttagtttactgcctaatacttcttctatctctaatagttccttacaactattaaatagatcgttgataaattcttgcgaaatttgaggttctatagctatttcccgcatactccgaccacgtaaatacattataccttcttttttataagcaaaaacataa

SEQ ID NO: 393 - DNA, 199 bp, Streptococcus pneumoniae
  misc_feature (1)..(199): tiling:Spneumo1:WAN024ABB; Cluster includes WAN024EHU-rc R 6.IG_971.1||||918891..919089|-|199 bp|Between spr0932 (+ s trand) and spr0933 (+ strand)|S.pneumoniae|R6|NC_003098.1| IG-rc|110
acttagcaaatttatcctaaaattttttgttgcctttatcaatcatttcaacgctcctttaaatataaaaatgatcctatcaatctttatattgagcctattttctaattgataccttgcaagaaaggaataatagctgttcctataccaagtaggaatgtaataaatgcagaaagtcatatactgtcattcttttcta

SEQ ID NO: 394 - DNA, 52 bp, Streptococcus pneumoniae
  misc_feature (1)..(52): tiling:Spneumo1:WAN0249WJ; Cluster includes WAN024EAF R6.I G_1545||||1478398..1478449|+|52 bp|Between spr1498 (- stra nd) and spr1499 (gpmA) (- strand)|S.pneumoniae|R6|NC_00309 8.1|IG|110
acttccatactaacataaaaagcctagaaatcaatyctagrcttacaatttt

SEQ ID NO: 395 - DNA, 121 bp, Streptococcus pneumoniae
  misc_feature (1)..(121): tiling:Spneumo1:WAN024A5N; Cluster includes WAN024EES R6.I G_1199||||1162213..1162333|+|121 bp|Between spr1158 (- str and) and spr1159 (+ strand)|S.pneumoniae|R6|NC_003098.1|IG |110
acttcctccataaagatttactctcttgattataccatgaaaaggctacaaatcagcacaccaaactttgtaattaaaattcaaaattttaacatatttactatgatagttttatttttta

SEQ ID NO: 396 - DNA, 69 bp, Streptococcus pneumoniae
  misc_feature (1)..(69): tiling:Spneumo1:WAN024AEU; Cluster includes WAN0247J0-rc R 6.IG_110.2||||96725..96793|-|69 bp|Between spr0089 (- stra nd) and spr0090 (- strand)|S.pneumoniae|R6|NC_003098.1|IG- rc|110
acttctagttttagctagaagttttttatatataaaaattttacacatttctcttgacagggctttctt

SEQ ID NO: 397 - DNA, 55 bp, Streptococcus pneumoniae
  misc_feature (1)..(55): tiling:Spneumo1:WAN0249EJ; Cluster includes WAN024E3I R6.I G_2220||||2007255..2007309|+|55 bp|Between spr2013 (comFA) (- strand) and spr2014 (+ strand)|S.pneumoniae|R6|NC_0030 98.1|IG|110
acttctttattcgtaaaaactagcactttagatgattttttagtacaattaaatc

SEQ ID NO: 398 - DNA, 152 bp, Streptococcus pneumoniae
  misc_feature (1)..(152): tiling:Spneumo1:WAN0249XO; Cluster includes WAN024EB8-rc R 6.IG_1486.1||||1423525..1423676|-|152 bp|Between spr1439 ( codY) (- strand) and spr1440 (- strand)|S.pneumoniae|R6|NC _003098.1|IG-rc|110
acttgtcaatagaaaaggaacaatttaattaaaaatattctggtttttaattaaattgtaagtcaatgcaagtcaataaggaattttcagataattattgaaaaagagacgtttttatgttataatgatagcgattaaattcgaggtgaaaa

SEQ ID NO: 399 - DNA, 105 bp, Streptococcus pneumoniae
  misc_feature (1)..(105): tiling:Spneumo1:WAN0249YI; Cluster includes WAN024EBR-rc R 6.IG_1427||||1367294..1367398|-|105 bp|Between transporter (PST) (- strand) and spr1384 (murE) (+ strand)|S.pneumoni ae|R6|NC_003098.1|IG-rc|110
actttctattgtaaaccgaaagtcgtaaatttacaagtaacaaggaaaagtttataatggaagataaggagtttttcctagttatcaaaattgaatgaggaatct

SEQ ID NO: 400 - DNA, 75 bp, Streptococcus pneumoniae
  misc_feature (1)..(75): tiling:Spneumo1:WAN0249IG; Cluster includes WAN024E5N-rc R 6.IG_2023||||1835500..1835574|-|75 bp|Between spr1864 (cgl A) (- strand) and spr1865 (- strand)|S.pneumoniae|R6|NC_00 3098.1|IG-rc|110
agaaaagtaacttttttggagttgctttttttatttttctaactctttgcgaatagtataggtgaggaggtaagt

SEQ ID NO: 401 - DNA, 180 bp, Streptococcus pneumoniae
  misc_feature (1)..(180): tiling:Spneumo1:WAN0249MU; Cluster includes WAN024E89-rc R 6.IG_1714||||1638437..1638616|-|180 bp|Between spr1665 (dp nC) (- strand) and spr1666 (- strand)|S.pneumoniae|R6|NC_0 03098.1|IG-rc|110
agaaaggtgagtgggataaatttatctcactcatttttaatttatgagatatgttagaaggaaatataaaagagagtgatgaaatacaaatgtaataggtacatatatgtggtatactagttatagtagattttaattgcttatatcgagtgagttctcatattagtgaggaatttttaa

SEQ ID NO: 402 - DNA, 199 bp, Streptococcus pneumoniae
  misc_feature (1)..(199): tiling:Spneumo1:WAN024A38; Cluster includes WAN024ED9-rc R 6.IG_1323.1||||1274526..1274724|-|199 bp|Between spr1279 ( - strand) and spr1280 (- strand)|S.pneumoniae|R6|NC_003098 .1|IG-rc|110
agaaatataagcaataaaaaytcgtttaaaagatcytactaaagctaatactaaataaaaataaaagagtaaactaggaagtttatttcaaacaacctaaaatactgattttcggctgaagataatactggagtgcaaattaatggggttataataaatagctgatagcttgtgttggttttggattttttaagagtag

SEQ ID NO: 403 - DNA, 94 bp, Streptococcus pneumoniae
  misc_feature (1)..(94): tiling:Spneumo1:WAN0249YC; Cluster includes WAN024EBO-rc R 6.IG_1437.1||||1374276..1374369|-|94 bp|Between spr1393 (- strand) and spr1394 (rpsR) (- strand)|S.pneumoniae|R6|NC_ 003098.1|IG-rc|110
agaaattaaaataaaaatgataaactttttgaaaataggggatttgcctactttatgatataatggaaagagttagattgaaagaggtagtgag

SEQ ID NO: 404 - DNA, 244 bp, Streptococcus pneumoniae
  misc_feature (1)..(244): tiling:Spneumo1:WAN0249SN; Cluster includes WAN024EQ4 R6.I G_307.2.1||||289109..289352|+|244 bp|Between spr0286 (hysA ) (+ strand) and spr0287 (kdgA) (- strand)|S.pneumoniae|R6 |NC_003098.1|IG|110
agaaattatccagtggatgatttcttcacgagtatgaaaatttgagaactagtaaagcatgatatatagtaaaatgaaataagaacagaacaaatcgatcaggacagtcaaatcgatttttaacaatgttttagaagtagatgtgtactattccagtttcaatctactatagcactagataaattgagtgtaaaagaatatgaggatccctttagggatagtggtaagtaataccaaagtctct

SEQ ID NO: 405 - DNA, 92 bp, Streptococcus pneumoniae
  misc_feature (1)..(92): tiling:Spneumo1:WAN0249ZQ; Cluster includes WAN024ECG-rc R 6.IG_1377.1.2||||1321173..1321264|-|92 bp|Between spr1333 (pgdA) (- strand) and spr1334 (- strand)|S.pneumoniae|R6|N C_003098.1|IG-rc|110
agaaattccatagatagaaaactacataatctctacagatacggatgttggagttgatgtaagatgctttggcttgctagaggaattgtgga

SEQ ID NO: 406 - DNA, 61 bp, Streptococcus pneumoniae
  misc_feature (1)..(61): tiling:Spneumo1:WAN024AI6; Cluster includes WAN024ELC R6.I G_676.1||||659377..659437|+|61 bp|Between spr0652 (- stran d) and spr0653 (+ strand)|S.pneumoniae|R6|NC_003098.1|IG|1 10
agaaattctccatctttgtcagttatacattgacaaaggttctgtctttttttacaattat

SEQ ID NO: 407 - DNA, 2043 bp, Streptococcus pneumoniae
  misc_feature (1)..(2043): tiling:Spneumo1:WAN0249TD; Cluster includes WAN024EJ9-rc R 6.IG_846.2||||812860..813000|-|141 bp|Between spr0810 (+ s trand) and spr0811 (- strand)|S.pneumoniae|R6|NC_003098.1| IG-rc|120
agaactattataccatattttgtttcgcaggaagtctattgaaaaatctccagactggagaactcacggatagttcctaatctggagatttcttatttgcacttttcttgtacaactttagtccatggtaaataagcctctaaaacctctttgtttacgagagtttcctcgtttggaagacattctagaagataggatagatatttctcgctatttaattgatgacgtttagctgtttccaacaaactcataataatagctcttgctttagctccttcaaaactttgagaaaataaccaccctcgcttttttaaactgagcttaggctaaaagagtccactggactcttttactccgtcccataaccaatgatttaatggcgcgttcagctagattattggaaaggaccagatgtccgtctttcaaaatggtcttaaaggtttcttcatacttgaggctgtattcaattgcccttcctagttttgaacctgctaaaactgactgacgccggcactaagcaaagaagtcttccattaagggctggagatgttcttgacgtttctgtagtcgttcatcagctggcaaagcctcccagtctctttccaaggaaaataactgatcacaataagctaaacctttagctcctaaggatgatttatccgcttgcttgggggggcgcttcaaaaaacttccttctcacatgcgcccaacatccaacaagttcagcttcttccagttgacgataagcagacgagcggttcgaagtttaccaagcttagcgtcgccttgctcctaaaccttggactgctatcgcataggcagaactagaggactaaagtcctaagttactgccgcaaaatatcacaatgcacatagccagaataatctcctaggaattcttgtactactgaaccacttcgacactgatcatggtggtaaagcgtaatcccttgtttctctgctttacctgacaaaaaagtccaatagtaagtcagctgactatcactctctagcaccctataagaagtttcatccgcatgaagtaagggctgagtcaatagtctctctcgcaagaggttataaaggggctccaaatagtattgactcgccttgatatgccaattagagatttccttacgtgtgattggtaaacccatcctagcccaatcttcttcttggcgataattgggtaccttcagattaaacttctgatggatggtgtgagcgataatagaagctgagccaaagttatgcgctaaaggggctttaggaataggagatttcacaagcttatccagatgattatcttttactcgttatggacaatgctatatggcataaatcaagtaccttaaagattccgactaatattggctttgcatttattcctccatacacaccagagatgaaccccattgaacaagtgtggaaagagattcgtaaacgtggatttaagaataaagccttttaaactttggaagatgtcatgaatcaactccaagatgttatacaaggactggagaaggaggtgataaagtccatcgttaatcggagatggactagaatgctttttgaaagcagatgagtataaaaagaaagtcctcatttcawtaraaawcwcgmstttmtkatgswtttatartaaaatgaaataagaacaggacaaatcgatcaggayagtmaaatcgatttctaacaatgttttagaagyakaggtgtmctattctagttycaatcyactatakttttggagtgatagaaaagcccttcataagccagtctacttgttctggtgtgagagctttgacatccttttctgtacttagccaaatcaatctgccgttctcaaagcgtttatatagtagccaaaatccttgaccatcccagtaaaggactttaaagcggtctttacgtccaccacaaaagagaaagacttgaccggagaaaggatccaattcaaagtgggttttaaccagataagccagtgaatcgattccttgtctcatatcagttttcccacacacgagatagacctcccctagg

SEQ ID NO: 408 - DNA, 312 bp, Streptococcus pneumoniae
  misc_feature (1)..(312): tiling:Spneumo1:WAN0249RP; Cluster includes WAN024EQJ-rc R 6.IG_276||||257778..258089|-|312 bp|Between spr0255 (+ str and) and spr0256 (rsuA) (+ strand)|S.pneumoniae|R6|NC_0030 98.1|IG-rc|110
agaactattatatcatatcaaaaggaggctrgtacaatgaccaacctccttttcgtttcatactcttcaaaaatctcttcaaaccgcgtcaacgtcgccttgccgtatatatgttactgacttcgtcagttctatctgcaacctcaaaacagtgtttttagctgacttcgtcagttctatctgcaacctcaaaacagtgtttttagctgacttcgtcagttctatctgcaacctcaaagcagtgctttgagcaacctgcggctagtttcctagtttgctctttgattttcattgagtatcagatttaggaaa

SEQ ID NO: 409 - DNA, 141 bp, Streptococcus pneumoniae
  misc_feature (1)..(141): tiling:Spneumo1:WAN0249M2; Cluster includes WAN024E7R-rc R 6.IG_1758.1.2||||1682499..1682639|-|141 bp|Between spr1709 (gtfA) (- strand) and spr1710 (msmG) (- strand)|S.pneumon iae|R6|NC_003098.1|IG-rc|110
agaagagctcatggaatctatagtctttgacacagaggaagagttyagcttgttgataattctatgyagaaaacaagaaagtagtactttgtttatcacagtctatattagtacgagtttgatgataaatagagatttaaa

SEQ ID NO: 410 - DNA, 395 bp, Streptococcus pneumoniae
  misc_feature (1)..(395): tiling:Spneumo1:WAN0249QV; Cluster includes WAN024EH5 R6.I G_1027.1.1.1.1.2||||972654..973037|+|384 bp|Between spr098 8 (IS1167) (- strand) and spr0989 (murZ) (+ strand)|S.pneu moniae|R6|NC_003098.1|IG|110
agaagctaaaaaatcccgtgccwcatcaracacgggattttgtggtacgacrggcatgtatagcraactgaatctggaatagcacagcatatcttctaaaatatagtaaaatgaaatgagaacagracaaatcgatcaggacagtaaaatcgatttctaacaatgttttakaagcagagrtgtactaktctagtttcaatcaactatattgttataaattgatttgaatttcaaaattaaattgtttgattcttatttcaatttgttatagtatatctgatgtcaaagttctcggcgagtcaaatagcgattcccaagcctgactatcgtgaggtagyggattaaaayggtctggggatagaccgttttaagtctgacgctggaaataagaatcg

SEQ ID NO: 411 - DNA, 253 bp, Streptococcus pneumoniae
  misc_feature (1)..(253): tiling:Spneumo1:WAN0249NW; Cluster includes WAN024E8S R6.I G_1671.1.1||||1598328..1598580|+|253 bp|Between spr1622 (- strand) and spr1623 (+ strand)|S.pneumoniae|R6|NC_003098. 1|IG|110
agaataggtatagcatgatataacgacttttcctaaaatcttttatttcgtataataacactacggagacaatatataaacaattttcttattttaccgtctattgagggcgtgaatacagaatcaaattcaagtctaaagattatatttttaattttaaaaattatataatagcaacaattaaagaatttgattttttaaaattatataataataacaatcgaaataattgacttttctatattaaagttat

SEQ ID NO: 412 - DNA, 164 bp, Streptococcus pneumoniae
  misc_feature (1)..(164): tiling:Spneumo1:WAN0249WE; Cluster includes WAN024EAD-rc R 6.IG_1548.2.1||||1480148..1480311|-|164 bp|Between spr1501 (- strand) and spr1502 (ileS) (- strand)|S.pneumoniae|R6| NC_003098.1|IG-rc|110
agaatcaaagagaaacttagcaagctaacagtagtaagataaaataggaatttgatattagggataagattggtaaatagtgtaatatttttacaacaataaatttatatagttatttctggtttctgaaaagtattatattttatttcatattatacaaattt

SEQ ID NO: 413 - DNA, 64 bp, Streptococcus pneumoniae
  misc_feature (1)..(64): tiling:Spneumo1:WAN0249K2; Cluster includes WAN024E6M-rc R 6.IG_1902||||1758554..1758617|-|64 bp|Between spr1784 (- s trand) and spr1785 (asnA) (- strand)|S.pneumoniae|R6|NC_00 3098.1|IG-rc|110
agaatcgaaccgcaaggttcggttttctttctctttttgtctataatttggtataataaacagt

SEQ ID NO: 414 - DNA, 156 bp, Streptococcus pneumoniae
  misc_feature (1)..(156): tiling:Spneumo1:WAN0249LM; Cluster includes WAN024E7G-rc R 6.IG_1838||||1704326..1704480|-|155 bp|Between spr1723 (gr oES) (- strand) and spr1724 (ssbB) (- strand)|S.pneumoniae |R6|NC_003098.1|IG-rc|110
agaattaaaaagtctgagttggtctcaggctttttatcttgagaaagtcagacttttttcttgaytatttctgaccaagtgatacaatagaaytatgaattagcactcmagttcaaagagtgctaataatatctatctcattatggaggaaatcag

SEQ ID NO: 415 - DNA, 62 bp, Streptococcus pneumoniae
  misc_feature (1)..(62): tiling:Spneumo1:WAN0249OE; Cluster includes WAN024E93-rc R 6.IG_1651.1||||1581189..1581250|-|62 bp|Between spr1605 (- strand) and spr1606 (pepF) (- strand)|S.pneumoniae|R6|NC_ 003098.1|IG-rc|110
agaattcaatattgagtcatttaagactgcctttttgaacagttgctagaaatgtagaggta

SEQ ID NO: 416 - DNA, 59 bp, Streptococcus pneumoniae
  misc_feature (1)..(59): tiling:Spneumo1:WAN024A25; Cluster includes WAN024ECM R6.I G_1368||||1311992..1312050|+|59 bp|Between spr1324 (apbE) (+ strand) and spr1325 (+ strand)|S.pneumoniae|R6|NC_00309 8.1|IG|110
agacaactgtttcaatggaattttaaaattgtattatgtaaaaagagaaaggaaatctc

SEQ ID NO: 417 - DNA, 120 bp, Streptococcus pneumoniae
  misc_feature (1)..(120): tiling:Spneumo1:WAN024AL4; Cluster includes WAN024EN3-rc R 6.IG_539.2||||515577..515695|-|119 bp|Between spr0515 (met F) (+ strand) and spr0516 (pnpA) (+ strand)|S.pneumoniae|R 6|NC_003098.1|IG-rc|110
agacagtttatcttttttacacagcttttcggccgtgttcaattacacaagatattttggacggttcggcttgccgaacatttctgtagaaaaataggaaggtgacgtcgcactcgacga

SEQ ID NO: 418 - DNA, 110 bp, Streptococcus pneumoniae
  misc_feature (1)..(110): tiling:Spneumo1:WAN0249Z7; Cluster includes WAN024EC5 R6.I G_1395||||1335367..1335476|+|110 bp|Between spr1351 (pgm) (+ strand) and spr1352 (bta) (+ strand)|S.pneumoniae|R6|NC _003098.1|IG|110
agacctataaaagatgagaccaaccaacctcatcttttttcgtatcaaatctaagcaattttagaaactttatggcatactagacttatcaatgaaagcgaggtaatctc

SEQ ID NO: 419 - DNA, 105 bp, Streptococcus pneumoniae
  misc_feature (1)..(105): tiling:Spneumo1:WAN0249PM; Cluster includes WAN024E79-rc R 6.IG_1860.2.1.2||||1717894..1717998|-|105 bp|Between spr17 45 (+ strand) and spr1746 (- strand)|S.pneumoniae|R6|NC_00 3098.1|IG-rc|110
agacctgatattatgcgttttttgcttttcaaaactttttgcccagtcttygtttttatcctctagtcacttgatttgtttcaggtggttttttagtatagtara

SEQ ID NO: 420 - DNA, 367 bp, Streptococcus pneumoniae
  misc_feature (1)..(367): tiling:Spneumo1:WAN024FKJ-3; Cluster includes WAN0243R6 sp r1377|metB|15903420|NP_358970.1|1360403..1361497|-|1095 bp |Cystathionine gamma-synthase|S.pneumoniae|R6|NC_003098.1| ORF|111
agaccttrtctcttcgtatggagcgctcaacagctaacgcccaagaagtggttgcctttttgaaggattctccagcagttaaggaagttctctacactggtcgtggaggcatgatttcctttaaagtagccgatgaaacacgcattcctcatattttgaacagtctcaaggtcttctcttttgcggaaagtttgggyggagtggaaagtcttattacttatccaacgactcaaactcatgctgatattccagcagargtacgccattcttatggtttgacagatgacctcttgcgtttgtctattgggattgaggatgctagagatttgattgcagatttgcgccaagccwtagaaggataactaat

SEQ ID NO: 421 - DNA, 120 bp, Streptococcus pneumoniae
  misc_feature (1)..(120): tiling:Spneumo1:WAN0249ME; Cluster includes WAN024E7Y-rc R 6.IG_1731.1||||1654514..1654633|-|120 bp|Between spr1682 ( pepA) (- strand) and spr1683 (+ strand)|S.pneumoniae|R6|NC _003098.1|IG-rc|110
agagaatactatccttttctaagatagagcaggactaagatactaacttagaaatccaccttcccactatccttctcctataaaaagtggtaaaatggatgaaagaaagaaggaactgaa

SEQ ID NO: 422 - DNA, 159 bp, Streptococcus pneumoniae
  misc_feature (1)..(159): tiling:Spneumo1:WAN0249X3; Cluster includes WAN024EAU R6.I G_1516.2.2||||1451273..1451431|+|159 bp|Between spr1469 (+ strand) and spr1470 (+ strand)|S.pneumoniae|R6|NC_003098. 1|IG|110
agagacaagtcacttagtccctttctactagagagtgcgtggttgctggaaacgcataggaagtctaaactgatactactcttgagttttttatgaaaacataaaacggtggccacgttagagccgatcagaggtgtccctctcttttgaggtacataa

SEQ ID NO: 423 - DNA, 244 bp, Streptococcus pneumoniae
  misc_feature (1)..(244): tiling:Spneumo1:WAN0249QD; Cluster includes WAN024EQ4-rc R 6.IG_307.2.1||||289109..289352|-|244 bp|Between spr0286 (h ysA) (+ strand) and spr0287 (kdgA) (- strand)|S.pneumoniae |R6|NC_003098.1|IG-rc|110
agagactttggtattacttaccactatccctaaagggatcctcatattcttttacactcaatttatctagtgctatagtagattgaaactggaatagtacacatctacttctaaaacattgttaaaaatcgatttgactgtcctgatcgatttgttctgttcttatttcattttactatatatcatgctttactagttctcaaattttcatactcgtgaagaaatcatccactggataatttct

SEQ ID NO: 424 - DNA, 661 bp, Streptococcus pneumoniae
  misc_feature (1)..(661): tiling:Spneumo1:WAN0249SC; Cluster includes WAN024EJ7 R6.I G_851||||818002..818662|+|661 bp|Between spr0815 (- strand ) and spr0816 (cad) (+ strand)|S.pneumoniae|R6|NC_003098.1 |IG|110
agaggtgttttcttatgcctacaagagctatcagctaattgaaccatctaatttttaggagggctgggtggctaacttcattatagaactttcatttacgaacatatagtaaaatgaaacaagaacagaacaaatcgatcaggacagtaaaatctatttctaacaatgttttagaagcagaggtgtactattctagtttcaatctattatatttttgttttttatcaaaaaatactttacaagttcttaaaaacatgatatagtaataaagcttagaaaatgagatgatgttttctagcaaatataaacccgagtaaaaaatgcytacggacaggcagggttgaatgccgaagcgtggttgaaaagccacattattgatagggttaaaagcctacttttataagttgatgttaggacacttgtcctaattcataaatttttagtgtggtgaaagcacacgtcatcttgtgaaacgatcaataaagtacgtaatatttgctactagagagttaggaaacatcgggaacagacatactcaacagaaaccaaaataaacacgtcagaagattgcagagcaggtgaaaacctgctcttttttcatgagtcaacctttagttccttagttttcataaggtcctaaaaatattgaaaggagtatgtt

SEQ ID NO: 425 - DNA, 540 bp, Streptococcus pneumoniae
  misc_feature (1)..(540): tiling:Spneumo1:WAN024FEJ-M; Cluster includes WAN0243LG sp r1584||15903626|NP_359176.1|1564646..1566259|-|1614 bp|Con served hypothetical protein|S.pneumoniae|R6|NC_003098.1|OR F|231
agargaaaacttgaccagggagattgccagtcgcattcgcgaagctgascaagaggtcaaggaacgttctgacaaaatggcyaaggacatcttggttcaagctatgcaacgtatcgctggtgaatatgtagcggagtcaacaaactcaacagttcatctgccagacgatactatgaagggacgcattattggtcgtgaaggtcgtaacattcgtacctttgaaagtttgacaggggtcgatgtgattatcgacgatacaccagaagtggtgaccttgtcaggatttgatccgattcgtcgtgagattgcccgtatgactatggaaatgttgctcaaagatggtcgtatacatccagctcgtatcgaagagttggttgagaaaaaccgtcaagagattgacaataagattcgtgaatacggtgaggctgctgcctatgaaattggtgcgccaaaccttcatccagacttgatgaagattatgggacgtttgcagttccgtacttcatatggacaaaatgttttgcgccattcgattgaggt

SEQ ID NO: 426 - DNA, 148 bp, Streptococcus pneumoniae
  misc_feature (1)..(148): tiling:Spneumo1:WAN024APW; Cluster includes WAN0247T0-rc R 6.IG_55||||35675..35810|-|136 bp|Between spr0034 (- strand ) and spr0035 (aspC) (+ strand)|S.pneumoniae|R6|NC_003098. 1|IG-rc|110
agatacctcctactttcaaaacgtatctctattatactacaaaagccccccgaccgcaaaaatacattagagaatagctttccactttctattttacttttcctgtttataggtctataatggtaatagattttatttggaggttttt

SEQ ID NO: 427 - DNA, 73 bp, Streptococcus pneumoniae
  misc_feature (1)..(73): tiling:Spneumo1:WAN024A9Q; Cluster includes WAN024EH4-rc R 6.IG_1027.1.1.1.2||||973158..973230|-|73 bp|Between spr098 8 (IS1167) (- strand) and spr0989 (murZ) (+ strand)|S.pneu moniae|R6|NC_003098.1|IG-rc|110
agatataaggrcgttaaaaggttacagtgaaaatagaaaatcttagtacgaattcaattactctcgtgattta

SEQ ID NO: 428 - DNA, 68 bp, Streptococcus pneumoniae
  misc_feature (1)..(68): tiling:Spneumo1:WAN024AKM; Cluster includes WAN024EMQ-rc R 6.IG_568.1||||546259..546326|-|68 bp|Between spr0544 (+ st rand) and spr0545 (- strand)|S.pneumoniae|R6|NC_003098.1|I G-rc|110
agatatactaaaagcgattggaccagcmaatcgcttttttagtttgcattggctattttaggaaactc

SEQ ID NO: 429 - DNA, 156 bp, Streptococcus pneumoniae
  misc_feature (1)..(156): tiling:Spneumo1:WAN024AHF; Cluster includes WAN024EKY-rc R 6.IG_698||||680647..680802|-|156 bp|Between spr0674 (sodA) (+ strand) and spr0675 (+ strand)|S.pneumoniae|R6|NC_0030 98.1|IG-rc|110
agatatcctttttycacgattacttaatactttattctaccataatttctagcagttagcacgtttctcataaaaatgaaaaaagtctgacgattttgtcagaccagaatcttataacctaaaaaagagaagaacaattcttccctccaactatca

SEQ ID NO: 430 - DNA, 81 bp, Streptococcus pneumoniae
  misc_feature (1)..(81): tiling:Spneumo1:WAN024AL3; Cluster includes WAN024EN2 R6.I G_542||||519553..519633|+|81 bp|Between spr0518 (+ strand) and spr0519 (cysS) (+ strand)|S.pneumoniae|R6|NC_003098.1 |IG|110
agatattcggactgaaatttacttgaacttttagtgatgaaactaattgttcttggatttcagctttcctgattatgattt

SEQ ID NO: 431 - DNA, 893 bp, Streptococcus pneumoniae
  misc_feature (1)..(893): tiling:Spneumo1:WAN024G9G; Cluster includes WAN02446J spr0 823|but|15902867|NP_358417.1|825410..826285|+|876 bp|Beta- alanine synthase or beta-ureidopropionase|S.pneumoniae|R6| NC_003098.1|ORF|221
agatgagaaatgtaagagttgcaaccattcagatgcaatgcgctaaggatgtggcaacaaatatccaaaccgcagagcgtttagtacgtcaggctgctgagcaaggagcccaaattattctcttgcccgagttgtttgaacatccctatttctgtcaggaacgtcagtatgactactaccagtatgcccaatctgtagcggaaaatactgccattcagcattttaaggtgattgctaaggaactacaagttgttttaccaatcagtttctatgaaaaagatggtaatgtcttgtataactctattgccgtcattgatgcagatggggragtgctgggygtttatcgaaagacccayataccagatgaccattattatcaagaaaaattctatttcacgcctggtaacactggtttcaaggtctggaatactcgctatgctaagattggtatcggtatctgttgggatcaatggttcccygaaacagcscgctgtcttgcwytgaatggkgcwgaattgctcttttatccwacagcyatcggttcagagccrattttggatacagatagttgtggtcactggcaacgtactatgcaagggcacgcagcagcgaatattgttccagtcatcgcagccaatcgttatggtttagaggaggttactcctagtgaggaaaatggcggacagagytccagtcttgacttctacggttcctcctttatgacggatgaaacaggagctattctagaacgagctgaaagacaagaagaagctgttctgttagctacttatracctagacaagggagcaagtgaacgyctaaactggggcttgtttcgagatagaagaccagaaatgtatagacaaattacagatywrastartgggagaaat

SEQ ID NO: 432 - DNA, 214 bp, Streptococcus pneumoniae
  misc_feature (1)..(214): tiling:Spneumo1:WAN024AHW; Cluster includes WAN024EL7-rc R 6.IG_688||||668257..668469|-|213 bp|Between spr0664 (+ str and) and spr0665 (prfB) (+ strand)|S.pneumoniae|R6|NC_0030 98.1|IG-rc|110
agatggcaatctcttcctctagcccttcgaggtcaaagagaccccctgaaagaagctaatttttcacgatttgcgtcaattttctgacgaattactgaaatgtccataaatactccttttttacattatttcattatagcatattttatcatttctttccatcttttgctctaatccccttttcatgaaaaaagaagcctttgggcttcccttc

SEQ ID NO: 433 - DNA, 299 bp, Streptococcus pneumoniae
  misc_feature (1)..(299): tiling:Spneumo1:WAN0249U3; Cluster includes WAN024EEE R6.I G_1225.2.1||||1181125..1181214|+|90 bp|Between spr1181 (gd hA) (+ strand) and spr1182 (- strand)|S.pneumoniae|R6|NC_0 03098.1|IG|220
agattaaataagaggaggggcccgaaagtaaatttcaggctccttttggttagaacttgacaaaawacatcattttatgcgaaactagaagaagattattttatactcartgagaatyaaagagcaaattagaaagctagtcgcaggttgctcaaagcactactttgaggttgaagatggaagctgacstggtttgaagagattttcraagagtattaaacwarragaarwwmcgctactcctaagaatagcgatttaatcatgtttttaagctactactgtagttgctctattattta

SEQ ID NO: 434 - DNA, 83 bp, Streptococcus pneumoniae
  misc_feature (1)..(83): tiling:Spneumo1:WAN024A5W; Cluster includes WAN024EEY-rc R 6.IG_1185||||1146755..1146837|-|83 bp|Between spr1144 (smf ) (- strand) and spr1145 (licC) (- strand)|S.pneumoniae|R6 |NC_003098.1|IG-rc|110
agattccaacatctgacaaaatagtcggatgttttttgattttttacgaacttttacgaatagatagatgagtagaaaaagaa

SEQ ID NO: 435 - DNA, 105 bp, Streptococcus pneumoniae
  misc_feature (1)..(105): tiling:Spneumo1:WAN0249YJ; Cluster includes WAN024EBR R6.I G_1427||||1367294..1367398|+|105 bp|Between transporter (P ST) (- strand) and spr1384 (murE) (+ strand)|S.pneumoniae| R6|NC_003098.1|IG|110
agattcctcattcaattttgataactaggaaaaactccttatcttccattataaacttttccttgttacttgtaaatttacgactttcggtttacaatagaaagt

SEQ ID NO: 436 - DNA, 109 bp, Streptococcus pneumoniae
  misc_feature (1)..(109): tiling:Spneumo1:WAN024ANG; Cluster includes WAN024EO7-rc R 6.IG_461.2.2||||436914..437022|-|109 bp|Between spr0437 (r poE) (+ strand) and spr0438 (pyrG) (+ strand)|S.pneumoniae |R6|NC_003098.1|IG-rc|110
agattcctctttctaaaatgctcaaggtcttgttaactacgaggggatatagaaaacaagaccctactaataagaataatctgggacgactgcaccagattcacaacta

SEQ ID NO: 437 - DNA, 87 bp, Streptococcus pneumoniae
  misc_feature (1)..(87): tiling:Spneumo1:WAN024A4X; Cluster includes WAN024791 R6.I G_141.2.1||||128066..128152|+|87 bp|Between spr0120 (+ str and) and spr0121 (pspA) (+ strand)|S.pneumoniae|R6|NC_0030 98.1|IG|110
agattgtccgcaggcttaagcttgcgttttttgttgtttaacgaaattaaaaaacaagctctctcatcggaaatgtttttataggaa

SEQ ID NO: 438 - DNA, 94 bp, Streptococcus pneumoniae
  misc_feature (1)..(94): tiling:Spneumo1:WAN024AQK; Cluster includes WAN024EPV-rc R 6.IG_329||||308936..309029|-|94 bp|Between spr0308 (luxS) (- strand) and spr0309 (- strand)|S.pneumoniae|R6|NC_00309 8.1|IG-rc|110
agatttcaacctctccagcctcggagaggttttctctctgtctcaggagcaacctttatgatataatgagagaagaaaactgaaaggatttacc

SEQ ID NO: 439 - DNA, 182 bp, Streptococcus pneumoniae
  misc_feature (1)..(182): tiling:Spneumo1:WAN0249VZ; Cluster includes WAN024EA7 R6.I G_1568||||1499160..1499341|+|182 bp|Between spr1521 (- str and) and spr1522 (- strand)|S.pneumoniae|R6|NC_003098.1|IG |110
agattttctcctattatttttattttctgctaaagcagatttttctttacttctttagtatacactttaccgaaaaggctttcaatatcttatagacacttagattttagtttctcgcttatagaatagcgtttggagcctttgaaagtagtttcagaaataawtgcwccccttactcatac

SEQ ID NO: 440 - DNA, 320 bp, Streptococcus pneumoniae
  misc_feature (1)..(320): tiling:Spneumo1:WAN0249UU; Cluster includes WAN024E9G-rc R 6.IG_1611||||1545149..1545467|-|319 bp|Between spr1564 (+ strand) and spr1565 (scrK) (- strand)|S.pneumoniae|R6|NC_0 03098.1|IG-rc|110
agcacaaaatccgcttgggaaaccaaacggattttgtggttgaaaacaatatttttgagcctttccttaagtgattacggacggtagcgactttcttcraaattccatacctaaactttgagmctastagkctcaaagtttccgaatacctgaaaccattagatttcaggtgtttctatcacggcggaaaggctaggtaagtcctcgcctcactatcgaaaaatatgcatratttccataccaaagtatatttagtatcaagctatagttaatctacgctttaaaaatccacttgggaaaccaaacggattttttacgtg

SEQ ID NO: 441 - DNA, 174 bp, Streptococcus pneumoniae
  misc_feature (1)..(174): tiling:Spneumo1:WAN024FB8; Cluster includes WAN023KOQ 3130 41_3131||||1666042..1666287|+|246 bp|EGAD orf prediction|S .pneumoniae|R6|NC_003098.1|ORF|110
agcacaatcaatacaattgctaaaagtaaatccatcatttttctcctgtttctttttgagtccctttcattataccacaaactagccaccctgaccagtttgttctacactttcarggatggaatagacagcaaaaagaaccctgcttttctgaaaaagaggtctccttgctaa

SEQ ID NO: 442 - DNA, 276 bp, Streptococcus pneumoniae
  misc_feature (1)..(276): tiling:Spneumo1:WAN024AKE; Cluster includes WAN024EMJ-rc R 6.IG_584.1||||561687..561962|-|276 bp|Between spr0560 (+ s trand) and spr0561 (prtA) (+ strand)|S.pneumoniae|R6|NC_00 3098.1|IG-rc|110
agcacattcataccatcaaaaatagtagcaataaacttgaacaactaccagaaacacgaaaacaggcataattgatraaatatyagcgctattaaacaatataaataaccgctaagartaaggcttaacggttatcttctacctatctattttttcaamtcctcagtcgtttatctacctataacctaggctttacgagtgccttgctctaccaactragctaaatcggcgattacacttacagtatrgcactctgagaatagatgtcaagtaata

SEQ ID NO: 443 - DNA, 229 bp, Streptococcus pneumoniae
  misc_feature (1)..(229): tiling:Spneumo1:WAN024A6O; Cluster includes WAN024EFF-rc R 6.IG_1147||||1111538..1111751|-|214 bp|Between spr1109 (fh s) (- strand) and C-terminus (dfp) (+ strand)|S.pneumoniae |R6|NC_003098.1|IG-rc|110
agcactattgtacacaaaaataagcggtaagtaaaatgaaagtgataaatttttggtaaaaacgaagatttaytatagtttcaaactataaagccatataaaatttaagaaaggaytctaaaagycttaaaaacagagatatttacgaacgtttagagrgttttaggatgttaaaaatcttgttttgtgatataatgaattatcatataagaggttagaggaattttga

SEQ ID NO: 444 - DNA, 178 bp, Streptococcus pneumoniae
  misc_feature (1)..(178): tiling:Spneumo1:WAN024ADD; Cluster includes WAN024EIS-rc R 6.IG_893||||852841..853018|-|178 bp|Between spr0857 (celB) (+ strand) and spr0858 (+ strand)|S.pneumoniae|R6|NC_0030 98.1|IG-rc|110
agcagatacactggactgaagaagaccaatagattataaactaactaataaaacaacttttgctgatttttaatgattttatatcctcaatattgaatacgttttyattataccatttttatcattattatgcaacaaatttttagtttatttcactaatctacaacatttatccttc

SEQ ID NO: 445 - DNA, 67 bp, Streptococcus pneumoniae
  misc_feature (1)..(67): tiling:Spneumo1:WAN0249O8; Cluster includes WAN024E8Y-rc R 6.IG_1661.2.2||||1588936..1589002|-|67 bp|Between spr1615 (- strand) and spr1616 (cshA) (+ strand)|S.pneumoniae|R6|N C_003098.1|IG-rc|110
agcagtcctttctaacgtggatttgagtagaatgactcatctactatatcttactatgtccattcta

SEQ ID NO: 446 - DNA, 921 bp, Streptococcus pneumoniae
  misc_feature (1)..(921): tiling:Spneumo1:WAN024CDM; Cluster includes WAN0244QZ spr0 087||15902131|NP_357681.1|94845..95807|-|963 bp|Hypothetic al protein|S.pneumoniae|R6|NC_003098.1|ORF|232
agcatgcgtaaatggacaaaaggatttctcatctttggtgtggtgactaccgttatcggctttatcctgctttttgtaggtatccaatctgacgggattaagagcctactttccatgtccaaagaacctgtctatgatagccgtacggaaaagctaacctttggcaaggaagtcgaaaacctagaaattactctccaccaacacrcgctcaccatcacagactctttcgatgatcaaatccacatttcttaccatccatctctttctgctcaccatgatcttatcaccaatcagaacgatagaactctgagtctcactgataagaaactgtctgaaactccgtttctctcttctggaattggtgggattcttcatatcgcaagtagctactctagtcgttttgaagaagttattctccrrctaccaaaagggagaactctaaaagggatcaacatctcagccaatygcggacaaaccaccatcataaatgctagccttgaaaatgcraccctcaatacaaacagctatatcctccgaattgaaggaagtcgtatcaaaaacagtaaactcacaacgcccaatatcgttaatatctttgatacagttcttacagatagtcagctagagtcaacagagaatcacttccacgctgaaaatatccaagtccatggyaaggttgaactgactgccaaagattatctcagaatcatcctagaccagaaagaaagccaacgaattaactgggacatctcaagcaactatggttctatcttccaattcacaagagaaaagcctgaatcaagaggtacggaattaagcaacccttacaaaactgaaaaaaccgatgtcaaggatcaactcattgcgagatctgatgataatattgatctaatatccacaccaagcagacgtykaactaat

SEQ ID NO: 447 - DNA, 118 bp, Streptococcus pneumoniae
  misc_feature (1)..(118): tiling:Spneumo1:WAN0249V9; Cluster includes WAN024E9R R6.I G_1585.1.1||||1520397..1520514|+|118 bp|Between spr1538 (a xe1) (- strand) and spr1539 (recG) (- strand)|S.pneumoniae |R6|NC_003098.1|IG|110
agcatgctccttttattttgtaatcgttaccacaactgtagcatatctatgtaatcaatgcaagaaagaaggrtaaatagaaagtgaatttagattctttacttttaggatgatgggc

SEQ ID NO: 448 - DNA, 137 bp, Streptococcus pneumoniae
  misc_feature (1)..(137): tiling:Spneumo1:WAN024A84; Cluster includes WAN024EG6 R6.I G_1094||||1051484..1051603|+|120 bp|Between spr1055 (ung) (- strand) and spr1056 (- strand)|S.pneumoniae|R6|NC_00309 8.1|IG|110
agccgactccttcatttttactgcctctattatagcaaaaagtggctatggaaaccactttttacagtttatctaaagatttaataaatcgactatatatacgatttgaatacgtgaatacagtttataaagactgg

SEQ ID NO: 449 - DNA, 120 bp, Streptococcus pneumoniae
  misc_feature (1)..(120): tiling:Spneumo1:WAN024ASI; Cluster includes WAN024EQS-rc R 6.IG_260.1||||233680..233799|-|120 bp|Between spr0239 (+ s trand) and spr0240 (uppS) (+ strand)|S.pneumoniae|R6|NC_00 3098.1|IG-rc|110
agccgcctgattgggcgactttatttttatagggagattattatgaaaaagttttaggagtttaagttaaggtcttcttaacttatgaacttagtgtacactccctagcttaaagtttcc

SEQ ID NO: 450 - DNA, 299 bp, Streptococcus pneumoniae
  misc_feature (1)..(299): tiling:Spneumo1:WAN0249IT; Cluster includes WAN024E5S-rc R 6.IG_1997||||1814370..1814647|-|278 bp|Between spr1837 (ad hE) (- strand) and spr1838 (- strand)|S.pneumoniae|R6|NC_0 03098.1|IG-rc|110
agcctccttatcaaaggaggtattattagaatyrcaaggtaagcgcttacctgyaaatccctttctttccaaatccctcttccaagcaagtttgtgaaataaaaaatatttgaaataaatttcacaaacttcaaagataaaacctgataagaaaagaaaatgagaaaagtttcacaagagtttaaaaattctttgtgaaatgtttatgaaactgtttacaaagttgaaataatgcgttataataaacttgtgaaaaaattaacaaaggatatcgttccttgaaagctatggaggaaaat

SEQ ID NO: 451 - DNA, 478 bp, Streptococcus pneumoniae
  misc_feature (1)..(478): tiling:Spneumo1:WAN0249QP; Cluster includes WAN024EBF-rc R 6.IG_1474||||1414034..1414510|-|477 bp|Between spr1430 (dp r) (- strand) and spr1431 (lytC) (- strand)|S.pneumoniae|R 6|NC_003098.1|IG-rc|110
agcgatgatttgaaagagggatgtgatagtagcaccctctttttctttgttttatgatagttcatcctcgagtaaattcaagwtcttgctcggaaatgaagcttatatagtagattgaatatagacaaataccttgtgattggtaaaacattttagaaattcatttacctttcctaatcgacttggtttcatcttatttcaatctattatagtattggggaatttcttcaaaccacatcagcttggtcagttctacctgcgacctcaaaacttgtgctttggtcaagctgggtttagtttcctagtttgctgatggatttccattgactataagcatccaaccctctttttgtcttctaaagaattcttaaattatcagtctattgcaacttttctcatataagttctttktcttgctattggttttccttagtagtatactaaggtagtaatcattaagaagtggttacaaaaaata

SEQ ID NO: 452 - DNA, 63 bp, Streptococcus pneumoniae
  misc_feature (1)..(63): tiling:Spneumo1:WAN0249DN; Cluster includes WAN02471E R6.I G_231||||207709..207770|+|62 bp|Between spr0210 (adk) (+ s trand) and spr0211 (infA) (+ strand)|S.pneumoniae|R6|NC_00 3098.1|IG|110
agcgtttttcacacttgcaaaaatccgctacaaatgttatactgaratagtctgacttataat

SEQ ID NO: 453 - DNA, 132 bp, Streptococcus pneumoniae
  misc_feature (1)..(132): tiling:Spneumo1:WAN024ACE; Cluster includes WAN024EE6 R6.I G_1244.2||||1196239..1196370|+|132 bp|Between spr1200 (- s trand) and spr1201 (- strand)|S.pneumoniae|R6|NC_003098.1| IG|110
agctagctcctcctatttaaatttttgggattaagtactttatccaccctcatatactctctccaccagtaaaatgcaagcaatgatacaaaatagatttaactattttatatagcgaaaacttacaaattt

SEQ ID NO: 454 - DNA, 201 bp, Streptococcus pneumoniae
  misc_feature (1)..(201): tiling:Spneumo1:WAN024ACA; Cluster includes WAN024EE4 R6.I G_1249.2||||1204951..1205151|+|201 bp|Between spr1205 (- s trand) and spr1206 (- strand)|S.pneumoniae|R6|NC_003098.1| IG|110
agctagctcctcctatttaaatttttgggattaagtactttatccaccctcattatactctctccaccagtaaaatgcaagcaattatacaatgttgtcacatagaaaataatgtttccgtaacttttcaaagtaacttccatctctctcccaaaactggaagttagttttagaagttacctaaaaatcaggtcacctatt

SEQ ID NO: 455 - DNA, 68 bp, Streptococcus pneumoniae
  misc_feature (1)..(68): tiling:Spneumo1:WAN0249M6; Cluster includes WAN02471U-rc R 6.IG_188.2||||176090..176157|-|68 bp|Between spr0167 (+ st rand) and spr0168 (- strand)|S.pneumoniae|R6|NC_003098.1|I G-rc|110
agctgggaaaagtttctcagcttttttctcggtatyattactggcattttcatcacatattacagcaa

SEQ ID NO: 456 - DNA, 69 bp, Streptococcus pneumoniae
  misc_feature (1)..(69): tiling:Spneumo1:WAN024AQB; Cluster includes WAN024EPN R6.I G_352||||336209..336265|+|57 bp|Between spr0331 (+ strand) and spr0332 (+ strand)|S.pneumoniae|R6|NC_003098.1|IG|110
agctttgaccttgatttttgtttgcctttttttatataataatactagcaagcgagaatggagagagac

SEQ ID NO: 457 - DNA, 245 bp, Streptococcus pneumoniae
  misc_feature (1)..(245): tiling:Spneumo1:WAN024F58; Cluster includes WAN0244SK spr0 030||15902074|NP_357624.1|30143..30481|-|339 bp|Hypothetic al protein|S.pneumoniae|R6|NC_003098.1|ORF|210
aggaaaatgtttagtcaactacatatgcgagaagaacaagtcttgttagcacaggactatgccttggaaactgctagggctgaagrccttgaacaaggactagagcgtgggaaagttgaaggaagggcagaaaggaaactttttrccttcctagacatagtacgccaaggtcttctgacttctgaggttgccagccagcaattaggtatgtcagtatctgaatttgaggcactgttgtaactaat

SEQ ID NO: 458 - DNA, 250 bp, Streptococcus pneumoniae
  misc_feature (1)..(250): tiling:Spneumo1:WAN0249TT; Cluster includes WAN024E7Z-rc R 6.IG_1729.2.1.2||||1652817..1653066|-|250 bp|Between spr16 80 (- strand) and spr1681 (- strand)|S.pneumoniae|R6|NC_00 3098.1|IG-rc|120
aggaatcatgagaagtcagccgagcccatagtagtgaagaaacttctgtaatggaagtggagcgaagtgaggaatcgtcaaacggtaggggataggctgtttgaagggtgctacgaaaaagatagggtaaggtgaaattatagyggaatgaaataagatatgaacaaattgattgaggaaatyaaatkaatttatagaaatcttttagcagtcatggygtcctattccagwttcgaaatgctataaatac

SEQ ID NO: 459 - DNA, 141 bp, Streptococcus pneumoniae
  misc_feature (1)..(141): tiling:Spneumo1:WAN024A94; Cluster includes WAN024EGQ R6.I G_1057||||997581..997721|+|141 bp|Between spr1018 (- stran d) and spr1019 (+ strand)|S.pneumoniae|R6|NC_003098.1|IG|1 10
aggacacctcttttcttataagttgattatatcaaattttacggaaaatttgattgactccattaggatttttaatcttttttttgatataattaraagtaaggaaaccaatctgaatcctaaaatagaaagattgatact

SEQ ID NO: 460 - DNA, 95 bp, Streptococcus pneumoniae
  misc_feature (1)..(95): tiling:Spneumo1:WAN0249GM; Cluster includes WAN024E4P-rc R 6.IG_2125||||1901359..1901453|-|95 bp|Between spr1918 (mal X) (+ strand) and spr1919 (malC) (+ strand)|S.pneumoniae|R 6|NC_003098.1|IG-rc|110
aggatactacttttttataagaaagctaaattatttgtgtctctattgataaattcaaagggggatttgatttccaccccccttgaacaaatttt

SEQ ID NO: 461 - DNA, 177 bp, Streptococcus pneumoniae
  misc_feature (1)..(177): tiling:Spneumo1:WAN0249ZY; Cluster includes WAN024770-rc R 6.IG_154.2.1.2||||141522..141698|-|177 bp|Between spr0133 (- strand) and A (transposase) (- strand)|S.pneumoniae|R6| NC_003098.1|IG-rc|110
aggcacttttgtcctattcttgtttcagccgactatactccgttattgggcagctacggaacagtcgatgggacgatggggggacataaaaaaatcctccagttttgttttttataacagtatactggagaattgacaatctcggtagatacctcgttatagcgcggttacttatta

SEQ ID NO: 462 - DNA, 51 bp, Streptococcus pneumoniae
  misc_feature (1)..(51): tiling:Spneumo1:WAN0249ON; Cluster includes WAN024E98 R6.I G_1638||||1571246..1571296|+|51 bp|Between spr1592 (- stra nd) and spr1593 (- strand)|S.pneumoniae|R6|NC_003098.1|IG| 110
aggctagtcccctttatttctctataaaaacagttatttggagtttcggtc

SEQ ID NO: 463 - DNA, 214 bp, Streptococcus pneumoniae
  misc_feature (1)..(214): tiling:Spneumo1:WAN0249W4; Cluster includes WAN024EA8-rc R 6.IG_1564||||1496274..1496472|-|199 bp|Between spr1517 (pb p2b) (- strand) and spr1518 (+ strand)|S.pneumoniae|R6|NC_ 003098.1|IG-rc|110
agggaaagctcctttacatgagtcatactggaagactagatcagrgaatagtcacacttcattataacacataatataaggatagataaataaaaacgcatctctgttttaaaaacgaaaaaatcgaaaaagcttctctcttttccataattttctactcaaattgtggtacaattaagagtaagattttaagttagaaatgagactgatttgt

SEQ ID NO: 464 - DNA, 73 bp, Streptococcus pneumoniae
  misc_feature (1)..(73): tiling:Spneumo1:WAN024ABD; Cluster includes WAN024EHV-rc R 6.IG_969||||916138..916210|-|73 bp|Between spr0930 (+ stra nd) and spr0931 (+ strand)|S.pneumoniae|R6|NC_003098.1|IG- rc|110
agggaatttcctcctttacttctttagagtaatatatctatcttaaagaaaacttataacaaaaacacctggt

SEQ ID NO: 465 - DNA, 200 bp, Streptococcus pneumoniae
  misc_feature (1)..(200): tiling:Spneumo1:WAN024ADQ; Cluster includes WAN024EIY R6.I G_874||||839018..839216|+|199 bp|Between spr0838 (+ strand ) and spr0839 (+ strand)|S.pneumoniae|R6|NC_003098.1|IG|11 0
agggagacaggatgtaataattctgtctgtttctgtttaacttaattagtgatgataatataaagatgtatcacttggtatagaagctttggtattaagttttttattaagcccatacggaataccgatggttggagcagcagttatagcgttcttagaaggtataaatagaaaaataaggtcattttaaatcaaaggat

SEQ ID NO: 466 - DNA, 109 bp, Streptococcus pneumoniae
  misc_feature (1)..(109): tiling:Spneumo1:WAN024A7V; Cluster includes WAN024EG2-rc R 6.IG_1098.2.2||||1054129..1054237|-|109 bp|Between spr1059 (- strand) and spr1060 (phpA) (- strand)|S.pneumoniae|R6| NC_003098.1|IG-rc|110
aggtagcagcattttctaactcctaaaaacaggataggagaacgggaaaacgaaaaatgagagcagaatgtgagttctagttctcatttttttyatgaaaatgtgcaaa

SEQ ID NO: 467 - DNA, 50 bp, Streptococcus pneumoniae
  misc_feature (1)..(50): tiling:Spneumo1:WAN0249GK; Cluster includes WAN024E4O-rc R 6.IG_2127.2||||1903808..1903857|-|50 bp|Between spr1920 (m alD) (+ strand) and spr1921 (malA) (+ strand)|S.pneumoniae |R6|NC_003098.1|IG-rc|110
aggtatctttctaaaaggtgttttctatatgagtattattatatagagaa

SEQ ID NO: 468 - DNA, 150 bp, Streptococcus pneumoniae
  misc_feature (1)..(150): tiling:Spneumo1:WAN0249CZ; Cluster includes WAN024EQY R6.I G_252||||222433..222573|+|141 bp|Between spr0231 (+ strand ) and spr0232 (pflF) (+ strand)|S.pneumoniae|R6|NC_003098. 1|IG|110
aggtatttgtgtgttactgttaaactcacacatttgtgctaaaaattagagagttaaaatttttctagttaaaagcttgaaaatttctataaaaatcggtattatattttcgaaagaaatraaaatattttcgaaagaaaggtgcttacg

SEQ ID NO: 469 - DNA, 72 bp, Streptococcus pneumoniae
  misc_feature (1)..(72): tiling:Spneumo1:WAN024A48; Cluster includes WAN024EDO-rc R 6.IG_1291.1||||1247578..1247649|-|72 bp|Between spr1247 (m urB) (- strand) and spr1248 (- strand)|S.pneumoniae|R6|NC_ 003098.1|IG-rc|110
aggtatttttatggtcgtcaaatgtctctaaaaatggtataatggaatgaattttgtaaaaggaagagtgac

SEQ ID NO: 470 - DNA, 271 bp, Streptococcus pneumoniae
  misc_feature (1)..(271): tiling:Spneumo1:WAN024AE2; Cluster includes WAN024EJ4 R6.I G_860||||827276..827546|+|271 bp|Between spr0824 (- strand ) and spr0825 (+ strand)|S.pneumoniae|R6|NC_003098.1|IG|11 0
aggtcttccttctttatcttttgctattattatagcatattttggagaagaaattgatagaaagcttgagactaattgattttatagtttaagatgttttgatgacaattcatgatttgaagaggatatttcgcaaagatatgctatactatgtttgtcaatgttgcaactagacaaattaaaaaaccaacttaatataatagtttttttgtaagtaggtatgagtakcagattactcaactaatctgaagaataatggaggaaatatatc

SEQ ID NO: 471 - DNA, 61 bp, Streptococcus pneumoniae
  misc_feature (1)..(61): tiling:Spneumo1:WAN024ABF; Cluster includes WAN024EHW-rc R 6.IG_966||||913224..913284|-|61 bp|Between spr0927 (+ stra nd) and spr0928 (glyA) (+ strand)|S.pneumoniae|R6|NC_00309 8.1|IG-rc|110
aggtcttctcctttattgtgtgactagtccattagtttgattttacaataagaaaatcaaa

SEQ ID NO: 472 - DNA, 77 bp, Streptococcus pneumoniae
  misc_feature (1)..(77): tiling:Spneumo1:WAN024AQ4; Cluster includes WAN024EPK-rc R 6.IG_365||||346896..346972|-|77 bp|Between spr0341 (fni) ( + strand) and spr0342 (+ strand)|S.pneumoniae|R6|NC_003098 .1|IG-rc|110
aggttcatcctctcccttctattttatcacaattcaaaaaagtcacctcagtctgaggatggaaaaaaaggcgctgg

SEQ ID NO: 473 - DNA, 126 bp, Streptococcus pneumoniae
  misc_feature (1)..(126): tiling:Spneumo1:WAN024AIX; Cluster includes WAN024ELU-rc R 6.IG_636.2||||624287..624412|-|126 bp|Between spr0612 (- s trand) and spr0613 (pyrF) (+ strand)|S.pneumoniae|R6|NC_00 3098.1|IG-rc|110
aggtttctccttttacctttactagtgagagagtctggccaacagaagccacgaaaaaaggaacctgccaacagcaaggttccacgaaaaatgggtagtctccaccctttcaccgtctaaccttag

SEQ ID NO: 474 - DNA, 61 bp, Streptococcus pneumoniae
  misc_feature (1)..(61): tiling:Spneumo1:WAN024AAR; Cluster includes WAN024EHL-rc R 6.IG_985||||930811..930870|-|60 bp|Between spr0946 (+ stra nd) and spr0947 (+ strand)|S.pneumoniae|R6|NC_003098.1|IG- rc|110
agtaaatgtaatcctattatacaatgaaaatacagaaaagagaaatctgacgtactggaga

SEQ ID NO: 475 - DNA, 77 bp, Streptococcus pneumoniae
  misc_feature (1)..(77): tiling:Spneumo1:WAN0249ZI; Cluster includes WAN0247X1 R6.I G_25||||19847..19923|+|77 bp|Between RNA (ribosomal) (+ st rand) and RNA (ribosomal) (+ strand)|S.pneumoniae|R6|NC_00 3098.1|IG|440
agtaactgagaatatgaaagcgaacggttttcttaarttgaatagatattcaattttgagtaggtattactcagagt

SEQ ID NO: 476 - DNA, 121 bp, Streptococcus pneumoniae
  misc_feature (1)..(121): tiling:Spneumo1:WAN024A2R; Cluster includes WAN024ECZ-rc R 6.IG_1331.2||||1282213..1282333|-|121 bp|Between spr1287 ( spnIM) (+ strand) and spr1288 (- strand)|S.pneumoniae|R6|N C_003098.1|IG-rc|110
agtaattttttacaagccatgtttttatatgaatttaagtgtatatgtgcatatatagtctgaataaatttgatttgaaaaatggataaaaaaataaaggcagtccgaagaccgccaatat

SEQ ID NO: 477 - DNA, 63 bp, Streptococcus pneumoniae
  misc_feature (1)..(63): tiling:Spneumo1:WAN024AGM; Cluster includes WAN024EKI R6.I G_743.2.1.1||||721635..721694|+|63 bp|Between E (transposa se) (- strand) and spr0720 (- strand)|S.pneumoniae|R6|NC_0 03098.1|IG|220
agtacaatacctttcctccgataattattttttatctrgtatactggaagttggggaattagg

SEQ ID NO: 478 - DNA, 167 bp, Streptococcus pneumoniae
  misc_feature (1)..(167): tiling:Spneumo1:WAN024AG3; Cluster includes WAN024EK6-rc R 6.IG_765||||739070..739236|-|167 bp|Between spr0741 (coaA) (- strand) and spr0742 (+ strand)|S.pneumoniae|R6|NC_0030 98.1|IG-rc|110
agtacacctcctataagttgtgaactaaaaagccccctttataagcttataaacttataaatcagtagaatctatctcctatttcatcaataaattgatcacttatactatataccattgacttaccacattcaagaaaccgctttatttttttagmtttttatggt

SEQ ID NO: 479 - DNA, 83 bp, Streptococcus pneumoniae
  misc_feature (1)..(83): tiling:Spneumo1:WAN0249OJ; Cluster includes WAN024E95 R6.I G_1648.2||||1578716..1578796|+|81 bp|Between spr1602 (trxA ) (+ strand) and spr1603 (+ strand)|S.pneumoniae|R6|NC_003 098.1|IG|110
agtagaatattacgatgtttgggatatgccatcgctaaaaaaacctcgatttggtattttttagctccctaatgggagctttt

SEQ ID NO: 480 - DNA, 89 bp, Streptococcus pneumoniae
  misc_feature (1)..(89): tiling:Spneumo1:WAN024A9Y; Cluster includes WAN024EH8 R6.I G_1016||||963429..963502|+|74 bp|Between spr0977 (+ strand ) and spr0978 (dnaG) (+ strand)|S.pneumoniae|R6|NC_003098. 1|IG|110
agtagggaaaatgagtgaaatggtttactttttttctgaaataaagtatactatataaagtaaactatgataacatggaggtattgtgt

SEQ ID NO: 481 - DNA, 60 bp, Streptococcus pneumoniae
  misc_feature (1)..(60): tiling:Spneumo1:WAN024AFE; Cluster includes WAN024EJT R6.I G_806.1||||771750..771809|+|60 bp|Between spr0776 (dacA) ( - strand) and spr0777 (+ strand)|S.pneumoniae|R6|NC_003098 .1|IG|110
agtagtcttattctatcataaagaaaaaaaatattcttgctttaataattcatctgttaa

SEQ ID NO: 482 - DNA, 192 bp, Streptococcus pneumoniae
  misc_feature (1)..(192): tiling:Spneumo1:WAN024AS6; Cluster includes WAN024EQQ-rc R 6.IG_265||||240107..240297|-|191 bp|Between spr0244 (bglA) (+ strand) and spr0245 (glmS) (+ strand)|S.pneumoniae|R6| NC_003098.1|IG-rc|110
agtatatacgacacaggcaagctgtgctttctccttaaaattggtatagtctaattcatcttttatagaatcagcaaaaacagtatatacttgtttctttcacttgtcaagagtaaaaattggtatagttcaaattaagctcctgtaagcataaaaactctgaccgattgggataatcagtcagagtccttt

SEQ ID NO: 483 - DNA, 141 bp, Streptococcus pneumoniae
  misc_feature (1)..(141): tiling:Spneumo1:WAN024A93; Cluster includes WAN024EGQ-rc R 6.IG_1057||||997581..997721|-|141 bp|Between spr1018 (- st rand) and spr1019 (+ strand)|S.pneumoniae|R6|NC_003098.1|I G-rc|110
agtatcaatctttctattttaggattcagattggtttccttacttytaattatatcaaaaaaaagattaaaaatcctaatggagtcaatcaaattttccgtaaaatttgatataatcaacttataagaaaagaggtgtcct

SEQ ID NO: 484 - DNA, 166 bp, Streptococcus pneumoniae
  misc_feature (1)..(166): tiling:Spneumo1:WAN024A64; Cluster includes WAN024EF4 R6.I G_1182||||1143813..1143960|+|148 bp|Between spr1141 (topA) (- strand) and spr1142 (- strand)|S.pneumoniae|R6|NC_0030 98.1|IG|110
agtatcacaccttttcaaagtaataaactttataaagtgtaaaccattttttgaaccctgtcaagacttagctactataatagaagaaaagttttatacttaaaacctcagtcttcctttgatatacatagaagactcacgagagaaaccagctattctcaagaaa

SEQ ID NO: 485 - DNA, 146 bp, Streptococcus pneumoniae
  misc_feature (1)..(146): tiling:Spneumo1:WAN024AAB; Cluster includes WAN024EHA-rc R 6.IG_1011.2.2||||956230..956375|-|146 bp|Between spr0972 ( + strand) and spr0973 (ftsW) (+ strand)|S.pneumoniae|R6|NC _003098.1|IG-rc|110
agtatcaccactctactaggatacagacaaatctgttccaaattccgttttattttctagttttgattgctattataccattttttcagaaagaaaaaaactcttaccttacaatccttcgaattttactgtttttacagaattaa

SEQ ID NO: 486 - DNA, 91 bp, Streptococcus pneumoniae
  misc_feature (1)..(91): tiling:Spneumo1:WAN024AAX; Cluster includes WAN024EHO-rc R 6.IG_980||||925965..926055|-|91 bp|Between spr0941 (+ stra nd) and spr0942 (ccrB) (+ strand)|S.pneumoniae|R6|NC_00309 8.1|IG-rc|110
agtattaayctcaatataatttttctatatcatatataatttttttaatttaagtttggactatcatttcaagtatattataacactttta

SEQ ID NO: 487 - DNA, 77 bp, Streptococcus pneumoniae
  misc_feature (1)..(77): tiling:Spneumo1:WAN024AD2; Cluster includes WAN024EIN R6.I G_904||||862880..862956|+|77 bp|Between spr0868 (flpA) (- strand) and spr0869 (+ strand)|S.pneumoniae|R6|NC_003098.1 |IG|110
agtattatatcaaaaaggtagaataaaatcatggaaatgtggtataataaagccaagtaaagagaaacgagaagcac

SEQ ID NO: 488 - DNA, 117 bp, Streptococcus pneumoniae
  misc_feature (1)..(117): tiling:Spneumo1:WAN024AIA; Cluster includes WAN024ELF-rc R 6.IG_667||||651679..651794|-|116 bp|Between spr0643 (+ str and) and C (transposase) (- strand)|S.pneumoniae|R6|NC_003 098.1|IG-rc|110
agtattatatgcaatttctttatataaaaagaccggattgctccgatctttcaatagttcatattctcaatttctattttaaaaatagctaaggttaacgtcaaatgactacgcgac

SEQ ID NO: 489 - DNA, 100 bp, Streptococcus pneumoniae
  misc_feature (1)..(100): tiling:Spneumo1:WAN024ADR; Cluster includes WAN024EIZ-rc R 6.IG_867||||832865..832943|-|79 bp|Between spr0831 (lytD) (+ strand) and spr0832 (proB) (+ strand)|S.pneumoniae|R6|N C_003098.1|IG-rc|110
agtctcactccgattattcatatttatccattataacatgaataacaggaaatagaaaagagttgataggaaaaagaaggccctaaaaccttcttttcta

SEQ ID NO: 490 - DNA, 76 bp, Streptococcus pneumoniae
  misc_feature (1)..(76): tiling:Spneumo1:WAN024A9R; Cluster includes WAN024E3U R6.I G_2192.1.2.2||||1977782..1977853|+|72 bp|Between H (transp osase) (- strand) and spr1986 (+ strand)|S.pneumoniae|R6|N C_003098.1|IG|120
agtctttagactctagaaagatttatctttttcacacaaaccttagtccgaattcaattactctcgtgatttacac

SEQ ID NO: 491 - DNA, 76 bp, Streptococcus pneumoniae
  misc_feature (1)..(76): tiling:Spneumo1:WAN0249FY; Cluster includes WAN024E4F-rc R 6.IG_2159.2||||1936838..1936913|-|76 bp|Between spr1952 (- strand) and spr1953 (+ strand)|S.pneumoniae|R6|NC_003098. 1|IG-rc|110
agtctttcctttagctgtttttctacattatatcagaaaaagagggcctttagaaaaggagtttyaaarataacta

SEQ ID NO: 492 - DNA, 142 bp, Streptococcus pneumoniae
  misc_feature (1)..(142): tiling:Spneumo1:WAN024AC6; Cluster includes WAN024EI9 R6.I G_941||||891302..891425|+|124 bp|Between spr0905 (yfnA) (+ strand) and spr0906 (lmb) (+ strand)|S.pneumoniae|R6|NC_0 03098.1|IG|110
agtgaaagtctattgagttgttgacactcagyagatttttatatgtgaaagaaatttcaaattttttctaaaaatatcttgacagattaaattttcaggagtagaatatttactagttaattaaatggttaaggagttgttc

SEQ ID NO: 493 - DNA, 118 bp, Streptococcus pneumoniae
  misc_feature (1)..(118): tiling:Spneumo1:WAN024AP6; Cluster includes WAN024EP3-rc R 6.IG_402||||378333..378450|-|118 bp|Between spr0378 (acp) (+ strand) and spr0379 (fabK) (+ strand)|S.pneumoniae|R6|N C_003098.1|IG-rc|110
agtgcctccaaccttccttgcttacgtaatagttcgatttcaccataatttgacagtcaaactattacctaaacaagagggagtgggtttctccctactccttctactaatattctgc

SEQ ID NO: 494 - DNA, 71 bp, Streptococcus pneumoniae
  misc_feature (1)..(71): tiling:Spneumo1:WAN0249SO; Cluster includes WAN024EIF R6.I G_933.2.2||||886489..886558|+|70 bp|Between spr0897 (+ str and) and A (transposase) (+ strand)|S.pneumoniae|R6|NC_003 098.1|IG|110
agtgctttgaagttggaatgctacactataacttataaaatatagtaaaatgaaccaaaaatagtacacaa

SEQ ID NO: 495 - DNA, 127 bp, Streptococcus pneumoniae
  misc_feature (1)..(127): tiling:Spneumo1:WAN0249UQ; Cluster includes WAN024E9E-rc R 6.IG_1613.1||||1548388..1548514|-|127 bp|Between spr1566 ( scrA) (- strand) and spr1568 (scrB) (+ strand)|S.pneumonia e|R6|NC_003098.1|IG-rc|110
agtggatagaatattttttctgcaaaacgcttgacatatttttaaaacatgataaaataatagtcgtaagggcgaataaaatcgctttcaaacaagaacaaaatgttatataaggagatttttgcaa

SEQ ID NO: 496 - DNA, 207 bp, Streptococcus pneumoniae
  misc_feature (1)..(207): tiling:Spneumo1:WAN0249ZM; Cluster includes WAN024ECB-rc R 6.IG_1387.1.1.1||||1328161..1328367|-|207 bp|Between spr13 43 (tufA) (- strand) and spr1344 (glpF) (- strand)|S.pneum oniae|R6|NC_003098.1|IG-rc|110
agtggatggataatgctgaaaactccttgaaggataagtctatttagtactttctattaattagttaaatttttaccaagaataattcacaaaaacgttgtaaaacacttgcaatttagctgaaatttgataaaatagtaaggaaagttagactgtattgcctactgtctatctataaaatatattttattggaggcttttactcaa

SEQ ID NO: 497 - DNA, 119 bp, Streptococcus pneumoniae
  misc_feature (1)..(119): tiling:Spneumo1:WAN0249GO; Cluster includes WAN024E4Q-rc R 6.IG_2124.2||||1899968..1900086|-|119 bp|Between spr1917 ( malM) (- strand) and spr1918 (malX) (+ strand)|S.pneumonia e|R6|NC_003098.1|IG-rc|110
agtgtattcctccyaaagaatagcaagttttattgataaggaaacgcaaacgttttcctttatgagcttagtatagcacaaatagaaaacggttgcaagtattttttgtaaaaatttta

SEQ ID NO: 498 - DNA, 308 bp, Streptococcus pneumoniae
  misc_feature (1)..(308): tiling:Spneumo1:WAN0249MM; Cluster includes WAN02471V-rc R 6.IG_185.2||||173855..174162|-|308 bp|Between spr0164 (rib D) (- strand) and spr0165 (ruvA) (+ strand)|S.pneumoniae|R 6|NC_003098.1|IG-rc|110
agtrttccttctctcttatttcgtttatctagtatatcatattttctttatccgaggagcgagaatcgattatcacaaatacagtatatcaaaaacaatckgtatttatctgttgacatattcaaaattaagtactataatcatctgtaattgaataactatcttcagggcagggtgmaattccctaccggtggtatagcccacgagccgaaaggcatgatttggtgaaattccaaagccgacagtatagtctggatgaaagaagataaaagtatatttgtgctttttgcgtgctctgaaatgattac

SEQ ID NO: 499 - DNA, 1065 bp, Streptococcus pneumoniae
  misc_feature (1)..(1065): tiling:Spneumo1:WAN024FGJ; Cluster includes WAN02414O |||A AL78636.1|||1065 bp|penicillin-binding protein 2B|S.pneumo niae||AF467811|ORF|000
agttatttcaattccgagctaggaaatggtggagccaagtattctgagggtgtgtatgcagttgctctaaatccaaaaacaggtccgtgtttatccatgtcaggtaccaaacatgacctgaacacgggagagttaacacaggattccttgggaactgtgaccaatgtctttgtacccggttcggttgttaaggccgctaccatcagctcaggttgggagaatggagtcttatcaggaaatcagaccttgacagaccaaccgattgttttccaaggttcagctccaatttattcttggtataaattggcatatggatcttttcctattacagctgtggtagctgaggagtattcatccaatgcttacatggtccaaatcgccttaggtcttatgggscaaacctatcaacccaatatktttgtyggmaccagcaatytrgarwcwgctatggrraaactgcgttcaacctttgrcgaatatsgcttgggtactgcgacaggaattgacctaccagatgaatctactggatttgttcccaaagagtatagctttgctaattacattactaatgcctttgggcagtttgataactatacgccgatgcagttggctcagtatgtagcaacyattgcaaatgatggtgttcgtgtggctcctcgtattgttgaaggcatttatggtaataatgataagggaggactgggtgacttgattcagcaactgcaaccgacagagatgaataaggtcaatatatccgactccgatatgagtatcttgcaccaaggattttaccaagtatcgcatggaactagtccccttacgacaggacgggcgttttcagatggcgccactgtttctatcagtggtaagaccggtacaggtgaaagctatgtagctggtggtcaagaagctaataataccaatgccgtggcctatgctccaacagaaaatcctcaaattgcagttgcagtagtctttcctcataataccaatttaaccaaaaatgttgggccagcaattgctcgcgacattatcaatttatataaccaacaccatccaatgaat

SEQ ID NO: 500 - DNA, 106 bp, Streptococcus pneumoniae
  misc_feature (1)..(106): tiling:Spneumo1:WAN024AEF; Cluster includes WAN024EJD-rc R 6.IG_839.1||||806092..806197|-|106 bp|Between spr0803 (+ s trand) and spr0804 (- strand)|S.pneumoniae|R6|NC_003098.1| IG-rc|110
agttctcttctgaataacagaaaaagagcctgttcgtttttttgttatatgaaaattagtgacttgtagattttcatcttataccattyccagcaatacaagtagc

SEQ ID NO: 501 - DNA, 228 bp, Streptococcus pneumoniae
  misc_feature (1)..(228): tiling:Spneumo1:WAN024AC9; Cluster includes WAN024E6N R6.I G_1896||||1753648..1753875|+|228 bp|Between spr1778 (hlyX) (- strand) and spr1779 (endA) (- strand)|S.pneumoniae|R6| NC_003098.1|IG|110
agttcttctcctaaaatagtatcttatcctttattatatcacaaaatttaatccaatacatattattttttcttaccgtaacttctcaaagtaacttccatctctctcccaaaactggaagttagttttagaagttgctattttttcttagtacctgttctagycctgcttaaactagtaaaaagaactcctacatccataagtgacataggagtttaggcttatctt

SEQ ID NO: 502 - DNA, 353 bp, Streptococcus pneumoniae
  misc_feature (1)..(353): tiling:Spneumo1:WAN0249LR; Cluster includes WAN024E7I R6.I G_1834||||1700356..1700708|+|353 bp|Between spr1719 (+ str and) and spr1720 (- strand)|S.pneumoniae|R6|NC_003098.1|IG |110
agttgtcaaaggtcaggaacaaaatcctgaccttttttggtagtataaaataaattgtgtaaacacaaaaaggaataaatctattatagcagagttacaacacattactagaaagagatttatgcaraattcgtaaaatatataaaacaaatagatatactgttattttttaatgtctttattccttgtaagtttacaacaaacttatatcgtttaatacaaaaaatacgaaaatgattagtataaaaaatacaggtcaacttcgtatcaaaaacatttttttgtatttccacatagcatcaatcatttagtacaatattttaaaaacaatatctyaacagagaaaatgmtat

SEQ ID NO: 503 - DNA, 148 bp, Streptococcus pneumoniae
  misc_feature (1)..(148): tiling:Spneumo1:WAN0249WQ; Cluster includes WAN024EAM-rc R 6.IG_1534||||1465158..1465304|-|147 bp|Between spr1487 (re lA) (- strand) and spr1488 (- strand)|S.pneumoniae|R6|NC_0 03098.1|IG-rc|110
agtttaaaatctaacttcgtagtatattacggrccaataattcagaattatcaagcaattttgaattatttttttcttattctgttccaatctagttttcatattcttaaaaaagtgataaaatggtaggaagaattggagagtagag

SEQ ID NO: 504 - DNA, 118 bp, Streptococcus pneumoniae
  misc_feature (1)..(118): tiling:Spneumo1:WAN0249H6; Cluster includes WAN024E4X-rc R 6.IG_2119||||1892354..1892471|-|118 bp|Between spr1912 (- strand) and spr1913 (rrmA) (+ strand)|S.pneumoniae|R6|NC_0 03098.1|IG-rc|110
agtttaagtgtatcaaaagaggcaaatgaaagcaactttaggaataagtagatgggagattcagtagaaataaaactaattctccaatttatagaatgaaattgcttttatatctaaa

SEQ ID NO: 505 - DNA, 132 bp, Streptococcus pneumoniae
  misc_feature (1)..(132): tiling:Spneumo1:WAN0249F5; Cluster includes WAN024E3S R6.I G_2193||||1979092..1979177|+|86 bp|Between spr1986 (+ stra nd) and spr1987 (- strand)|S.pneumoniae|R6|NC_003098.1|IG| 220
agtttcgcaagtattatgcttacaaattacttgagcaattaactaaaatataaaccctgcctwkatatmwaggcagggtttatattttagttaattgctcaagtaatttgtaagcataatacttgcgaaact

SEQ ID NO: 506 - DNA, 77 bp, Streptococcus pneumoniae
  misc_feature (1)..(77): tiling:Spneumo1:WAN024APR; Cluster includes WAN024EPD R6.I G_389||||365374..365450|+|77 bp|Between spr0365 (rnhB) (- strand) and spr0366 (+ strand)|S.pneumoniae|R6|NC_003098.1 |IG|110
agtttctattgtaccacaaaagcagtaaaatttgtaaaaactgacaaaattagcgaattttggtataatatcgtgag

SEQ ID NO: 507 - DNA, 123 bp, Streptococcus pneumoniae
  misc_feature (1)..(123): tiling:Spneumo1:WAN0249HT; Cluster includes WAN024E59 R6.I G_2088||||1859008..1859130|+|123 bp|Between spr1881 (gltX) (- strand) and spr1882 (gpi) (- strand)|S.pneumoniae|R6|N C_003098.1|IG|110
agtttctcctattatctaggcgtctgcctttttgctttctatattatatcacaagtcttggctgagtccaatttctatggataaagagagtaaaaagagtgggcaaaccactcttttcttcta

SEQ ID NO: 508 - DNA, 350 bp, Streptococcus pneumoniae
  misc_feature (1)..(350): tiling:Spneumo1:WAN024A7S; Cluster includes WAN024EFY R6.I G_1102||||1061638..1061969|+|332 bp|Between spr1063 (ptsH) (- strand) and spr1064 (nrdH) (+ strand)|S.pneumoniae|R6| NC_003098.1|IG|110
agtttgactctccttttgttctttctttttttgagttatatgtgataacccttacaatttagtattataccatcttctaggatttttttcaagcattttctggattttccttcaatttcctttcagataacttgctgaaaatcttctatcctagataacaaaacacaggatatagtttctttaaaaacaatttataggataatcattgctatttcacaatacaaacactatatattgtgtttatatataaaaacaacaaaagaacaccactatatttagttcaaatcattgacaaaattttattttctgatatactaagatagtattaaattttgaagaggagttacaca

SEQ ID NO: 509 - DNA, 183 bp, Streptococcus pneumoniae
  misc_feature (1)..(183): tiling:Spneumo1:WAN024AJC; Cluster includes WAN024ELZ R6.I G_630.1||||619396..619567|+|172 bp|Between spr0606 (- stra nd) and spr0607 (+ strand)|S.pneumoniae|R6|NC_003098.1|IG| 110
agtttgttcatttactaacatcaagctttttcaatttcattttagacagtcatttraattttccgtattagtcttgcagcaagagattaatagaattagtcattattttattgattgcggactgagggactagagtatgttttacttarcccctcttttatttattaaaggttaggtttgtta

SEQ ID NO: 510 - DNA, 73 bp, Streptococcus pneumoniae
  misc_feature (1)..(73): tiling:Spneumo1:WAN024AIJ; Cluster includes WAN024ELN-rc R 6.IG_651.1.1||||636102..636174|-|73 bp|Between spr0627 (lc tO) (+ strand) and spr0628 (+ strand)|S.pneumoniae|R6|NC_0 03098.1|IG-rc|110
agttttcgatagcaatttattcttccaatacacgaagaaaaacctccacattcagtggaggcaatctgtttta

SEQ ID NO: 511 - DNA, 65 bp, Streptococcus pneumoniae
  misc_feature (1)..(65): tiling:Spneumo1:WAN024AGV; Cluster includes WAN024EKO-rc R 6.IG_729.2||||704572..704636|-|65 bp|Between spr0705 (+ st rand) and spr0706 (pepN) (+ strand)|S.pneumoniae|R6|NC_003 098.1|IG-rc|110
agttttctcctattctaagtttaagagctgctgctcttcttcaaacaaacttattatatcatatt

SEQ ID NO: 512 - DNA, 651 bp, Streptococcus pneumoniae
  misc_feature (1)..(651): tiling:Spneumo1:WAN024AO9; Cluster includes WAN024EOI R6.I G_443||||416417..417067|+|651 bp|Between spr0419 (- strand ) and spr0420 (xylR) (- strand)|S.pneumoniae|R6|NC_003098. 1|IG|110
agttttgatacctgtattcgttgtttcatgagcatttgacgtttcttttcatgtaggcatttcaacaattagaatgatatttttccgaggatgaacttatatattgtgactttttagagttatgatgcctcttgatttgactatcgctatcaatttcatccacttttacagtttcatggttttatgaaccgaaacatctaggtacaggttttagcatcaattgattgtttttgagccatatgaagttgaaacgtggagatrcttttcttgtgataacgccctattcaaagaggaataaccgtttttggagagagttcagtactatgtggcgctaaatactatatgtaaaacatatattaaacaagatttaactaaggagaattgtaaaaacaaaaatgagaatttcatataaagtttattctaggagtatgtatcttgaataaaaattgttatttaagttctgggggttatgatgaatgtttttataataataaaatgcagctagaagaaaagttattttaatataaatcactcaacatagcgagaaggcggtttcctatatggaagtcgtcttgttttcatattgtctaaatacgagatatctactacaggttatagttgatttaaacaggtctatagatttctaatata

SEQ ID NO: 513 - DNA, 342 bp, Streptococcus pneumoniae
  misc_feature (1)..(342): tiling:Spneumo1:WAN024DFA; Cluster includes WAN0244AI spr0 680||15902724|NP_358274.1|685395..685616|-|222 bp|Hypothet ical protein|S.pneumoniae|R6|NC_003098.1|ORF|231
amtaccatgaaaaagaatatcctgaagaagaagggagttactggactttytaaaatgaaatcttgcracctggatcaagcycttcatgagcatttttcagaagaagaattagctggycactttcatgtccttctatggacttttttacaatggcattgctatcacacccaatacctatctaagcgcctggttcgtaaactttattgcagctcttcctctaaatttcctaattgttgaaccaattgcccgttttatactaagttcttttcagaaaccatttactggggaagaagttgaagattttcaagatgatgatgaaatcccaactattatctaactaat

SEQ ID NO: 514 - DNA, 317 bp, Streptococcus pneumoniae
  misc_feature (1)..(317): tiling:Spneumo1:WAN0249RM; Cluster includes WAN024EB3 R6.I G_1498.1||||1435492..1435544|+|53 bp|Between spr1451 (truA ) (- strand) and spr1452 (+ strand)|S.pneumoniae|R6|NC_003 098.1|IG|110
arcctctattttatcaagaaattagtctgtaaacaaggacctaaaacaaatattgtatgggtataaaaatctcatactcttcgaaaatctcttcaaaccacgtcagtttccatctgcaacctcaacacactattttgagcaacctgcggctagctttctatagtagattgaaataagatatgaacaactctattaggaaagtcaaattaatttctagaaatattttagcagctacagcgtactattccaaactcaatcaactatagtttgctctttgattttcattgagtatcaaaagaaaaacttaggaatcaatc

SEQ ID NO: 515 - DNA, 53 bp, Streptococcus pneumoniae
  misc_feature (1)..(53): tiling:Spneumo1:WAN024AFF; Cluster includes WAN024EJU-rc R 6.IG_804||||768844..768896|-|53 bp|Between spr0774 (nifU) (+ strand) and spr0775 (+ strand)|S.pneumoniae|R6|NC_00309 8.1|IG-rc|110
artatcctttctttcttcatttctaataattcataagacaaaagaaacttgtc

SEQ ID NO: 516 - DNA, 137 bp, Streptococcus pneumoniae
  misc_feature (1)..(137): tiling:Spneumo1:WAN0249FV; Cluster includes WAN024E4D R6.I G_2161.2||||1941341..1941477|+|137 bp|Between spr1954 (- s trand) and spr1955 (+ strand)|S.pneumoniae|R6|NC_003098.1| IG|110
arttgtgctaaayatcataatttatattattttccgagaaattatagccattgacattacctaggaattgcgttataayatacatgtaagcggtacccaaaatggtgccaagtcaaaatttttaaggaggaaaatac

SEQ ID NO: 517 - DNA, 106 bp, Streptococcus pneumoniae
  misc_feature (1)..(106): tiling:Spneumo1:WAN024AMI; Cluster includes WAN024ENR R6.I G_478.2.1||||461899..461987|+|89 bp|Between spr0454 (grpE) (+ strand) and spr0455 (dnaK) (+ strand)|S.pneumoniae|R6| NC_003098.1|IG|110
asacgatactcttcgccgtggygctatttgcgcaaattttgagaccttaggctcaaagtttagtcaaagagattgacgaagtcaagctctgacggcgtcgccactg

SEQ ID NO: 518 - DNA, 145 bp, Streptococcus pneumoniae
  misc_feature (1)..(145): tiling:Spneumo1:WAN0249V6; Cluster includes WAN024E9Q-rc R 6.IG_1591||||1528905..1529049|-|145 bp|Between spr1544 (se cA) (- strand) and spr1545 (- strand)|S.pneumoniae|R6|NC_0 03098.1|IG-rc|110
aswrtcataaaagtcrgagaggttagcttgraaactaacctctttttccttttcaaaatggggattcttccttgaaaataatcagtaattgtgctaaaattaaaggaacattctaaaatattcggaatttaaagtaaggaaaaac

SEQ ID NO: 519 - DNA, 595 bp, Streptococcus pneumoniae
  misc_feature (1)..(595): tiling:Spneumo1:WAN024AB2; Cluster includes WAN024EHP R6.I G_979.1||||925120..925714|+|595 bp|Between spr0940 (+ stra nd) and spr0941 (+ strand)|S.pneumoniae|R6|NC_003098.1|IG| 110
ataaaaagaggtggaaaggcactattaaagactttaagtctaaaaaggtatcaaagtatgccagagataaaaaaatataaatatgacactttaaaggcgattagaaaattaaagaaatgctagaagacttttagatgacagttaccaagagggtctaattttcactgctayttatgcagtgggaattkgacctttttatataagcaaattctatttcaaaattggttaccaagaaagacttcttttcactgttaagtataagagggtaatttatagaattttgttacatcaagataaatattttctgatggtcaaattttaaaaagattaataactctcgataaattttgaaccttaacaattgaatagaccaagacaagacgttaattatttttggagcgtaataacctatccgtcaagatctttcggctgaataattcggcaaaaaaagttctgctaagcaaaaagaaagtgagcgataagtaagagtttgaatatagggagggataccctatccgctatgaagaaaatgaggrtaatgatacttctaaggttgaagccggctcatccggaatagaggcggargtgagattcc

SEQ ID NO: 520 - DNA, 50 bp, Streptococcus pneumoniae
  misc_feature (1)..(50): tiling:Spneumo1:WAN024A3Z; Cluster includes WAN024EDK R6.I G_1310.2||||1263334..1263383|+|50 bp|Between spr1266 (hemN ) (- strand) and spr1267 (- strand)|S.pneumoniae|R6|NC_003 098.1|IG|110
ataaaaatcaccatccccagatacatagtccgtccggagatggtgatggt

SEQ ID NO: 521 - DNA, 49 bp, Streptococcus pneumoniae
  misc_feature (1)..(49): tiling:Spneumo1:WAN024AOQ; Cluster includes WAN024EOU-rc R 6.IG_429||||401552..401600|-|49 bp|Between spr0405 (+ stra nd) and spr0406 (ilvA) (+ strand)|S.pneumoniae|R6|NC_00309 8.1|IG-rc|110
ataaaacctctttttctataaaaaacagtcactaatgactgttttttag

SEQ ID NO: 522 - DNA, 61 bp, Streptococcus pneumoniae
  misc_feature (1)..(61): tiling:Spneumo1:WAN0249DR; Cluster includes WAN024E37 R6.I G_2242||||2028032..2028092|+|61 bp|Between spr2035 (+ stra nd) and spr2036 (+ strand)|S.pneumoniae|R6|NC_003098.1|IG| 110
ataaaacttcaaaactcagttgggttaaccaactgagttttctatcattctacgaggtaac

SEQ ID NO: 523 - DNA, 56 bp, Streptococcus pneumoniae
  misc_feature (1)..(56): tiling:Spneumo1:WAN024ARG; Cluster includes WAN0247U1-rc R 6.IG_48.2.1||||28487..28542|-|56 bp|Between spr0027 (+ str and) and spr0028 (prsA) (+ strand)|S.pneumoniae|R6|NC_0030 98.1|IG-rc|110
ataaaagaagggcaccatatttgtacccttgcatcattcttttgaaaaatattcta

SEQ ID NO: 524 - DNA, 99 bp, Streptococcus pneumoniae
  misc_feature (1)..(99): tiling:Spneumo1:WAN024ADC; Cluster includes WAN024EIR R6.I G_896.2||||855163..855260|+|98 bp|Between spr0860 (+ stran d) and spr0861 (infC) (+ strand)|S.pneumoniae|R6|NC_003098 .1|IG|110
ataaaagttgagaaaagcagaagtgagagcttctcgccttgtgacattaagttgcctggccctacggatgaaaagtttcgaagaaacgctatcataacg

SEQ ID NO: 525 - DNA, 131 bp, Streptococcus pneumoniae
  misc_feature (1)..(131): tiling:Spneumo1:WAN0249NF; Cluster includes WAN024E8I R6.I G_1695.1||||1618842..1618972|+|131 bp|Between spr1646 (- s trand) and spr1647 (galE) (- strand)|S.pneumoniae|R6|NC_00 3098.1|IG|110
ataaagaccttcttttttatatttgacatcggtgtcayyatgtttacattatacaatgaaaccgtttcctttgtcaagcrctkkcaaacatttttttwaatttatctttcattaaatatgcatttcattaa

SEQ ID NO: 526 - DNA, 80 bp, Streptococcus pneumoniae
  misc_feature (1)..(80): tiling:Spneumo1:WAN024AH7; Cluster includes WAN024EKU-rc R 6.IG_707.1.2||||687165..687244|-|80 bp|Between spr0683 (+ strand) and spr0684 (+ strand)|S.pneumoniae|R6|NC_003098.1 |IG-rc|110
ataaagagaccttcatcagtccgagactgctgttaatgttcgattaagtagtcttggaattgcctaaacgttcaatcttt

SEQ ID NO: 527 - DNA, 561 bp, Streptococcus pneumoniae
  misc_feature (1)..(561): tiling:Spneumo1:WAN0249TR; Cluster includes WAN024E3Y-rc R 6.IG_2189.2||||1974172..1974481|-|310 bp|Between spr1982 ( dltA) (- strand) and spr1983 (- strand)|S.pneumoniae|R6|NC _003098.1|IG-rc|120
ataaatataaatcatacagctaattagatttgcaacagtctgttatcaatgattctacccaaatcctaacaagatatagtgaatttcgaatacgctatataatacggacacttgaaaatagaaattggggatgaaaggggatctataatttctggaagtactatcaaaaattaatatcatagtcttattagagaatagcatcacccactttctcaaataagattaaattgtaactgaattataatgaaaaagagastgrkyaawmagtctttaaaaatcagaaaagcgcatagtatcaggtrttgaaaaaacttgatattgtgtgttttattatgggaagatttacttcattgtctcctgaaatggagttttgaagcaggatcactctatttgaaaatatacatagaaaaactgtataatccttaaaataagctgaaatctattggaaacatacggtaaacaattgaaaagatactatataaagtggtacaatggtagaaaaataagctagtaagaatcactcttattttagcgaaaaattacagaaatgaatggtttttc

SEQ ID NO: 528 - DNA, 207 bp, Streptococcus pneumoniae
  misc_feature (1)..(207): tiling:Spneumo1:WAN0249O6; Cluster includes WAN024E8X R6.I G_1662.2||||1590332..1590538|+|207 bp|Between spr1616 (csh A) (+ strand) and () (+ strand)|S.pneumoniae|R6|NC_003098. 1|IG|110
ataaatatagaaacgctgtggtgtacgacttcacacttaagtgttgaccgactattttttgtattattagggaaacaaaagtcttctaacagcatgtaggccgtctcacacggaaacagcttcagttagagcgagttgcccacctgcttaattgcgcgggttcaatacaaaccgtgaagtttcggcaccaatacagcttttttcttt

SEQ ID NO: 529 - DNA, 130 bp, Streptococcus pneumoniae
  misc_feature (1)..(130): tiling:Spneumo1:WAN0249RO; Cluster includes WAN024EB4-rc R 6.IG_1492.2||||1431922..1432047|-|126 bp|Between spr1445 ( pepQ) (+ strand) and spr1446 (- strand)|S.pneumoniae|R6|NC _003098.1|IG-rc|110
ataaattaattgtctaactgtttggggkcagtacattcaayacctgatactatgcgttttattgtgggragattttcctcattttctagtgaaattgaactttttctaacatcttttgatagatgacttc

SEQ ID NO: 530 - DNA, 248 bp, Streptococcus pneumoniae
  misc_feature (1)..(248): tiling:Spneumo1:WAN0249L6; Cluster includes WAN024E78-rc R 6.IG_1864.1.2||||1720018..1720265|-|248 bp|Between spr1749 (- strand) and spr1750 (- strand)|S.pneumoniae|R6|NC_0030 98.1|IG-rc|110
ataaatttggataaatcgaactcactattcaggaggcatatgagcaattcgaaaaagaaaagtgtcaaattgagcctataggagtagaagtgaaatagtaagtcctgcatagtggatgagagaaaagttctccttgaagttttcctgaactatcagtcgcatgtcaaacgatatgtagggtaatgtgagaggggatagcgagtagtttttggttattttatcaaaaaacttatattttattataccga

SEQ ID NO: 531 - DNA, 253 bp, Streptococcus pneumoniae
  misc_feature (1)..(253): tiling:Spneumo1:WAN0249NX; Cluster includes WAN024E8S-rc R 6.IG_1671.1.1||||1598328..1598580|-|253 bp|Between spr1622 (- strand) and spr1623 (+ strand)|S.pneumoniae|R6|NC_0030 98.1|IG-rc|110
ataactttaatatagaaaagtcaattatttcgattgttattattatataattttaaaaaatcaaattctttaattgttgctattatataatttttaaaattaaaaatataatctttagacttgaatttgattctgtattcacgccctcaatagacggtaaaataagaaaattgtttatatattgtctccgtagtgttattatacgaaataaaagattttaggaaaagtcgttatatcatgctatacctattct

SEQ ID NO: 532 - DNA, 212 bp, Streptococcus pneumoniae
  misc_feature (1)..(212): tiling:Spneumo1:WAN024A2K; Cluster includes WAN024771-rc R 6.IG_147.2||||137156..137367|-|212 bp|Between spr0126 (- s trand) and spr0127 (orf51) (- strand)|S.pneumoniae|R6|NC_0 03098.1|IG-rc|110
ataagaaacacatttttagaaggataaattttattgtcttcatctcttacagtttgctcagcattctcaatgatttgaacattactacyatccctttaccattcgatttatctgtttgtattgttttatttttatgcttcaactctatttttgakcagaacaatgactcccataaaaataataagctttgaaaattccattgtcatgtcatg

SEQ ID NO: 533 - DNA, 129 bp, Streptococcus pneumoniae
  misc_feature (1)..(129): tiling:Spneumo1:WAN0249OS; Cluster includes WAN024E9B-rc R 6.IG_1629||||1564517..1564645|-|129 bp|Between spr1583 (gm k) (- strand) and spr1584 (- strand)|S.pneumoniae|R6|NC_00 3098.1|IG-rc|110
ataagaaagagcagttgaaaaattactgcttttttgttacactagatagaaagactgtaaaggataatctggctttttgccattattctagagaaatgttatttcacagattgactaaaaggagacaca

SEQ ID NO: 534 - DNA, 176 bp, Streptococcus pneumoniae
  misc_feature (1)..(176): tiling:Spneumo1:WAN0249GW; Cluster includes WAN024E4U-rc R 6.IG_2122.1||||1894692..1894867|-|176 bp|Between spr1915 ( + strand) and spr1916 (malP) (- strand)|S.pneumoniae|R6|NC _003098.1|IG-rc|110
ataagatcattccttttctctctttttctttaagtaattatatacaatgtacgacgaagtcgtcattgcaatgctgatccaccacctaaagggaactttaaacaacattgataagataaagaatataaacaacgaaaatacgttatacccaattaattttattgtatatctcatga

SEQ ID NO: 535 - DNA, 131 bp, Streptococcus pneumoniae
  misc_feature (1)..(131): tiling:Spneumo1:WAN0249FW; Cluster includes WAN024E4E R6.I G_2161.1.2||||1940985..1941115|+|131 bp|Between spr1954 (- strand) and spr1955 (+ strand)|S.pneumoniae|R6|NC_003098. 1|IG|110
ataagtgattattctaaactatcayctcgtcgactagactataacaaaaaataaaaagagggtcaataagataattatctcttcctaaatactcagaaaagattctataatttgtacaattgaacaagaaa

SEQ ID NO: 536 - DNA, 58 bp, Streptococcus pneumoniae
  misc_feature (1)..(58): tiling:Spneumo1:WAN024AEC; Cluster includes WAN0247I1 R6.I G_111||||97961..98017|+|57 bp|Between spr0090 (- strand) a nd spr0091 (+ strand)|S.pneumoniae|R6|NC_003098.1|IG|110
ataatacctcttctagctgattttaataacagcttattttaaggctttttcactataa

SEQ ID NO: 537 - DNA, 86 bp, Streptococcus pneumoniae
  misc_feature (1)..(86): tiling:Spneumo1:WAN0249XV; Cluster includes WAN024EBD-rc R 6.IG_1479||||1419253..1419321|-|69 bp|Between spr1435 (apt ) (- strand) and spr1436 (- strand)|S.pneumoniae|R6|NC_003 098.1|IG-rc|110
ataattattgaagttaacttttccttttttctttcttaaaaaatatgctataatagagagtaaaaaactttgaaagaaagaaaaag

SEQ ID NO: 538 - DNA, 61 bp, Streptococcus pneumoniae
  misc_feature (1)..(61): tiling:Spneumo1:WAN024AI5; Cluster includes WAN024ELC-rc R 6.IG_676.1||||659377..659437|-|61 bp|Between spr0652 (- st rand) and spr0653 (+ strand)|S.pneumoniae|R6|NC_003098.1|I G-rc|110
ataattgtaaaaaaagacagaacctttgtcaatgtataactgacaaagatggagaatttct

SEQ ID NO: 539 - DNA, 66 bp, Streptococcus pneumoniae
  misc_feature (1)..(66): tiling:Spneumo1:WAN0249M4; Cluster includes WAN024E7T-rc R 6.IG_1755||||1676928..1676993|-|66 bp|Between spr1706 (ami C) (- strand) and spr1707 (amiA) (- strand)|S.pneumoniae|R 6|NC_003098.1|IG-rc|110
ataatttctaatagaactttctctccatgaggagaaggttcttttgggatttttaaaggaaataat

SEQ ID NO: 540 - DNA, 145 bp, Streptococcus pneumoniae
  misc_feature (1)..(145): tiling:Spneumo1:WAN0249FJ; Cluster includes WAN024E46 R6.I G_2170||||1951485..1951629|+|145 bp|Between spr1963 (adh2) (- strand) and spr1964 (fucI) (- strand)|S.pneumoniae|R6| NC_003098.1|IG|110
ataattttcctcctgcgcctccgcgctatctatttaacatcattatattactttttgtattcgttttyaattatttgtgaattgtttaacaaatctttttaaaaggataggagggacgtaagttcacctcctatataaacaagtt

SEQ ID NO: 541 - DNA, 411 bp, Streptococcus pneumoniae
  misc_feature (1)..(411): tiling:Spneumo1:WAN0249TK; Cluster includes WAN024E9J R6.I G_1607.1||||1540721..1540817|+|97 bp|Between spr1560 (+ st rand) and spr1561 (natB) (- strand)|S.pneumoniae|R6|NC_003 098.1|IG|210
ataatttttacctagatatgtaacatactcatagaacaaaagagaccaggcaaaaagtctttamaattagaaaacgcatagtatcargtgttgaatatgtactgccccccaaaagttagattttttctgtctaacttttgggggcagttcawaarawccttgrtawtatgcgttttttgtgagctgacttatttcctttcactatatcgcaaaatgaaataagaacggaacgatgggattttggaattcaaatcaatttrtaagaatgttttagaagtaatattatcctattccagattcagttcactatacaattgagttttcaagcaacytgtttacataatgtgtacataattaggttcgtgattccacccttttcacctttaaaaacctcgctttcgcaaggctctt

SEQ ID NO: 542 - DNA, 211 bp, Streptococcus pneumoniae
  misc_feature (1)..(211): tiling:Spneumo1:WAN0249N8; Cluster includes WAN024E8F-rc R 6.IG_1701.2.1||||1625736..1625946|-|211 bp|Between spr1652 (- strand) and spr1653 (+ strand)|S.pneumoniae|R6|NC_0030 98.1|IG-rc|110
ataayrcaaatatycyatatgtttagtgatgcttgctatacatyattagatctcctgcgagacaatctataaaacacttgtctacgattacctatatgccctattccagtattttagaagcactgcatctatttttatcgaggttaaatctagcttttatagaaggtctatttaagaaatatattgtagtgttttagtttcaatccgccat

SEQ ID NO: 543 - DNA, 78 bp, Streptococcus pneumoniae
  misc_feature (1)..(78): tiling:Spneumo1:WAN0249EU; Cluster includes WAN024E3O-rc R 6.IG_2202||||1989650..1989727|-|78 bp|Between spr1995 (psp C) (- strand) and spr1996 (- strand)|S.pneumoniae|R6|NC_00 3098.1|IG-rc|110
atacaaaattcgatttatatacagttcatattgaagtratatagtaaggttaaagaaaaaatatagaaggaaataaac

SEQ ID NO: 544 - DNA, 193 bp, Streptococcus pneumoniae
  misc_feature (1)..(193): tiling:Spneumo1:WAN024A8B; Cluster includes WAN024EGB-rc R 6.IG_1084.1||||1039495..1039687|-|193 bp|Between spr1045 ( + strand) and spr1046 (xerC) (+ strand)|S.pneumoniae|R6|NC _003098.1|IG-rc|110
atacagtaaactcctttctagctttatactttatcatttctaacttaattatagtcttatttttaataaagttcaattatttatatgtaaaattcctcatcagtaaaaaataaccgatctcattyctgagaatcggttttctaaataaatcaaactgatcatttacataacataaattatgtaaatrmtcata

SEQ ID NO: 545 - DNA, 294 bp, Streptococcus pneumoniae
  misc_feature (1)..(294): tiling:Spneumo1:WAN0249U7; Cluster includes WAN024E8P R6.I G_1675.2||||1600959..1601115|+|157 bp|Between spr1626 (+ s trand) and spr1627 (- strand)|S.pneumoniae|R6|NC_003098.1| IG|220
atacagtctcttttgaggggctgattcaggttcataatcgcagtyaacattgatttcaaggctgtttgctttctatctcccctttttcataatgtatartaaaatgaaayaakaayaggacraatygatcgggacagtyaaatcgatttctaacaatgttttagaagtagaggtgtactattatagtttcagtctactatagaactgaccaagtcagtaacctagacttagggcaaggcggcactgacctagtttgaagagatttccgaagagtataaattttaatattttctt

SEQ ID NO: 546 - DNA, 152 bp, Streptococcus pneumoniae
  misc_feature (1)..(152): tiling:Spneumo1:WAN024ANR; Cluster includes WAN024E1K-rc T IGR4.IG_159||||160059..160210|-|152 bp|Between SP0163 (+ s trand) and SP0164 (+ strand)|S.pneumoniae|TIGR4|NC_003028. 1|IG-rc|020
atacctctcctttygttttcttgcatttattttatcacttcaaaattagcttgtcaaktrtttttataatstttttttatttttttttrtttratacttttttgtatyyraaytagrtttraaaaacgatgctcactwgaacaccgtattcm

SEQ ID NO: 547 - DNA, 69 bp, Streptococcus pneumoniae
  misc_feature (1)..(69): tiling:Spneumo1:WAN0249RL; Cluster includes WAN024ED5-rc R 6.IG_1326.2||||1277675..1277742|-|68 bp|Between spr1282 (- strand) and spr1283 (+ strand)|S.pneumoniae|R6|NC_003098. 1|IG-rc|110
atacctgatactatgcgtttttaagattttaaagacttttttcctwkmycykktwtactttatctggta

SEQ ID NO: 548 - DNA, 247 bp, Streptococcus pneumoniae
  misc_feature (1)..(247): tiling:Spneumo1:WAN024ANU; Cluster includes WAN024E1L TIGR 4.IG_158||||158945..159191|+|247 bp|Between SP0162 (+ stra nd) and SP0163 (+ strand)|S.pneumoniae|TIGR4|NC_003028.1|I G|020
atacggaaaggggctgaaagaactaggggaacagttggaattagaaagtgataggtatgaaaagtggcgttgaagctgaataagtttataaagcgtttgaatgaagaaatggaaagtaaataagttgacgatgaattasmmaatagattwtatctacaatktgtatctttyrwawmatwkatttgaawtttagatttaatcatgttacaattaamaytgaaatcaaatagaaraggaaratgcaaac

SEQ ID NO: 549 - DNA, 120 bp, Streptococcus pneumoniae
  misc_feature (1)..(120): tiling:Spneumo1:WAN0249K7; Cluster includes WAN024E6O R6.I G_1895.2||||1752196..1752315|+|120 bp|Between () (+ strand ) and spr1778 (hlyX) (- strand)|S.pneumoniae|R6|NC_003098. 1|IG|110
atacgtataactttaaaaacttttggagcgagtttgtggcagagttctttccatggcataattcccttttgaaatcaattgaaaaaagcttcgtcacgcctggtgacaaaagcctctagt

SEQ ID NO: 550 - DNA, 205 bp, Streptococcus pneumoniae
  misc_feature (1)..(205): tiling:Spneumo1:WAN0249JK; Cluster includes WAN0247W1-rc R 6.IG_37.2||||21957..22161|-|205 bp|Between spr0019 (- stra nd) and spr0020 (+ strand)|S.pneumoniae|R6|NC_003098.1|IG- rc|110
atactccttttcttttttataaacttattctaacaaaaaattttacacattcactatcaattcctgaattgttaaaataccagcctcaacaagataaaaataggaaaagttgacaaaatagaaacaaatttgctacctaaatttcaaamaattaaagttctaaaaagaccgccttaaaacttttgggtaartcctattagaacta

SEQ ID NO: 551 - DNA, 274 bp, Streptococcus pneumoniae
  misc_feature (1)..(274): tiling:Spneumo1:WAN0249R2; Cluster includes WAN024EEW-rc R 6.IG_1193||||1154475..1154748|-|274 bp|Between spr1152 (li cD2) (+ strand) and spr1153 (carB) (- strand)|S.pneumoniae |R6|NC_003098.1|IG-rc|110
atagaaaaataagatatagcakactgaatttagaacagtacacaggaatactaaaatatttctakaaattaatttgaattttctaattgatttgttcgcatcttatttcaatctactatagaaaaaagtctttaaaattataaaacgcatcatatcaaggtttttcaaaaaccttgatatgatgcgttttattgtgggaatatgtatttcattttctactaaaattatgtttttgaataacctctatcttagtagtttgtataatccccctcaa

SEQ ID NO: 552 - DNA, 391 bp, Streptococcus pneumoniae
  misc_feature (1)..(391): tiling:Spneumo1:WAN024AOA; Cluster includes WAN024EOK-rc R 6.IG_441||||415634..416024|-|391 bp|Between spr0417 (- str and) and spr0418 (+ strand)|S.pneumoniae|R6|NC_003098.1|IG -rc|110
atagattccaaattttctctatctgctcattttaataaacaatactagtgtaactatccttccagtcagaarcttgtcaaatcacaccgaaaaytcttctaaaatttatctcgttaggcaatcaagcaaaaactcgacgatagtacaaacattatcatacagrattgactkcctaaattatatactttagtaaggttttcggataagaaaaaaggttcattttacatttctaaacattcttttctaagatgaaaaacagaatttttcgattgtgatttaaagcaacaagaagattttcagtatcatcctatagatacgagctaattaagaaaaactacatttttgaatataaactacaataatataaactaaattttataggaggaagaca

SEQ ID NO: 553 - DNA, 65 bp, Streptococcus pneumoniae
  misc_feature (1)..(65): tiling:Spneumo1:WAN024A2D; Cluster includes WAN024ECQ R6.I G_1356||||1303098..1303162|+|65 bp|Between spr1312 (trxB) (- strand) and spr1313 (- strand)|S.pneumoniae|R6|NC_00309 8.1|IG|110
atagattccttctttcttgttgtaactatctttattctaactctttcttgtcaatcacgcaagga

SEQ ID NO: 554 - DNA, 54 bp, Streptococcus pneumoniae
  misc_feature (1)..(54): tiling:Spneumo1:WAN024A4Q; Cluster includes WAN024EDX-rc R 6.IG_1269.1||||1223471..1223524|-|54 bp|Between spr1225 (l icD1) (- strand) and spr1226 (- strand)|S.pneumoniae|R6|NC _003098.1|IG-rc|110
atagattttcaccccttgtttgtggtataatgaaacgatacgatagaaagaata

SEQ ID NO: 555 - DNA, 83 bp, Streptococcus pneumoniae
  misc_feature (1)..(83): tiling:Spneumo1:WAN024A2G; Cluster includes WAN024ECS-rc R 6.IG_1348||||1297632..1297699|-|68 bp|Between spr1304 (cpp A) (- strand) and spr1305 (- strand)|S.pneumoniae|R6|NC_00 3098.1|IG-rc|110
atagctaaataatgttaaatttgagcataatatcttgtaaaaaattctaaaatcctttaaaataaaaagtgacggaggaattt

SEQ ID NO: 556 - DNA, 93 bp, Streptococcus pneumoniae
  misc_feature (1)..(93): tiling:Spneumo1:WAN024ANI; Cluster includes WAN024EO8-rc R 6.IG_461.1||||436634..436726|-|93 bp|Between spr0437 (rpoE ) (+ strand) and spr0438 (pyrG) (+ strand)|S.pneumoniae|R6 |NC_003098.1|IG-rc|110
atagctccctaagaactagggagccccgacctctaaaagaggtgcccaaacaatatgatacctaaaaataggataattgtcaatagctaactc

SEQ ID NO: 557 - DNA, 237 bp, Streptococcus pneumoniae
  misc_feature (1)..(237): tiling:Spneumo1:WAN024F2K; Cluster includes WAN023KME 3152 12_3261||||1744471..1744767|+|297 bp|EGAD orf prediction|S .pneumoniae|R6|NC_003098.1|ORF|110
atagctgcgtcagtaaggacacgagttgtttcctggaaggaagccgctgacaagaaactgtttgtttcaagtgaggctttggtaattcccataaggactgggcgacctgtcgctggaactccacctgcgataaggacatctttgttggcatctgtaaagtcattgatatccatgagggtacccatgagaagatctgtatcacctggatccatgacacggactttacggatcatttga

SEQ ID NO: 558 - DNA, 157 bp, Streptococcus pneumoniae
  misc_feature (1)..(157): tiling:Spneumo1:WAN024AQZ; Cluster includes WAN024EQ6-rc R 6.IG_306.2||||284947..285102|-|156 bp|Between spr0285 (bas A) (- strand) and spr0286 (hysA) (+ strand)|S.pneumoniae|R 6|NC_003098.1|IG-rc|110
ataggaactaaatctcaaattagagatttatagcaacwaagtaaaccggtttaattaaatcataccatttttaaagttatttgtaaacggtttctatcatattgarggcttattcttcaacaatatcttccatccgactcgacgaaaaaagtaaaaa

SEQ ID NO: 559 - DNA, 70 bp, Streptococcus pneumoniae
  misc_feature (1)..(70): tiling:Spneumo1:WAN0249HA; Cluster includes WAN024E4Z-rc R 6.IG_2116.1||||1888502..1888571|-|70 bp|Between spr1909 (p bp1b) (- strand) and spr1910 (tyrS) (+ strand)|S.pneumonia e|R6|NC_003098.1|IG-rc|110
atagggaagaaagtggctattttattgaaaatttcccttttgtggtataatagataaagtgaggaaatcc

SEQ ID NO: 560 - DNA, 64 bp, Streptococcus pneumoniae
  misc_feature (1)..(64): tiling:Spneumo1:WAN024AIZ; Cluster includes WAN024ELV-rc R 6.IG_636.1.1||||624096..624159|-|64 bp|Between spr0612 (- strand) and spr0613 (pyrF) (+ strand)|S.pneumoniae|R6|NC_0 03098.1|IG-rc|110
atagttaaagactttcacttmggacagagaaaaagagtttgcttgttaccctttaattgaacaa

SEQ ID NO: 561 - DNA, 353 bp, Streptococcus pneumoniae
  misc_feature (1)..(353): tiling:Spneumo1:WAN0249LQ; Cluster includes WAN024E7I-rc R 6.IG_1834||||1700356..1700708|-|353 bp|Between spr1719 (+ strand) and spr1720 (- strand)|S.pneumoniae|R6|NC_003098.1 |IG-rc|110
atakcattttctctgttragatattgtttttaaaatattgtactaaatgattgatgctatgtggaaatacaaaaaaatgtttttgatacgaagttgacctgtattttttatactaatcattttcgtattttttgtattaaacgatataagtttgttgtaaacttacaaggaataaagacattaaaaaataacagtatatctatttgttttatatattttacgaattytgcataaatctctttctagtaatgtgttgtaactctgctataatagatttattcctttttgtgtttacacaatttattttatactaccaaaaaaggtcaggattttgttcctgacctttgacaact

SEQ ID NO: 562 - DNA, 312 bp, Streptococcus pneumoniae
  misc_feature (1)..(312): tiling:Spneumo1:WAN024A5S; Cluster includes WAN024EEV R6.I G_1194||||1157926..1158237|+|312 bp|Between spr1153 (carB) (- strand) and spr1154 (carA) (- strand)|S.pneumoniae|R6| NC_003098.1|IG|110
atataagatattaagggtgtcaagcggacaaagctaaaataggagttatgacgaagaactgtcagttctaggaataactatctttttagcaccgtccgtagcccgtattcagttcagcaaatacggagcacccttctcctttctattcgtcgcctctcagggcgacattaaataagatacaaaggacgaatagaaagcgattgaattttaggaaatcaaggaaggattgacaatccaagttggtttctctacattctgagctttccgtccgtgttcagttacataaattctccgacgagcttttactcgttc

SEQ ID NO: 563 - DNA, 73 bp, Streptococcus pneumoniae
  misc_feature (1)..(73): tiling:Spneumo1:WAN0249DI; Cluster includes WAN024E34-rc R 6.IG_2256.2||||2035554..2035626|-|73 bp|Between spr2043 (c omC) (- strand) and () (- strand)|S.pneumoniae|R6|NC_00309 8.1|IG-rc|110
atataatagcaaagctgggaattttcccggcttttttcttaaaaaagtacactttgggagaaaaaaatgacag

SEQ ID NO: 564 - DNA, 166 bp, Streptococcus pneumoniae
  misc_feature (1)..(166): tiling:Spneumo1:WAN0249ML; Cluster includes WAN024E85 R6.I G_1722||||1646181..1646346|+|166 bp|Between spr1673 (+ str and) and spr1674 (- strand)|S.pneumoniae|R6|NC_003098.1|IG |110
atatagagtaaagcttcagttgtcttatttctaggttactgagttttttatcttttcaacaacaaaagaggacccgccgatcctctttttcatactataaatccttgattatcaactatatctgttttaatcgaaatctcaaaacagcactttcaaacatcttttc

SEQ ID NO: 565 - DNA, 426 bp, Streptococcus pneumoniae
  misc_feature (1)..(426): tiling:Spneumo1:WAN0249QL; Cluster includes WAN024ELK R6.I G_654.1||||639027..639452|+|426 bp|Between spr0630 (thiE) (+ strand) and spr0631 (+ strand)|S.pneumoniae|R6|NC_00309 8.1|IG|110
atatctatccttggattctaagtaagtaggattttccttttttaaaaagctatgtccagattcagcttgaatggctaattcatcaaacaggtcatttgttttttgcaaaagaaagatctgctgtctttgtgagtgcaaggctgtatttccagttcaatttcttgaactagtataaaatgtgtgttataataatcacataattaaataataaagacatttggggtgctttaggctgagatgatacccattgaacctgatacagttaagactggcgaagggaaatgtgaaatgtttttttcgtatgtcgaaaagaactgtctaatcttgtaagctgaactctaattygtatctgtaattagagttttttcttttacgaaactggatgaagatgatatagtagattgaaataagatgcgaacaaatcaa

SEQ ID NO: 566 - DNA, 216 bp, Streptococcus pneumoniae
  misc_feature (1)..(216): tiling:Spneumo1:WAN024A2N; Cluster includes WAN024ECU R6.I G_1343.2||||1292390..1292605|+|216 bp|Between spr1299 (- s trand) and spr1300 (guaA) (- strand)|S.pneumoniae|R6|NC_00 3098.1|IG|110
atattagaaagttggctctctaattaaattaattctcattatatatatcaaaagaccgcagyttgaaaactacggtctaattttttgtccaaatgtaaaycacttggaactattattcaatttattctttttagyaaatgttcccgttttaatcccagttacagtttttaatcctctgtaaccgttgattttacaaagcttttaatttttttgcga

SEQ ID NO: 567 - DNA, 101 bp, Streptococcus pneumoniae
  misc_feature (1)..(101): tiling:Spneumo1:WAN024ANB; Cluster includes WAN024EO3 R6.I G_462.2.2||||439088..439188|+|101 bp|Between spr0438 (pyrG ) (+ strand) and spr0439 (- strand)|S.pneumoniae|R6|NC_003 098.1|IG|110
atattatatatctgcagaatactctttcagtttcattcakcctagtcttgcttaggaaaaagtaaraagccatccaattatgatggatagcttcttggttm

SEQ ID NO: 568 - DNA, 127 bp, Streptococcus pneumoniae
  misc_feature (1)..(127): tiling:Spneumo1:WAN024A9F; Cluster includes WAN024EGX-rc R 6.IG_1042||||986926..987052|-|127 bp|Between spr1003 (- st rand) and spr1004 (+ strand)|S.pneumoniae|R6|NC_003098.1|I G-rc|110
atattctcccttgttctcatattatccgtcaaaaatatctttgattttttctccagattcatatacaataaatacaatgcttattataccataaatccgctttcaacgataaaaaaaggtaagaaaa

SEQ ID NO: 569 - DNA, 121 bp, Streptococcus pneumoniae
  misc_feature (1)..(121): tiling:Spneumo1:WAN024A2S; Cluster includes WAN024ECZ R6.I G_1331.2||||1282213..1282333|+|121 bp|Between spr1287 (spn IM) (+ strand) and spr1288 (- strand)|S.pneumoniae|R6|NC_0 03098.1|IG|110
atattggcggtcttcggactgcctttatttttttatccatttttcaaatcaaatttattcagactatatatgcacatatacacttaaattcatataaaaacatggcttgtaaaaaattact

SEQ ID NO: 570 - DNA, 147 bp, Streptococcus pneumoniae
  misc_feature (1)..(147): tiling:Spneumo1:WAN024AKY; Cluster includes WAN024EMZ-rc R 6.IG_546.2||||522980..523124|-|145 bp|Between spr0522 (+ s trand) and H-truncation (transposase) (+ strand)|S.pneumon iae|R6|NC_003098.1|IG-rc|110
atatttataattcattcctttcgtttcactcaaggcacaacacagaatgaaaaagtgttgtgatctttattttgttttataataatagtgagaaarcctatcactactacaaatcacggggaggtgaataagtgagtggtacagcca

SEQ ID NO: 571 - DNA, 94 bp, Streptococcus pneumoniae
  misc_feature (1)..(94): tiling:Spneumo1:WAN024ACW; Cluster includes WAN024EIJ R6.I G_925||||879328..879421|+|94 bp|Between spr0889 (- strand) and spr0890 (- strand)|S.pneumoniae|R6|NC_003098.1|IG|110
atatttcctccaactatttctatttcaaaaaatccttactatattgtatcacaatcagacacaaaaagaaaaagcaaatgataaacaaatgctt

SEQ ID NO: 572 - DNA, 150 bp, Streptococcus pneumoniae
  misc_feature (1)..(150): tiling:Spneumo1:WAN024A3S; Cluster includes WAN024EDH-rc R 6.IG_1316||||1267058..1267180|-|123 bp|Between spr1272 (na gB) (- strand) and spr1273 (queA) (+ strand)|S.pneumoniae| R6|NC_003098.1|IG-rc|110
atatttgttcattctttctaagttctaatcctatccattataacacgtttcaagtttggacgctctttttttagaaattaaatcgttttcacttgacaaaaattggtctataccatataataaatatagacaraaatggaggatgaaaag

SEQ ID NO: 573 - DNA, 103 bp, Streptococcus pneumoniae
  misc_feature (1)..(103): tiling:Spneumo1:WAN024ARC; Cluster includes WAN024EQC-rc R 6.IG_298||||276227..276328|-|102 bp|Between spr0277 (+ str and) and spr0278 (+ strand)|S.pneumoniae|R6|NC_003098.1|IG -rc|110
atcaaagctgtgctaagttggcttatttgttatctatttttattataaaataaagcgtttccaatgacaattccctcattttcctaaatgatatggaaaaaaa

SEQ ID NO: 574 - DNA, 61 bp, Streptococcus pneumoniae
  misc_feature (1)..(61): tiling:Spneumo1:WAN0249XD; Cluster includes WAN024EAZ R6.I G_1505||||1439711..1439771|+|61 bp|Between spr1458 (fer) ( + strand) and spr1459 (gtrB) (- strand)|S.pneumoniae|R6|NC _003098.1|IG|110
atcaatggcgataatccactccctctagtttagcacatttccatgtaaaattatagtcttt

SEQ ID NO: 575 - DNA, 180 bp, Streptococcus pneumoniae
  misc_feature (1)..(180): tiling:Spneumo1:WAN024FY4; Cluster includes WAN023LAX 3134 61_2151||||1159036..1159296|+|261 bp|EGAD orf prediction|S .pneumoniae|R6|NC_003098.1|ORF|110
atcacgattaataccataatttcctaccaaaggataagtaaaggtcaagatttgtccattataagactggtctgtaatggattcttggtagccggtcatccctgtattaaagacgatttcgcctgttacatcaatatctgctccgaaggccttgccttcaaaaactgtgccatcttctaa

SEQ ID NO: 576 - DNA, 99 bp, Streptococcus pneumoniae
  misc_feature (1)..(99): tiling:Spneumo1:WAN0249HR; Cluster includes WAN024E58 R6.I G_2091||||1861388..1861477|+|90 bp|Between spr1884 (guaA) (- strand) and spr1885 (- strand)|S.pneumoniae|R6|NC_00309 8.1|IG|110
atcactcaaaatgactttcgtctaatatgttttttttaaggctgtgataaacattttttatggacaagaaaaagctgcccacataggacaacttctttc

SEQ ID NO: 577 - DNA, 178 bp, Streptococcus pneumoniae
  misc_feature (1)..(178): tiling:Spneumo1:WAN024AGF; Cluster includes WAN024EKB-rc R 6.IG_752||||728271..728360|-|90 bp|Between spr0728 (glnQ) (+ strand) and spr0729 (folD) (+ strand)|S.pneumoniae|R6|N C_003098.1|IG-rc|110
atcacttctcttttcttacaaatatctttaattataccaaaaaatacaatgtagctctaacacttctttcctaggywatcctatagyttyaaactataagaaaaagctctggttgarcttttcactaatcttstcttkaamktttaaarywgrctacaaatagctaaacaaagctaac

SEQ ID NO: 578 - DNA, 167 bp, Streptococcus pneumoniae
  misc_feature (1)..(167): tiling:Spneumo1:WAN024AO5; Cluster includes WAN024EOG R6.I G_446||||421670..421836|+|167 bp|Between spr0422 (+ strand ) and spr0423 (+ strand)|S.pneumoniae|R6|NC_003098.1|IG|11 0
atcataagtatagaaaatgaactaaggtattcagagaagattgatcctaaatattatgaaatttaaggatttttaagatatttagggtcaactttctatttatatcgtagcgaagtcattttaataatgatgtgtaaaagatggatcaagattgaggaggaagaaag

SEQ ID NO: 579 - DNA, 569 bp, Streptococcus pneumoniae
  misc_feature (1)..(569): tiling:Spneumo1:WAN024D9K; Cluster includes WAN0243X4 spr1 163|lemA|15903206|NP_358756.1|1165547..1166107|-|561 bp|Cy toplasmic membrane protein|S.pneumoniae|R6|NC_003098.1|ORF |111
atcatgacttggattattcttggagttwtmgctcttrttgttatttttgtgattgttagctataacggtttggttaaaaatcgtatgcaaaccaaggaggcttggagtcagattgatgttcagttgaaacgtcgmaatgayctcttgccraacttgattgagactgtaaaaggttatgccaaatatgaaggttctacccttgaaaaggtggcagaactacgtaaccaagtggcggcagcgacttcaccagcagaagctatgaaagccagtgatgccctcactcgtcargtttcaggtatttttgcagttgcagaaagctatccagatttgaaagctagtgctaactttgttaaattgcaagaggagttgacaaacacagaaaataaaatttcttactctcgtcaactctataacagtgttgtcagcaactacaatgtaaaattagaaactttcccgagcaatattatcgctggaatgtttggatttaaagcggcagatttccttcaaacacctgaagaggaaaagtcggttcctaaagttgattttagcggtttaggtgactaactaat

SEQ ID NO: 580 - DNA, 58 bp, Streptococcus pneumoniae
  misc_feature (1)..(58): tiling:Spneumo1:WAN0249E3; Cluster includes WAN024E3C R6.I G_2230||||2015428..2015485|+|58 bp|Between spr2023 (mreC) (- strand) and spr2024 (- strand)|S.pneumoniae|R6|NC_00309 8.1|IG|110
atccctacctttatatcaaaaactgttacagtaactttttatcaattcctgaaagcta

SEQ ID NO: 581 - DNA, 99 bp, Streptococcus pneumoniae
  misc_feature (1)..(99): tiling:Spneumo1:WAN0249L9; Cluster includes WAN02471S R6.I G_191.1||||179084..179182|+|99 bp|Between spr0170 (corA) ( - strand) and spr0171 (uvrA) (+ strand)|S.pneumoniae|R6|NC _003098.1|IG|110
atcccttatcctttctcatttttcagattttttcacactgtactattatactacaaaatcggccttttgggtaatagaatctcactttttttggtataa

SEQ ID NO: 582 - DNA, 176 bp, Streptococcus pneumoniae
  misc_feature (1)..(176): tiling:Spneumo1:WAN0249PO; Cluster includes WAN024EKE-rc R 6.IG_748.2.2||||723770..723945|-|176 bp|Between B (transpo sase) (+ strand) and spr0725 (clpE) (- strand)|S.pneumonia e|R6|NC_003098.1|IG-rc|110
atcctataraaaaggagtagaaaatgaaatttttctgcttctttttttactaaaataactgtaatttcttgacagcttgccctttgtccattatgatatatagtagactgaatctgaaatagtacgaaacaattgctaaaacatttatagaaattaattttactttcccaatcgat

SEQ ID NO: 583 - DNA, 200 bp, Streptococcus pneumoniae
  misc_feature (1)..(200): tiling:Spneumo1:WAN024ADP; Cluster includes WAN024EIY-rc R 6.IG_874||||839018..839216|-|199 bp|Between spr0838 (+ str and) and spr0839 (+ strand)|S.pneumoniae|R6|NC_003098.1|IG -rc|110
atcctttgatttaaaatgaccttatttttctatttataccttctaagaacgctataactgctgctccaaccatcggtattccgtatgggcttaataaaaaacttaataccaaagcttctataccaagtgatacatctttatattatcatcactaattaagttaaacagaaacagacagaattattacatcctgtctccct

SEQ ID NO: 584 - DNA, 116 bp, Streptococcus pneumoniae
  misc_feature (1)..(116): tiling:Spneumo1:WAN024AL8; Cluster includes WAN024EN5-rc R 6.IG_537||||511686..511801|-|116 bp|Between spr0513 (+ str and) and spr0514 (metE) (+ strand)|S.pneumoniae|R6|NC_0030 98.1|IG-rc|110
atcctttgtatagcttgttttatagctttatttcarttagamkrytmaaacrygttattagtaattcttataagtgactatgrcytgttattagaaaagactataactgattctag

SEQ ID NO: 585 - DNA, 174 bp, Streptococcus pneumoniae
  misc_feature (1)..(174): tiling:Spneumo1:WAN024A6D; Cluster includes WAN024EF9 R6.I G_1169||||1132668..1132841|+|174 bp|Between spr1128 (guaC) (- strand) and spr1129 (- strand)|S.pneumoniae|R6|NC_0030 98.1|IG|110
atcgatgtctcgtttcttttgtaatgacctacctatgctctygcatcactacgccttttccgacgtttccttaatttattataaaycaaagtacagtttttgtcaaattattttatgaattaaaatatatygttcggrttttrcttgtgttaaaaataaaagaaagaggggaaa

SEQ ID NO: 586 - DNA, 176 bp, Streptococcus pneumoniae
  misc_feature (1)..(176): tiling:Spneumo1:WAN0249Q2; Cluster includes WAN024EKE R6.I G_748.2.2||||723770..723945|+|176 bp|Between B (transposas e) (+ strand) and spr0725 (clpE) (- strand)|S.pneumoniae|R 6|NC_003098.1|IG|110
atcgattgggaaagtaaaattaatttctataaatgttttagcaattgtttcgtactatttcagattcagtctactatatatcataatggacaaagggcaagctgtcaagaaattacagttattttagtaaaaaaagaagcagaaaaatttcattttctactccttttytataggat

SEQ ID NO: 587 - DNA, 314 bp, Streptococcus pneumoniae
  misc_feature (1)..(314): tiling:Spneumo1:WAN0249HI; Cluster includes WAN024E56 R6.I G_2097||||1870743..1871056|+|314 bp|Between spr1890 (argS) (+ strand) and spr1891 (IS1381) (- strand)|S.pneumoniae|R 6|NC_003098.1|IG|110
atcgccaaagttacttgattgcaaagcaatctaagtaactaacgccaaatcctattcggactttggctaggcgcttcactagttttaggacataaatatgatcgatttatgtcctaaaacgtcgtaatcttaaagttattggaactaaagttcctaattgttagacgctagccgcttatatgcgaactagctaactgcttcactagtcatgacccctaaatataatcgatttagagkccatgacgtcgtaaccagagacacttgcctaaacrcttcactaattcacctaaccaaataatagacttcctgcaaaa

SEQ ID NO: 588 - DNA, 55 bp, Streptococcus pneumoniae
  misc_feature (1)..(55): tiling:Spneumo1:WAN024AGP; Cluster includes WAN024EKL-rc R 6.IG_739||||717765..717818|-|54 bp|Between spr0715 (gyrB) (+ strand) and spr0716 (ezrA) (+ strand)|S.pneumoniae|R6|N C_003098.1|IG-rc|110
atcgtaacgattatatcatattttttagaccaagggaactacttctccctatttt

SEQ ID NO: 589 - DNA, 148 bp, Streptococcus pneumoniae
  misc_feature (1)..(148): tiling:Spneumo1:WAN024A7C; Cluster includes WAN024EFP-rc R 6.IG_1129.2||||1086578..1086725|-|148 bp|Between spr1091 ( - strand) and spr1092 (truB) (- strand)|S.pneumoniae|R6|NC _003098.1|IG-rc|110
atcgtttrggaataaaaatcgggtgatagataacaattgcttgataaaaccccatactaatagtagaatggttttgggaattataatattccaattgttgcgagttgtaggtactcaaataatctatatagaaatttagaggtgtgaa

SEQ ID NO: 590 - DNA, 359 bp, Streptococcus pneumoniae
  misc_feature (1)..(359): tiling:Spneumo1:WAN024AB3; Cluster includes WAN024EHQ-rc R 6.IG_977.2||||924271..924629|-|359 bp|Between spr0938 (+ s trand) and spr0939 (+ strand)|S.pneumoniae|R6|NC_003098.1| IG-rc|110
atctaggcttgctttatatttatgataaaagactgctcctaaaaatgaaacagatataaaattttcaaaaactctataatttttatcatctatatcttcgtagtaacctaagataccattgtcaatatttgtagcactaattctaggagtttttccatcgagtaaatatctttttggaatagatgagcctgttggtacttractcgatttcccctttttttcggtaataaatatttctttttattttgttgtctgatatttttcctacctgtcctttgtaggatgagtattttctagattttcttgaataactttttacttgaagttttagcttttgaactagtcgttgtactttcttt

SEQ ID NO: 591 - DNA, 206 bp, Streptococcus pneumoniae
  misc_feature (1)..(206): tiling:Spneumo1:WAN0249VX; Cluster includes WAN024EA6 R6.I G_1569.2||||1499887..1500092|+|206 bp|Between spr1522 (- s trand) and spr1523 (- strand)|S.pneumoniae|R6|NC_003098.1| IG|110
atctattwtytmttttttcttttggacttttttctayttttatctatggrcwtataatctatatayatcccgracagcgaagcaattaaaatagtactccaagtatgcyyatyaaatccatctagccctccacgraytatcattgcaagcactgtccaagctaacatattcaataaaaaaatacaaagtgctttcattctcgcatt

SEQ ID NO: 592 - DNA, 61 bp, Streptococcus pneumoniae
  misc_feature (1)..(61): tiling:Spneumo1:WAN0249LV; Cluster includes WAN02471T R6.I G_189.1||||177190..177250|+|61 bp|Between spr0168 (- stran d) and spr0169 (- strand)|S.pneumoniae|R6|NC_003098.1|IG|1 10
atctcatcctcctagaaatagattgagcctattttatcacaaaatataagagaaagctatg

SEQ ID NO: 593 - DNA, 110 bp, Streptococcus pneumoniae
  misc_feature (1)..(110): tiling:Spneumo1:WAN0249LJ; Cluster includes WAN024E7E R6.I G_1846||||1708822..1708931|+|110 bp|Between spr1731 (- str and) and spr1732 (- strand)|S.pneumoniae|R6|NC_003098.1|IG |110
atctcctttctgactctactatatcaaagctaagttaggaatacaagggcaaaaaagcaagtggtcaatttgaagcagtaagtggttgtaggactagcttaacttacatg

SEQ ID NO: 594 - DNA, 153 bp, Streptococcus pneumoniae
  misc_feature (1)..(153): tiling:Spneumo1:WAN024A2P; Cluster includes WAN024ECY-rc R 6.IG_1332||||1283327..1283479|-|153 bp|Between spr1288 (- strand) and spr1289 (+ strand)|S.pneumoniae|R6|NC_003098.1 |IG-rc|110
atctcctttctttaatatcccttttagatataaattcgcttaattgataatatctatcattgcttttctattatacatctgttataattactaatacaatagttttgaattaataaggctaattggaatattgtctaaaagggatagtgtgtt

SEQ ID NO: 595 - DNA, 84 bp, Streptococcus pneumoniae
  misc_feature (1)..(84): tiling:Spneumo1:WAN024A6R; Cluster includes WAN024EFG R6.I G_1146.1||||1109539..1109622|+|84 bp|Between spr1108 (mutY ) (- strand) and spr1109 (fhs) (- strand)|S.pneumoniae|R6| NC_003098.1|IG|110
atctctagtataacacagaaggtttcacctgtctttgtatctgatttataatattttcaatagatagtatataacttttctatc

SEQ ID NO: 596 - DNA, 84 bp, Streptococcus pneumoniae
  misc_feature (1)..(84): tiling:Spneumo1:WAN024ACU; Cluster includes WAN024EII R6.I G_926||||880223..880305|+|83 bp|Between spr0890 (- strand) and spr0891 (gcaD) (+ strand)|S.pneumoniae|R6|NC_003098.1 |IG|110
atcttataattctaccctaaaaatcaaaaaaaatcaaaaaaatgggttaaggaagagactttagagcattttttcattcaagag

SEQ ID NO: 597 - DNA, 91 bp, Streptococcus pneumoniae
  misc_feature (1)..(91): tiling:Spneumo1:WAN024AEX; Cluster includes WAN024EJN-rc R 6.IG_825.2||||786664..786754|-|91 bp|Between spr0789 (+ st rand) and spr0790 (hsdM) (+ strand)|S.pneumoniae|R6|NC_003 098.1|IG-rc|110
atcttcccttttctttagtttttaaaacttagtaatatcattattttatcagatttcaaacaaagcttcaattaactatatctatgcgtca

SEQ ID NO: 598 - DNA, 62 bp, Streptococcus pneumoniae
  misc_feature (1)..(62): tiling:Spneumo1:WAN0249IO; Cluster includes WAN024E5R-rc R 6.IG_2000.1||||1815835..1815896|-|62 bp|Between spr1840 (- strand) and spr1841 (tktA) (- strand)|S.pneumoniae|R6|NC_ 003098.1|IG-rc|110
atcttgtaaaagtagctgaaatttgatatagtagtcctatgtaaaagacaaaggagaaaaca

SEQ ID NO: 599 - DNA, 240 bp, Streptococcus pneumoniae
  misc_feature (1)..(240): tiling:Spneumo1:WAN0249T5; Cluster includes WAN0247P0 R6.I G_86||||72869..73074|+|206 bp|Between spr0065 (galM) (+ st rand) and spr0066 (+ strand)|S.pneumoniae|R6|NC_003098.1|I G|200
atctttgcttttcactgagtatcaagttaaaaaawrargctggtcaaaaagtctttaaaattawaataacgcatmwtrtcaggtgatgaaaagtttgataatatgcgttttattatgaaatgatttactttatattatcctgaaatggtgttatttttgagttatctggcttgactttcttgatggaaattatataatagttgtaataataataattacaacgagaaaagaggaccattt

SEQ ID NO: 600 - DNA, 472 bp, Streptococcus pneumoniae
  misc_feature (1)..(472): tiling:Spneumo1:WAN024B2G; Cluster includes WAN023ZPB |spi ||CAD19607.1|||472 bp|signal peptidase 1|S.pneumoniae||AJ4 22259|ORF|000
atctttttttggagtaatgtccgcgtagaaggacaytccatggatcctaccctagcggatggcgaaatcctctttgtygtyaarcayytccctattgaccgytttgatatcgtggtkgcccaygaggawgatggcaataaggacatygtcaarcgtgtcatcggaatgcctggcgacaccatccgttacgaaaacgataaactttacatcaatgataaagagacggacgaaccttacctagctgactacatcaaacgtttcaaggatgacaaactccaaagcacytactcaggwaagggmtttgaaggaaataaaggaacyttctttagaagtatcgctcaaaaagcycaagccttcacagtygatgtcaactayaataccaactttagctttactgtyccagaaggagaataccttctyctcggagacgaccgcytggtttctagcgacagccgycacgtaggtaccttca

SEQ ID NO: 601 - DNA, 1043 bp, Streptococcus pneumoniae
  misc_feature (1)..(1043): tiling:Spneumo1:WAN024D2H; Cluster includes WAN0243FY spr1 782||15903824|NP_359374.1|1756515..1757552|-|1038 bp|Conse rved hypothetical protein|S.pneumoniae|R6|NC_003098.1|ORF| 112
atgaaaaaaaagattagatggcccttrtaygtcattgcggccttgattgtgacyttcttggcatttgtrgtgccyttgccytaytatatagaggttccaggtggttcggaagatattcgccaagtccttaaagtaaatgacacagaagataaggaagctggtgcctatcaattcgttacggttggtgttcaacatgcyactttagctcatatgatttatgcttggttgacaccttttacagatattcgtagtgctcaggagactacaggtggttcttccgatgttgaatttmtgcgaatcaatcaattctacatgcaaacatcgcaaaatatggccaagtatcaaggactaaaaacagctggtaaggatatcgaactcaagtactttggagtttatgttttgaatgtgacggataattcaacctttaaagggattctcaatatctctgatacagtcacagcagtcaatgatcagacctttgatagttccaaagacttgattgattacgtcagttctcaaaaattaggggaytccgtcaaggtcacctatgaagaggatgggcaaaccaagtctgcagaaggaaaratyatcaccttggaaaatggmaaaaatggrattggaatcggcttgattgaycgtacagaggtaatcagcaatgtcccaattagcttttcaacagctggtattggcggyccaagtgctggtctcatgtttagtctagctatctatactcaaatagctcacccagatcttcgtaatggtcgtattgttgccggtacaggtaccattgaccgcgatggtaatgtgggagacattggaggyattgataagaaggttgtagcttcggctarggcargtgctgctattttctttrctcctgataaccctgttagcgaagaagaacaaaargcgcatccggacgcgaaaaacaactaccaaacagccctagaagcggctaaaacaatcmwrackratatgaaaatcgtgcccgttaaaaccctacaagatgcgattgattacttgaaaaacaatccctaactaat

SEQ ID NO: 602 - DNA, 785 bp, Streptococcus pneumoniae
  misc_feature (1)..(785): tiling:Spneumo1:WAN024FJF; Cluster includes WAN0243Q1 spr1 418||15903461|NP_359011.1|1404855..1405634|-|780 bp|Conser ved hypothetical protein|S.pneumoniae|R6|NC_003098.1|ORF|1 11
atgaaaaaaaatagtttatatatcatatcctcactcttttttgcttgtgtcttatttgtctatgctacggcgacgaattttcaaaacagtaccagtgctaggcaggtaaaaacggaaacctatactaatacagtaacmaatgtccctattgacatacgctataatagtgataagtattttattagcggttttgcttcagaagtatcagtggtcttgactggtgcaaatcgcctatcgctagctagtgaaatgcaagaaagtacacgtaaattcaaggttactgctgacctaacagatgccggtgttggaacgattgaagttcctttgagcattgaagatttacccaatgggctgaccgctgtggcgactccgcaaaaaattacagtcaagattggtaagaaggctcagaaggataaggtaaagattgtaccagagattgaccctagtcaaattgatagtcgggtrcaaattgaaaatgtcatggtgtcagataaagaagtgtckattacgagtgaccaagagacattggatagaattgataagattatcgctgtyttgccaactagcgaacgyataacaggtaattacagtggttcagtacctttgcaggcaatcgaycgcaatggtgttgtcttaccggcagttatcactccgtttgatacaataatgaaggtgactacaaaaccagtagcaccaagttcaagcacatcaaattcaagtacaagcagttcatcggagacatcttcgtcaacgaaagcaactagttcaaaaacgaattaactaat

SEQ ID NO: 603 - DNA, 2229 bp, Streptococcus pneumoniae
  misc_feature (1)..(2229): tiling:Spneumo1:WAN024CQT; Cluster includes WAN0242AG SP13 26||15901180|NP_345784.1|1249404..1251626|-|2223 bp|neuram inidase, putative|S.pneumoniae|TIGR4|NC_003028.1|ORF|011
atgaaaaaaaatattaaacaatatgtaaccttaggtactgtagtggtattatcagcatttgttgctaactcagttgcagctcaggagactgaaacttctgaagtatcaacaccaragttggtgcaacctgttgcaccaacgactycgatttcggaagtacaacmtamatcggrtaactcttcggaagttactgtacaacctcgaacagttgaaactactgttaaggatccatcttctacagcggaagaaactcctgtcttagaaaaaaataatgttactttaacagggggcggagaaaatgttactaawgagttaaaggataaatttactagcggtgactttactgtagtgattaagtacaatcagtcwagtgagaaaggyttacaagctctgtttggaatatctaattcyaaacccggtcaacaaaatagttatgtagatgtgttccttagagacaatggtgarttgggratggaagcgcgtgatacttcttccaataaaaatmacctagtawccagacctgcttcagtttggggtaagtacaaacaagaggcygtgackaacactgttgcagtagtagcagattcagtcaaaaaaacrtattctttataygcaaatggtacaaaagtagtagaaaagaaartggataayttcctaaacatcaaggatattaaaggtattgattactatatgcttgggggagtgaaacgtgcaggaaaaacggcgtttggttttaacggaacactagaaaatatcaaattctttaatagtgcattggatgaagaaactgttaaaaagatgacaacaaacgctgttactggacatttaatttatacggctaatgatacaacaggttctaactatttccgtattccagttctgtatacttttagcaatggtcgggtwttttcaagcattgacgctcgttacggtggaactcatgatttcttgaataaaattaatattgctacaagttatagtgatgataatggtaagacatggactaaaccaaaattaacattrgcattcgatgattttgcgccagyaccattagaatggcctcgtgawgttggtggacgtgacttacaaatcagcggtggtgcaacctatattgactctgttattgttgaaaaaaakaacaaacaagtactcatgtttgctgatgtkatgcctgctggagtaagttttagagaagcwactagaaaagattcaggttataaacaaattgatggtaattattaccttaaattaargaaacaaggtgatactgattayaattatactattcgtgagmatggtactgtatacgacgatcgtaccaacagaccaactgaattttcagtagataaaaatttcggtattaaacaaaatggtaattatttgacggtagagcrmtawyyrrtttcatttgaaaataataaaaagactgaatatcgtaatgggactmaagtccatatgaatatcttctacaaagatgcattrttyaaagtagtgccaacgaactatattgcatatatttctagcaatgatcatggcgaatcttggtctgcaccaactttattacctcctataatgggacttaatcgraatgcgccwtatttrggtcctggacgtggaatcattgaaagctcaactggacgtattcttattccgtcttacactggtaaagagtctgcrttcatttatagtgacgataatggagcrtcttggaaagttaaagtwgtgccacttccttctagttggtcagcagaagcacaatttgtagaattgagtccaggagtaattcaagcatayatgcgtacaaataatggtaaaattgcatatttaacaagtaaagaygcaggtactacttggagtgcrccggaatatttgaaatttgtttcaaatccaagttatggaacacaattatcaatcatcaattatagycaattgattgatggtaaaaaggctgtcattttaagtactccaaactccacaaatggtcgtaaacacggacaaatttsgattggtctaattaatgatgataatacaattgattggcgttatcatcacgaygttgattatagtaactatggatactcatattcaacattgacagagttaccaaatcatgaaattggattgatgtttgaaaaatttgattcatggtctcgtaatgaacttcatatgaaaaatgttgtaccatatataacatttaagattgaagatytgaaaaagaatctaactaat

SEQ ID NO: 604 - DNA, 1985 bp, Streptococcus pneumoniae
  misc_feature (1)..(1985): tiling:Spneumo1:WAN024EYU; Cluster includes WAN0243I1 spr1 707|amiA|15903749|NP_359299.1|1676994..1678973|-|1980 bp|A BC transporter substrate-binding protein - oligopeptide tr ansport|S.pneumoniae|R6|NC_003098.1|ORF|111
atgaaaaaaaatcgtgtatttgctacagcaggtcttgttttattagcagcaggtgtacttgcagcatgcagttcttcaaaatcatctgattcatcagcccctaaagcttatggctatgtttatacagcagacccagaaaccttggactacctgatttcamgtaaaaatagtacaacagtagtgacttcaaatgggattgatggtttattcactaacgataattacggtaatcttgctcctgcagttgcagaggattgggaagtctctaaggatggtttgacctacacttataagattcgtaraggggttaaatggtttacctctgatggagaagaatatgcagaggtgacggctaaagatttygtgaacggtttaaaacacgcagcagataaaaaatcagaagctatgtatttagctgaaaattcggttaaaggcttggcagattatctatcaggaacttcaacagatttttcaacagttggtgtcaaggcggttgatgattatacgttacaatacactttgaaccagcctgaaccgttctggaactctaagttgacctattctattttctggcctctgaatgaagaattcgaaacatcaaaaggaagcgattttgctaaaccaacagatccgacatccttgctttataatggtccattcttgttgaaagggttgactgcaaaatcttctgtagagtttgtaaaaaatgagcaatattgggataaagaaaatgtccacctagatactatcaatctagcttactatgatggatcagatcaggagtcgctagagcgtaacttyactagtggagcttatagttatgcccgtctttaccctaccagctccaactattctaaggttgcagaagaatacaaggacaatatctattacacacaatcaggctctgggattgctggtctgggtgtgaatattgatcgccaaagttacaactatacttctaaaactacagattcagagaaagtagctactaagaaggcattgcttaacaaagatttccgtcaagccttgaattttgctcttgatcgctcagcttactcagctcaaatcaatggtaaagatggagcagctttagcagttcgtaatttatttgtaaaaccagactttgtttcagctggtgagaagacctttggtgatttagtcgctgctcaacttcctgcttatggtgatgagtggaaaggtgtgaatttagctgatgggcaggatggtttattcaatgctgacaaggccaaggcagagtttgcgaaagctaagaaagctttagaagcagacggcgttcagtttcctattcatctggacgttccagtagaccaagcatcaaaaaactayatatctcgtattcagtcctttaaacaatctgtagaaacagttcttggtgttgaaaatgtcgttgttgatattcaacaaatgacaagtgatgaattccttaatattacttactatgctgccaatgcttcatctgaggattgggatgtatcrggaggagtttcatgggggccagactatcaagacccatctacttacctggatattttaaaaacaactagcagtgaaactacaaaaacatatttaggatttgataatccaaatagcccttcagtagttcaagttggtttgaaagaatacgataaattagttgatgaagctgccaragagacaagcgacttsaatgtccgttatgaaaaatatgcagcggctcaagcatggttgacagatagttcactctttattcctgctatggcttcttctggtgcagcaccagtgctttcacgaattgttccatttactggagcttctgcgcaaacaggctctaaggggtcagatgtttacttcaaatatttgaaatyacaagataaagyggtgactaaggaagagtatgaaaaagctcgtgaaaaatggttgaaagaaaaagctgaatcaaatgagaaagctcaaaaagaattggcaagtcatgtgaagtaactaat

SEQ ID NO: 605 - DNA, 405 bp, Streptococcus pneumoniae
  misc_feature (1)..(405): tiling:Spneumo1:WAN024BGQ; Cluster includes WAN023OJ3 pne8 7_27||||22947..23057|+|111 bp|Type 44(1) capsule operon, G limmer 2.02 orf prediction|S.pneumoniae||WAN01UCE7|ORF|010
atgaaaaaaacattgacacctaccaaagagtcaatagactccctgcgaaattatgaagcaagtaaacaattaactgatacacgatttaagcgtcttgttggtgttcagcgcacgacttttaaagagatgttagctgtattaaaaacagcttatcaacttaaacacgcaaaaggtggacgaaaacctaaattaagcctagaataccgcacttatgaagaaattgcggctgattttggtattcacgaaagcaacttaatccgtcggagccaatgggttgaagtaactcttgttcaaagtggtgttacgatttcaagaactcctctyagttctgaggacacggtaatgattgatgcgacggaagtaaaaatcaatcgccctaaaaaaagaattagcgaaykaactaat

SEQ ID NO: 606 - DNA, 1359 bp, Streptococcus pneumoniae
  misc_feature (1)..(1359): tiling:Spneumo1:WAN024G46; Cluster includes WAN0243BG spr1 945|pcpA|15903986|NP_359536.1|1925783..1927855|-|2073 bp|C holine-binding protein|S.pneumoniae|R6|NC_003098.1|ORF|100
atgaaaaaaactacaatattatcattaactacagctgcggttattttagcagcatatgtccctaatgaaccaatcctagcagcatatgtccctaatgaaccaatcctagcagatactcctagttcggaagtaatcaaagagactaaagttggaagtattattcaacaaaataatatcaaatataaggttctaactgtagaaggtaacataggaactgttcaagtgggtaatggagttactcctgtagagtttgaagctggtcaagatggaaaaccattcacgattcctacaaaaatcacagtaggtgataaagtatttaccgttactgaagtagctagtcaagcttttagttattatccagatgaaacaggtagaattgtctactatcctagctctattactatcccatcaagcataaaaaaaatacaaaaaaaaggcttccatggaagtaaagctaaaactattatttttgacaaaggcagtcagctggagaaaattgaagatagagcttttgatttttctgaattagaagagattgaattgcctgcatctctagaatatattggaacaagtgcattttcttttagtcaaaaattgaaaaagctaaccttttcctcaagttcaaaattagaattaatatcacatgaggcttttgctaatttatcaaatttagagaaactaacattaccaaaatcggttaaaacattaggaagtaatctatttagactcactactagcttaaaacatgttgatgttgaagaaggaaatgaatcgtttgcctcagttgatggtgtttygttttcaaaagataaaactcaattaatttattatccaagtcaaaaaaatgacgaaagttataaaacgcctaaggagacaaaagaacttgcatcatattcgtttaataaaaattcttacttgaaaaaactcgaattgaatgaaggtttasaaaaaatcggtacttttgcatttgcggatgcgayyaaacttgaagaaattagcttaccaaatagtttagaaactattgaacgtttagccttttacggtaatttagaattaaaagaacttatattaccagataatgttaaaaattttggtaaacacgttatgaacggtttaccaaaatttttaacattatctggtaataatatcaactcattgccgtccttcttcctaagtggcgtcttagattcattaaaggaaattcatattaagaataaaagtacagagttttctgtgaaaaaagatacatttgcaattcctgaaactgttaagttctatgtaacatcagaacatataaaagatgttcttaaatcaaatttatctactagtaatgatatcattgttgaaaaagtagataat

SEQ ID NO: 607 - DNA, 1354 bp, Streptococcus pneumoniae
  misc_feature (1)..(1354): tiling:Spneumo1:WAN024G48; Cluster includes WAN0241P2 SP21 36|pcpA|15901950|NP_346554.1|2046651..2048516|-|1866 bp|ch oline binding protein PcpA|S.pneumoniae|TIGR4|NC_003028.1| ORF|011
atgaaaaaaactacaatattatcattaactacagctgcrgttattttagcagcatatgtccctaatgaaccaatcctagcagatactcctagttcggaagtaatcaaagagactaaagttggaagtattattcaacaaaataatatcaaatataaggttctaactgtagaaggtaacataggmactgttcaagtgggtaatggagttactcctgtagagtttgaagctggtcaagatggaaaaccattcacgattcctacaaaaatcacagtaggtgataaagtatttaccgttactgaagtagctagtcaagcttttagttattatccagatgaaacaggtagaattgtctactatcctagctctattactatcccatcaagcataaaaaaaatacaaaaaaaaggcttccatggaagtaaagctaaaactattatttttgacaaaggyagtcagctggagaaaattgaagatagagcttttgatttttctgaattagaagagattgaattgcctgcatctctagaatatattggaacaagtgcattttyttttagtcaaaaattgaaaaagctaaccttttcctcaagttcaaaattagaattaatatcacatgaggcttttgctaatttatcaaatttagagaaactaacattaccaaaatcggttaaaacattaggaagtaatctatttmgactcactactagctkaaaacatgttgatgttgaagaaggaaatgaatcgtttgcctcagttgatggtgttttgttttcaaaagataaaacycaattaatttattatccaagtcaaaaaaatgacgaaagttataaaacgcctaaggagacaaaagaacttgcatcatattcgtttaataaaaattcttacttgaaaaaactcgaattgaatgaaggtttagaaaaaatyggtacttttgcatttgcrgatgcgattaaacttgaagaaattagcttaccaaatagtttagaaactattgaacgtttagccttttacggtaatttagaattaaaagaacttatattaccagataatgttaaaaattttkgtaaacacgttatgaacggtttaccaaaattaaaaagtttaacaattggtaataatatcaactcattgccgtccttcttcctaagtggcgtcttagattcattaaaggaaattcatattaagaataaaagtacagagttttctgtgaaaaaagatacatttgcaattcctgaaactgttaagttctatgtaacatcagaacatataaaagatgttcttaaatcaaatttatctactagtaatgatatcattgttgaaaaagtagataatataaaacaagawactgatgtag

SEQ ID NO: 608 - DNA, 467 bp, Streptococcus pneumoniae
  misc_feature (1)..(467): tiling:Spneumo1:WAN024DDD; Cluster includes WAN02446D spr0 829|lspA|15902873|NP_358423.1|829640..830101|+|462 bp|Sign al peptidase type II; lipoprotein signal peptidase|S.pneum oniae|R6|NC_003098.1|ORF|111
atgaaaaaaagagcaatagtggcagtcattgtactgcttttrattgggctggatcagttggtcaaatcytatatcgtccagcagattccactgggtgaagtgcgctcctggatycccaatttcgttagcttgacctacctgcaaaatcgaggtgcagccttttctatcttacaagatcagcagytgttattcgctgtcattactctggttgtcgtgataggtgccatttggtatttacataaacacatggaggactcattctggatggtcttgggtttgactytrataatcgcgggtggtcttggaaactttattgacagggycagtcagggctttgttgtggatatgttccaccttgactttatcaactttgcaattttcaatgtggcagatagctatctgacggttggagtgattattttattgattgcaatgctaaaagaggaaataaatggaaattaactaat

SEQ ID NO: 609 - DNA, 3909 bp, Streptococcus pneumoniae
  misc_feature (1)..(3909): tiling:Spneumo1:WAN024G4A; Cluster includes WAN0244DT-5 sp r0561|prtA|15902605|NP_358155.1|562418..568852|+|6435 bp|C ell wall-associated serine proteinase precursor PrtA conse rved N-term|S.pneumoniae|R6|NC_003098.1|ORF|111
atgaaaaaaagyacagtattgtcaytaacyacagctgcagttattttagcagcctatgcccctaatgaggtagtcttagcagacacatctarctctgaagatgctttaarcatctctgataaagaaaaagtagtaktagataaggaaacagaaaataaagagaaacatrraratatycatartgctatrgaaacttcamaggatwytraagaraagaaaacarcartyattraggraaaagaakttgttagtaaaaatcctgtrayagacamtaamactagcaatgaagaagcaaraatcaaagragraaattccaatmaatcycaaggagathatrcrsactcrtytgyraataaarrcacagaaaatccsaaaaaagaagatarasttgtctatattgctgaatttaaagataaagaatctggagaaaaagcaatcaagsractatcmartcttaagaatacaaaagttttatatacttatgatagaatttttaacggtagtgccatagaaacaactccrgataacttggacaaaattaaacaaatagaaggtattwcatcsrttgaaagggcacaaaaagtccaacccatgatgaatcatgccagaaaggaaattggagttgaggaagctattgattacctaaagtctatcaatgctccrtttgggaaaaattttgatgstarmggtatggtcatttcaaatatcgatactggaacagattatagrcataaggctatgagaatcgatgatgatgcyaaagcctcaatgagatttaaaaaagaagacttaaaaggmactgataaaaattwytggttgagtgataaaatccctcatgcgttcaattattataatggtggcaaaatcactgtagaaaaatatgatgatggaagggattattttgacccacatgggatgcatattgcagggattcttgctggaaatgatactgaacaagayatcaaaaactttaacggcatagatggaattgcrcctaatgcacaaattttctcttayaaaatgtattctgacgcaggatctgggtttgcgggtgatgaaacaatgtttcatgctattgaagattctatcaaacacaacgttgatgttgtttcggtatcatctggttttacaggaacaggtcttgtaggtgagaaatattggcaagctattmgggcattaagaaaagcaggcattccaatggttgtcgctacgggtaactatgcgacttctgcttcaagttcttcatgggatttagtagcaaataatcatctgaaaatgaccgacactggaaatgtaacacgaactgcagcacatgargatgckatagcggtcgcttctgctaaaaatcaaacagttgagtttgataaagttaacataggtggagaaagttttaaatacagaaatataggggcctttttcgataagartaaaatcacaacaaatgaagatggaacaaaagctcctagtaaattaaaatttgtatatataggcaaggggcaagaccaagatttgataggtttggatcttaggggcaaaattgcagtaatggatagaatttatacaaaggatttaaaaaatgcttttaaaaaagctatggataagggtgcacgcgccattatggttgtaaatactgtaaattactacaatagagataattggacagagcttccagctatgggatatgaagcggatgaaggtactaaaagtcaagtgttttcaatttcaggagatgatggtgtaaagctatggaacatgattaatcctrataaaaaaactgaagtcaaaagaaataataaagaagattttaaagataaattggagcaatactatccaattgatatggaaagttttaattccaacaaaccgaatgtaggtgacgaaaaagagattgactttaagtttgcacctgacacagacaaagaactctataaagaagatatcatcgttccagcaggatcyacatcttgggggccaagaatagatttacttttaaaacccgatgtttcagcacctggtaaaaatattaaatcyacgcttaatgttattaatggcaaatcaacttatggctatmtrwcmrkaactagtatggcgactccaatcgtrgcagcttctactgttttgattmgaccraaattraaggaaatgcttgaaaraccygtattraaaaatcttaarggwgatgayaaaatagaycttacaagtcttacaaaaatwgccctacaaaatactgcdmgacctatgatggatgcaacttcttggaaagaaaaaagtcaatactttgcatcacctagacarcagggrgcrggsctaattaatgtggccaaygctttgagaaatgaagttgtagcractttcaaaaacackgattctaaaggtttggtaaaytcatatggttccatttctcttaaagaaataaaaggtgataaaaaatactttacaatyaagcttcacaatacatcmaacagrcctttracytttaaagtttcagcatcagcgrtaactacagattctytaactgacagaytaaaactkgatgaaacatataaagatgaaaaatctccagatggtaagcaaattgttccagaaattcayccagaaaaagtcaaaggrgcaaatatyacatttgagcatgryactttcactataggsgcaaattctagctttgatttraatgcggttataaatgttggrgaggcyaaaaayaaaaataaatttgtagaatcatttattcattttgagtcagtrgaagmratggaagcwytaarctccaryggsaagaaaaymracttccaaccwtctttrtcratgccyctaatgggatttgctgggaattggaaccacgaaccaatccttgataaatgggcttgggaagaaggrkcaaratcaaaaacamtggraggttatgatgatgayggtaaaccraaaattccaggaaccttaaataagggrattggtggagaacatggtatagataaatttaatccagcaggagttatmcaaaatagaaaagataaaaatasaacatcyctrgatcaaratccagamttatttgcyttyaayaacsaagggwtcawygcwsmatcmwcwagtggttctaagattgctaacatttatcctttagattcaaatggaaatcctcaagatgctcaactwgaaagaggaytaacwccwtctccacttgtwytaagaagtgcagaagaaggaytratttmamtwrtaaayacmaayaaagarggagaaaaycaaaragacytwaaagtyrtwtcragagarcacttyatwagaggaattytaaattctaarrgmaatgaygcwaagggwatcaaatcatcyaaactaaaagtttggggtgacttgaartgggatggactcatctataayccwagaggtagagaagaaaatgcmccagaaagtaaggataaycaagatccwgctactaagatamgaggwcaatttgaaccgattgcrgaaggtcaatatttctataaatttaaatatagattaactaaagattacccatggcaggtttcctatattcctgtaaaaattgataacacmgcccctaagattgtttcggttgatttttcaaatcctgaaaaaattaagytratyacaaaggatacttatcayaaggtaaaagatcartayaagaatgaaackytattygckagagatcaaaaagaacatcctgaaaaatttgaygagattgcraaygargtktggtatgcwggmgcygctcttgttaatgaagatggagaggttgaraaaaatcttgaagtaacttaygcaggtgagggtcaaggaagaaatagraarcttgayaaagayggraatacyatytatgaaattarmggwgcrggagatytaagrggaaaaatcatygaagtmatygcmytagatggwkcwagc

SEQ ID NO: 610 - DNA, 960 bp, Streptococcus pneumoniae
  misc_feature (1)..(960): tiling:Spneumo1:WAN024FRC; Cluster includes WAN023PW1 pne0 8_13||||9560..10153|+|594 bp|Type 7A capsule operon, Glimm er 2.02 orf prediction|S.pneumoniae||WAN01UCKE|ORF|000
atgaaaaaaataagaattattattccttattttgggaaactaccaaccttttttccttattttttattaactgctaaacgtaatcaaaaaattgatttcttagtttatacggatcaaaaggtggatgaattcgctatgttaaatgctaaaaatatagaatttgtaactctttcttttgatgagttaagagaaaaagttcagtctaagtttgattttaaaatctctctcaaaacaccttataaattttgtgactatagacctgcttatgggcttatctttgaagaagaattaaagggttatgattactggggtttttgtgacacagatgtcttactaggtgatatttatcaatttcttgaagagcatagcttttttgagaacgactatgctcgatatggtctttttggtcatcttcaaatttttaagaatttaagagaagttaatcatatttttatgtctgggcaaggttcagactatcgattagattatcacaatgtctatactagtgaacaaagttttatttttgatgaatcagaaggtatccaaaagctttttgaaaaatgtcatttcaaacaactgcaagataagttttttgatgatattgatattagtcatttctcatttcgggaatatggcgaaaataaatcgaaacgctattatttttggtctgaagaaaatggtttggaatcaataaatttaatcaatgatgatatagtggttaagcgtcctctatacgcacatttccaaaagagaatgattaaatgccctgactttaaactagtcgattcattttatgttataccaaatcaattagttattggagagaaaatttctaagcaagagctagtagaggtgacaagaaataaattctattgggaatatgttaaatcaacaatgttaaagaaattaaaaaaagaaaaatggacatttgaatttattcgtcataaattaaggatgaaa

SEQ ID NO: 611 - DNA, 711 bp, Streptococcus pneumoniae
  misc_feature (1)..(711): tiling:Spneumo1:WAN024G2B; Cluster includes WAN0243YO spr1 107|rr02|15903150|NP_358700.1|1107604..1108359|-|756 bp|Re sponse regulator|S.pneumoniae|R6|NC_003098.1|ORF|211
atgaaaaaaatactaattgtagatgatgagaaaccaatctcggatattatcaagtttaatatgaccaaggaaggttaygaagttgtaactgcttttaatggtcgtgaagcgctagagcaatttgaagcagagcaaccagatattattattctggatttgatgcttccagaaattgatggtttagaagttgctaagaccattcgtaagacaagcagtgtgcccattcttatgctttcagccaaagatagtgaatttgataaggttatcggtttggaacttggggcagatgactatgtaacraaacccttctccaatcgtgagttgcaggcgcgtgttaaagctcttctgcgtcgttctcaacctatgccagtagatggtcaggaagcagatagtaaacctcaacctatccaaattggggatttagaaattgttccagacgcctacgtggctaaaaaatatggcgaagaactagacttaacccatcgtgaatttgagcttttgtatcatttagcaycgcatacaggtcaagtcatcacgcgcgaacacttgcttgagactgtctggggttatgactattttggtgatgtccgyacagttgatgtgactgtacgacgtctgcgtgagaagattgaagatacgcccagccgaccagagtatatcttgacrcgccgtggtgtagggtattacatgagaaataatgctykaactaat

SEQ ID NO: 612 - DNA, 1086 bp, Streptococcus pneumoniae
  misc_feature (1)..(1086): tiling:Spneumo1:WAN024FQJ; Cluster includes WAN023PQG pne1 8_13||||8714..9799|+|1086 bp|Type 10B capsule operon, Glim mer 2.02 orf prediction|S.pneumoniae||WAN01UCJE|ORF|000
atgaaaaaaatagcaattgttagatataatctaagtaaaattggtggagcggaaaaagtrgctattaatatggctaatgaattgtcacaatactatgatgtaaaaytrttatcwattctattggatgaagatggttttataaattatgatrttaatcctaatgtgacattaataaattttcacaagggtgatcttagaattagaactgctacattaaaattaacggrkaaattaagrgawtatattaaaagagaaaaaattraagtgattttttctatwaccccattaacaaatactatggttagattagctactctrggattaaatgtgaaaatagttttctgtgatcaycatagyttagaatttcgtgattttagaagtagrgaagtgcagagatttgtaggagctaaattttttgacaagatygtcactttaacagaagaagatagaatmaaataytcmgataaatataatatacctataaataaagtraatgctatttataattggattgatgargaagattytgaaaatactccatttgataatragrcaaataaaataataacggtaggkcgatttcayagtcaaaagggrtatgattatctygccraagtagctataaaagtattatcacaacatccagactggcagtgggatatatatggttcaggggataarcttattgaacaggagctaaaaagaaaactagaagaaggytrtgtttcttcacaarttaatttyaaagraaatgtaaagggaactgaaaatatttatcccaatcatagtatctaygtcatgacttctcgctatgagggyttrcctttagtyctattagaagctcaacaatacaayctyccwattgttagyttyagatgtccgacgggacctagtgarattgttgaagatagaatcaacggatttctgattgattgctatgaygtggatcagatgagtgagaaattrcttgaattgatgaaaaatgatgatttgcgacaatctttctcagaacatgccmaagacaatatggataaatttgataaaaataaaattctyaaycagtggatagarttrattgagacaatt

SEQ ID NO: 613 - DNA, 552 bp, Streptococcus pneumoniae
  misc_feature (1)..(552): tiling:Spneumo1:WAN024CGZ; Cluster includes WAN0244S1 spr0 049|purN|15902093|NP_357643.1|52812..53357|+|546 bp|5'-pho sphoribosylglycinamide transformylase 1|S.pneumoniae|R6|NC _003098.1|ORF|111
atgaaaaaaatagcggtttttgcctctggtaatggctcaaattttcaggtgattgccgaagaatttccagtggagtttgtcttttcagaccatcgtgatgcctatgtgcttgagcgtgcaaagcagctcggcgttctgtcctatgcttttgaactcaaggagtttgagagcaagrcagactacgaagcagcccttgtcgaactcttggaagaacaccagattgacttggtttgcctagcaggctacatraaaatmgttggaccaaccttattgtcggcttatgaaggtcggattgtcaacattcatccagcctacttgccagaatttccaggagctcatgggattgaggatgcttggaatgctggcgtgggtcagtctggtgtgaccattcactgggtggattmgggtgtggatacaggccaggtcatcaaacaggttcgtgtgccacgactagctgatgataccattgacagatttgaagctcgcatccatgaagcagagtacaggytgtatccggaagtagtgaaggctctatttacagatykaactaat

SEQ ID NO: 614 - DNA, 1083 bp, Streptococcus pneumoniae
  misc_feature (1)..(1083): tiling:Spneumo1:WAN024FQK; Cluster includes WAN023PQZ pne1 7_14||||9010..10092|+|1083 bp|Type 10A capsule operon, Gli mmer 2.02 orf prediction|S.pneumoniae||WAN01UCJH|ORF|000
atgaaaaaaatagctttagtgaaatggattttggatgattctggtggcggtgagcgagttgctgtatctttggcaaacgaacttacaaaaaagtatgaagttcatttgattggaattacaacaaagcaatcggatttattctttggaatcaattctcaagtaaaatactccaatttttttgaccatcgagtacgcttgtctaagaatattctaaaaatctcaaaaatgttaaaaaaatatttcctagataatgagatagaggttgcctttgggataggratattckctaatrtatttttatccttgtcgggaataggaatttctactaaagtagttttgtgtgatcataccaattcaattacggctaatagagaactttctmagaaagtccaaagatatgttgggacaaagctagcagacaagattattactcttacgcaagaggatcgtaaaaattatatacgaaaatacggcatttctgagaataggattgcttacatctataattggaaagaaaatcgtctttccaatataccttataatgatgagtctactaaaattgtaactgttggtcgttttgattatcaaaaaggatatgattatcttatccaagtcgcgaaaaaagtgttagctaaaatgcctgactggacttgggaaatctacggttccggaaaacaagatraagtagacaaaatcagagatttaatcaccgaaaatgatttacaggataagttagtcataaaaggacttgaaaaaaatcaggatctgatttatggagataaagggatttatgtcatgacttctcgttacgaaggtttaccgttggtattgttagaagctcaacaatacaatcttcctattgttagcttcagatgtccaacgggacctagtgagattgttgaagatggggtcaatggttatctgatagattgttatgataccgataagatgagtgagaaattgcttgaattgatgaaaaatgatgatttgcgacaatctttctcagakcatgcaaaagatactatggataaatttgataaaaataaaattcttaatcagtggatagagttgattgagacaatt

SEQ ID NO: 615 - DNA, 576 bp, Streptococcus pneumoniae
  misc_feature (1)..(576): tiling:Spneumo1:WAN024DT2; Cluster includes WAN0244OK spr0 174||15902218|NP_357768.1|183696..184265|+|570 bp|Hypothet ical protein|S.pneumoniae|R6|NC_003098.1|ORF|112
atgaaaaaaatagttcttgttagtctagctttcctttttgtcctggttggttgcggacagaaaaaagaaactggaccagctacaaaaacagaaaaagatacgcttcagtcggcattgccagttattgaaaatgctgagaagaatacagttgtaactaagactttggtcttgcccragtcagatgatggtagccagcagacacaaacaattacttacaaagacaagacttttttgagtctarctatccaacaaaaacgtccagtctctgatgagttgaagacttatattgaccaacatggagkggaggaaactcaaaaagctcttcttgaagcgsaggagaargataagtctatcattgaagctcgtaaattggcaggtttcaaacttgaaacaaaactattgagcgcaacggaacttcaaacaacgactagttttgattttcaagttctggatgtcaagaaggcttcccagttggaacatctgaagaatattggtttggaaaatcttttgaaaaatgaaccaagcaaatatatttcagatagattggcaaatggygcgacagaacaastarctaat

SEQ ID NO: 616 - DNA, 1095 bp, Streptococcus pneumoniae
  misc_feature (1)..(1095): tiling:Spneumo1:WAN024CKC; Cluster includes WAN023POJ pne2 4_17||||15604..16698|+|1095 bp|Type 12B capsule operon, Gl immer 2.02 orf prediction|S.pneumoniae||WAN01UCJ2|ORF|000
atgaaaaaaatagttgtaattttcggaactcgtcccgaagctatcaagatgtgtcccttggttaaagagctaagaacacgtgagaatcttgaaacattggtctgtgttacgggtcaacatcgtcaaatgctggatcaagttttggatacttttaggattacgcctgattttgatttatctattatgaaggacaaacaaactctctttgatgtcacaattggcattttggaaggcatgaagactgtcttagagtcagttaatcctgatttaatattagttcatggggatacgagtacaacatttgccagttcactggccgccttttatctacagattccaattggacatgtagaggctggtttgcgtacttatgatatttattcaccttatcctgaagaatttaatcgtcaagcagtaggtgctttggctcagtatcattttacaccaacacaactctcaaaagacaatctcttgagagaaggaaaaaattctgaagctatatttatcacaggtaacacagcaattgatgctttacaaactacaattcaagaggattatactcatcctgagttaaattgggttggggatagcaaactaatattaattactgctcatcgtcgtgaaaatattggtgacccgatgaggcacatgtttagagcaatccgacgtatcattgaagaacattcggatataaaggctctttaccccattcatatgaatcctctagttcgtcagattgctgaggaagaactaagcggatgtgaacgtatcaaaatgatcgatccgttggaagtattagattttcataactttttatcacggagttatctcattttaacagatagtggtggtatccaagaagaggcacctagtttaggaaaacctgttttagttatgagagatacaactgaacgtccggagggaattaaagcaggaactttgaagcttgtaggtactgatgaggacaatatttatagacattttaaagaattgttagaaaatgatttagtttatcaagcgatgagccaagcttcaaatccgtatggagatggaacagcttgcaagaaaattgcagacatactagaaggagaagta

SEQ ID NO: 617 - DNA, 1247 bp, Streptococcus pneumoniae
  misc_feature (1)..(1247): tiling:Spneumo1:WAN024DEB; Cluster includes WAN02447U spr0 776|dacA|15902820|NP_358370.1|770508..771749|-|1242 bp|D-a lanyl-D-alanine carboxypeptidase|S.pneumoniae|R6|NC_003098 .1|ORF|111
atgaaaaaaatatttttaactttrttaactrtctcycttttaggrkgtgyttctactgytgytgctcaagattttamyattgcygcwaaacatgcsattgctgttgarrcaaatactggwaaaatwctytatgaraargatgcaackcarccwgtcgaaatygcttcyatwacaaaaytgmttacygyttayctrgtctatgaagctytggaaaacggaagtattaccctctccacyccwgtagatatttctgattatccttatcaattgacgacaaattctgaagccagtaatrttcctatggaggcycgtaattatactgtygaagagttrcttgaagcaactctggtatctagtgccaacagcgccgctattgccctagctgagaaaattgctggctcagaaaaagatttcgtcgatakgatgmgggcaaaactcttggaatggggaatymargatgccackgttgtcaatacracwggtcttaacaaygaractctargrgataacatttacccaggttctaawaaagatgakgaaaataagctyagtgcttatgatgtygcyatygttgcycgcaacctcatcaaaaaatacccacaagtyttrgaaatcacyaaaaaaccttcttctacttttgmtrgratracaatcacttcaaccaactacatgttagaaggtatgcctgcttaccgtggtggttttgatggrctraaaacaggaacaacagataaggctggagagtcttttgttggtactactgtcgaaaaaggcatgagagtcatcacagttgttttaaatgcagatcatcaagacaataatccttacgctcgrtttacagctacmtcttccctaatggattatatttcttctacatttacacttcgcaaaatmgttcarcaaggcgatgcctatcaagatagcaaarcccctgtacaagatggaaaaraagatacrgtmaytgcagtggctccagaggatatctatctaathgaacrkrttgggaaycaatcttcycaatctgttcaattcacwccygattmyaaarcaatcycagcaccrcttgaagctrgaacagtggttgsccatytgacttaygaagacaaggacttgatyggtcaaggttacatcaccacagagcgccctagtttcgaaatggtwgcagacaagaaaatkgaaaaarccttyttcttaaaagtttggtggaatcagtttgtccgytttgttaacgagaaattataactaat

SEQ ID NO: 618 - DNA, 2115 bp, Streptococcus pneumoniae
  misc_feature (1)..(2115): tiling:Spneumo1:WAN024CCH; Cluster includes WAN0244QN spr0 099|ABC-MSP|15902143|NP_357693.1|105545..107653|+|2109 bp| ABC transporter membrane-spanning permease - amino acid tr ansport|S.pneumoniae|R6|NC_003098.1|ORF|231
atgaaaaaaatcagtmatytytgtatgttactcctgcttctgtgtaccactttttttgtttttaatgtaaactatacacgagaagtggttcggattcaagaaatgggaaagactgtagattctttggatttgtatttgaaagatattaacgaacctgcagcgtctgttcttcgattttttgaggatgtatcaaaggagtataaagtctccatcatcaaaacagacagtggtgatgaggtggtcaagtctggtgtttttgataaagataccttcccctaccaagagtttgggatttcttctcttgattttaccacagatggtgaaggagtctatagtaataaagaaatttccaataaacttggtacgattccgacctttctaaaagccaaacctattcagcttatgacttttcaaacctatatcaaggatacatctcgtagtttaaatggtcgctatacgataacttctacacaagagatggacaaggataggattgtacagaaatggagcgattttttcaagatagaccaggctaccttgctagagccgacctacaaaagtgcagtggaagtcataaatcgagatttgcttttatctgccattgtttttgtcttggctattttgcttcttgtgttagtgacagtgtatcaaccgatgatggagatgaaaagagttggggtacaaaaattacttggttttcaagatagggctgttttagctgatgttgtaaaaggcaacctttacctcctcctaggtggggctcttgtgatcaatctaggcgtgtttttcttgcttgattataagccaaaagatttgtttcctatgctgtggttgtctcattttttgctgttgcagctttatctctttatcagttggttgacttacctcttaatccaaaaaatgacaatcagctctctgctgaaaggtttttcatctttcaaatttggtcttatcttcaattatgtgatgaaaatagggacaactattttactgacggccttactgattggggtgggcakaagtttagaacaagaaaacaaagaacttgcttatcagcaacagtgggtaagtcaaggtaattacctgaccttagaaaccttcaaactcaatgataatctgtggcaagaagagctagcagggtcagggaaatctacagattatttctatcgattttatcaggatttggtagaaaaaacgcaggcgggctatgtgcagagtagcagtcttcctgtaaaaaattttgtccaatcagaacagattcagcaatatcagttaacagatacggtggatgtttactatgccaatcgcaattttctaaagagcaagggattcaagctaccarataccggtattaaaaaagttattttgatgccagcaagtacgaaaggtgaagaagataaaaatcagctcttggggaagttaattgcctttcattcgatgaagtatgaagagcagcaaaaacgaacgatagaggagatggatgtcgagattgcctattatgaaggagattggtcatttttcccatatagtgataagcgaaaggaaaatctctccaatccaattattagcttggtcaatgattctgatatgatgtgggatgagaaagcctccctgtcaacaactggcttaaataatccgattaaaattgaaaatacggttcaacatcaaaaagagattacagagytagttgagaaattgtcagatggaaattatttaaaattttcatctattcaagccattcaacaagagaaagtggattcttatmgagatgctgttcggaattttaacctactctttgctttgtttggtctccttagcatgatgatttcctacttcttactagtaacaactttcttattgaagcgcagggatatcattaccaagaagtttatggggtggaaactggtcgatcgctaccgtcctctcctcgttctgctcttgctgggctatagtttccctcttctagtcttgattttctttgcycatgcgttcttaccacttctactgtttgcaggttttacatgtctggatatactatttgtgctaggcttagcttctaggatggagaaaagaagtctagtagagttattgaaagggggcatcttaykaactaat

SEQ ID NO: 619 - DNA, 192 bp, Streptococcus pneumoniae
  misc_feature (1)..(192): tiling:Spneumo1:WAN024DNY; Cluster includes WAN0243O6-5 sp r1485||15903528|NP_359078.1|1462112..1462423|+|312 bp|Hypo thetical protein|S.pneumoniae|R6|NC_003098.1|ORF|221
atgaaaaaaatcatcttcatcaaaaccattcaactccttgtcattgatggaatcatgctggcatttttgacatttaaaagggggcttacttgggactggattttgatttatagyggttggctcattttctttcatcctgtgctattgacctatctttcaaaccaactttgtgaccactttagtctaactaat

SEQ ID NO: 620 - DNA, 836 bp, Streptococcus pneumoniae
  misc_feature (1)..(836): tiling:Spneumo1:WAN024CBD; Cluster includes WAN0244PC spr0 146|ABC-SBP|15902190|NP_357740.1|154470..155300|+|831 bp|A BC transporter substrate-binding protein - amino acid tran sport|S.pneumoniae|R6|NC_003098.1|ORF|110
atgaaaaaaatcgttaaatactcatctcttgcwgccctwgswcttgttgctgcaggtktgcttgcggcttgctcagggggtgctaagaaagaaggagaagcagctagcaagaaagaaatcatcgttgcaaccaatggatcaccaargccatttatctatgaagaaaatggcgaattgactggttacgagattgaagtcgttcgcgctatctttaaagattctgacaaatatgatgtcmagtttgaaaagacagaatggtcaggtgtctttgctggtcttgacgctgaycgttacaatatggctgtcaacaatcttagctacactaaagaacgtgcggagaaatacctctatgccgcaccaattgcccaaaatcctaatgtccttgtcgtgaagaaagatgactctagtatcaagtctctcgatgatatcggtggaaaatcgacggaagtcgttcaagccactacatcagctaagcagttagaagcatacaatgctgaacacacggacaacccaactatccttaactatactaaggcagacttscaacaaatcatggtacgtttgagcgatggacaatttgactayaagatttttgataaaatcggtgttgaaacagtgatcaagaaccaaggtttggacaacttgaaagttatcgaacttccaagcgaccaacaaccgtacgtttacccacttcttgctcarggtcaagatgagttgaaatcrtttgtagacaaacgcatyaaagaactytayaaagayggaackcttgaaaaattgtctaaacaattcttcggagacacttayctaccggcagaagctgatattaaataactaat

SEQ ID NO: 621 - DNA, 1076 bp, Streptococcus pneumoniae
  misc_feature (1)..(1076): tiling:Spneumo1:WAN024D95; Cluster includes WAN0243UW spr1 243|potD|15903286|NP_358836.1|1242787..1243857|-|1071 bp|A BC transporter substrate-binding protein - spermidine/putr escine transport|S.pneumoniae|R6|NC_003098.1|ORF|111
atgaaaaaaatctattcatttttagcaggaattgcagcgattatccttgtcttgtggggaattgcgactcatttagatagtaaaatcaatagtcgagatagtcaaaaattggttatctataactggggagactatatcgatcctgaactcttgactcagtttacagaagaaacaggaattcaagttcagtacgagrcttttgactccaacgaagccatgtacactaagataaagcagggtggaacgacctacgatattgccattccaagtgaatacatgattaacaagatgaaggacgaagacctcttggttccgcttgattattcaaaaattgaaggaatcgaaaatatcggaccagagtttctcaaccagtcctttgacccaggtaataaattctccatcccttacttctggggaaccttaggaattgtctacaacgaaaccatggtagatgaagcgcctgagcattgggatgacctttggaagcyggagtataagaattctatcatgctytttgatggggcgcgtgaggtgctgggactaggactcaattccctcggctacagyctcaactccaaggatcygcagcagttggaagagacagtggataagctctacaaactgactccaaatatcaaggctatcgttgcggacgagatgaagggctayatgattcagaataatgttgcaatcggcgtgaccttctctggtgaagccagccaaatgttagaaaaaaatgaaaatctacgttatgtggtaccgacagaggccagcaatctttggtttgacaatatggtcattcccaaaacagttaaaaaycaaractcagcctatgcctttatcaactttatgttgaaacctgaaaatgctctccaaaatgcggagtatgtcggctattcaacaccaaacctaccagcgaaggaattgctcccagaggaaacaaaggaagataaggccttctatcccgatgttgaaaccatgaaacacctagaagtttatgagaaatttgaccataaatggacagggaaatatagcgacctcttcctacagtttaaaatgtatcggaagtarctaat

SEQ ID NO: 622 - DNA, 1074 bp, Streptococcus pneumoniae
  misc_feature (1)..(1074): tiling:Spneumo1:WAN024D4I; Cluster includes WAN0243JR spr1 645|ABC-SBP|15903687|NP_359237.1|1617090..1618157|-|1068 b p|ABC transporter substrate-binding protein - unknown subs trate|S.pneumoniae|R6|NC_003098.1|ORF|111
atgaaaaaaatgaaagtttggtctactgtacttgcaacgggagttgctcttactacacttgctgcttgctctggaggttcaaattctacgactgcttcttcatctgaagaaaaagctgataaaagtcaagaattagtwatctattcgaactcagtctcaaatggtcgtggtgattggttaactgctaaagcaaaagaagctggttttaatataaaaatggttgatatygctggcgctcaattagcagaccgtgttattgctgagaagaataatgcagttgcagatatggtatttggaattggtgctgttgaytcaaataaaattagagatcaaaaattactagtacagtacaagcctaaatggttagataaaattgatcaatctttatcagataaagataattattataayccwgtkattgttcaaccmttrgtwttrattggrgckcctgatgyaaaagaaatgccwaaagaytggacwgarttagstagtaartataarggwmaatattcmatttmtggtcttmawggwggkacwggacgsgcmattctagcaagtatyytagttcgwtaycttgatgawaaaggwgawttagghgtwtcvgaaaargghtgggaagtwgcaaaagaatatttgmaaaatgcmtayacwctwcaaaarggwgaaagywcarytgttaarryrttagayaaagaarryscwathcaatayggwatgatstggggttctggwgcrttartyggacaaaaagaacaaaatgttgwwttcaaagttatgactcctgagattggtgtaccatttgtaactgaacaaactatggttttaagcactagtaaaaaacaagcgttagctaaagaatttattgattggtttggtcaatcagaaattcaagtagaatatagyaaraamtttggmtctatycctgcmaataaagatgccctmaaagakytacctgaagatacgaaraaatttgttgatcaagtgaaaccacaaaatattgactgggaagctgttggaaagcatttggatgaatgggtagaaaaagctgaattagaatacgtamaamtaactaat

SEQ ID NO: 623 - DNA, 1343 bp, Streptococcus pneumoniae
  misc_feature (1)..(1343): tiling:Spneumo1:WAN024FG9; Cluster includes WAN0243MT spr1 534|ABC-SBP|15903577|NP_359127.1|1512121..1513458|-|1338 b p|ABC transporter substrate-binding protein - sugar transp ort|S.pneumoniae|R6|NC_003098.1|ORF|111
atgaaaaaaatgagaaagtttttatgtctagctggaattgcgctagcggctgttgccttggtagcttgttcaggaaaaaaagaagctacaactagtactgaaccaccaacagaattatctggtgagattacaatgtggcactcctttactcaaggaccccgtttagaaagtattcaaaaatcagcagatgctttcatgcaaaagcatccaaaaacgaaaatcaagattgaaacattttcttggaatgacttctatactaaatggactacaggtttagcaaatggaaatgtgccagatatcagtacagctcttcctaaccaagtaatggaaatggtcaactcagatgctttggttccgytaaatgattctatcaagcgtattggacaagataaatttaacgaaactgccttaaatgaagsaaaaatcggagatgattactactctgttcctctttattcacatgcacaagtcatgtgggttagaacagatttgttaaaagaacataatattgrggttcctaaaacttgggatcaactctatgaagcttctaaaaaattgaaagaagctggagtttatggcttgtctgttccgtttggaacaaatgacttaatggcaacacgtttcttgaacttctacgtacgtartggyggaggaagcctcttaacaaaagatcttaaagcagacttgacaagccaacttgctcaagatggtattaaatactgggttaaattgtataaagaaatctcacctcaagattctttgaaytttaatgtccttcaacaagctaccttgttctatcaaggaaaaacagcatttgactttaactctggcttccatatcggaggaattaatgccaacagtcctcaattgattgattcgattgatgcttatcctattccaaaaatcaaagagtctgataaagaccaaggaattgaaacctcaaacattccaatggttgtttggaaaaattcaaaacatccagaagttgctaaagcattcttagaagcactttataatgaagaagactacgttaaattccttgattcaactccagtaggtatgttgccaactattarggggattagcgattctgcagcctataaagaaaatgaaactcgtaagaartttaaacatgctgaagaagtaattactgaagctgttaaaaaaggtactgctattggttatgaaaatggrccaagtgtacaagctggtatgttgactaaccaacacattattgaacaaatgttccaagatatcattacaaatggaacagatcctatgaaagcagcaaaagaagcagaaaaacaattaaaygatttatttgaggctgttcagtarctaat

SEQ ID NO: 624 - DNA, 332 bp, Streptococcus pneumoniae
  misc_feature (1)..(332): tiling:Spneumo1:WAN024E27; Cluster includes WAN0243DR spr1 862|cglC|15903903|NP_359453.1|1833266..1833592|-|327 bp|Co mpetence protein|S.pneumoniae|R6|NC_003098.1|ORF|111
atgaaaaaaatgatgacattcttgaaaaaagctaaggtkaragyttttacmttgrtkgagatgttrgtrgtcttgctgattatcagcgtgcttttcttgctctttgtacctaatctgaccaagcaaaaagargcagtcaatgacaaaggaaaagcagctgttgttaaggtggtggaaagccaggcagaactttatagcttrgawaaraatgaagatgctasyctragmaagttamaagvagatggrcgmatcacggaagaacaggytaaagcttataawgaatachatrmtaaaaatgkrgkrgcaaatcgtaaagtcaatgattaactaat

SEQ ID NO: 625 - DNA, 1098 bp, Streptococcus pneumoniae
  misc_feature (1)..(1098): tiling:Spneumo1:WAN024FKC; Cluster includes WAN023OGB pne9 1_14||||9282..9368|+|87 bp|Type 47A1 capsule operon, Glimm er 2.02 orf prediction|S.pneumoniae||WAN01UCEE|ORF|000
atgaaaaaaatgttaatttgcataactagcttaacaggaggcggagctgaaaaatcactggtaaattttatacagcaatttaagtataagtatgatatctctttactcgtatatagcgaaaagaataattattatgcacaaaaacttgaagatattaaaatagattatttcataaaaaaagacacaccatatcttattgaaaaacttttgaataaggtagtgaaattttttcctaggacattggtatataaatttattcttaataaaactaggtttaaaaaagaaaaatacgacatagaatttgcgtatatagaaggaaagccaactaaaattatttcaggctcatacaatgaagatagtctaaaattagcgtatattcattgtgatttttctaagaattggtactctcgtaaatcgtttagaagtattagagatgagagtgtgtgctatcaaaaatttcatgatgttttagctgtttctttaggtcagaaagaaagttttgaaaaaatatttccatcatgtaaattggatatagttccaaatttaatcaatcaaaatgaaatagaaagattaagcaaagaatcaaatgtgcaaaagacatttccttatttttgtgcagtaggaagattggcagaagtgaaaaattattcattattaataaatgcatttcaccaatttagaaaaaaatatcctgaatttcatttattaattttgggtgaaggagagctacggcaaacactgcaaaatcagattgagattctaggtgagcaaaattacattcaattagtcggttttcaaagtaacccatactcctatataagacaaagcaaagggctgattcaaagctcaatttcagaatcatttagttatgttctagctgaagcgtcaatattgggagttcccacgatttctactagaactcaagggtcagaattaatgatgaaatattttgatgttatagaagttgatcatgatagtgcggcactggctaagggaatggaatttattctccagaaggaaatttttgagaaaaatacggatttcaatgaggaagcaataaataagtttgaagcaatattttcaaaaataaaggagaaa

SEQ ID NO: 626 - DNA, 1092 bp, Streptococcus pneumoniae
  misc_feature (1)..(1092): tiling:Spneumo1:WAN024FM9; Cluster includes WAN023P1G pne6 1_14||||8325..9416|+|1092 bp|Type 33B capsule operon, Glim mer 2.02 orf prediction|S.pneumoniae||WAN01UCGA|ORF|000
atgaaaaaaattgcgatagtaaggtataatttaagtaaaattggtggagctgaaaaagttgctataaatatggctaatgaattttctcaaaaccacaaaacatacttaatttctattttactaaatgaagacaagaacataaattatgacatatcatctgatgttgaagttgagtcctttttttatggtgatttaagagttcgyaaagtgataattccagctatgctgaagttaagaaaacacttgataaagaatgaaattgatgtagtgttttctattgctccggctacaaatattattatctttttagcaacgttaggattaaatataaaaactgtcttttgtgaccaccatagtttagagtttcaagacactttcagtcgcgagatacaaagatatattggggcaaagttttttgacaaaattgtaactttgactgaggaagataaaaatagatatcgaaaagacttttcattaagaaatgaaaaggttacttcaatctataattggatggaagacattaataacattcccgcatatactaataaaagcaagagcattataacagttggaagaatagaatatcaaaaaggatatgactatttagctaaagctattgttaacgttytgtcaaaatataaagactgggaatgggacatatacggttcgggaaacgagcaaataaaacaagatctgattactgaattggataaaggtggcgttttatcgcgggttcattttaaagggaatgttaatggtacagaaaatatttatccyggtcattctatttatgtaatgacttctcgttatgaaggtcttcccttagttcttttagaagctaaacagtatggactaccgattgttagttttaaatgtccaacgggtccatcagaaatagttttagatgaggaaaatggatatttagttgataattacgatgttgattacatgagtagaaaaatttctgatttaattgaaaacgagaatttgagattaaaattttcagatgaatcaatgaaagatactgaaaaatttagcaagaaaaagattataaagcagtgggaagacttaattgaagaaatgacaggggaa

SEQ ID NO: 627 - DNA, 903 bp, Streptococcus pneumoniae
  misc_feature (1)..(903): tiling:Spneumo1:WAN024FL7; Cluster includes WAN023OS4 pne7 5_14||||10492..10611|+|120 bp|Type 35A2 capsule operon, Gl immer 2.02 orf prediction|S.pneumoniae||WAN01UCEX|ORF|000
atgaaaaaaattgstkatttgrtcaaaagatatggtgtgaaaaatgtggttttacgtgctattaatgatgttctaccagtcaatctcatctttccyagtcaacaactcagacgtttgaattggcaagaaaaagtcaaaaagaagttraaaaaatatgtagttrtttcggattcaatcaagagtgaggaggartgcgatattatctggtggctatggtttcaaggacttgataatgcacyagctattgtgaaaaaatgtagagagtcggtagataaatatgctaaacgcagtggcaaaagggttattgagttaacatctcaaaatttatttgaatatattgaggtacctaacgaactctatgtgaaatataagtcaggtagtttgccaytagctttrttttcagatttttgtcgaattagccttctttctaactatggaggattatggrttgattcaactgttctaattacggggraaattgaagatgagatattgaaccaagatatttttatgtttcaagcttcycctttagactattcrgttactaaaatcagtaattggatgttatattcaaaatayccaggacacccgttcatatyatcgatacgtgatactttgatttcattttataawaagaataatacgatcccagattattttttatttcatttacttgtttcctgtttaatagatgataataggataaatcaaagtttttatgatatggattattatacyaatacctatcctcacttattagggagagttttgagcgaaccatatgatmctttgaaatttgaaaatattttaaggaaaacgtctattyataaattatcatataaaaatttaratwatgttgctgargatagmttttataatgcwattttagrtttagattttagt

SEQ ID NO: 628 - DNA, 1064 bp, Streptococcus pneumoniae
  misc_feature (1)..(1064): tiling:Spneumo1:WAN024GEK; Cluster includes WAN0244CM spr0 604|murG|15902648|NP_358198.1|616727..617785|+|1059 bp|Und ecaprenyl-PP-MurNAc-pentapeptide-UDPGlcNAc GlcNAc transfer ase|S.pneumoniae|R6|NC_003098.1|ORF|221
atgaaaaaaattgtctttacaggtggggggacggttggacacgttaccctcaatcttttgttaatgccyaagttcatcgaagatggttgggaagtccactatatcggggacaagygtggtatcgaacaccaagaaatccttaagtcaggtttggatgtcacyttccaytcyattgcgactggraaattgcgtcgctatttctcttggcaaaatatgctggacgtcttcaaagttkgytggggaatygtccaatcgctctttatcatgttgcgactkcgtccacagayccttttttcaaaggggggctttgtctcagtaccgcctgttatcgcwgcgcgtgtgtcaggagtgcctgtctttattcacgaatctgacctgtctatgggcttggccaataaaatcgcctataaatttgcgactaagatgtattcaacctttgarcaagcttcgagtttgkctaaggttgagcatgtgggagcrgtgaccaaggtttcrgatcaaaaamatccagaaccagatgaattggtggatattcaaasccactttaatcmyaaattgccractgtattgtttgttggcggttctgcaggygctcgtgtctttaaccaattggtgacagaccataagaaagaactaacagagcgctacaatattatcaatctaactggagattctagyctgaaygagttgagscaaaatctttttcgtgttgactatgtgaccgatctctatcaacccttgwtggaattggctgatattgttgtgacacgwggtggtgccaatacgatttttgagctcttggcgatagcaaaattgcatgtcattgtgccrcttggtcgtgaagctagtcgtggtgaccagmttgaaaatgcagcttactttgtwaaraaaggctatgcagaagaccttcaagaaagcgatttgaccttggatagtttggaagagaagctttctcacttactaagtcacaaggaagattaccaagctaagatgaargcttctaaggaattgaaatctctagcagatttttatcaattgttgaaaaaagatttatcataactaat

SEQ ID NO: 629 - DNA, 1964 bp, Streptococcus pneumoniae
  misc_feature (1)..(1964): tiling:Spneumo1:WAN024CIO; Cluster includes WAN0244T2 spr0 012|ftsH|15902056|NP_357606.1|12174..14132|+|1959 bp|Cell- division protein / general stress protein (class III heat- shock)|S.pneumoniae|R6|NC_003098.1|ORF|111
atgaaaaaacaaaataatggtttaattaaaaatccttttctatggttattatttatctttttccttgtgacaggattccagtatttctattctgggaataactcaggaggaagtcagcaaatcaactatactgagttggtacaagaaattaccgatggtaatgtaaaagaattaacttaccaaccaaatggtagtgttatcgaagtttctggtgtctataaaaatcctaaaacaagtaaagaagraacaggtattcagtttttcacgccatctgttactaaggtagagaaatttaccagcactattcttcctgcagatactaccgtatcagaattgcaaaaacttgctactgaccataaagcagaagtaactgttaagcatgaaagttcaagtggtatatggattaatctactcgtatccattgtgccatttggaattctattcttcttcctattctctatgatgggaaatatgggaggaggcaatggccgtaatccaatgagttttggacgtagtaaggctaaagcagcaaataaagaagatattaaagtaagattttcagatgttgctggagctgaggaagaaaaacaagaactagttgaagttgttgagttcttaaaagatccaaaacgattcacaaaacttggagcccgtattccagcaggtgttcttttggagggacctccggggacaggtaaractttgcttgctaaggcagtcgctggagaagcaggtgttccattctttagtatctcaggttctgactttgtagaaatgtttgtcggagttggagctagtcgtgttcgctctctttttgaggatgccaaaaaagcagcaccagctatcatctttatcgatgaaattgatgctgttggacgtcaacgtggagtcggtctcggcggaggtaatgacgaacgtgaacaaaccttgaaccaacttttgattgagatggatggttttgagggaaatgaagggattatcgtcatcgctgcgacaaaccgttcagatgtacttgaycctgcccttttgcgtccaggacgttttgatagaaaagtattggttggycgtcctgatgttaaaggtcgtgaagcaatcttgaaagttcacgctaagaayaagcctttagcagaagatgttgatttgaaattagtggctcaacaaactccaggctttgttggtgctgatttagagaatgtcttgaatgaagcagctttagttgctgctcgtcgcaataaatcgataattgatgcttcagatattgatgaagcagaagatagagttattgctggaccttctaagaaagataagacagtttcacaaaaagaacgagaattggttgctyaccatgaggcaggacataccattgttggtctagtcttgtcgaatgctcgcgttgtccataaggttacaattgtaccacgcggccgtgcaggcggatacatgattgcacttcctaaagaggatcaaatgcttctatctaaagaagatatgaaagagcaattggctggcttaatgggtggacgtgtagctgaagaaattatctttaatgtccaaacyacaggagcttcaaacgactttgaacaagcgacacaaatggcacgtgcaatggttacagagtacggtatgagtgaaaaacttggcccagtacaatatgaaggaaaccatgctatgcttggtgcacagagtcctcaaaaatcaatttcagaacaaacagcttatgaaattgatgaagaggttcgttcattattaaatgaggcacgaaataaagctgctgaaattattcagtcaaatcgtgaaactcayaagttaattgcagaagcattattgaaatacgaaacattggatagtacacaaattaaagctctttacgaaacaggaaagatgcctgaagcagtagaagaggaatctcatgcactatcctatgatgaagtaaagtcaaaaatgaatgacgaaaaataactaat

SEQ ID NO: 630 - DNA, 1002 bp, Streptococcus pneumoniae
  misc_feature (1)..(1002): tiling:Spneumo1:WAN024D7B; Cluster includes WAN0244JV spr0 343|hk03|15902387|NP_357937.1|347668..348663|+|996 bp|Hist idine kinase|S.pneumoniae|R6|NC_003098.1|ORF|111
atgaaaaaacaagcctatgtcattattgctctcacctccttcctrtttgtcttttttttctcccacagcttgctggaaatacttgattttgactggtctatctttttgcacgatgtcgaaaaaacagaaaaatttgtctttttattgttggttttcagcatgtccatracctgtctcttagccctgttttggcgagggatcgaagagctttctctaagaaaaatgcaggctaatctcaagcgtttattrgcagggcaagaagtrgttcaggttgyagatccagatttggatgccagtttcaagtccttatcaggtaaacttaaccttttgacagarrctcttcaaaaagcwgaaaatcakagycttgctcaggaagaggaaatcatcgagaargaacggaagcgaattgctcgggatttgcacgatacagtcagtcaggagttgtttgcggcccacatgattttatcgggtatcagtcagcaggctttgaaattggatagagaaaagatgcagayccagttgcagagtgtcacagctattttagaaacwgcccagaaggatttgcgggttttgctcttgcatttgcgaccagttgaactggagcagaagagcttgatagaagggattcarattctyttaaaagagcttgaggacaagagtgatcttagggttagtctcaagcagaatatgacgaaattgcctaagaaaatcgaggagcatatyttccgtatcctgcaagagttgattagcaatacsctccgccatgcccaggcatcttgcctagatgtctacctctatcagacagatgttgaattgcaactgaaggtggtggacaatgggattggtttccrgttagggagcttagacgacttgagttatggactgcgaaatatcaaggakmgggttgaagatatggcwggracrgttcarytmttracagctcccaagcaagggctggcrgttgatatccgtattcccctgttagataaggaaykaactaat

SEQ ID NO: 631 - DNA, 1490 bp, Streptococcus pneumoniae
  misc_feature (1)..(1490): tiling:Spneumo1:WAN024C5A; Cluster includes WAN0244KT spr0 309||15902353|NP_357903.1|309030..310514|-|1485 bp|Hypothe tical protein|S.pneumoniae|R6|NC_003098.1|ORF|221
atgaaaaaacaagcttttagttctgaacaatatttraatytacaacgcgaccayatyttrgagcgcattaaccaatttgacggcaagctctacttagagtttggcggtaaaatgttagaagatttccacgctgctcgtgtccttcctggttatgaacctgacaacaaaatcaagctcttgcaagaattgaaagagcaggttgaggttgtgattgccattaatgctagyaacattgaacattccaaagcacgtggcgacttaggcatttcttatgaccaagaagttcttcgtttgattgayaaattcaatgaattagggatttttgttggttccgttgtcattacacaatacrctggccaacccgctgcagatgccttccgcaaycaacttgagaaaaacggaattgattcttatcttcattatccaatcaaaggatatcckacggatatggatcacatcatttccycaraaggcatgggcaaaaacgactacatcaaaaccagtcgcaacttgattgtcgtaaccgctcctggaccyggttctggaaaattggcaacgtgtatgtccaatatgtaccacgaccaaatcaatggcatcaartctggctacgctaaatttgaaaccttccctrtttggaatcttccccttcatcatccagttaacttggcttatgaagctgcmacagctgaccttgatgatgtcaacatgattgaccccttccatctycaaacctatggagaaaccactgtcaactacaaccgtgatatcgaaatcttcccagtgctcaarcgcatgttggaacgtattctcggaaaatcrccatacgcttcaccgacagatatgggtgtcaacatggttggtttcgctattacagatgacgargcygctgtcgaagcttctaaacaagaaatcatccgycgttactatcaaacagttcttgacttcaaagctgaaaaagttrgmgaagctgccgtcaagaaaattgagttgctcatgaacgacctcggtatcacacctgcagaycgtaaggttgctgtcgttgcgcgccaaaaagcagaagaaactggyggaccagccctagcyyttgaattrccaaatggkgamatyrtcactggtaaraactcagaactctttggbcctacagccgctgccttgatcaacgccatcaaaaaatcagctgacatcgctaaagaagtaaaactaatcgagcctgaagttgttaagccaatccaaggwcttaaaatcgatcatctcggtagccgcaatccacgccttcattcaaatgaaatyctgattgcacttgctatcacagctacagaaaatcctgatgctgcccgcgctatggaagaactcggcaacctcaaaggaagcgaagcccactcaaccatcatcttgactgatgaagacaagaatgtccttcgtaaactgggtatcaacgtaacctttgacccatactaccaatacgaccgcttatatcgtaagtaactaat

SEQ ID NO: 632 - DNA, 464 bp, Streptococcus pneumoniae
  misc_feature (1)..(464): tiling:Spneumo1:WAN024DT7; Cluster includes WAN0244P0 spr0 158||15902202|NP_357752.1|166821..167279|-|459 bp|Hypothet ical protein|S.pneumoniae|R6|NC_003098.1|ORF|111
atgaaaaaacaagtatttcacgatgcagctrccggtgttcttatcggcctcatcctctcyatcctcttttcactcatttatgcaccaaatacctacgcaccactaaatccctactctctcatmggccaagtgatggatcagcatcaggttcacggtgccctggtcttgctctactgcacacttatctgggcarccatcggtatgctcttcaactttggcaaccgcttattyagccgtgactggagcatgcttcgtgccactctgactcatttcttccttatgctggctggctttgtcccactagcaactcttgctggttggttcccyttccactggattttctacctccagctcattatcgagtttgcgattgtctatctcatcatctgggctattctctataaaagagaggctaaaaaagtagatcacatcaatcaactcttggagcatagaaaatarctaat

SEQ ID NO: 633 - DNA, 695 bp, Streptococcus pneumoniae
  misc_feature (1)..(695): tiling:Spneumo1:WAN024G68; Cluster includes WAN02441P spr0 997||15903041|NP_358591.1|982153..982842|-|690 bp|Conserve d hypothetical protein|S.pneumoniae|R6|NC_003098.1|ORF|221
atgaaaaaaccagttattgggattacaggaaacgaaaaarctcatccagatgatgacatcatgatgagctacgcagcaaaaggctttgttgaaggcgttaaagatgctggagggattcccatcatcctaccgattggtgatcaagaaatggcctgccactatatcagtttgattgacaagctcatcttracaggtgggcaaaatgtcgatccaaaattytatggcgaacccaaaaccattgatagygatgaytatcaccttcaaagagatatcttcgaactggccctcatcaaggaagctattaaacagaaaaagcccattttctctgtctgccgtggtacccaactctttaacgttgccatgggtggaactttgtaccaagatatcgaagaccattggcaggattcttctgttgagtacacaactcaacgcttggtracagaamcagataccgttctccaagaaatctatggagaaatctctcatatcaactccttccaccaccagagcatcaaggacttagcaccaaatttaaaagttgtggctcatgatcctaaagatggtatcattgaggctgtcatgagtacggatgatgtcgcctttctcggtgtccaatggcatccagaacttctttttgaaaatcgtcccaaagataaraaactctttgactatgtcgttaatgaactttarctaat

SEQ ID NO: 634 - DNA, 437 bp, Streptococcus pneumoniae
  misc_feature (1)..(437): tiling:Spneumo1:WAN024DCA; Cluster includes WAN02443Y spr0 916|mesH|15902960|NP_358510.1|903701..904132|-|432 bp|MesH proteine|S.pneumoniae|R6|NC_003098.1|ORF|111
atgaaaaaacctattcaaaaattttttaacaatgaaatcttagcctatctcttttttggymtwgygacwactctwgttkckatwctmtcacgaytagtcatttatcarctaagtcatcaggaactccttgctacggccttggcaaatattatcggtatcytatttgcctttatcacaaatgatacgattgtatttaagcaaaaaaagaaaaatagacttatccgtttagtgaaattttctcttgcycgcctttctacttttctgttagacttgtttttaacttttctctttgtaacccaatttcctcacatcatagggcaattcgtaactgaaaacattgataagataaatgctattgaaacaataattgcacaaatattcattattatcatcaattatatcttgagcaargtctatatttttaraaaataactaat

SEQ ID NO: 635 - DNA, 569 bp, Streptococcus pneumoniae
  misc_feature (1)..(569): tiling:Spneumo1:WAN024DA5; Cluster includes WAN0243YJ spr1 112||15903155|NP_358705.1|1113003..1113566|+|564 bp|Conser ved hypothetical protein|S.pneumoniae|R6|NC_003098.1|ORF|1 11
atgaaaaaacgctctaatattgcacccattgctatcttttttgctaccatgctcgtgatacactttctgagctcacttatctttaacctttttccatttccaatcaaaccgaccattgttcatattcctgtcattattgccagcattatttatggtccacgagttggggttacacttggatttttgatgggattacttagcttgacggttaacacgattacgattctaccgacaagctacctcttctctcccttcgtaccaaacggaaacatctactcagctatcattgccatygtcccacgtattttgattggtttaactccttacttagtctataaactgatgaaaaacaagactggtctgattttagctggrgcycttggttccttgacaaatactatctttgtccttggaggaatcttcttcctatttggaaatgtttataayggaaatatccaacttcttctggcaaccgttatctcaacaaattcaattgctgaattggtcatttctgcaattctaaccctagccattgttccacgactacaaaccttgaaaaaataactaat

SEQ ID NO: 636 - DNA, 677 bp, Streptococcus pneumoniae
  misc_feature (1)..(677): tiling:Spneumo1:WAN024DDG; Cluster includes WAN02446G spr0 826||15902870|NP_358420.1|827822..828493|+|672 bp|Hypothet ical protein|S.pneumoniae|R6|NC_003098.1|ORF|111
atgaaaaaacgrgctattcaaattttactagcattgtccttaattttttacaaatcaacttggttttggagrsttttcaatyayctcgcaaagccctatctaycagcaagtcgtgaattttttcagattctgcttttgatggagagyggagttcttttmttagcggtcatctatctactrgtttttgcaggaaagaaaayttttcatttcaagtggcagctgaggtayttyatctaccttttactgggytacatcayttcrtatatgtctgacttyctcttttcgtatttcatatccctgtcttcaaatcaratttctttgaatgaaacgrtagaaatgatrgggagacaggarttmccytatktyttgctcatcgtttgcttcatcgsccctattgctgaggaattgatttatcgmggtgtgcttatgacaacctkttkcaaaaactcrccttggtacgswraygtyttgctttctgctattattttcggttatattcatatcaattttgctttaactcctcttgcttttttcatttatgctagyggaggtctkattttrgctctattgtatcgcatgactaaaaaymtctactatccaatactagttcatattctcatyaatatyactgcyttctgggaygtktggttrctcctattttcaggaagttarctaat

SEQ ID NO: 637 - DNA, 1523 bp, Streptococcus pneumoniae
  misc_feature (1)..(1523): tiling:Spneumo1:WAN024DXL; Cluster includes WAN0243C8 spr1 917|malM|15903958|NP_359508.1|1898020..1899537|-|1518 bp|4 -alpha-glucanotransferase (amylomaltase)|S.pneumoniae|R6|N C_003098.1|ORF|221
atgaaaaaacgtcaaagtggtgtgttgatgcacatctcttctcttccaggagcttacggaatcggatcatttggtcaaagtgcttacgacttcgttgatttcttggtccstacaaaacaacgttactggcaaatccttccattaggagcaactagttacggggattctccttaccaatctttctcagccttcgcaggaaacactcattttatcgatttagatatcttggtggagcaaggtktgttggaagcaagtgaycttgaaggagttgactttggtagcgatgcgtctgaagttgactatgctaaaatctactatgcacgtcgtcctcttttagaaaaagcggtgaaacgtttctttgaagtcggagatgttaaagattttgagaaatttgctcaagacaaccaatcatggcttgagctctttgctgagtatatggctatcaaagagyattttgacaatcttgcttggactgaatggccagatgcagatgctcgtgctcgtaaagcttcagcacttgaaagctatcgtgagcaattggcagacaagttggtttaccaccgtgtgactcaatacttcttcttccaacaatggttgaaattgaaagcttacgctaacgacaaccacatcgaaatcgttggggacatgccaatctacgtagcggaagattcaagtgatatgtgggcaaatccacatctcttcaaaacagatgtcaatggtaaggctacttgtatcgcaggatgcccaccagatgagttttctgtaactggtcagctttggggtaayccaatctatgactgggaagcaatggacaaagacggytacaaatggtggattgaacgcttgcgtgaaagcttcaaaatctacgatatcgttcgtatcgaccacttccgtggcttcgaatcttactgggaaatccctgctggttccgatacagcagcacctggtgagtgggtgaaaggtccaggytacaagctttttgcagccgttaaggaagaacttggtgagctaaacatcatcgcagaagaccttggcttcatgacagatgaagtgatcgaattgcgtgaacgtactggcttcccaggaatgaagattcttcaatttgccttcaacccagaagacgaaagcattgatagcccacacttggcacctgctaactcagttatgtacacaggaacacacgataacaatacggttcttggttggtaccgtaatgagattgatgatgcgactcgtgagtacatggctcgttacacgaaccgtaaagaatacgaaacagtggtacacgctatgcttcgtacagtattttcatcagttagctttatggcaattgcaactatgcaagatttactagaattggatgaggcagctcgtatgaacttcccatctacccttggtggaaactggtcttggcgtatgactgaagatcaattgacaccagctgtcgaggaaggtttgcttgacttgacaacaatttatcgccgaattaatgaaaatttggtagatttaaagaaataactaat

SEQ ID NO: 638 - DNA, 809 bp, Streptococcus pneumoniae
  misc_feature (1)..(809): tiling:Spneumo1:WAN024GCI; Cluster includes WAN0244AJ spr0 679|ppiA|15902723|NP_358273.1|684508..685311|-|804 bp|Pept idyl-prolyl cis-trans isomerase|S.pneumoniae|R6|NC_003098. 1|ORF|331
atgaaaaaactagcaacccttcttttactgtctactgtagccctagctgggtgtagcagcgtccaacgcagtctgcgtggtgatgattatgttgattccagtcttgctgctgaagaaagttccaaagtagctgcccaatctgccaaggagttaaacgatgcwttaacaaacgaaaacgccaatttcccacaactatctaaggaagttgctgaagatgaagccgaagtgattytccacacaagccaaggtgatattcgcattaaactcttccctaaactcgctcctctagcggttgaaaatttcctcactcaygccaaagaaggctactataacggtattaccttccaccgtgtcatcgatggctttatggtccaaactggagatccaaaaggggacggtacaggtggtcagtccatmtggcatgacaaggataagactaaagacaaaggaactggtttcaagaacgagattactccttatttgtataacatccgyggtgctcttgctatggctaatactggtcaaccaaacaccaatggcagccagttcttcatcaaccaaaactctacagatacctcttctaaactccctacaagcaagtatccacagaaaattatygaagcctacaaagaaggtggaaaccctagtctagatggcaaacayccagtctttggtcaagtgattgrcggtatggatgttgtggataagattgctaargccgaaaaagatgaaaaagacaagccaactactgctatcacratcgacagcatcgaagtggtgaaagactacgattttaaatcttaactaat

SEQ ID NO: 639 - DNA, 438 bp, Streptococcus pneumoniae
  misc_feature (1)..(438): tiling:Spneumo1:WAN024D6L; Cluster includes WAN0243O8 spr1 483||15903526|NP_359076.1|1460276..1460713|+|438 bp|Hypoth etical protein|S.pneumoniae|R6|NC_003098.1|ORF|110
atgaaaaaactctatagaatccattttatagcaattgcagttattgatttgctactatttgsrktttttatcaytagactcgagacatcttttgagtgsctcttgctctctggtttaattttcttccttgctcaaggactcctgctatttctcttgrtcgtccgactcaaacatcaattcgctgagatttatcctcaaatcaataaaaagattcgcttctactatttaggggttctcaccattgattttctattttttgttctcttagccttcattagttctcagcgtttttcatctcttatgycaatyatcactgcttgccattctactttttattatatgacagctgactacctargagaaaactatccagacttttacgacaaacacatctctwwmwsgkakwstmtyywawckawttcttcttttttagtataa

SEQ ID NO: 640 - DNA, 201 bp, Streptococcus pneumoniae
  misc_feature (1)..(201): tiling:Spneumo1:WAN024DJP; Cluster includes WAN0244L2 spr0 300||15902344|NP_357894.1|300360..300602|-|243 bp|Hypothet ical protein, truncation|S.pneumoniae|R6|NC_003098.1|ORF|1 11
atgaaaaaagaaaagaaacagttacgttatcctggtctgaaagcaggttcgatttatggaacagtgatattttttataattccactcattgataccctaacaagtgaaaatccaaattttatcagttctcttctaaatacaaaacatatttttaaaactatrctgggagctttctttttcggagtgatgatacatattgtc

SEQ ID NO: 641 - DNA, 549 bp, Streptococcus pneumoniae
  misc_feature (1)..(549): tiling:Spneumo1:WAN024CWA; Cluster includes WAN0242ZX SP03 32||15900263|NP_344867.1|304678..305220|-|543 bp|hypotheti cal protein|S.pneumoniae|TIGR4|NC_003028.1|ORF|010
atgaaaaaagaaaccttcactgaaaaactgatcaaacgcacatacggtatttctgrtccccttgacgaatacaaacggcgtgaggccgatagtattgggaaccaagtctttatcrtcctcttttatctgatgattttcggaaatmttattccactccttctggcctataaataccctcaagaagtggctctaatctatcctcctctgattttagtgattgccctcatcgctkctggctatgtcacctaccaaatgaaaaaaacaggcatcacagtcattgaaccagatatgctgaatgagaaagaaagcaagcaactacactacccaggtctgaaagcaggtttgttctttggtctatggatgttttttataactcctcttctcagkatactcatagatgaaggtcaggactattttcattctcttctcactataagaaatggtgtatcaagtattctcggttctattttcttcggagcgagcatacagttyctcatctcccgtcgcattgcaaaaactaagaaaaatcaagatgaggatctarctaat

SEQ ID NO: 642 - DNA, 552 bp, Streptococcus pneumoniae
  misc_feature (1)..(552): tiling:Spneumo1:WAN024CXF; Cluster includes WAN024396 spr2 027|pgsA|15904068|NP_359618.1|2017921..2018466|-|546 bp|Ph osphotidylglycerophosphate synthase|S.pneumoniae|R6|NC_003 098.1|ORF|111
atgaaaaaagaacaaattcccaatctcttaacaataggtcgaattctctttatacctatttttatctttattttaacgataggaaattcgatagagagtcatatagttgcagctattatctttgctgttgccagtattaccgactatttagatggatatttagctcgtaaatggaatgtggtcagtaattttggtaaatttgcagatcctatggcggataagttactagttatgtcggcttttattatgttgattgagttaggtatggctccggcttggattgttgcagtgattatctgtcgtgagttagctgtgacaggwttaaggcttttattggttgaaactggtggaacaattttagcagcagcaatgcctggaaaaattaaaacttttagtcagatgtttgcyattattttcttgctattacattggactttgcttggtcaagttctactttatgtagccttatttttcactatctactctggctatgactatttcaagggtagtgcctatgtatttaaagggacatttggttcgaaaykaactaat

SEQ ID NO: 643 - DNA, 380 bp, Streptococcus pneumoniae
  misc_feature (1)..(380): tiling:Spneumo1:WAN024D9G; Cluster includes WAN0243WU spr1 173|crcB|15903216|NP_358766.1|1174279..1174653|-|375 bp|Cr cB protein|S.pneumoniae|R6|NC_003098.1|ORF|110
atgaaaaaagaacaattttatccgctaggaatttttctagctgctatgttgggcggacttgtccgatatctagtttccacctggttaccagccagtccagayttyccttggggcactctctttgtcaactatctgggaattttctgcttgatttwtcttgtcaagggctatctggtctataaggggactagtaagggcttgattttagcactggggacgggtttttgcggaggtttaacaactttttccagcctaatgcttgatactgtgaagctgcttgatacagggcgttatyttagtttrrtmctgtatttgcttttgagyatcggtggaggcctrctyttagcttaytwtytrgggaggaagaaatggtaactaat

SEQ ID NO: 644 - DNA, 675 bp, Streptococcus pneumoniae
  misc_feature (1)..(675): tiling:Spneumo1:WAN024DY8; Cluster includes WAN023KGL 3140 90_3509||||1881023..1881697|-|675 bp|EGAD orf prediction|S .pneumoniae|R6|NC_003098.1|ORF|110
atgaaaaaagataaggcattttttgaaccttatmtkwttwtkttattccttctcagtcaattcttttccaagttggatgaggtaattcttcaaatcatctttgacttgtggrtgtttgagggcgtagtcratrgatgttttcatraagccaaacttrtcyccracrtcgtaacgagcycctktraaytcacgrgcaaawacacgytgtgttttattragrgtrtcgattgcatcwgtmagytgratttcatttccwgcaccwggagcttgsttttcgagratytsraaaatttcaggcgtgaggaggtagcgtccgataatagcaaggtcgctaggagcgtcctctggagctggtttttcaacaaaggtttcaacactgtaaagaccatcttttccttcgccttgcggagcaataaccccgtaagcagatacttcgtcatgagggactggcatgacagcgatagtagacgcgtgggtacgctygtagtcatccatgagttgtttggtaagtggaacagccttttcgtctgtgatatccatcaagtcatcaccaagcataacgacaaaaggttcatttccgacgaaagccttggcttgcaaaacagcatctccgagaccgcgtggatgagtttggcggataaaatgcagacgcatgycagttgtttyatcaactag

SEQ ID NO: 645 - DNA, 1100 bp, Streptococcus pneumoniae
  misc_feature (1)..(1100): tiling:Spneumo1:WAN024G86; Cluster includes WAN024440 spr0 914|hemH|15902958|NP_358508.1|902106..903200|+|1095 bp|Fer rochelatase|S.pneumoniae|R6|NC_003098.1|ORF|111
atgaaaaaagcaattttaatgatgaccttcggttcaccagaagagattayctttgaaggtgtagctgattttttcacaaatattcgycgtggggtgagaccccaagaccacgagattcagactctytatgataattatgtacgaattggaggcacgcctctgcaaaaaattacccgtcaagasgttrccttggtagaagctaggctgggrartgaatacagtgtctactttgctaataagttttccagtccctttattccagatgtgatcggtcaaatggaagcagacggaattgaacagtgtatttgcttgattttggagccccattattctttctactctgtcatgggctatgaaaaatttttagaaagcaaacaaattcaatttttggtcattawggactggtatcaggaagaagcgctcttaaactattgggcwgatgaaattgctaagattttaaaagaagaagtaaagcaagacagctttaaagtcatcttttcagcccatastgtgccyatttttgccttggactttggtgatccttatatagaccaaattttcgaaaatagcaagctagtcgctgaaaaactgggcttgagttcagaacaatataccaacacttggcaragtgagagtgatattggtattccatggattaaaccagatgttttggagtatctcagagaacagacagaacatccagaccattatatttttgtacctattagtttcatcagtgagcatattgaggtcttgtttgacaatgatgtrgaatgttatgacttatgycaggaatttggggtaaactaccatcgtccaccaatgccaaatacagattctcgtttgattgatgctttggtcaatacagttagagtcaatgaaaatcaagagtttaaggaatttctcccagaagaagagacctttgatgagttagttccttcagacgagacgaaaaacattttrgctgaatctsaagatttacaaatgccagaatttgtgaaaaaaytgattgagaaaaaaggkcgkgaraatgttaagatgccttatcttatcaaaaaaatgcttgaaaaagcaggcaagttacccaaagagtaactaat

SEQ ID NO: 646 - DNA, 921 bp, Streptococcus pneumoniae
  misc_feature (1)..(921): tiling:Spneumo1:WAN024FW9; Cluster includes WAN02413L |cap 3C||CAA87405.1|||921 bp|glucosephosphate uridylyltransfera se|S.pneumoniae||Z47210|ORF|000
atgaaaaaagtaaaaaaagctgttattcctgctgcagggctgggcacacgatttttgcctgccactaaagctttggcaaaagaaatgcttccaattgtagaccgccccacaattcattttgtcattgaagaagctttacgttcgggtattgaagatattctagtagttactggaaagagtaaacgttctattgaagattattttgattcaacttttgaattggaatatagtcttagaaaacaaggaaagatggaacttcttaagtcagttaaygaatcgactgatattaaagtacatttcgttcgtcaaagttcaccacgtggtcttggtgacgctgttctccaagcgaagtcttttgttggtgacgatccctttgttgtaatgcttggtgatgaccttatggatatcaccgactcaactgctgtacctttaacaagacaattgatggaygattacaacgcaacacaggcttcaactatcgcagtaatgcctgttagatatgaagatgtttcttcttatggtgtgatttctcctagattggaaagtagtaatggcctctatagtgttgatgcttttgtagagaaaccaaaaccagaagaagcgcctagcmatttagctattattggacgttatctacttactcctgagattttttctatattagaaacccaaaagccaggagcaggtaatgaaattcaattgacagatgctattgatacattgaataagacacagagtgtttttgcgcgtgaatttgtgggcaaacgttacgatgttggtgataagtttaattttatgaaaacatcaattgattatgctcttcaacatcctcagattaaagagagtttaaaaaattacgttattgcacttggtaagcaattggagaagctagatgactgttcgtcaagtggacacctatga

SEQ ID NO: 647 - DNA, 563 bp, Streptococcus pneumoniae
  misc_feature (1)..(563): tiling:Spneumo1:WAN024DCH; Cluster includes WAN02444A spr0 904||15902948|NP_358498.1|888961..889536|+|576 bp|Conserve d hypothetical protein|S.pneumoniae|R6|NC_003098.1|ORF|111
atgaaaaaagtaatgtttgctggcttaagtctcttgtcattagttgtattgatggcctgtggtsaggaagaaactaaaaagactcaagcagcacaacagccaaaacaacaaacgactgtacaacaaattkctgttggaaaagatgytccaracttyacattgcaatccatggatggcaaagaagttaagttatctgattttaagggtaaaaaggtttacttgaagttttgggcttcatggtgtggtccatgcaagaaaagtatgccagagttgatggaactagcggcgaaaccagatcgtgatttcgaaattcttactgtcattgcaccaggaattcaaggtgaaaaaaytgttgagcaattcccacaatggttccargaacaaggatataaggatatcccagttctttatgataccaaagcaaccaccttccaagcttatcaaattcgaagcattcctacagaatatttaattgatagccaaggaaagattggaaagattcaatttggtgctatcagtaatgcggatgcagaagcagcatttaaagaaatgaactarctaat

SEQ ID NO: 648 - DNA, 1104 bp, Streptococcus pneumoniae
  misc_feature (1)..(1104): tiling:Spneumo1:WAN024CKB; Cluster includes WAN0242ZA SP03 57||15900286|NP_344890.1|331773..332870|+|1098 bp|UDP-N-ac etylglucosamine-2-epimerase|S.pneumoniae|TIGR4|NC_003028.1 |ORF|010
atgaaaaaagtagttgtagtatttggaactcgtccagaagccatcaagatgtgtcctttggtcaaagagttaagaacacgtaagaatattgaaacattagtttgcgttacgggccaacaccgtcaaatgttggatcaggtcttggacacatttgggattattcccgattttgatttgtctattatgaaagataaacaaactttatttgatgtgaccattggcattttggaaggaatgaaggctattttagagtcagaaaaacctgatttggtgttagttcatggggatacaagtacgaccttcgctagttcactggcggccttttatttacagattccaattggtcatgttgaagctggtttgcgcacttacgatatctattcaccatatcctgaagagtttaatcgtcaagcagttggggttttggctcagtatcattttacaccaacacaactttcaaaagataatcttttaagagaaggaaaaactccagagagcatatttgtgacaggtaatacggcgattgatgctttacaaactacaattcaagaggactatacgcatcctgagttagaatggataggagaaagcaggtttattctaattacagctcatcgtcgtgaaaatcttggtgaaccgatgagacatatgtttagagcaattagaaggattattgaagaatattcagatgtcaaggctatttatcctatccatatgaatcctcgtgttcgccaaattgctgaggaagaactaagtggctgtgaacgtatcaagatgatcgaacctttagaagtattagattttcacaattttttatcaagaagttatttaattttaacagatagtggtggtattcaggaagaggctccaagtttaggaaaacctgttttggttatgagagatacaactgaacgtccagagggaattgaagcagggactttgaaacttgtaggtgctgatgaaaataatatttataggcattttaaagaattattagaaaatgattcagtttatcaagcaatgagtcaagcttcaaatccatatggagatggaacggcttgtaagaaaattgcagacatactagaaggagaagtgctaactaat

SEQ ID NO: 649 - DNA, 1122 bp, Streptococcus pneumoniae
  misc_feature (1)..(1122): tiling:Spneumo1:WAN024FNO; Cluster includes WAN023PB5 pne4 5_14||||10776..11897|+|1122 bp|Type 22F capsule operon, Gl immer 2.02 orf prediction|S.pneumoniae||WAN01UCHA|ORF|000
atgaaaaaagtattaattgtccgaagtggaccttaccaagttactccaaatgaatacaaccttcaggagcttggattagcttctgctctcagtcagcagggataccaatgtgacgtgatgtattatcacaaaacaaaaaactatgatcaattatttgagaaaaacggggaaaaaattaaagtattttggagaaggggaataagattatttagaagtggaatttatccccagattttaaaaaagaaatttttgagtcagtatgataaaataattatttccgagtatagccagattatggcagttttattgtctagaattcattccaatgtatatatttataatggtccatactataatctatttaagatccccattattgaatctatgtacgattttctttttgtaagaatgctcaataagagaaccaagacagttttctgcaagacagaaaaggcaaagcattatcttaaaaataagggattcaatgattgtaaagtagtgggcgtaggtctagatgttgaaaagtttgaacaagaagaggaacctacggagaatactatagaacttttaaaaagaatggagaataagcaaaatattctttatgtaggctcactatcaaaaagaaaaaacacagctcatttaattagaatttttaatattttaaaatctaaaagtggtaagaaaaacgaacttcaattggtattgattggtaaggatgagggtaatattgttgaaaaaattaactattcacggtttaaagatgatattatttatcaaccttatttaaagaactctcagcttcaatttatttacccatcatcacaactatttgtgctcccgtcgattcaagagatttttggtatggtattacttgaggcaatgtattttaagttgtctgttgtttccagcgcaagtgctggaggagagacactgattcaagatggtataaacggtaaaattatgaatgattttaatgatgaacactgggtggattgtatagaaaatctattaaataacccattggaattgaaacggcttggagaatgtgcccataagcgaattacggaacagtttatgtggtcttcaattgcgagaaaaataattgagacatttgatgaaagg

SEQ ID NO: 650 - DNA, 1089 bp, Streptococcus pneumoniae
  misc_feature (1)..(1089): tiling:Spneumo1:WAN024CKD; Cluster includes WAN024172 |cps 9vH||AAM62292.1|||1089 bp|putative UDP-N-acetyl-glucosamin e-2-epimerase Cps9vH|S.pneumoniae||AF402095|ORF|000
atgaaaaaagtcatgttggtttttgggacacgtccagargctattaaaatgtgtccyytagtaartgaactgaaacaaaatgattcaatcaagacacttgtgtgtgtaactggtcaacataaggaaatgytagagcaggttttrgaggtgttcaaggttgtcccagatyatgatttgggtatcatgaaakcaaatcaraccctatttwccattacgaytagtatyttggataarattcargcrgttctagarmaagaaawrccwgatmtygttcttgttcatggagatacwacaacaacatttgcgacagctttrgcagcattttatatgggaatcaaagtgggacacgtcgaagcmggtctcagaaccyayaatctccaaagtccatttccagaggarttcaatcgccagacracttctatcattgccgactatcatttygcgccgactgaagttgcraaggaaaatctactaagagaggrcagaaaaaatatctttgtgacgggaaatacagtcattgatgctttgaagacgactgttcaakryaactaycatcacccaattttrgaatgggcaaagggtagtaagttaatcatgctaacggctcatcgacgagaaaatcttgggraaccgatggaaaacatgtttaatgctgttaatcgaattttaracgaattygaagatgtaaaagttgtatatcccatccataaaaatcctaaggttcgagarttrgcaagtaaagtttttggcgataatgaacgaatgaaratcattgaaccgttagargttattgatttycataattttatgratcaaagctatatgattttgacagattctggaggtgtrcaggaagaagcaccttctttaggraaacctgtcttrgtgatgcgtgatacaacagagcgtcctgarggrgtcgytgctggcacrttgaagttggtaggwacagaagaagagaatatytataryaacttyaaacttcttcttgargatgaaacagaatataacaagatgagyaaagctagcaayccttatggagatggaatgacttgtaaacggrttgttgatattattctggaagtataa

SEQ ID NO: 651 - DNA, 1131 bp, Streptococcus pneumoniae
  misc_feature (1)..(1131): tiling:Spneumo1:WAN024DE7; Cluster includes WAN0242LQ SP08 91||15900774|NP_345378.1|839434..840093|+|660 bp|type I re striction-modification system, S subunit, putative|S.pneum oniae|TIGR4|NC_003028.1|ORF|011
atgaaaaaagtgaagttgggggaagtttgtgagattttatctggttacgcttttaaatcatcacaatttaatgataacaaaattggtctccccttaatacgaattcgagatgtagaaagaggtttttctgatacctactttgaaggaacttatcccgaagaatatcttattaaaaatggagacttattgattacaatggatggcagttttatattgaaaaaatgggagggggatttagcgctacttaatcaacgtgtctgtaaaattaaaattacggataaaagtgtagatgaaggttatatatcttggttgattcctaaatttttaaaagaaattgaagataagaccccttttgttacagtgaaacatctttcagtagctaaaataaaagatatctcatttgtattgcctaataaactagaacaaaagctaattgcaaaaaaactaaatacgataagtcaaatttatgattttcgtaaaattcaatcagaaaaatttaacgagctcgtcaaatcccgatttaacgagatgtttggggaaaataaaatatttgaaagcattgataacttatttgatrttatagatggtgataggggcaaaaattatcctaaatcagatgagttgtttagtgaggagtactgtttatttttaaatacaaagaatgttactaaaaacggattttcattcgatacaaagcaatttatcactaaaacaaaggataaattacttcgaaaaggcaaacttgagcgttatgatatagtcttgacaacaagaggtactgttggaaatgtagcgtactacgatgaattaataaaatataaacatttacgtataaattcaggtatggtaatattacgtcccaagacaccaaatctaaatcagaaatttattatccatgttttaaggaataataattatagtcgagtgatatcaggaagtgctcagcctcagttaccaattacaaaattaaaaaaaatacttctccccctycccccactagccctccaaaatgagttcgcagactttgtagyccwggtcgacaaatcacaatttgcttgtsagatagcyawaaawststggagaratagcttgaaayttwgwakaatatmdctratgcaggagtattttggc

SEQ ID NO: 652 - DNA, 399 bp, Streptococcus pneumoniae
  misc_feature (1)..(399): tiling:Spneumo1:WAN024FOK; Cluster includes WAN023PIY pne3 3_11||||6156..6554|+|399 bp|Type 16A capsule operon, Glimm er 2.02 orf prediction|S.pneumoniae||WAN01UCI4|ORF|000
atgaaaaaagttataacatatggaacatttgatttgttgcactatggtcatattaatcttcttaaaagggctaaatcgttaggcgattatttaattgttgtgatttccactgacgaattcaactggaatgaaaaacaaaaaaaatgttattttacatatgaacaaagaaaaacactcgtagaggctgttaggtatgttgatttagtaatacctgaagaatcatgggaacaaaaagtgacagatgtccatgaatatcacatagatacctttgtcatgggagatgattggaaggggaaatttgattttttagagaaggaaggagttgaagtggtctatttatcacggactcctgaaatcagtacaactgaaattaagaattcattggcaaccagagaatat

SEQ ID NO: 653 - DNA, 1502 bp, Streptococcus pneumoniae
  misc_feature (1)..(1502): tiling:Spneumo1:WAN024FB2; Cluster includes WAN0243I2 spr1 706|amiC|15903748|NP_359298.1|1675431..1676927|-|1497 bp|A BC transporter membrane-spanning permease - oligopeptide t ransport|S.pneumoniae|R6|NC_003098.1|ORF|212
atgaaaaaatatatttttatgcgtgttttgcggtcattggtttcgattttcttagtaacgactttgacctacacgattatctataccttggttcctcgaaaattgattttcaagcaggatcctaactataataaaattgcgacaacggctgataaacgtgataactatgaaaatactgtgtttgagcgtatgggctacattgagtattacgatactaaagagttgcaagaaaaggcaagtagcatggattcttctgtaacagtagaagcaaatgcgaccaataaagctatttatgaaaagtacatcaatcaattaggtcatggttggactttgggagaatttactgaaagtggtcaattctatgctactcgtgaaattccaatttttgaacgtgtttttcacttctatgctaacttgattgacattgaycatacaaataaaatccaagaccctgaaaatccagacttgaaacgctaccttcgttttgaaaatgatycagctatcggatggtcattggtcggttcaggaactaaacataaatatctcttgtactttaacagtcagttcccatttgttcatcaaaactttgtgaacttgaatttaggtgactcttacccaacctatgctaatacaccagttcttcaggttattactcaaggtcaaggacaaaccaaaactgcccaagttcagttcccaacaggtaagaaaacgtcttctgtaaatatttactcaagaayctacaagtcacctagtcaggctgactctcgtgaagtagctagctatgggaaagatgatccttatacagcgactgaaagtaattaccaatatccatctatgattgtcagctctgctattactggtttgattggtttggttcttgcctatgctcttgccgtgccacttggttcagccatggctcgtttcaagaacacttggattgatagcctctcaacagggrctttgaccttcttgcttgctcttccaacgattgccttggtttacatcgttcgattgattggatcatctattgcccttccagattcattccctatcttgggagctggagattggcgttcttacgttttaccagcagtcatccttggtttgttgggtgctcctsktacagccatttggattcgtcgttacatgattgacttgcaatctcaagactttgttcgtttcgctcgtgcaaaaggtttgtctgaaaaagaaatttcaaacaaacacatctttaaaaatgccatggttccgctggtttcaggaattcctgstgccattattggggttatcggtggtgcaacccttactgaaacagtcttcgccttcccaggtatgggtaaaatgttgattgactctgtaaaagcatctaataactctatggtcgttggtcttgtcttcatctttacatgtatttctatcttctcacgtcttttgggagatatttggatgactattattgacccacgtattaaattgactgagaaaggaggcaaataactaat

SEQ ID NO: 654 - DNA, 791 bp, Streptococcus pneumoniae
  misc_feature (1)..(791): tiling:Spneumo1:WAN024DGR; Cluster includes WAN0244DV spr0 559||15902603|NP_358153.1|560403..561188|+|786 bp|Conserve d hypothetical protein|S.pneumoniae|R6|NC_003098.1|ORF|111
atgaaaaaatatcaacgaatgcatctgatttttatcagacaatacatcaaacaaatcatggaatataaggtrgattttgtggttggtgtcttgggagtctttctgrctcaaggcttgaatctcttgtttctcaatgtcatctttcaacatattccattcctagaaggytggacctttcaagagatagctttcatttatggattttccttgattcccaagggaatggaccatctcttttttgacaatctctgggcactagggcaacgcctagtccgaaarggrgagtttgacaagtatytgactcgtcccatcaatcctctctttcacatcctagttgaaacctttcagattgatgccttgggtgaactcttagtcggtggtattttattgggaacaacagtgaccagcattgtttggactcttccraaattcctgcttttcctagtttgtattccttttgcgaccttgatttatacttctcttaaaatcgcaacagccagtatcgccttttggactaagcagtcaggcgccatgatttacatcttctatatgttcaatgactttgctaagtatccgatttctatttacaattctcttcttcgttggttgattagctttatcgtgcctttcgcctttacagcctactatccagctagctatttcttacaggaaaaggatgtgttctttaacgtaggaggtttgatgttgatttctctggttttctttgttatttcccttaaactttgggataagggcttagattcctacgaaagtgcgggttcgtaactaat

SEQ ID NO: 655 - DNA, 723 bp, Streptococcus pneumoniae
  misc_feature (1)..(723): tiling:Spneumo1:WAN024DDR; Cluster includes WAN024473 spr0 803||15902847|NP_358397.1|805375..806091|+|717 bp|Hypothet ical protein|S.pneumoniae|R6|NC_003098.1|ORF|121
atgaaaaaatattttattrgcggtttgggaagcaatgcctatcatagcaaggattttyttcaagaactagattcgcaggtctattttctaaatccatatgaaaagcatcttcgagatgaaacagaattgaaatcatggtttaaaaatgarattgtagaggaagaatytatctgtctgataggycattctcttggaggagatttagctcgttatytcgcatcggaatttgaagaagtaaagaaactgattcttttggatggtggctatctagatttagataagattttacctttggatacagagttagaggaaactaaaaattatatcaaatctcaaattrtttyggacttagmtsttcttayttctaaagaraartcygaagcaaagcattggtcagaaaatatggagaaagctgtaagacagtcytatcactggaatgttgagtataatagatatgagttggctataaattatgaaaatatagaagcgatactccgcctacggagaaaaatacaagcttttaagagagaagtgggagataccttgtttattagtcctcgctatcctaatgragctacatggagagaggaagcccywaamkaattgccagactattttratactatttttttagaaaactttggccatgagctttatactcaagcacctaaagaaatcgctagtytaatgaatgagtggctcgcttattttytaykaactaat

SEQ ID NO: 656 - DNA, 842 bp, Streptococcus pneumoniae
  misc_feature (1)..(842): tiling:Spneumo1:WAN024ESU; Cluster includes WAN0243RU spr1 353|glnH|15903396|NP_358946.1|1336103..1336939|-|837 bp|AB C transporter substrate-binding protein - glutamine transp ort|S.pneumoniae|R6|NC_003098.1|ORF|111
atgaaaaaatggatgcttgtattagtcagtctgatgactgctttgttcttagtagcttgtgggaaaaattctagcgaaactagtggagataattggtcwaagtacsagtctaacaagtctattactattggatttgatagtacttttgttccaatgggatttgctcagaaagatggttcttatgcaggatttgatattgatttagctacagctgtttttgaaaaatacggaatcacggtaaattggcaaccgattgattgggatttgaaagaagctgaattgacaaaaggaacgattgatctgatttggaatggctattccgctacakacgaacgccgtgaaaaggtggctttcagtaactcatatatgaagaatgagcaggtattggttacgaagaaatyatctggtatcacgactgcaaaggatatgactggaaagacattaggagctcaagctggttcatctggttatgcggactttgaagcaaatccagaamttttgaagaatattgtcgctaataaggaagcgaatcaataccaaacctttaatgaagccttgattgatttgaaaaacgatcgaattgatggtctattgattgaccgtgtctatgcaaactattatttagaagcagaaggtgttttaaacgattataatgtctttacagttggactagaaacagaagcttttgcggttggagcccgtaaggaagatacaamcttggttaagaagataaatgaagctttttctagtctttacaaggacggcaagttccaagaaatcagccaaaaatggtttggagaagatgtagcaacyaaagaagtaaaagaaggacagtaactaat

SEQ ID NO: 657 - DNA, 572 bp, Streptococcus pneumoniae
  misc_feature (1)..(572): tiling:Spneumo1:WAN024DGK; Cluster includes WAN0244DE spr0 576||15902620|NP_358170.1|586337..586930|+|594 bp|Conserve d hypothetical protein|S.pneumoniae|R6|NC_003098.1|ORF|111
atgaaaaaatggcaaacatgtgttcttggagcaggttcgctcctttgtttgacggcttgttcaggcaagtccgtgactagtgaacaccaaacgaaagatgaaatgaagacggagcagacagctagtaaaacaagcgcagctaaagggaaagaggtggctgattttgaattgatgggagtagatggcaagacctaccgtttatctgattacaagggcaagaaagtctatctcaaattctgggcttcttggtgttccatctgtctggctagtcttccagatacggatgagattgctaaagaagctggtgatgactatgtggtcttgacagtagtgtcaccaggacataagggagagcaatctgaagcggactttaagaattggtataagggattggattataaaaatctcccagtcctagttgacccatcaggcaaacttttggaaacttatggtgtccgttcttacccaacccaagcctttatagacaaagaaggcaagctggtcaaaacacatccaggattcatggaaaaagatgcaattttgcaaactttgaaggaattakcctarctaat

SEQ ID NO: 658 - DNA, 935 bp, Streptococcus pneumoniae
  misc_feature (1)..(935): tiling:Spneumo1:WAN024AUF; Cluster includes WAN0243NX spr1 494|psaA|15903537|NP_359087.1|1470686..1471615|+|930 bp|AB C transporter substrate-binding protein - manganese transp ort.|S.pneumoniae|R6|NC_003098.1|ORF|111
atgaaaaaattaggtacattactcgttctctttctttctgcaatcattcttgtagcatgtgctagcggaaaaaaagatacaacttctggtcaaaaactaaaagttgttgctacaaactcaatcatcgctgatattactaaaaatattgctggtgacaaaattgaccttcatagtatcgttccgattgggcaagacccacacgaatacgaaccacttcctgaagacgttaagaaaacttctgaggctratttgattttctataacggtatcaaccttgaaacaggtggcaatgcttggtttacaaaattrgtagaaaatgccaagaaaactgaaaacaaagactacttcgcagtcagcgacggcgttgatgttatctaccttgaaggtcaaaatgaaaaaggaaaagaagacccacacgcttggcttaaccttgaaaacggtattatttttgctaaaaatatcgcyaaacaattgagcgccaaagaccctaacaataaagaattctatgaaaaaaatctcaaagaatatactgataagttagacaaacttgataaagaaagtaaggataaatttaataagatccctgctgaaaagaaactcattgtaaccagcgaaggagcattcaaatacttctctaaagcctatggtgtyccaagtgcytacatctgggaaatcaatactgaagaagaaggaactcctgaacaaatcaagaccttggttgaaaaacttcgccaaacaaaagttccatcactctttgtagaatcaagtgtggatgaccgtccaatgaaaactgtttctcaagacacaaacatcccaatytacgcwcaaatctttactgactctatcgcagaacaaggtaaagaaggcgacagctactacagcatgatgaaatacaaccttgacaagattgctgraggattggcaaaataactaat

SEQ ID NO: 659 - DNA, 930 bp, Streptococcus pneumoniae
  misc_feature (1)..(930): tiling:Spneumo1:WAN024AUE; Cluster includes WAN0240OK |||A AF70668.1|||930 bp|PsaA|S.pneumoniae||AF248234|ORF|000
atgaaaaaattaggtacattaytyrttctctttctttccgtyattgytcttgtagcatgtgctagcggaaaaaaagatgcagcttctrgtcaaaaactaaaagttgttgctacaaaytcaatcatcgctgatattactaaaaatattgctggtgacaarattgatcttcayagtatcgttccgattggrcaagacccacacgaatacgaaccactycctgaagatgttaagaaaacttctgaggcwgacctcattttctataayggtatcaaccttgaaacaggtggcaatgcytggtttacmaaattggtagaaaatgcyaagaaractgaaaacaaagactactttgcagtcagygaaggygttgatgtyatctaccttgaaggaaaaaatgaaaaaggtaaagaagacccacacgcttggctyaaccttgaaaatggrattatctttgctaaaaatatcgccaaacaattgagygcyaaagaycctaacaacaargaattctatgaaaaaaatctcaaagaatatactgataagttagacaaacttgataaagaaagtaaggataaatttaataacatccctgctgaaaagaaactcatygtaaccagcgaaggagcattcaaatacttctctaaagcctatggtgtcccaagtgcttacatctgggaaatcaayactgaagaagaaggaacacctgaacaaatcaagaccttggttgaaaaacttcgccaaacaaaagttccttcactctttgtagaatcwagtgtggatgaccgtccaatgaaractgtttcwcaagacacaaacatcccaatctacgcacaaatctttackgactctatcgcagaasaaggtaaagaaggygacagctactacagcatgatgaaatacaaccttgayaagattgctgaaggattggcaaaataa

SEQ ID NO: 660 - DNA, 434 bp, Streptococcus pneumoniae
  misc_feature (1)..(434): tiling:Spneumo1:WAN024CZQ; Cluster includes WAN0243ED spr1 839||15903881|NP_359431.1|1815060..1815488|-|429 bp|Conser ved hypothetical protein|S.pneumoniae|R6|NC_003098.1|ORF|1 11
atgaaaaaattagtctttgtctgtctgggaaatatttgccgtagccctatggccgagtttgttatgaaatcaatgacagataastacgaaatccaaagtcgagcaacttcctcttgggaacatggcaatccgattcataaggggactcagggaatttttcaasagtatgagattccttatgacaagaacaagacatcgcttcagattagtaaggaagattttgaagcctttgattatattatcggaatggacgcttcaaatrtttcygacttaygtcagatgtgtccagtagactgtcaagataagatttactcattttcatctgaaagtgttccagacccttggtatacaggagattttgaagaaacctatcgacgtgttcaagagggytgtcaagcttggttagaacgtttagaaaaggagagttaactaat

SEQ ID NO: 661 - DNA, 1101 bp, Streptococcus pneumoniae
  misc_feature (1)..(1101): tiling:Spneumo1:WAN024C9M; Cluster includes WAN023R0N-5 co ntig_1409_1||||579..2591|-|2013 bp|Glimmer 2.02 orf predic tion|S.pneumoniae|670|WAN01UDX2|ORF|000
atgaaaaaattatttatactcatatccaacctgcttgctagtttgttctttgtttgggtatttaccatttggactgatacatatgtctccyattattacyccaacgttgttgtacatgattcttcccctgaaacaacttttcagcatgttgctacacgcttggaaaaactagcagaagaaacrgatagctttattgcgattcaacaccaagatcctaactcagaaggtactacagttttttcttatacgacctttggrgacggaaagttgcctgaygggctwcaggaaaaaaaactagaagatgctcaaagtagtagtgttgaaacaaactattttgtattcgatggacacctagatattcacttgctaagggaggagctaagtcaacttggcttgactaayatgmacctgacaattccatctaaactatctacgttaatggctatctttagtaacggatttcagttaatcagtctattgattttcatcttaacctttgkagcactgactttaattagtcaaattagccaattacggtcgtcgggcattcgcctcatttcaggagagaaacggtggtccattttycttagaccagttggtgaggatttgaaagggatagctgttggtttcagtttagctggcgtgctcrccattcttatgcaaaaaattctgtcgcttccaacgcaatccctaatgaccataggagcaggcktgctcagttataatctcatcttgttgtckatctccctgtttttcgctcaactcttcgcagttgggataaaaaagatacacctgatgcagattataaaagggcaagtgcctgtcagaggaatcattagtttgattttaatcggtcaactattagcgattattattgtaacrctgggaatagggagtagcttaaagtattcccaagcctggcaacagcatcggattggacaagaggcttggagycaggaaaggcaactgattaccctatcaatcagccgtgaaggaacgagtcctggttttgatgaacaagctcaaaggaaactcagaacttggtatcaattgatggatctggctgtttcagaacaaaaggctttcttatctagacaccag

SEQ ID NO: 662 - DNA, 276 bp, Streptococcus pneumoniae
  misc_feature (1)..(276): tiling:Spneumo1:WAN024D2K; Cluster includes WAN0243G6 spr1 774||15903816|NP_359366.1|1742999..1743160|+|162 bp|Hypoth etical protein|S.pneumoniae|R6|NC_003098.1|ORF|120
atgaaaaaattcgacaattatattattgagaagccttgcgattctaattcagataaactgcaaaaaatcttaataattgaaartttggtagatgatattttgcaatttyctctcagaatcaataatagtgtaggagagattttcctcctacaaccgtttywaamkaawactatctttattccatgttattttgaggaagatattgtgaaagtcaaagatgatgataaagttgagtggaatttgttagaatttcaaaaatttagagcatttttggct

SEQ ID NO: 663 - DNA, 780 bp, Streptococcus pneumoniae
  misc_feature (1)..(780): tiling:Spneumo1:WAN024FT8; Cluster includes WAN0243UV spr1 244|potC|15903287|NP_358837.1|1243854..1244627|-|774 bp|AB C transporter membrane-spanning permease - spermidine/putr escine transport|S.pneumoniae|R6|NC_003098.1|ORF|211
atgaaaaaatttgccaacctttatctgggactggtctttctggtcctctacctgcckatyttttacttgattggctaygcctttaatgctggtgatgatatgaatagctttacaggttttagctggactcactttgaaaccatgtttggagatgggagactcatgctgattttgrctcagacmtttttcttggccttcctatcagcyttgatagcgaccattatcgggacttttggtgccatttacatctaccagtctcgtaagaaataccaagaagcctttctatcactcaataatatcctcatggttgcgcctgacgttatgattggtgctagcttcttgattctctttacccaactcaagttttcacttggctttttgaccgttctatctagtcaygtggccttctccattcctatcgtggtcttgawggtcttgcctcgactcaaggaaatgaatggcgacatgattcatgcggcctatgacttgggagctagtcaatttcagatgwtyaaggaaatcatgcttccttacctgactccgtctatcattrcwggttayttcatggccttcacctattcgytrgatgaytttgccgtgaccttctttgtaacaggaaatggcttttcaaccctatcagtcgagatttactctcgtgctcgcaaggggatttcsytagaaatcaatgccctktctgctctagtctttctctttagtattatcctagttgtaggttattactttatctctcgtgagaaggaggagcaagcaykaactaat

SEQ ID NO: 664 - DNA, 1980 bp, Streptococcus pneumoniae
  misc_feature (1)..(1980): tiling:Spneumo1:WAN024CXU; Cluster includes WAN02439N spr2 010||15904051|NP_359601.1|2002560..2004533|-|1974 bp|Conse rved hypothetical protein|S.pneumoniae|R6|NC_003098.1|ORF| 111
atgaaaaaattttatgtaagtccaatttttcctattctagtaggattgattgcgtttggagtcttatccactttcattatttttgttaataataatctgttgacggttttaattttgtttctttttgtaggaggctatgtttttttatttaagaaactgagagtgcattatacaaggagtgatgtagaacagatacagtatgtaaaccaccaagcggaagaaagtttgacakctctattggaacaratgcctgtaggtgttatgaaattgaatttatcttctggagaggttgagtggtttaatccctatgctgaattgattttgaccaaggaagatggtgattttgatttagaagctgttcaaacgattatcaaggcttcagtaggaaatccgtctacttatgccaagcttggtgagaagcgttatgctgttcatatggatgcttcttccggtgttttgtattttgtagatgtatccagggaacaagccataacagatgaattggtaacaagtmgaccagtgattgggattgtctctgtggataattatgatgatttggaggatgmaacttctgagtcagatattagtcaaatcaatagttttgtagctaattttatatcagagttttcagaaaaayacatgatgttttctcgtcgggtaagtatggatcgattttatctatttactgactacacggtgcttgagggcttgatgaatgataaattttctgttattgatgctttcagagaagagtcgaaacagagacagttgcccttgacyttaagtatgggattttcttatggcgatggaaatcatgatgagatagggaaagttgctttgctcaatttgaacttggctgaagtacgtggtggcgaccaggtggttgttaaggaaaacgacgaaacgaaaaatccagtttattttggtggtgggtctgctgcttcaatcaagcgtacacggactcgtacgcgcgctatgatgacagctatttcagataagattcggagtgtagatcakgtttttgtagtcggtcacaaaaatttagacatggatgctttgggctctgctgtaggtatgcagttgttcgccagcaatgtgattgaaaatagctatgctctttatgatgaagaacaaatgtctccagatattgaacgagctgtttcattcatagaaaaagaaggagttacgaagttgttgtctgttaaggatgcaatggggatggtgaccaatcgttctttgttgattcttgtagaccattcaaagacagccttaacattatcaaaagaattttatgatttatttacccaaaccattgttattgaccaccatagaagggatcaggattttccagataatgcrgtyattacttatatcgaaagtggtgcaagtagtgccagtgagttggtaacggaattgattcagttccagaattctaagaaaaatcgtttgagtcgtatgcaagcaagtgtyttgatggctggtatgatgttggatactaaaaatttcacctcgcgagtaactagtcggacatttgatgttgctagctatctcagaacgcgcggaagtgatagtattgctatccaggaaatygctgcgacagattttgaagaatatcgtgaggtyaatgaacttattttacaggggygtaaattaggttcagatgtactaatagcagaggctaaggacaygaaatgctatgatacagttgttattagtaaggcagcagatgccatgttagccatgtcaggtattgaagcgagttttgttcttgcgaagaatayacaaggatttatctctatctcagctcgaagtcgtagtaaactgaatgtacaacggattatggaagagttaggcggtggaggccactttaatttggcagcagctcaaattaaagatgtaaccttgtcagaagcaggtgaaaaactgacagaaattgtattaaatgaaatraaggaaaaggagaaagaagaaykaactaat

SEQ ID NO: 665 - DNA, 1031 bp, Streptococcus pneumoniae
  misc_feature (1)..(1031): tiling:Spneumo1:WAN024G7J; Cluster includes WAN02443G spr0 934|ABC-SBP|15902978|NP_358528.1|920239..921264|+|1026 bp| ABC transporter substrate-binding protein - iron transport |S.pneumoniae|R6|NC_003098.1|ORF|111
atgaaaaacaaattttttctaatagctattttagctatgtgtatagtttttagcgcttgttcttctaattctgttaaaaatgaagaaaatacttctaaagagcawgcgcytgataaaatagttttagatcatgctttcggtcaaactatattagataaaaaacctgaaagagttgcaactattgcttggggaaatcatgatgtagcattagctttaggaatagttcctstwskahtttcaaaagcaaattacggtgtaagtgctgataaaggagttttaccatggacagaagaaaaaatcaaagaactaaatggtaaagctaacctatttgacgatttggatggacttaactttgaagcaatatcaaattctaaaccagatgttatcttagcaggttattctggtataactaaagaagattatgacactctatcaaaaattgctcctgtagcagcatacaaatctaaaccttggcaaactttatggagagatatgattaaaattgattcaaaagccttaggtatggaaaaagaaggtgatgagttaatcaaaaatactgaagctcgtatatccaaagaattagaaaaacatccagaaatcaaaggaaaaatcaaaggaaaaaaagtattatttactatgattaatgctgcagatacatcaaaattctggatttatactagcaaagatccaagagcaaattatttaacagatttaggtctagttttccctgaatcattaaaagaatttgagagtgaagatagttttgcaaaggaaatttctgcagaagaagcaaataagataaatgatgctgatgtaatcataacttatggtgatgataaaactcttgaagctttacaaaaagatcctcttttaggtaaaataaatgcaattaaaaatggtgccgttgctgtaattccagataatacaccgttagcagcctcatgcactccaacaccactttcaataaactatactattgaagaatacctaaatmttttaggaaatgcatgcaaaaatgcgaaataactaat

SEQ ID NO: 666 - DNA, 126 bp, Streptococcus pneumoniae
  misc_feature (1)..(126): tiling:Spneumo1:WAN024ATU; Cluster includes WAN02438Q spr2 043|comC|15904084|NP_359634.1|2035337..2035462|-|126 bp|Co mpetence stimulating peptide precursor (CSP)|S.pneumoniae| R6|NC_003098.1|ORF|100
atgaaaaacacagttaaattggaacagtttgtagctttgaaggaaaaagacttacaaaagattaaaggtggggagatgaggytgtcaaaattcttccgtgattttattttacaaagaaaaaagtaa

SEQ ID NO: 667 - DNA, 131 bp, Streptococcus pneumoniae
  misc_feature (1)..(131): tiling:Spneumo1:WAN024ATT; Cluster includes WAN0241MK SP22 37||15902040|NP_346644.1|2157755..2157880|-|126 bp|compete nce stimulating peptide 2|S.pneumoniae|TIGR4|NC_003028.1|O RF|021
atgaaaaacacagttaaattggaacagtttgtagctttgaaggaaaaagacttacaaaakattaaaggtggggagatgaggatttcaagaatcatccttgattttcttttcctacgaaaaaagtaactaat

SEQ ID NO: 668 - DNA, 151 bp, Streptococcus pneumoniae
  misc_feature (1)..(151): tiling:Spneumo1:WAN024FU7; Cluster includes WAN0240NR |com C||CAB39526.1|||141 bp||S.pneumoniae||AJ240792|ORF|000
atgaaaaacacagttaaattggaacagtttgtagctttgaaggaaaaagacttgcaaaatattcaaggtggggagatgaggaaaatgaatgaaaagtcctttaatatctttaatttctttaatttctttagawkwmkwtaraagaagataa

SEQ ID NO: 669 - DNA, 1301 bp, Streptococcus pneumoniae
  misc_feature (1)..(1301): tiling:Spneumo1:WAN024ERK; Cluster includes WAN0243EI spr1 834|ptcC|15903876|NP_359426.1|1808876..1810171|+|1296 bp|P hosphotransferase system system, cellobiose-specific IIC c omponent|S.pneumoniae|R6|NC_003098.1|ORF|111
atgaaaaactcaaaatttatagaycaatttgccacctttgctggtaaactagggaaccaaattcatttaaaaacyctaagagatgcattcgtaacagtaatgccattatatattttggcaggtttaatcgttcttttgaacaacacggtatttaagtggattttccaaggggatacattaacaagattccaatattggggaataacaattgcaaacggtactttaagtatttcaggtatgattattgctgtaatggttggttatttcttagctaaaaacagagatttcgaaaacccgttagcagcatcaatgctatcattagtttctttaattgtgatgatgccaaatacagtttctgtagttcctgacggagcaaaagatgckgtaaacatttcaggtgttctttcattcaacaacacaggtacaggcgcaatgttcgccggggttatcgtagcgattattgcaacagaattattcattgaattatcaaaygttaaagctttacaaatgaaccttggtgaaaatattccaccagctgttagtagatcatttagcgtattacttccagtcatgaccgtcatctccttatttggggttgtttcagcattattattcaatataactggaatgaacttaatctcaatcattacaatctttattcaagaaccaaytcgtcatattggtacaagcttaatcggggtcattattatttactctttaggraawwwkktatggsywwttkgtattcaccaagcagttatttacagtgccatcctagaaccattactattaattaacattactgaaaacatcactgcagcaaataatggacaagccattccacacatcatcaacytatcacaaatacaaacattcgctttaatgggtggtagtggatctacattatgtttattaatagcaacattcttagtragtcgcaatgctgtytctaaaaacgtggctaaattatcttttggacctggtatcttcaatatcaatgaaccagtattattcggttacccaatcgtttataacatttcattagctattccatttatcacagttccagtmcttggtattttaatcagctacttagcaacagttacagrattcatgagtcctgcatttatacaagttccttggactacaccagtattcttaaatgcatggttagcaacagcaggggacgtgagagcagttctagttcaattcatcatctttgcacttggagttcttctatacattccatttatcaaagttaatgacaaagttgttgarcaagaaatggaaggttaactaat

SEQ ID NO: 670 - DNA, 1482 bp, Streptococcus pneumoniae
  misc_feature (1)..(1482): tiling:Spneumo1:WAN024BFW; Cluster includes WAN0244R3 spr0 083|ABC-SBP|15902127|NP_357677.1|89862..91406|+|1545 bp|AB C transporter solute binding protein - sugar transport|S.p neumoniae|R6|NC_003098.1|ORF|221
atgaaaaactggaaaaaatatgcttytgcatctgctagtgtagtcgctytggctgcaggtcttgctgcttgtggaaatttgacaggtaacagcaaaaaagctgctgattcaggtgacaaacctgttatmaaaatgtaccaaatcggtgacaaaccagayaacttggatgaattgttagcaaatgccaacaaaatcatygaagaaaaagttggtgccaaattggatatccaataccttggctggggtgactatggtaagaaaatgtcagttatcacatcatctggtgaaaactatgatattgcctttgcagataactatattgtaaatgctcaaaaaggtgcttacgctgactwgacwgaattgtacaaaaaagaaggtaaagacctttacaaagcacttgacccagcttacatcaagggtaatactgtaaatggtaagatttacgctgttccagttgcagccaacgttgcatcatctcaaaactttgccttcaacggaactctccttgctaaatatggtatcgatatttcaggtgttacttcttacgaaactcttgagccagtcttgaaacaaatcaaagaaaaagctccagacgtagtaccatttgctattggtaaagttttcatcccatctgataaytttgactacccagtagcaaacggtcttccattcgttatcgaccttgaaggcgatactactaaagttgtaaaccgttacgaagtgcctcgtttcaaagaacacttgaagactcttcacaaattctatgaagctggctacattccaaaagacgtcgcaacaagcgatacttcctttgaccttcaacaagatacttggttcgttcgtgaagaaacagtaggaccagctgactacggtaacagcttgctttcacgtgttgccaacaaagatatccaaatcaaaccaattactaacttcatcaagaaaaaccaaacaacacaagttgctaactttgtcatctcaaacaactctaagaacaaagaaaaatcaatggaaatcttgaacctcttgaatacgaayccagaactcttgaacggtcttgtttacggtccagaaggcaagaactgggaaaaaattgaaggtaaagaaaaccgtgttcgcgttcttgatggctacaaaggaaacactcacatgggtggatggamcactggtaacaactggatcctttacatcaacgaaaacgttacagaccaacaaatcgaaaattctaagaaagaattggcagaagctaaagaatctccagcgcttggatttatcttcaatactgacaatgtgaaatctgaaatctcagctattgctaacacaatgcaacaatttgatacagctatcaacactggtactgtagacccagataaagcgattccagaattgatggaaaaattgaaatctgaaggtgcctacgaaaaagtattgaacgaaatgcaaaaacaatacgatgaattcttgaaaaacaaaaaactaactaat

SEQ ID NO: 671 - DNA, 665 bp, Streptococcus pneumoniae
  misc_feature (1)..(665): tiling:Spneumo1:WAN024D4H; Cluster includes WAN0243JQ spr1 646||15903688|NP_359238.1|1618182..1618841|-|660 bp|Hypoth etical protein|S.pneumoniae|R6|NC_003098.1|ORF|111
atgaaaaacttaacaaaaattaagttcaaagagaatggggaatttaatcatttccctgggaatacagttgtagcaaatctttatactaaacaagatttgatggaagttgttgatattattcaatcacgttatagagaattaccatttatcgataagtttactttaactccaaggaattctattcacatgactgtaattgaattgttgtgccatgaaaatcgtgaaacggagttttggagcagtaatcttcctctagatacacctttacaggaaatacatgattactttgctaaacaacttgaaatttttccattgttggatgaagaaattcatatgcgtataactgaaatgggaaaacaaaacatactagttgaacctgcagatgaagcttctgcaaagagattagaagaaattcgtacttatgtctcagaaaaagcaggtgtttgtttccctaatcatgatagatatcaattccatatttcaattgggtatcttcggattcctctaaccgaagaggaggaagaagagtttactaaagtcagagcagaattaactgaaattttattagagaagattccaactattactgtaaaccgtattgactatactgtatttgaagatatgagacaatttgttccatatcacgaaaaatttaaataactaat

SEQ ID NO: 672 - DNA, 680 bp, Streptococcus pneumoniae
  misc_feature (1)..(680): tiling:Spneumo1:WAN024D3F; Cluster includes WAN0243HE spr1 730||15903772|NP_359322.1|1707692..1708366|-|675 bp|Hypoth etical protein|S.pneumoniae|R6|NC_003098.1|ORF|111
atgaaaaagaaagcatttggtattgttttattggttttagcagcttggatcttgctgcaagggaattttggaattccttctttggatggtaaaatatggcctttactaggtattgttttttttgcttataagtccattgagtccatccttagacgtcatctcacttcggcagtttttacaggtttactggcgmtcatcattgcaaattacgcttatgacttgttaccagttaccaatcattctcttatttgggctagcatcttggtggtacttggtgttggttatctgacgcattcaagtaagttctggaatgaaaaaaaatggtggtacaatgggaaaaaaacagtcgtcacggataaggaagtcgcttttggtagcgggaccttctataagcaagatcaagatctcgtagatgaccaagtggaagtcgcttttggggatgctaaaatctactatgataatgcagagatgctaggtgattttgcaactttaaatattgaagtrgccttcggraatgcaaccgtctatgttccacaacactggcgtgtagatttgaaagtagaaacctcctttggtgcagctaaggctgacgctcctgtagccccaaccagcaaaaccttgaytatccrtggagatgtggcttttgggaagttggaaattgtctacgytaaataactaat

SEQ ID NO: 673 - DNA, 1022 bp, Streptococcus pneumoniae
  misc_feature (1)..(1022): tiling:Spneumo1:WAN024B7X; Cluster includes WAN0244N7 spr0 223|ABC-SBP-truncation|15902267|NP_357817.1|216000..216368 |-|369 bp|ABC transporter solute-binding protein - iron tr ansport, truncation|S.pneumoniae|R6|NC_003098.1|ORF|120
atgaaaaagaaatggatgtattatgctgcttgttcttctaatgaatctgccgatgacagttcatctgataaaggagacggcggttcgctagtcgtttattcaccaaactcagagggcttaattggagcaactattcctgcctttgaagaaaaatatggtatcaaagtagaactgattcaagctggtactggagaacttttcaaaaaactagagtcagaaaaagaagttcctgtagctgatgttatctttggtggttcttatacacaatatactacccacggagaactctttgaaaactatacttcaaaagaaaatgataatgttatcaaagaatatcaaaacacaactggctactctactccttatacactagatggtagtgttttaatcgtcaaccctgatttaactaaaggcatgaacatcgaaggatataacgatcttttcaaacctgaactaaaaggaaaaatcgcaactgctgacccagcaaactcttctagcgcctttgctcaattaacaaatatgctacaagctcaaggtggttacaaagatgataaggcttggtcttatgtaaaagatcttttcacacttattgatggtaaaatcggttyaagttcatctrgtgtctataaagyagtcgctgatggagaaatgrctgttggtctctcttatgargatycagcarttaaactcttaaatgacggagctaacattaargtagtctatccaaaagaaggaaccgtcttcctacctgctagtgctgctatcgttaaaaaakctaaaaatatggaaaatgccaagaaatttatcgattttattatctctcaagaagtacaagatacacttggtacaaccactactaaccgtcctgttcgtaaaaatgctaaaacaagcgaaaacatgaaaccaattgacaaaatcaaaacactcactgaagattatgattatgtcatcaagaataaatcagatatcgttaagaaatacaacgaagtctttacagatatccaatctaaacagtaactaat

SEQ ID NO: 674 - DNA, 984 bp, Streptococcus pneumoniae
  misc_feature (1)..(984): tiling:Spneumo1:WAN024F7U; Cluster includes WAN0244N6 spr0 224|ABC-SBP-truncation|15902268|NP_357818.1|216513..216707 |-|195 bp|BC transporter substrate-binding protein - iron transport, truncat...|S.pneumoniae|R6|NC_003098.1|ORF|101
atgaaaaagaaatggatgtattatgctgcttgttcttctaatgaatctgccgatgacagttcatctgataaaggagacggtggttcgctagtcgtttattcaccaaactcagaaggcttaattggagcaactattcctgcctttgaagaaaaatatggtatcaaaatagaactgattcaagctggtactggagaacttttcaaaaaactagagtcagaaaaagaagttcctgtagctgatgttatctttggtggttcttatacacaatatgctacccacggagaactctttgaaaactatatttcaaaagaaaatgataatgttatcaaagaatatcaaaacacaactggcttctctactccttatacactagatggtartgttttaatcgtccaccctgatttaactaaaggcatgaacatcgaaggatatagcgaccttctcaaacctgaactaaaaggaaaaatcgcaactgctgacccagcaaactcttctagcgcctttgctcaattaacaaatatgctacaagctcaaggtggttacaaagatgataaggcttggtcttatgtaaaagatcttttcacacttattgatggtatagtaaaatgaaataagaacaggacaaattaatcaggacagtcaaatcgatttctaacaatgttttagaagtagatgtgtactattctagtttcaatatactataaaatcggttcaagttcatctggtgtctataaagcagtcgctgatggagaaatgactgttggtctctcttatgaagatccagcagttaaactcttaaatgacggagctaacattaaggtagtctatccaaaagaaggaaccgtcttcctaccttctagtgctgctatcgttaaaaaatctaaaaatatggaaaatgccaagaaatttatcgattttattatctctcaagaagtacaagatacacttggtacaaccactactaaccgtcctgttcgtaaaaat

SEQ ID NO: 675 - DNA, 1889 bp, Streptococcus pneumoniae
  misc_feature (1)..(1889): tiling:Spneumo1:WAN024G9D; Cluster includes WAN02446B spr0 831|lytD|15902875|NP_358425.1|830981..832864|+|1884 bp|Tei choic acid phosphorylcholine esterase/choline binding prot ein E (cbpE)|S.pneumoniae|R6|NC_003098.1|ORF|441
atgaaaaagaaattaactagtttagcacttgtaggcgcttttttaggtttgtcatggtatgggaatgttcaggctcaagaaagttcaggaaataaaatccactttatcaatgttcaagaaggtggcagtgatgcgattattcttgaaagcaatggacattttgccatggtggatacaggagaagattatgayttcccagayggwagtgattctcgytatccatggagagaaggaattgaaacgtcttataagcatgttctaacagaccgtgtctttcgtcgtttgaaggaattgrgtgtccaaaaacttgattttattttggtgacccatacccacagtgatcatattggaaatgttgatgaattactgtctacctatccagttgaccgagtctatcttaagaaatatagtgatagtcgtattactaattctgaacgtctatgggataatctgtatggctatgataaggttttacagactgctrcagaaamaggtgtttcagttattcaaaatatcacacaaggggatgctcattttcagtttggggacatggatattcagctctataattatgaaaatgaaactgattcatcgggtgaattaaagaaaatttgggatgacaattccaattccttgattagcgtggtgaaagtcaatggcaagaaaatttaccttgggggcgatttagataatgttcatggagcagaagacaagtatggtcctctcattggaaaagttgatttgatgaagtttaatcatcaccatgataccaacaaatcaaataccaaggatttcattaaaaatttgagtccgagtttgattgttcaaacttcggatagtctaccttggaaaaatggtgttgatagtgagtatgttaattggctcaaagaacgaggaattgagagaatcaaygcagccagcaaagactatgatgcaacagtttttgatattcgamaagacggtttwgtmaayatttcaacwtcctacaagcckattccaagttttcaagctggttggcataagagtkcatatggraactggtggtatcaagcgcctgattctacaggagartatgytgtcggttggaatgaaatyrarggtgaatggtattactttaaccaaacgggtatcttrttacagaatcaatggaaaaaatggaacaatcrttggttctatttgacagactctggtgytkctgctaaaaattggaagaaaatygmtggaatctggtattattttaacaaagaaaaycagatggaaattggttggrttcaagataaagagcagtggtattatttggatgttgatggytctatgaagacaggwtggcttcaatatawggggcaatkgtattactttgctccatcaggggaaatgaaaaygggctgggtaaaagataaagaarcctggtactatatggattctactggtrtcatgaagacaggtgagatagaagttgctgrwcawcattaytatctrgragawtcaggagctatgaagcaaggctggcwtaaaaaggcaaatgattggtatttctacaagacagryggttcacgagctrtrggttggatyaargacaaggataaatggtacttcttgaaagaaaatggtcaattacttgtgaayggtaagacaccagaaggytatactgtggattcaagtggtgcctggttagtggatgttycgatcgagaaatctgctacaattaaaactacaagtcattcagaaataaaagaatccaaagaagtagtgaaaaaggatcttgaaaataaagaaacragtcaacatgaaagtgttacaaattyttcaactagtcaagatttgacatcctcaacttcacaaagctctgaaacgagtgtaaacaaatcggaatcagaacagtarctaat

SEQ ID NO: 676 - DNA, 671 bp, Streptococcus pneumoniae
  misc_feature (1)..(671): tiling:Spneumo1:WAN024DLD; Cluster includes WAN0244PF spr0 143||15902187|NP_357737.1|151597..152262|+|666 bp|Hypothet ical protein|S.pneumoniae|R6|NC_003098.1|ORF|111
atgaaaaagataatctcacaccgctactttattatagtttttctactagttattgctgaccagaagttcagtgttytagttttacgcagygaccttgttrctgggctatctgactttgcctattatctgtcggatatgatgttgaattttcttgtggttttatttgctcttattgctatgatttggtcggggaaatggcagaaaatcaatagtagaaagtttaaaggatcctatcttttctattccttcctagctctgcttgcttttgttgyttggaatttygtyaccttttttcttttcccacctactcgaaatgaaatttcttatcaayatgctgctcckacttttacaggrgctacrgcatttttgatgtattttttytatcctgtgattgcaggtcccatttttgaagasatratyyatcgkggattrgtgatgacwgytctggaaaaaggaaagaaatgggggctagatgtacttggytcygctrttttatttggggtctcgcacattagtaatcacggttgggtcttgacagactttgtcttctatatgggtggaggtcttatatttgcagtcttatwwagaatgacaaagtcaatttattggcctattggactgcayatagtctacaatggyattggtcagcttttgatgttactgtaactaat

SEQ ID NO: 677 - DNA, 1089 bp, Streptococcus pneumoniae
  misc_feature (1)..(1089): tiling:Spneumo1:WAN024AY9; Cluster includes WAN02406Q |cps 19fK||AAC44968.1|||1089 bp|UDP-N-acetylglucosamine-2-epime rase|S.pneumoniae||U09239|ORF|000
atgaaaaagataatgctagttttcggtacacgtccagaagcaataaaaatgtgttcattagtcaatgagttgagaaaacaggaagatatgaaaacagttgtttgtgtaactggtcaacacaaggagatggttagccctgttttagatttatttggagttcaaccagactatgatttagaaattatgaaggctaatcaaaacttgttctctataacaataagtattttagaaaaaataaaacctgtgttagaaaaagaacaaccagatattgttttggttcacggtgatactactacgacatatgcagcagctttagcggcattttatctaggaattaaagttggtcatgttgaagctggattacgaacttacaacctgcaaagtcctttcccagaagagttcaacagacaatcgacttctattattgcaaattatcattttgctcctacagaattagctaaagaaaatctaataaaagagggtagaaataatatctatgttactggaaatacagtgattgatgcacttacaactacagtacaaaaggattatacacaccccgatctagatttaaacgatggaaatcgcctcatcttattgactgctcatagacgcgaaaatctcggagaacctatgagacatatgtttagagctgttaaacgagttttaaatgaatatgacgatgttaaagtaatttatccaattcataaaaatccattggtacgggaaacagctacagaaatttttggagatacagaacgtattcagatcattgaacctttagatgttcttgattttcacaactttatgaatcatagttatatgattctaactgactcaggaggggtycaagaagaggcaccttcgttaggaaagcctgtattggtcatgcgagatacgacagaaagacctgaaggagtagctgctggaacgttgaaattggttgggactgatgaggagactatttatcaaaactttaagatgcttttagacgatcccgaagaatataaaaaaatgagtcragctagtaatccttatggaaatggtgatgctagtaaacagattgttcgaattttacgtggaatttga

SEQ ID NO: 678 - DNA, 881 bp, Streptococcus pneumoniae
  misc_feature (1)..(881): tiling:Spneumo1:WAN024DAC; Cluster includes WAN0243Z8 spr1 087|ispA|15903130|NP_358680.1|1082907..1083782|-|876 bp|Fa rnesyl diphosphate synthase|S.pneumoniae|R6|NC_003098.1|OR F|111
atgaaaaagcaagaaaaattagctcttgtcgagtcggctttggaagatttttatggagaccagcagtttgcctctagtttacgggagtctgttctctattctattcatgctggtggcaagcgtattcggccttttctcttgttagaagttctggaagccttgcaggttrccatcaaacctgctcacgcgcaggtagctactgccttrgagatgattcatacagggagcttgattcacgatgaccttcctgctatggatgatgacgattatcgaagagggcggttaaccaatcacaagaaattcggtgaagctatggccattttggctggagatgccttattcttagacycatatgccttgattgcgcaggcagatttgccaagtcagatyaaggtggacttgattgccaacttatcccttgcttcaggtagtctgggtatggtrgcagggcaagttttggatatggagggcgaacaccagcamttgtctytggaagaacttcagaytattcatgccaataagactgggaagttactagcctatcccttccaagcggcagctattatagctgaattgtcacctgaaatgcaggtgaagctgaaaactgtgggtgaattgattggacttgcttttcaagtyagagatgatgtactggatgtgacagctagttttgaggaaatcggyaagacacctcaaaaggatctgcaggcagaaaaatcaacctatcctgccytgttgggcttggaagagtccattgccttttgtaaccaaaccctggatcaagctaatgaaaaattrgaagaaattgcccagcagvttccctttgaaacagaatcgattgtaagtgtagtagaaagtttgagaatcaatggctaactaat

SEQ ID NO: 679 - DNA, 1172 bp, Streptococcus pneumoniae
  misc_feature (1)..(1172): tiling:Spneumo1:WAN024CDG; Cluster includes WAN0244QW spr0 090||15902134|NP_357684.1|96794..97960|-|1167 bp|Conserved hypothetical protein|S.pneumoniae|R6|NC_003098.1|ORF|312
atgaaaaagcaatcactcttttttgttccaggtattatcctgattggtgtttccttgcgaactccttttactgttttacccattattttgggaaayatttcgcaaggtctggaggtagaagttagttcgcttggtgtcttgaccagcctgcctctccttatgtttaccctcttttcaccattttctacccaactggctcagaaaatcggcttggagcatctcttcacctacagcctcttcttcttgaccatcggctcacttattcgactaatcaatctgcccctgctctatctaggaaccttgatggttggggcaagtgtcgcagtcatcaatgtcctgcttcctagtcttatccaagccaatcaaccaaagaaaattggttttctgaccaccttatatgtaacgtctatggggattgcaacggctctggcttcctatctagctgtgcccattacacaagccagttcttggaaaggacttatccttctcctcacgttactctgtctagcaacttttttggtctggctcccaaatcaccgctataatcatagactagctccacaaaccaaacaaaaaagtcaaataaaggtcatgcgtaataaacaggtttgggcaattattatcttttcaggttttcaatccttgatcttttacaccgtcatgacctggttacctaccatgtctatccatgcaggtctatccagtcacgaagctggcttgstgacttctatcttatctctgattagcattcctttttcaatgaccatcccaagcctgacaaccagtttatctactcgcaaccgtcagctcatgctcactctggtttcactagctggtgtgrtcggcatttccatgctctttttcccaatcaataatttcatttactggcttgccatccatctcctcatcggaaccgcaaccagygccctcttcccttatctcatggtcaacttttcactcaagacaagcgcccctgaaaagacagcccaattgtccggcctatctcaaacaggaggctatatcctagcagcctttgggccaaccctctttggttacagttttgacctgttccactcttgggtaccakctgtagctgccctcttgctcatcgmtatcctgatgactgtggccctctttacagtggacagagcggataagatcctttaactaat

SEQ ID NO: 680 - DNA, 615 bp, Streptococcus pneumoniae
  misc_feature (1)..(615): tiling:Spneumo1:WAN024FVR; Cluster includes WAN024103 |||A AF73819.1|||615 bp||S.pneumoniae||AF154044|ORF|000
atgaaaaagctaactgaaaaaatcacacaatttatcgaaaactttaaaaatgtccatgccaaagcccgaaagattggttttgcagggttcatgcgcctgctctggaaagatctctttgttggtcgtagccttttccagtggttgtatctcatcgccttgtcaagtgttcccttgatcttaaagttcacgcaaaatacaaaaagtcatgactggctgagcttgtttgcatcctggactgggattgtctgtctcatcttggtatcagaaggacgtgcaagcaattatctctttggggctattaattcggctatctatttgattttggccatgaatgccactttttatggtgaagttttgacagcgatttacttctttgtcatgcagccgattggtctctgtacttggttgtccaatcgtatcaatgaccaaggtaaaccagaagaatcccactttgaagctaagaaattatctgttcttgactggctcaagtacttaaccttgactgccatcatctggattggtatgggcttggcttaccaaagtatcaatagcgctcgtcctttccgtgatagtgttacctgttggtcagctcttgatgacacgtctcaaccgtga

SEQ ID NO: 681 - DNA, 983 bp, Streptococcus pneumoniae
  misc_feature (1)..(983): tiling:Spneumo1:WAN024GF7; Cluster includes WAN0244D6 spr0 584|glcK|15902628|NP_358178.1|600133..601110|+|978 bp|Gluc ose kinase|S.pneumoniae|R6|NC_003098.1|ORF|111
  misc_feature (624)..(624): n is a, c, g, or t
  misc_feature (705)..(705): n is a, c, g, or t
atgaaaaaggagaatatgatgagtcaaaagattattgggattgaccttggtggaacttctatcaaatttgcaatcttaacaacagcaggagaaatccaaggaaaatggtcaatcaagaccaacattttggatgagggaagtcatatcgttgatgatatgattgagtctattcaacatcgtttggacttgcttggattggcagcagcggacttccaaggcattggaatgggatcaccaggtgtggttgaccgtgacaaagggactgttatcggtgcctayaacttgaactggaaaamycttcaaccaatyaaasaraarattgaaaaakcyttgggyattccwttyttyatygataatgatgcyaaygtrgcvgctctyggtgarcgytggatgggkgctggwrataaycaaccrgaygttgtctttatracaytyggtacwggtgttggtggygrtatygtygcwgaagghaaattrcttcayggtgtkgctggtgcagcaggygarytkggycayatyactgttgaytttgaycarccaawykcatgtacytgyggtaaraaaggytgycttgagacagtygcttcwgcaacaggdattgtyaayttgactcgtcgytatgcngatgaataygaaggcsatgcagcyttgaaacgyytgattgayaayggagaagaagtaacygctaagacwgtbtttgabytngcaaaagaagragaygacctygcyttrwyygtttayygyaacttctcacgttacttrggwrtygcwtgtgcyaacattggttcaatcctaaacccatcaacaatcgtcatcggtggtggtgtgtcagctgcgggagaattccttctacaaggtgttcaaaaagtttacgatgaaaatagtttcccacaagtacgcacatctactaaattagctcttgcaactctaggaaatgacgctggagttatcggagcagcatcacttgtattgcaataactaat

SEQ ID NO: 682 - DNA, 690 bp, Streptococcus pneumoniae
  misc_feature (1)..(690): tiling:Spneumo1:WAN024AW4; Cluster includes WAN0244GA spr0 472|blpY|15902516|NP_358066.1|476191..476880|+|690 bp|BlpY protein|S.pneumoniae|R6|NC_003098.1|ORF|100
atgaaaaagtatcaacttctattcaaaataagtgcagtcttctcttacttatttttcgtatttggtctttctcagctgacgcttatcgtccaaaattattggcaattttcttcccagattggcaatttcgtctggattcaaaatatcttgagtttactatttagcggagtcatgatttggattctggttaagacaggccatggctatctctttcgcattccaagaaaaaaatggctttggtattctattttgacagtattagtggtagtgctccatatctcttttaacgttcagacagctaaacatgttcagtcaactgctgagggttggaacgtattgattggttatagtgggaccaactttgctgagctaggtatctatgtaaccctgtttttcctgactccactaatggaagagttgatttataggggattacttcaacacgccttctttaagcattcgcgatttggccttgatttgcttcttccttccattttgtttgctcttcctcattttttgagtctgcctagtctgttagatatcttcgtctttgcaacatttggaatcatctttgccggtttgacccgctataccaagagtatttatccatcctatgcggtgcatgtgatcaataatattgtagcgaccttcccgtttttgctcacttttctacatagggtcttggggtaa

SEQ ID NO: 683 - DNA, 1170 bp, Streptococcus pneumoniae
  misc_feature (1)..(1170): tiling:Spneumo1:WAN024AUL; Cluster includes WAN023PI7 pne3 4_8||||6530..7699|+|1170 bp|Type 17F capsule operon, Glimm er 2.02 orf prediction|S.pneumoniae||WAN01UCHZ|ORF|000
atgaaaaagtcagtttatatcattggttcaaaaggaattcctgctaagtatggaggatttgaaacttttgttgaaaaattaacagccttccaacaagataaggctatccaatattatgtggcttgtatrcgtgaaaaytctgcaaaatcagggaytactgaggatgtttttraacataatggtgctatctgttataaygtcgatrttcctaatattggtccagcgcgagctatagcgtatgatatcgctgcaattaacagagctattgaawttgcyaaagaaaataakgrtgaagatccaatcttctatattttagcttgtcgaatyggtccgttyatccatggaattaagaaaaraatycargcrataggtgggrctcttctrgttaatccrgatggycaygartggytrcgagmwaartggagykywcchgttcgymrhtaytggaaawwytcygaargwcttatggtcaaayatgcagmtyttttagtgtgtgatagtaagaatattgaaaaatatatccaagaagattatawacagtatcaacctaaracaacctatatcgcttatggrachgatacaacacgctcyayattaaagagtagtgayraaaaagtacgttcttggttcaaagagaagaatrtttctgaraacgagtattayctagttgtaggacgttttgtwccagaaaayaactatgarkctatgatwcgtggstttytrgcrtctaaytctaagaaggactttgtcttaatcacaaatgtagaacagaataaattttataatcagttgttggcaaaaactggttttgataaggacccacgagtaaaatttgtaggtacagtctatgagcaagagcttctkaartatattcgwgaaaaygcytttgcttacttccacggrcatgaagttggtggaacmaatccttcgytwytwgaagcwytrgcatcmacwaarytraayttaytrctmgatgttggytttaaccgmgaagttggggagcaaagtgcratytattggaaaaaagatgagctttcccaartaatygagaaagttgarcaatttgatgcaaaaatgattgatgagttagatagacaatcaaatcagagaattryggatthtttcacttgggaaaagattgtcacagactacgagaaaktatttaaarrw

SEQ ID NO: 684 - DNA, 1173 bp, Streptococcus pneumoniae
  misc_feature (1)..(1173): tiling:Spneumo1:WAN024AUK; Cluster includes WAN0240UP |wch F||AAK20712.1|||1173 bp|WchF|S.pneumoniae||AF316642|ORF|00 0
atgaaaaagtcagtttatatcattggttcaaaaggaattcctgctaagtatggaggatttgaaacttttgttgaaaaattaacagccttccaacaagataagrctatccaatattatgtrgcttgtatgcgtgaaaactctgcaaaatcagggactactgaggatgtttttgaacataatggtgctatctgttataacgtcgatgttcctaatattggtccagcgcgagcyatagyrtatgatatcgckgcaattaacagagctattraaattgccaaagaaaataaggatgaagmtccaatcttctatattytagcttgtcgaatcggtccgttcatccatggaattaagaaaaaaatccaggmgataggtgggactcttctagttaatccagatggtcacgagtggttacgagctaagtggagcgctccagttcgtcgttattggaaaatttccgaaggtcttatggtcaaacatgcagatcttttagtgtgtgatagtaagaatattgaaaaatatatccaagaagattatatacagtatcaacctaagacaacctatatcgcttatgggacagatacaacacgctccacattaaatagcagtgatgaaaaagtgcgtgcttggttcaaggagaaaaatgtttctgaaaacgagtattacctagttgtaggacgttttgttccagaaaataattatgagtctatgatacgtggtttcttggcgtctagctctaagaaggattttgtcctaatcacaaatgtagaacagaataaattttataatcagctattagcaagtactggatttgataaagatccacgagtgaaatttgttggaacagtctacgaccaagaacttctgaagtatattcgagaaaatgcttttgcttacttccacggacatgaagttggtggaacaaatccttcgttacttgaagcattagcatccacaaagttaaacttactactcgatgttggttttaaccgcgaagttggggagcaaagtgcgatctattggaaaaaagatgagctttcccaagtaatcgagaaagttgaacaatttgatgcaaaaatkattgatgagttagatagacaatcaaatcagagaattgkggattwtttcacttgggaaaagattgtcacagactacgagaaattatttaaaaaatga

SEQ ID NO: 685 - DNA, 807 bp, Streptococcus pneumoniae
  misc_feature (1)..(807): tiling:Spneumo1:WAN024C6I; Cluster includes WAN0240M6 |dpn A||AAA88581.2|||807 bp|DNA adenine methyltransferase|S.pne umoniae||M14339|ORF|000
atgaaaaataacgaatataagtatggaggtgttcttatgacaaaaccatactacaataaaaataagatgattcttgttcattcagatacgttcaagttcttatcaaaaatgaaaccagaaagtatggatatgatttttgctgatccaccttattttttaagtaatggtggaatatctaattctgggggacaagtwgtttctgttgataaaggagattgggataaaatttcttcattcgaagaaaaacatgagtttaatcgtaaatggattcgcctagcaaaagaagttctgaagcctaatgggacggtatggatttcaggtagtttgcacaacatatactcagttggaatggcattagaacaagaaggttttaaaattctgaataatattacttggcagaaaacaaaccctgcccccaatttatcttgtcgttattttacccattctactgaaaccattttatgggccagaaaaaatgataaaaaagctcgtcattactacaattatgatttaatgaaagaattgaatgatggaaaacaaatgaaagatgtctggaccggttctttaacaaagaaagttgaaaaatgggctgggaaacatccaactcaaaaaccagagtatttgttagaacgyattattttagcctctactaaagagggtgactatattctagacccatttgttggtagtggcactacgggtgttgttgcgaagcggttaggtagaagatttataggtatcgatgctgaaaaagaatatttaaaaattgcaaggaagaggttggaggcagaaaatgaaacaaactag

SEQ ID NO: 686 - DNA, 300 bp, Streptococcus pneumoniae
  misc_feature (1)..(300): tiling:Spneumo1:WAN024CSA; Cluster includes WAN0242F6 SP11 44||15901010|NP_345614.1|1071637..1071930|+|294 bp|conserv ed hypothetical protein|S.pneumoniae|TIGR4|NC_003028.1|ORF |010
atgaaaaataatgctattggtagtaactggaaagatgtaagagctgaattattcagcaaagaggaaattttggaaagtgatatgcgcgtggctatcatgagtgagcttatcgaggctagaaatgaaaagggtattagtcagaagaaactagaggagatgagcggtgttagtcagccagttatcgctagaatggaaacaggaaagacaagcccacaacttgatacagtattaaaagtgttggcaagtcttggtaagaccttagctgttgtaccattagagcatgagcaggttctarctaat

SEQ ID NO: 687 - DNA, 111 bp, Streptococcus pneumoniae
  misc_feature (1)..(111): tiling:Spneumo1:WAN024FDM; Cluster includes WAN0241YB SP17 88||15901617|NP_346221.1|1704733..1704837|-|105 bp|hypothe tical protein|S.pneumoniae|TIGR4|NC_003028.1|ORF|121
atgaaaaatagaataattgatgtttttgaagtagtaaatcgcmtccttgtaataactgttgaaaatcctgatttcgaagacttgagagttaatcatactcaaykaactaat

SEQ ID NO: 688 - DNA, 494 bp, Streptococcus pneumoniae
  misc_feature (1)..(494): tiling:Spneumo1:WAN024FRN; Cluster includes WAN0243TX spr1 278||15903321|NP_358871.1|1273808..1274296|-|489 bp|Hypoth etical protein|S.pneumoniae|R6|NC_003098.1|ORF|211
atgaaaaatagattttattattmtcaattactagacgaaagagaagaacaactgttcaataaagcgggctctgaaagtytctatatctgcatygctttgtcgctcctatcttatatcatttcagtattagcaccaagcctttttaattctaatatgctgctaatcgttatcatcatagggacattttactttttcaatcgtgcccgttatctgggagtgacctactatrgtcgttttcattttacgattttgggttgttttttcctaaccttggctattacggctcttttgatgttgcagaattatcaattcaacatagaaatttatcagcacaatcctttgaattttaaatacctgtctgcttgggtcattacttatrtcatttaccttccgtggrtctttattggcaatcttggtcttaagagctatggcgaatgggctcagaaaaaatttgaacaagatatggatgaattggagagtggagaatarctaat

SEQ ID NO: 689 - DNA, 789 bp, Streptococcus pneumoniae
  misc_feature (1)..(789): tiling:Spneumo1:WAN024FTX; Cluster includes WAN023P67 pne5 4_9||||5421..6209|+|789 bp|Type 25A capsule operon, Glimme r 2.02 orf prediction|S.pneumoniae||WAN01UCGY|ORF|000
atgaaaaatataaaaatattagtagcaacacataaaaaatataaaatacccagtgatacaagtttgtatctaccaattcatgtaggatgtgaaggaaagaaaaaaattggatttcaaggtgacaattcaggagaaaatatttctaatttaaatccttattattgtgaattgactggcttgttttgggcttggaaaaacttagattatgattatcttggattagtacactatcgtagatattttacttcaagacgtcaatcttatcgtgaagatctcaacatggatagtatcattttatctaaatcagaggttgaaaaaatgatgctggactatgatgttgttgttccacgtaaaagaaaatattatattgaaactctctattctcactatgcacatactcatgatcgaagtcatttagatgttactcgccaaatcattagtgagttaaatccggattatattgatacgtttgataaagtgatgaatcgtcgtagcggctatatgtttaacatgtttatcatgtcaaaagataatgtgaatgcatattgtgagtggttattcccaattattaatgagttatataaacggttggatattacaggctattcggcttttgatgcgagattgtttggacgtgtcagtgaacgcttatttaatgtttggttagctaagcaaaatttgcgcataaaagagacgccttttatttatatggagaaaatcaacttacttgaaaaagggaaatccttccttcaagcaaaattctttggtaaaaagtatggacagagtttt

SEQ ID NO: 690 - DNA, 789 bp, Streptococcus pneumoniae
  misc_feature (1)..(789): tiling:Spneumo1:WAN024FTW; Cluster includes WAN023OSR pne7 4_9||||6081..6869|+|789 bp|Type 35F2 capsule operon, Glimm er 2.02 orf prediction|S.pneumoniae||WAN01UCCV|ORF|000
atgaaaaatataaaaatattagtagcaacacataaaaaatataaaatgcccagtgattcaaatatgtatctaccaattcatgtaggatgtgaaggaaagaaaaatttaggatttcaaggtgacaattcagaagaaaatatttctaatttaaatccttattattgtgaattaactggcttgttttgggcttggaaaaacttagattgtgattatctgggtttagtacattatcgtcgttattttactaaaatgacaaaaaggtacaatgaatcaataaatatcgatgatgtaattttaaataggtttgaagttgagaaattgttagagaactcagatatcattgttcctaaaagaagaaaatattatattgaaactctttattctcattacgaccatacttttgatggttctcatttagatctagctagaaaaatgattgaaatgaagaatccagaatatctctctagttttgataaggtaatggaacaaagaagcgggtacatgtttaacatgttcattatgaaaaaagaactggcagaygattatttttcttggctgtttcctatcttggatagtatgtatgaaagtatggatttatcagggttaactgattttgaagctagattatttggaagagtaagtgagttgttatttaacgtatggttggtgaagagcaatttaactccaaaggaagtgccgtttatgtatatggaaaaagttaacttatttaaaaaagggatttcatttttgatggcgaaatttttcggaaagaaatatggacagagtttt

SEQ ID NO: 691 - DNA, 1007 bp, Streptococcus pneumoniae
  misc_feature (1)..(1007): tiling:Spneumo1:WAN024D4K; Cluster includes WAN0243JX spr1 639|ccpA|15903681|NP_359231.1|1611988..1612989|-|1002 bp|C atabolite control protein|S.pneumoniae|R6|NC_003098.1|ORF| 111
atgaaaaatataaatgggaaaaaggtaactatttatgatattgcacgtttatcaggtttttctccaaaaacagtttcacgagttattaatggtggagtaaatgttaaagaagaaacttatcaagcgattcaaaaagttatagaggaattgtcgtatattccaaatgcgtatgcaaaaaatttaactaaaaaagaagctataaatatattgatttctgtaaaaaaaatcgactcttttcctttaatttggtttcatacgctgttagataaagtgttacggacgtgtaaagaatttggtgttaatgctatagttgagtactttggagaggaggatacaattagtaattcaattatatcaagcacaggtagcctagtagatggtgttattgttttttatgaaagtgtagatgatatcagaattcagtatttaaagaagaaccatatgccttttcttgttttcggtgaatctcaaacgtctggagtagtctatgtatctaataataattttcaagctacttatgatatgatgaaagctgtaactgaagaaaaatttaaaaatatgtggttgcttatgggaggagaatcccatgttaataaggatcgtgaaaraggtgtgcgttcttttctgaatgataaaaattactttatggatttaaaagtcatttatggcttatctacaattgattcagtttattcttatgcaatgcagcacttgactacccaaaattatccggacattatttttgtttcaggmgatgaaaaggttcagggcttgattcgtgcgtgctatgagaaaggaattcttattccagatgatatttctatyattggatttgataatattcmtatttctcagtattatactscagctttgtctacaatkgctcccaattatgttaaattggctaaagaaatgatagaaggtgttttagcaattattaaaggggaaagtgtcacatctgttgaagtttctcctaaatttgttaggagacagagtttctarctaat

SEQ ID NO: 692 - DNA, 986 bp, Streptococcus pneumoniae
  misc_feature (1)..(986): tiling:Spneumo1:WAN024FG3; Cluster includes WAN0243MP spr1 538|axe1|15903581|NP_359131.1|1519416..1520396|-|981 bp|Xy lan esterase 1|S.pneumoniae|R6|NC_003098.1|ORF|111
atgaaaaatccagctttgctagaagaaattaagacctatagaggaagggatgaggttccggaagactttgatgmtttctgggatggggaagtgaaaaatgtttccacrcttccatcctaccacttggaggaaagagatttccacattyctcaagtcaagtgctatgagttaacatttgaaggaagcaaggaaggaaaggtctatgcacgcattgttcttccaaagagtgaggagaaggtyccaytaatmttccattttcatggttatatgggacgtggctgggactgggccgacatgctggkcttcaccgtagctggttacggtgttgtttccatggatgtgcggggccagtcaggttactcacaagacggcttgcgttctcctttaggaaataccgtgaaggggcatattatccgtggtgctrtggaaggtcgggaccacctcttttataaggatgtttatctggatatttaccagttggtcgaaattgttgctagtctgtctcaggttgatgagaagcgtctttctagctatggtgcctcacaaggaggggctctagcyctagttgcagcagcgctcaatcctcgaattcagaaaacagttgccatttatcccttcttgtcagacttcagacgggtgattgagattggtaatactagcgaggcttacgacgaacttttccgttatttcaagtttyacgaccccttscatgaaacagaggaggaaatcatggcgacccttgcctatatcgatgtcaaaaatcttgcccatcgtatccaaggtgaggttaagatgattacgggcttggacgacgatgtttgctatcccattacccagtttgcgatttataatcgtctgacctgcgataaaacctatcgyatcatgcctgagtatgctcacgaagccmtgaatgtatttgtyaatgaccaagtctacaactggctctgtggaagtgagattccttttaaatatctaaaataactaat

SEQ ID NO: 693 - DNA, 194 bp, Streptococcus pneumoniae
  misc_feature (1)..(194): tiling:Spneumo1:WAN024D2R; Cluster includes WAN0243GE spr1 766||15903808|NP_359358.1|1732263..1732451|+|189 bp|Hypoth etical protein|S.pneumoniae|R6|NC_003098.1|ORF|121
atgaaaaatgattttgtaatcggaaagagtttgaaagaattatctcttgaagaaatgcaattggtttatggtggcacagatggtgctgaccctagatcaacaattatatgttctgctacattaagttttattgcatcatatttggggtcagctcagactcgttgtggcaaagacaacaagaaaaaataactaat

SEQ ID NO: 694 - DNA, 642 bp, Streptococcus pneumoniae
  misc_feature (1)..(642): tiling:Spneumo1:WAN024CKP; Cluster includes WAN0242ZH SP03 50||15900279|NP_344883.1|323989..324624|+|636 bp|capsular polysaccharide biosynthesis protein Cps4E|S.pneumoniae|TIG R4|NC_003028.1|ORF|010
atgaaaaatggaaatagaatttatagttggaggttgtttatgtacrgtataataaaacgattaggtgatatattattatctttaatagggataataatattgtgtccggtttttatgataattgcaattgcgattaaacttgattcagaaggtccggttatatttaagcaaaaacgctttggtattcataaagaatacttctatattttgaaatttaggtctatgaaaatagatgcacctaaaaatgtggcgcctcgaaacttatataatccagagcaatrgattacaaaagtaggggctttcttgcgaaaaacatctttggatgaactaccacaattgtttaatattcttgttggtaatatgagtattgtaggtcctagaccagcgggtataaatgaactagatttgattgcagagagagataagtatggagcaaatgatatcttgccagggttaactggatgggcacaaattaacgggcgtgatactttgtctgttgagatgaagacggagttagatggctactatgttaaacatctgtctttgataatggatattagatgtatagttaagacaataccttacgtactgaaacgaaaaggtattgtagagggtagtggtaagaaagaaagtctaactaat

SEQ ID NO: 695 - DNA, 1149 bp, Streptococcus pneumoniae
  misc_feature (1)..(1149): tiling:Spneumo1:WAN024G5L; Cluster includes WAN02440S spr1 030|glgC|15903074|NP_358624.1|1012186..1013328|+|1143 bp|G lucose-1-phosphate adenylyltransferase|S.pneumoniae|R6|NC_ 003098.1|ORF|111
atgaaaaatraaatgttagctttgattcttgctggtgggcaaggaactcgtctcggtaaactcactcaaagcatcgcaaaaccagctgtgcaatttggtgggcgctaccgtatcattgactttgccctatcaaactgtgccaactcagggattcayaatgttggggtcgttacacagtatcaaccacttgctctcaacaaccatattgggaatggttcaagctggggactagacggtattaattcaggygtctctattcttcaaccttattctgcaagtgaaggaaatcgttggtttgagggractagtcacgctatttaccaaaatatcgactatatcgacartgtcaatcctgagtatgtcttgattttgtctggggaycacatctacaaaatggactatgatgatatgctccagtctcataaggataataatgccagcttgacagtagcagttttrgacgtccctcttaaagaagcaagccgttttggtatcatgaacacagatgctaacaatcgtattgttgaatttgaagaaaaaccagctcaacctaaatctacaaaagcttctatgggaatctacatttttgattggcaacgccttcgtaatatgttagtcgctgctgaaaagagcaaggttggcatgtcaractttggtaaawawstmattccaaattaccttgagtcaggtgaaagtgtttatgcttaygaatttagtggttattggaaagatgttggtactattgagtcactttgggaagcgaacatggagtatatttctccagaaaatgccttggatagtcgtaaccgtcaatggaagatttactcaagaaacttgatttcaccaccaaacttcctcggggcaaatgctcatgtggaagactcattagttgtagacggatgtttcgttgatggarctgttaaacattctatcctttcaasaggcgcgcaagttcgcgaaggagcggaagtccttgattcagttatcatgagtggagctatcattggtcaaggagctaagattaaacgtgccattattggtgaaggtgcgattatttctgacggtgtcgaaattgatggaacagatgaagtacaagttgtaggatataatgaagtagtgggggtagcaacagatgaagatykaactaat

SEQ ID NO: 696 - DNA, 510 bp, Streptococcus pneumoniae
  misc_feature (1)..(510): tiling:Spneumo1:WAN024D3E; Cluster includes WAN0243HC spr1 732||15903774|NP_359324.1|1708932..1709435|-|504 bp|Conser ved hypothetical protein|S.pneumoniae|R6|NC_003098.1|ORF|1 10
atgaaaaattatcaagaatggtatcgaaatatcagmtccagactaactagtygtccaattcttttattcctattacgcagtttcaatcgtttgatgacagtcgccatgcccctggtctatctgatcttgctagtcacyacttacctgcaactaggacttggtcagcaagttggggtttatgtgcttattcctgcatcaggttttgtggccttgtccctgtttcgtaagaaaatcaatcacccgagaccttatgaaacttggratatctgtccccttcttgataaggatagttcgggacggtcgatgcccagtcgccatgtcttttcggcaactatcatctccatggcctgtctgcatgctagtctacctattggcttagtatgcttgatcttttcagctttgctggggttggtgagggttttagggggtgttcattatcccaaggatgtcttggttggctatgcttgtggtttggtgtggggattccttttcttcctattcykaactaat

SEQ ID NO: 697 - DNA, 1185 bp, Streptococcus pneumoniae
  misc_feature (1)..(1185): tiling:Spneumo1:WAN024CWV; Cluster includes WAN02434A SP01 68||15900106|NP_344710.1|163632..164810|+|1179 bp|macrolid e efflux protein, putative|S.pneumoniae|TIGR4|NC_003028.1| ORF|010
atgaaaaatttgataaagttgctaataattagattgattgttaacttagcagacagtgtattttatatagtagcattgtggcacgttagcaataattattcttcgagcatgttcttaggaatatttattgcagtaaattatctaccggatttgttactaatcttttttggaccagttattgacagagtaaatccgcaaaaaattcttataatatcaattttggttcaattagcagtggctgtaatatttttattattattaaaccaaatatcattttgggtgataatgagtctagtgtttatttcagtaatggctagctccataagttacgtgatagaagatgtgttgattcctcaagtggtagaatatgataagattgtatttgcaaattctctttttagtatttcgtataaagtattagattctatttttaattcattcgcatcatttttacaggtggcagtaggatttattttattggttaagatagatataggcatatttttacttgctctatttatattgttgttgttaaaatttagaactagcaatgcgaatatagaaaacttctctttcaaatattacaagagagaagtgttgcaaggtacaaagtttattttaaataataaattattatttaaaaccagtatttctttaacgcttataaactttttttattcatttcagacagtagttgtaccgattttttctattcgatattttgatggtccgattttttatggtatttttttaactattgctggtttgggtggtatattgggaaatatgctagcgccaatcgtaataaaatatttaaaatcgaatcaaattgttggtgtatttctttttttgaacggctcaagttggttagtagcaattgttataaaagactatactttatcacttattttatttttcgtttgttttatgtctaaaggagtcttcaatattatttttaattcgttgtaccaacaaatacctccacatcaacttcttggtagggtaaatactaccattgattctattatttcttttggaatgccaattggtagtttagttgcaggaacgcttattgatttgaatattgaattagtgttaattgctattagcataccttattttttgttttcttatattttttatacggataatggattgaaagaatttagtatatatctarctaat

SEQ ID NO: 698 - DNA, 527 bp, Streptococcus pneumoniae
  misc_feature (1)..(527): tiling:Spneumo1:WAN024D9Q; Cluster includes WAN0243XB spr1 156|pyrR|15903199|NP_358749.1|1160309..1160830|-|522 bp|ra nscriptional attenuation of the pyrimidine operon / uracil phosphoribosyltra...|S.pneumoniae|R6|NC_003098.1|ORF|111
atgaaaacaaaagaagttgtagacgaattgaccgtcaaacgagcgattacgcgtattacttatgagattatcgaacgcaacaaagatttgaataagatygtcttggctggtattaaaactcgtggtgtctttattgcccaccgaatccaagaacgtttgaagcagttagaaaatctttcagttcctgttgtggaattggatactaaacctttccgtgatgatgttaaaagtggagaagatacttctttggtttctgtcgatgtgacagaccgcgaagttatcttggtggatgatgtgctctatacaggtcgtaccatccgtgctgctattgataatattgtcggtcatggtcgtcctgcgcgtgtgagtttagcagttctagtcgatcgtggacatagagaattgccaatccgtccagattacgttggaaaaaatatcccaaccagtcgttctgaagaaatcatcgtagagatgacagaacttgatgaccaagacagagttctgattactgaagaagcttarctaat

SEQ ID NO: 699 - DNA, 299 bp, Streptococcus pneumoniae
  misc_feature (1)..(299): tiling:Spneumo1:WAN024F3I; Cluster includes WAN0244G3 spr0 479||15902523|NP_358073.1|481311..481604|+|294 bp|Conserve d hypothetical protein|S.pneumoniae|R6|NC_003098.1|ORF|111
atgaaaacaagaaaaatccctttgcgcaagtctgttgtgtctaacgaagtgattgataagcgtgatttgctccgcattgtyaagaacaaggaaggacaagtmtttattgatcctacgggcaaggccaatggccgcggcgcttatatcaaactagacaatgcagaagccctagaggcgaaaaagaagaaggtctttaaccgcagctttagcatggaagtggaagaaagcttttatgacgagttgatcgcttatgtggatcacaaagtgaaaagaagagagttgggacttgaataactaat

SEQ ID NO: 700 - DNA, 1481 bp, Streptococcus pneumoniae
  misc_feature (1)..(1481): tiling:Spneumo1:WAN024FCZ; Cluster includes WAN0243JO spr1 648|galT|15903690|NP_359240.1|1620044..1621519|-|1476 bp|G alactose-1-phosphate uridylyltransferase|S.pneumoniae|R6|N C_003098.1|ORF|221
atgaaaacaattattgataattttgttgatagagtaattgaatacggaatgtataatgaaattgacaaaatatatgtgaaaaatagagtactagcgttaataggtgaggagggaaytgatcgcatttccgatgaaaatgacctgaaacaaataaaagattacttagtggaaatcgccttaaaaaacggtaaaattaaagatttaatcgaggaaaaggaatgtttaggagcagagttaatgaatttcatagttcctttacctagtcgattaaatgatattttttggagttcatatgatatatcacctcaagaagcagttgaagagttttataagttaagtaaagatagtgattatattaaaacttctgctattgctaagaatattgagtttcgagcatcaactaaatacggagagctagagattacgataaatttgtcaaaacccgaaaaagatccaaaaacaattgctgctgaaaaattagtaaaagcmactaattatcccaaatgtttactatgtatggaaaatgaaggatatcaggggcgaataaattatccagcacgttcgaatcatagaattattcgrttgaaacttggtgacgaagtatggggattccartattctccctactyatactttaatgagcatgcgatatttttraatagtcaacatgtaccaatggctattacctctaaaacatttgaacaattattggagattgttgatattttgccaggatattttgctggttcaaattctgatcttcctatctcaggaggctccattcttagtcataaccactaccagggagggaaacatattttcccaatggaaaaagcaaaatttgagagtgaatttygttttaaagactttgaggatgttaatgctggtattgtaaaatggccaatgtcagtaattaggttacaaagtgaaaataaaaatcgcttgttagatttagctactaaaattctaaataagtggagagaatattcagatttagaagtagacatcattgctatgactgaagatgtcccacaccatacggtgactcctattgctcgtaaagtggacgggagataygaattagatattgttctaagagataatcatactactgaacartacccagatggtgttttccatcctcatcaagatgtacaacatattaaaaaggaaaatatcgggttaatcgaagtgatgggacttgcgatattaccacctcgtttgaaaccagagttagaagaagttggaaaatatcttttaggagaggataaygcaattgcggattatcatttagaatgggccgaccaattgaaagaaaaatatcctcgcattaataaagaagaggttaatagcgtagttcaacacgaagcaggacaagtgtttgcgagagttctggaagatgcaggagtttataagaatacaccgtctgggcatgaagcgtttatgagatttgttaagtcggttggaattaattarctaat

SEQ ID NO: 701 - DNA, 677 bp, Streptococcus pneumoniae
  misc_feature (1)..(677): tiling:Spneumo1:WAN024FHZ; Cluster includes WAN0243OZ spr1 456|cmk|15903499|NP_359049.1|1438296..1438967|-|672 bp|Cyt idylate kinase|S.pneumoniae|R6|NC_003098.1|ORF|111
atgaaaacaattcaaattgctattgatggtcctgcttccagcggtaagagtacggtcgcaaagattattgctaaggattttggrttcacctaccttgatacaggagctatgtatcgtgcagcgacctatatggctcttaagaaccaattagkagttgaagaagtcgaagcccttctagccttgttggaccarcatccaatcagctttggacgttcagaaactggagaccagcttgtttttgtaggagatgtggatattacccatcctatccgtgaaaatgaagtgaccaatcatgtttctgctattgcagcaattcctsaagtgcgtgagaaactggtttctctccaacaagaaattgcccagcaaggcggrattgtcatggatggtcgcgatattggaactgttgtattgccacaagcagaattgaaaattttcctagtagcttctgttgatgagagagcagagcgtcgttacaaggaaaatattgccaagggaattgaaacagaccttgaaaccctaaaaaaggaaattgctgcgcgtgactayaaggatagtcatcgtgagacttctcctctcaaacaagcagaggatgctgtctaccttgatacaactggtttgaacattcaagaagtagttgaaaaaatcaaagcagaagctgaaaaaagaatgtaactaat

SEQ ID NO: 702 - DNA, 1267 bp, Streptococcus pneumoniae
  misc_feature (1)..(1267): tiling:Spneumo1:WAN024ET5; Cluster includes WAN0243FO spr1 792|lysA|15903834|NP_359384.1|1763512..1764762|-|1251 bp|D iaminopimelate decarboxylase|S.pneumoniae|R6|NC_003098.1|O RF|121
atgaaaacaccatttatcaatagagaagagttagaagcgattgttgccgagttcccgactccctttcacttgtatgatgagaaggggattcgtgagaaggcaagagcygtcaaccaagctttttcgtggaacaagggctttaaggaatattttgcagttaaggctactccaactccagctattttgaaaattctccaagaagaaggttgtggtgtggactgctctagttatgtagagcttttgatgagccataaactggactttctgggttctgagattatgttctcttccaacaacacgccagacaaggaatacgcctatgcacgtgaattgggtgcgaccattaacttggatgcctttgaagatattgaacatctggagagagtagcaggcattccagaaatcatctcttgtcgttataatcctggaggcgtttttgaactggggacagacattatggacaatcctggggaggctaagtttggcatgaccaaggaccagctctttgaagcctttgctatcttgaaggaaaaaggagccaagacttttgggmttcactccttcctagcgtccaataccgtgacccatctctattatccagagttggctcgtcagctctttgaactggctgttgaaatcaaggaaaagttgggcatttsgytagactttatcaatctttctggcggtattggtgttaattatcrtccagaccaggagccgaacgatatcgccttgattggtgagggagttcgtaaggtgtatgaagargttcttacgtcagcaggtcttggtcaggtcaagattttcacygaattgggtcgttttatgctggcacctcacggtgctctagtcacaagagtsactcataagaaggaaacctaccgtacctatctaggtgtrgatgcctcagcagtcaacctcatgcgtccagctatgtacggagcttaccatcatattagcaacgtgacccatccagatggaccagctgaagyggtagatgtggtyggttcactctgtgaaaacaatgataaatttgcagtyaatcgcgaactgcctcatacagaaatcggtgatttgctggtmattcatgatacaggtgcccacggattttcaatgggctaccagtataatgccaaattacgttctgcggaaatcctctataccgaagaaggtaaagcccgtcaaatccgccgtgcagagcgcccygaggactattttgcaaccttatatggcttygattttgaagaataatctrataatagattga

SEQ ID NO: 703 - DNA, 1676 bp, Streptococcus pneumoniae
  misc_feature (1)..(1676): tiling:Spneumo1:WAN024G26; Cluster includes WAN0243YM spr1 109|fhs|15903152|NP_358702.1|1109867..1111537|-|1671 bp|Fo rmate--tetrahydrofolate ligase|S.pneumoniae|R6|NC_003098.1 |ORF|221
atgaaaacagatattgaaatcgcacagagtattgagttgaagccaattgttgatgttgtagagaaacttggtatttcttaygacgatttggagttgtacggaaagtacaaggctaaactcagctttgataaaattcgkgcagttgagagcaatccagtcggtaaattgatcttggttactgccatcaacccaacacctgcaggtgaaggaaagtcgacgcttaccattggtcttgcggatgccttgaacaagattggcaaraaaaccatgattgctatccgcgaaccgtctcttggtccagtcatggggatcaagggtggtgctgctggtggtgggtatgcacaagttctgccaatggaagacatcaacctccactttactggagatatgcatgctattacaactgccaacaatgccctttctgccttgattgacaaccacttgcaccaagggaatgagctgggaattgatcaacgtcgtatcctctggaaacgcgttgtggacttgaacgaccgtrcgctccgccatgtgactgttggtcttggtggtcctctaaacggtattccacgtgaggayggttttgatattacagttgcttcagaaatcatggcaattctttgcttggcaacggacatcgaggacttgaaacgtcgtttggcgaatatcgttattggttatcgctatgaccgtacgcctgtttctgtaggtgatttgcaggttgagggtgccttggctttgattttgaaggatgctattaagccaaacttggttcagacaatttacggtacacctgcctttgtacacggtggtccatttgccaatatygctcatggctgtaactctgttttggcgacgacaacagcccttcacttggctgattacactgttactgaagctggttttggtgcggaccttggtgctgagaaattccttgatatcaagacaccaaacttgccaacatctccagatgcagttgttattgtcgcaacccttcgtgcccttaagatgaatggtggtgtggctaaagaygctctgactgaagaaaatgtagaggcagttcgtgcaggttttgctaacttgaaacgccacgttgaaaatatccgtaagttcggtattccagcagttgtagctattaacgaatttgtatctgatacagaagctgaaattgcagycttaaaagaactctgtgcctyaatcgatgtaccagttgaattggctagtgtctgggctgatggagyagaaggtggagtagmacttgccgaaacagttgttaagacaattgctgaaaatccagctaactataaacgtttgtaygataatgacctttctgtccaagaaaagattgaaaaaattgtcactgaaatctatcgtggtagcaaagtgaactttgagaagaaakctcaaacacaaattgctcaartcgttcaaaacggttgggacaaattgccaatctgtatggctaaaactcaatacagtttctcagayaatccaaatgcgcttggagcaccagaaaactttgaaattaccattcgtgaattggtaccaaaattaggtgcaggcttcatcgttgccttaactggtgatgttatgaccatgccaggtcttccaaaacgtccagcagctctcaacatggatgttgaaagcgatggaactgtactaggcttgttctarctaat

SEQ ID NO: 704 - DNA, 971 bp, Streptococcus pneumoniae
  misc_feature (1)..(971): tiling:Spneumo1:WAN024FBN; Cluster includes WAN0243IL spr1 687|fatB|15903729|NP_359279.1|1658788..1659753|+|966 bp|AB C transporter substrate-binding protein - ferric iron tran sport|S.pneumoniae|R6|NC_003098.1|ORF|111
atgaaaacatcycttaaactttatttcactgccctagtggccagcttcttgctcctacttggtgcatgtagtacaaactcaagcactagtcagacagagaccagtagctctgctccaacagagrtaaccattaaaagttcactggmcgaggtcaaactttccaaagttcctgaaaagattgtgacctttgacctcggcgctgcggatactattcgcgctttaggatttgaaaaaaatatcgtcggaatgcctacaaaaactgttccgacttatctaaaagacctagtgggaactgtcaaaaatgttggttytatgaaagaacctgatttagaagctatcgccgcccttgagcctgatttgattatcgcttcrccacgtacacaaaaattcgtagacaaattcaaagaaatcgccccaaccgttctcttccaagcaagcaaggaygactactggacttctaccaaggctaatatcgaatccttagcaagtgccttcggcgaaactrgtacacaraaagccaaggaagaattgrccaagctagacaagagcatccaagaagtcgctactaaaaatgaaagctctgacaaaaargcccttgcgatcctccttaatgaaggaaaaatggcagcctttggtgccaaatctcgtttctctttcttgtaccaaaccttgaaattcaaaccaactgatacaamatttgaagactcacgccacggacaagaagtcagctttgaaagtgtcaaagaaatcaaccctgacatcctctttgtcatcaaccgtacccttgccatcggtggggacaactctagcaacracggtgtcctagaaaatgcccttatcgctgaaacacctgctgctaaaaatggtaagattatccaactaacaccagacctctggtatctaagcggaggcggacttgaatcaacaaaactcatgattgaagacatacaaaaagctttgaaataactaat

SEQ ID NO: 705 - DNA, 1088 bp, Streptococcus pneumoniae
  misc_feature (1)..(1088): tiling:Spneumo1:WAN024D89; Cluster includes WAN0243SB spr1 336|DEAD/H|15903379|NP_358929.1|1322922..1324004|+|1083 bp |DEAD RNA helicase|S.pneumoniae|R6|NC_003098.1|ORF|111
atgaaaaccaaactaccgactgaatggcaagaactgagtgaccaactcggtttccaagaattcacccccattcaaactcaactatttgakcyccttcttrctggagaaaacctcctaggagtgagccaaaccggaactggtaagaccctagcgtatctcctaccaagtcttctcagactacaaaagaaaaaagcccaacaactcttgattctagcaccaaayacggaacttgctggacagatttttgatgtatgtaaaacgtgggcagaagctatcggattgactgctcaactcttcctttcaggttcaagtcagaaacgacaaattgaacgycttaaaaaggggccagaaattctgattggaactcctggccgtatctttgaactcattaaacttaaaaaaatcaagatgatgaatgtggaaaccatcatcctggatgaatttgaccaattactagatgattctcagattcactttgtagaraaaatcactcactacgcacctcgtgaccaccaactggtctacatgagtgccacgaccaagtttgaycaagaaaagattgtgccgaatacacgcactattgatctctctratcaaaaattggacaatatccagcatttctacatgcaggtagaccaacgtcatcgagtggatatrctacgaaaactggctcatgtagaggatttccgtggtctagtcttcttcaatagcctgtcagaccttgggaatgccgaggaaaaactacagtatcgtgatatattggctgtttccctcgctagtgatgttaatgttaaatttagaaaartcatcttagaaaagtttaaagataaccaactaaccctgcttcttgcaactgaccttttggctcgtggaattgatatcgatagcctagaatgtgtcgtaaactttgatattcctagagatagcgaaacctacacacaccgtgctggccgtactggycgtatgggcaaggaaggwtatgttatyactctcgtcactcatccagaagaaatcaaaaaacttaaaaagtttgcaagtatccgagaaattgtcctaaaaaaccaagaactctatatcaaataactaat

SEQ ID NO: 706 - DNA, 233 bp, Streptococcus pneumoniae
  misc_feature (1)..(233): tiling:Spneumo1:WAN024BEF; Cluster includes WAN023M30 3142 75_718||||375614..375841|-|228 bp|EGAD orf prediction|S.pn eumoniae|R6|NC_003098.1|ORF|110
atgaaaaccatttgcgacctcaggacggttcaaggtaaggattgccaagtcctcttcaagytgataaataatgtgttccatcagggctcctttttattttataagcagtttatactcttcgaaaatctcttyaaaccgcgtcagcttccatctgcaacctcaaaacagtattttgagctgacttcgtctagcttcttagtttgctctttrattttyattgagtgttaactaat

SEQ ID NO: 707 - DNA, 467 bp, Streptococcus pneumoniae
  misc_feature (1)..(467): tiling:Spneumo1:WAN024D4B; Cluster includes WAN0243J8 spr1 664|dpnD|15903706|NP_359256.1|1637214..1637675|-|462 bp|Re striction system of S. pneumoniae|S.pneumoniae|R6|NC_00309 8.1|ORF|110
atgaaaacgaaacaacttgttgcatcagaagaggtgtatgatttcttaaaagtcatctggcctgattatgaaactgaaagccgttacgataacctaagtttaatcgtctgtaccttatcagatcccgattgtgtgagatggttatctgaaaatatgaaatttggtgacgaaaaacaactagctttgatgaaggaaaaatatgggtgggaagtaggagataaattgccagagtggctacatagctcctatcatagattattgttaataggtgaattattggaaagcaatctaaaactgaaaaagtatacagtagaaattacagaaactttatcacgtttagtaagtatagaggctgaaaatccagatgaagccgaacgacttgtaagagaaaagtataagagttgtgaaattgttcttgatgcagatgattttcaggactatgacactagcatatatgaatarctaat

SEQ ID NO: 708 - DNA, 2457 bp, Streptococcus pneumoniae
  misc_feature (1)..(2457): tiling:Spneumo1:WAN024GCA; Cluster includes WAN02449N spr0 711|dinG|15902755|NP_358305.1|710880..713330|+|2451 bp|ATP -dependent DNA helicase|S.pneumoniae|R6|NC_003098.1|ORF|11 1
atgaaaacgattggtaatcgctatgttgtggtggatttagaggcaactagcacaggtagtaaggctaaaattatccaagtgggaattgtcgtgattgaggayggagaaatcgtcgatcactatacgacggatgtcaatccacatgaacccttggatgctcatatcaaagaactgacaggattgacagaccaacgtctggcgcaagcacctgatttttcgcaagttgccagaaaaatmtttgacttggtggaggatgggatttttgtagcccataatgttcagtttgatgctaatctcttggcggaaaatttattttttgaaggytatgagctaagaaaccctcgtgttgatacggtcgaattggcccaggtctttttccctgaactggaaaaatatagcttgccgattttgtgtcgagaattaggaattcctcttaaacacgcacacacagccctttcagatgcccaagctacagcagaattacttctttttttacggraaaagatgrcccagcttcctaaaggtctcttggaacgcttgctggaaatggctgacgctctcctatatgagtcytacctggttattgaggaaacttatcgcaaccaatctatcctgagttctccagacttggtccaagttcaaggtctrtattttaagaaaacggmagcttctctggagcyacgaaaactatctcaagacttttctaaaaatatttctctgttgaaccttgaagtgagggaggaacaaswaakttttgctaaagaggttggcttgctattgaaagatgaacctktctctctgattcaagcgccgacagggattgggaaaacctatggctatctcttacccgctttatctcaatccaaagagcgacaaattgttcttagtgttccgacaaagattcttcaaaatcaaatcatggaagaagaaggtaaacgyctcaaggaagtgttccatacagatattcatagcttaaagggaccacaaaattatctgaagttggatgccttttatcattccttgcaggaaaatgatgaaaatcgcttatttagacgctttaaaatgcaagtcttggtctggcttactgagacagagacaggagatttggatgaaatcgggcaactctaccgttaccaacattttctagcagaccttcgtcatratgggaatttatcatcccakagcttatttgtgacggaagatttttggaaacgtagtcaagaaagggcagagacttgcaagcttttagtgactaatcatgcctatctcgtraccagacttgaagataatcctgaatttgtcagtgaccgtttactgattattgatgaagtccaaaagattttgttagctctagaaaatctgcttcaagagacctacgatatacaatctattatcgatttaattgataaggctttagtaggagaagaaaacagggttcaacaacggatactagaaagtattcgctttgagtgyctctacttgatagaacaatttcagtctggyaaatctaggaaaaatatcttagattctctggayaatctccatcagtatttttcagaattrgaagtrgaagrctttgatgagctggttcgctattttacagctgaaggtgattactggcttgaagtaactgaaacgagtcaaaagaaaattcagatttcttctacaaaatcaggccgtactcttctgtcctctttacttcctgagagttgccaagtcytgggagtatcrgctactcttgagattagtcagagggtttctttggcagaccttttaggctatcctgaagcyaaatttgtcaagattgaatctcggggaaaacaggaacaagaagtggtyatggtcaaagatttccctctggtaacagaaacctccttagaagtctatgccagagaggtagctgctttactagtggaaattcaagctttccagcaaccgattttggttctctttaccgctaaagacatgcttctagcagtatcggatttacttacagttrgccacttggcccagtataaaaatggggatgttcatcagctaaagaaacgctttgaaaaaggtgaacaacaaatcttgcttggtgcagcaagtttctgggagggagttgatttttcaagycatccttytgtgattcaagttgtaccgaggcttcctttccaaaatcctcaagaacccttgacgaaaaagattaatcaagaactgaatcaagaagggaaaaatgccttttatgattatcaattgccaatggccattattcgtttaaaacaggctttgggaagaagtatgagacgtgaataccaacgttccttaactcttattttggataggagaatcrtcggaaaacgatacggcaaacaaatagtagcatctctagcagaagaagcgactgttaaaaccatctctcgatccgaagttgacgaggctattgatagattttttaatgarcttykaactaat

SEQ ID NO: 709 - DNA, 980 bp, Streptococcus pneumoniae
  misc_feature (1)..(980): tiling:Spneumo1:WAN024GNJ; Cluster includes WAN0244IV spr0 379|fabK|15902423|NP_357973.1|378451..379425|+|975 bp|Enoy l-acyl carrier protein(ACP) reductase.|S.pneumoniae|R6|NC_ 003098.1|ORF|111
atgaaaacgcgtattacagaattattgaagattgaytatcctattttccaaggagggatggcctgggttgctgatggtgatttggcaggggctgtttccaaggctggaggattaggaattatcggtgggggaaatgccccgaaagaagttgtcaaggcyaatattgataaaatcaaatcattgactgataaaccctttggggtcaacatcatgctcttatctccctttgtggaagayatcgtggatctcgttattgaagaaggtgttaaagttgtcacaacaggagcaggaaatccaagcaagtatatggaacgtttccatgaagctgggataatcgtwatycctgtbgttcctagtgtcgctttagctaaacgcatggaaaaaatcggtgcagacgctgttattgcagaaggaatggaagctggggggcatatcggtaaattaacaaccatgaccttggtgcgacaggtagccacagctrtatctattcctgttattgctgcagraggaattgcggatggtgaaggtgctgcsgctggctttatgctaggtgcagaggctgtacaggtggggacacggtttgtagttgcaaaagagtcgaatgcccatccaaactacaaggagaaaattttaaaagcaagggawattgayactacgatttcagctcagcactttggtcakgctgttcgtgctattaaaaatcagttgactagagattttgaackggctgaaaaagatgcctttaagcargaagatcctgatttagaaatctttgaacaaakgggagcaggtgcyctagccaaagcagttgttcacggtgatgtggakggtggctctgtyatggcaggtcaaatcgcagggcttgtttctaaagaagaaacagctgaagaaatcctaaaagatttgtattacggagccgctaagaaaattcaagaagaagcctctcgctggrcaggagttgtaagaaatgactaactaat

SEQ ID NO: 710 - DNA, 624 bp, Streptococcus pneumoniae
  misc_feature (1)..(624): tiling:Spneumo1:WAN024FSB; Cluster includes WAN0243UC spr1 263||15903306|NP_358856.1|1260037..1260687|-|651 bp|Hypoth etical protein|S.pneumoniae|R6|NC_003098.1|ORF|221
atgaaaactaaattgaycttttggggctctatgctctttctcctctccctctcmatccttctgaccatttatctggcttggattttctatcctatggagattcagtggctaaacttaacgaatcgagtctatctaaaaccagaaaccattcaatacaattttcatatcttgatgaattatctgaccaatccttttagtcaggtcttacagatgcctgattttcgttcgtcagcagctggtctgcaccatttcgcagtggtcaagaatctctttcatttggttcagctagtagctctagtgacactgccaagtttctatgtctttgtcaataggattgtgaaaaaggactttttgtctctttatcgaaaaagtctcctgrctctagtagtyttacctgtratgattggacttgggggagttttgattggttttgaccaattctttactcttttccatcaaattctctttgtgggagatgatacctggctttttgatccagccaaggatcctgttattatgattttgccagagaccttctttcttcatgccttcctcctcttttttgccctctatgaaarcttctttggstatctgtrtctgaaaagtcgtaggaagykaactaat

SEQ ID NO: 711 - DNA, 411 bp, Streptococcus pneumoniae
  misc_feature (1)..(411): tiling:Spneumo1:WAN024CMD; Cluster includes WAN0242UR SP05 36||15900449|NP_345053.1|513530..513934|+|405 bp|immunity protein BlpL|S.pneumoniae|TIGR4|NC_003028.1|ORF|010
atgaaaacttttcttgctaaaaaacggaacatcttccttgcgagattgttcttaggtcagttgcccttgcttgtttctacttatctatttctatctcgtcagtttttaaatttttccgtagttttccaatttcttttagtagttattaacttggcttctattttggttactgtttatctcactagggaaatgaggataagagagtttgaagatgatgatttggttagtcctagaaccaatcaacttatgttcatcggcttgacaggttttatgtctattatttgtttgtatagaggtatcacagcaggagaatcctaccaacaaataatcgcttatattggcgctgttctctgcttaatcatcatgcttctgctcatgtggggcttgaagtattataaaaagctarctaat

SEQ ID NO: 712 - DNA, 75 bp, Streptococcus pneumoniae
  misc_feature (1)..(75): tiling:Spneumo1:WAN024FH4; Cluster includes WAN023Y30 AL44 9935.1_53||||42784..42858|-|75 bp|Glimmer 2.02 orf predict ion|S.pneumoniae||AL449935.1|ORF|000
atgaaaagaacaaaaaagtttatcggtataggagtagctctattatctctttctcttctagttgcatgtggaaca

SEQ ID NO: 713 - DNA, 1187 bp, Streptococcus pneumoniae
  misc_feature (1)..(1187): tiling:Spneumo1:WAN024B4V; Cluster includes WAN0243UT spr1 246|potA|15903289|NP_358839.1|1245411..1246568|-|1158 bp|A BC transporter ATP-binding protein - spermidine/putrescine transport|S.pneumoniae|R6|NC_003098.1|ORF|221
atgaaaagaaggaatttatgccaattgaaaaarccaattatcgaattcaaaaacgtctctaaagtttttgaagacagcaacaccaaggttctcaaagacatcaactttgagttggaagaagggaaattctacacccttctaggtgcatctggttcggggaaatcaactatcctaaacattattgcaggtttactggatgcgacgacaggagatatcatgctagacggtgttcgtatcaatgatattcmaaccaacaagcgcgacgtacataccgtcttccaatcctatgccttgttcccacatatgaatgtgtttgaaaatgttgcctttccacttcgcttgcgtaaaattgataagaaagaaatygagcagcgtgtagcggaagttctcaagatggttcagttggaaggttatgaaaaacgttccatccgcaaactttctggaggacaacgtcagcgtgtggccatcgcccgtgctatcatcaaccaaccccgtgtggtcttgttggacgagcctttatcagcgctggacttgaaattgagaacagacatgcagtacgaattgcgtgaattacaacaacgattgggcattacctttgtctttgtcactcacgatcaggaagaagctcttgccatgagtgactggattttcgttatgaatgatggcgagattgtccagtctggaacccctgtggacatctacgatgagccaatcaaccactttgttgccacctttatcggggagtcaaacatcttgccaggtaccatgattgaggactacttggtcgaatttaacggcaaacgctttgaagcggttgatggtgggatgaagccaaatgaacctgttgaggtcgttattcgtccagaggacttgcgcattacccttcctgaagaaggcaarctccaagttaaggtcgayacccagctyttccgtggrgtkcattatgaaattatcgcctatgacgaacttggaaatgaatggatgatccactcaacccgtaaggcyatcgtgggtgaggaaatcggtctggactttgaaycagaagacatccacatcatgcgtctcaatgaaaccgaagaagagttcgatgctcgtatygargartacgtrgaaatcgaagagcaagaagcaggtytgatcaatgcratcgaggaggaaagagatgaagaaaacaagctctaactaat

SEQ ID NO: 714 - DNA, 593 bp, Streptococcus pneumoniae
  misc_feature (1)..(593): tiling:Spneumo1:WAN024BHT; Cluster includes WAN0243VX spr1 206||15903249|NP_358799.1|1205152..1205739|-|588 bp|Hypoth etical protein|S.pneumoniae|R6|NC_003098.1|ORF|211
atgaaaagaataattccagtttatatattccaacaagtaaatgtcctattggtatctctatacttattgaaatttctttgtatcggtgagttaactatactacagattctctatrgttcgtcactcatttcttttttatggatgtatggycaacgcaaacaagckcataaggtcaatatgaaatctaggatgaaatggcttggtrttgrattygttagcctactgattataagtctatgttttagyctratycatgctcaaggaasyacgaatcaagcaaacttaattggccttcaacatcaartyccttggttttcatttttattgttcttaatcaatgcgagtatggttgaagaatttctgtatcgwgaaattttatgkaayttggtyagaaaattagatatymgagttgctttgacaagtgttttatttgccttagcacatcatmcaggaaccattctagcttggtgtttrtatgtttcacttgggatgtttttaggkmtkgtrcgctayaaatckgacttatggggcagtatgggrctacatttggtgtggaacctactagtttatagtttgctgcttttttaactaat

SEQ ID NO: 715 - DNA, 594 bp, Streptococcus pneumoniae
  misc_feature (1)..(594): tiling:Spneumo1:WAN024BHS; Cluster includes WAN0242AA SP13 32||15901186|NP_345790.1|1256530..1257117|-|588 bp|conserv ed domain protein|S.pneumoniae|TIGR4|NC_003028.1|ORF|010
atgaaaagaataattccagtttatatattccaacaagtaaatgtcctattggtatctctatacttattgaaatttctttgtatcggtgagttaactatactacagrttctctatggtgcgtctcttttttcttttttatggatgtatggtcaacgaaaacaagtggtcaaggtcaatatgaaaactaggatgaaatgccttggtattggactagctagtctactgattataagtctatgttttagcctgattcatgctcaaggaagcacgaatcaaacaaatttaattggccttcaacatcaagttccttggttttcatttttattgttcttaatcaatgcgagtatggttgaagaatttctgtatcgtgaaattttatggaacttggttagaaaattagatattcgagttgctttgacaagtgttttatttgccttagtacatcatccaggaaccattctagcttggtgtctgtacgtttcacttggaatgtttttaggtatggtgcgctataaatctgacttatggggaagtatggggttacatttggtgtggaactttttagtttatagtttgctgctttttctaactaat

SEQ ID NO: 716 - DNA, 605 bp, Streptococcus pneumoniae
  misc_feature (1)..(605): tiling:Spneumo1:WAN024BHR; Cluster includes WAN023O5S spn0 29h04_131||||119456..119596|-|141 bp|Glimmer 2.02 orf pred iction|S.pneumoniae|23F-1|WAN01UCO3|ORF|002
atgaaaagaataattccagtttatatattccaacaagtaaatgtcttattggtatccctatacttactgaaattgctttgtattagtgagttaaccatactacagattctctattgtgcgtcgctcatttcttttttatggatgtatggtcaacgaaaacaagttgtcaaggtcaatatgaaaactaggatgaaatggcttggtattggattcgttagcctactgattataaatctatgttttagcctaatccatgctcaaggaactacgaatcaagcaaacttaattggccttcaacatcaagtcccttggttttcatttttattgttattaatcaatgcgagtatggttgaagaatttctgtatcgagaaattttatggaacttggttagaaaattagatattcgagttgctttgacaagtattttatttgtcttagctcatcatccaggaaccattttagcttggtgtttgtatgtttcacttgggatgtttttagggcttgtgcgctacaaatcggacttatggggcagtatggggctacatttggtgtggaacctatcagtctatgtcttattttttctttaataatagctggtctgtct

SEQ ID NO: 717 - DNA, 78 bp, Streptococcus pneumoniae
  misc_feature (1)..(78): tiling:Spneumo1:WAN024DNN; Cluster includes WAN023SIE NC_0 03098.1_2023||||1575126..1575203|+|78 bp|Glimmer 2.02 orf prediction|S.pneumoniae|R6|NC_003098.1|ORF|111
atgaaaagaatcattcatgcttggaataaggcaagccttgtcaagcgtatcttgattggtatgctttrtggggaatcc

SEQ ID NO: 718 - DNA, 249 bp, Streptococcus pneumoniae
  misc_feature (1)..(249): tiling:Spneumo1:WAN024FDL; Cluster includes WAN0243KL spr1 615||15903657|NP_359207.1|1588494..1588733|-|240 bp|Hypoth etical protein|S.pneumoniae|R6|NC_003098.1|ORF|121
atgaaaagagaggtgataagcaatggaaatgatggaactaccaagtcaggaaattttgatttttacaaaacaaattcgtcattggattcttagtgatcaagttatttcagggaaaagaaaacttttcttccgggaagatactccaaaagagattttagatttgtacgaaaacattaaatctaaacttgattttgcttaccaagaagttyattctaatartgggttgaaaaaatatgaaaaatarctaat

SEQ ID NO: 719 - DNA, 390 bp, Streptococcus pneumoniae
  misc_feature (1)..(390): tiling:Spneumo1:WAN024FPL; Cluster includes WAN023PP3 pne2 0_19||||15571..15960|+|390 bp|Type 11A capsule operon, Gli mmer 2.02 orf prediction|S.pneumoniae||WAN01UCJ5|ORF|000
atgaaaagagtaattacttatggaacctttgatttgcttcattatggacatatcaatttgttaaagagagcaaagcaattaggagattatctcattgttgtagtttcaagcgatgagttcaatttgaaagaaaaaaataaagtttgttactttaattttgaacatagaaaaaatttggttgaagcaataagatatgttgatctggtgatttctgaaacaagctgggaacagaaaaaaacagatattaaagaatatcacattgatacatttgttatgggggatgattggaagggaaaatttgattatttaaaagaagaaggagtggaagtaatttatttaccaagaactaaagaaatatctacaactaaaattaaagaagatttagcagat

SEQ ID NO: 720 - DNA, 357 bp, Streptococcus pneumoniae
  misc_feature (1)..(357): tiling:Spneumo1:WAN024FTA; Cluster includes WAN0240CP |||A AC98436.1|||357 bp||S.pneumoniae||L29324|ORF|001
atgaaaagaratatacgtagtattcggaaacaatttcgcttaacagaaacggaagaaaaacaaatactagatttaatgagagagaaaggagakgataatttttctgattttctccgtaaaagcttactattrtctgatggacaaaaacagatggaaaaatggttcaacctttggaaaaaacaaaagttggaacaaattagycgtgatgttcatgaartattmataattgctaaaayaaatcatcaggtkactcamgaacatgtttctattttgttaacttgtattcaggaattaattaaagaggtagaaaaaacargtcctcttagtgaarattttygtaayaaatacatgaggtag

SEQ ID NO: 721 - DNA, 393 bp, Streptococcus pneumoniae
  misc_feature (1)..(393): tiling:Spneumo1:WAN024FV4; Cluster includes WAN0240UH |gct ||AAK20720.1|||393 bp|Gct|S.pneumoniae||AF316642|ORF|000
atgaaaagarttataacatatggtacatttgatttattgcattatggtcatatcartcttttgaaacgtgctaaacagctaggtgattatttgattgtagttgtttcaagtgatgagtttaatttaaaagaaaagaataaagtatgttactttaactacgaacacagaaaaaatttagtagaagctattcgatatgtcgatttagtaatccctgaaactagttgggaacagaaaaagtcagatgttaaagastaccrtattgacacttttgtaatgggtgatgattggaaaggtaaatttgattatcttgaagaagaaggtgttgaagtagtctatttgcctagaacaaaggaaatatcaaccacaaagataaaagaagatttatcggaatga

SEQ ID NO: 722 - DNA, 752 bp, Streptococcus pneumoniae
  misc_feature (1)..(752): tiling:Spneumo1:WAN024DKH; Cluster includes WAN0244N3 spr0 227|deoR|15902271|NP_357821.1|218461..219255|+|795 bp|DEOR -type transcriptional regulator|S.pneumoniae|R6|NC_003098. 1|ORF|111
atgaaaagattggaacaaattattaaattagtatcagaatatgaaaagatcgacgttaatacattatcggaaaaattaaatgtatcgaaagtaacgrttagaaaagatttagataaattagartcaaaaggtttattacacagagagcatggatatgctgtattaaatagtggagatgacttaaatgtacgtttgtcaattaaytatgaaaytaagagaaaaattgttcaggaagcagtaaaattggtgtcagataatgaaacaataatgatagaatctggatcgacctgtgctttacttgctgaggaaatttgcaagcaaaaaagaaatgttacgattgtaacaaattcrttttttatagcaaattttgtgagagcttatgattcatgtcgtrttattgttcttggtggwgagtttcagaargattcacaggtkactgtrggacctttattaaaagaaatgatacagacttttcatgtgyrtcaagcttttgttgggacagatggttacgataaagagatgggctttacmggaaaagatttaatgcgcagtgaggtagttcaatatatttcagcagygtcggataaagtcattgtmctaactgactcaagtaaatttgataaaagrggtacagtaagaagatttgctttaagtcaagtctatgaagtaataacagacgaaaaactttctaaacaaaatatagctacattagaaaatgctgggataatggttaaggtagtttcgtaactaat

SEQ ID NO: 723 - DNA, 1086 bp, Streptococcus pneumoniae
  misc_feature (1)..(1086): tiling:Spneumo1:WAN024GI6; Cluster includes WAN024173 |cps 9vG||AAM62291.1|||1086 bp|putative alpha-1,3-galactosyltra nsferase Cps9vG|S.pneumoniae||AF402095|ORF|000
atgaaaagcgaaaatcaaaaaaataatattctacatatttctcgtacaatggatattggtggtgcagaacgtattgtatatcaattgagttctgatttgaaagatgaatttgatagtgtccatgtcgcttcaacaggtggactatgggagagcaaacttttatcaaaaggagttcaacatcataaaattttagatgttgacagtaagaatcccctaactatggtaaagatcctttcaagtttttatagaattatcaaaaataatgatattaccattgttcacactcatcatcggatggctgccttttatattcgcttgttgaaaatcattaatcctaagttgatacatgtttacactgcacataatgtatttaaaaataaattaccattatacaaattttccttaaaaaaagcgyattgtgtagctgtrrgtaaagcggttaatgataatttgaaacatgatgtaggaatcagtgatagtacagtartctataatggggttgtttttgaaaaaactgataagctagttgrtgarattgtaaaytataacggaatcaaattggggtgtattgctaggttatcagagcaaaaaggattgacctacctaattgatgcgatgtctttagtgaaacacaggratattacrttgttcattgtcggagatggagagcttcgagatgarcttgaaaacaaggtgaaacaattaaatcttcaaaaatcagtgatatttttaggttatcgaaaagatrttgttgaatgtatcaatagttttgattacttagtgtcatcatctttatatgaggggttkgstctaaatgyaattgaagcatttatgaakgggaaaacgatggttkcatcagatatcccmggaataaatgaagtagtcaataacaaaaatgggattcttgttcctgttaaggatgatgttgccttagcgagagcgattgaaaagcttgcgaytgacaaaaaacttagagaaaaactcgcttatcaagcaaaaaaagaytatgagacaaaatttaattattccttgtttttrgataattatcggagactttatagaaaattaaygggagaatcaaaatga

SEQ ID NO: 724 - DNA, 1298 bp, Streptococcus pneumoniae
  misc_feature (1)..(1298): tiling:Spneumo1:WAN024EV3; Cluster includes WAN024484 spr0 766|IS1167-truncation|15902810|NP_358360.1|761198..761602| -|405 bp|Degenerate transposase (orf2)|S.pneumoniae|R6|NC_ 003098.1|ORF|137
atgaaaagcgacaaaaccatcattagaaagattcatatggracaattacatyttatcacaaaactrctcgatatyaaagacmcaaayatcmarattmtagatrtcrtcaatakggatwcmcacaaagaaatyatcgcyaarctggaytaygasgcyccatcttgccctgattgtggaagtctaatgaagaaayatgactttcaaaaaccgtctaagatcccttacctcgaaacaactggtatgccttctagaattctccttagaaaacgccgtttcaagtgctatcactsttcaaaaatgatggttgctgagactcccctggtaaagaaaaatcaccaaatccctcgtatcatcaaccaaaaaattgctcaaaagttaattgaaaaaatttctatgactgatattgcccatcagctkkccatttcaacttcaactgtcattcgcaagctcaatgactttcactttgagcatgatttttctcggcttccaaagattatgtcttgggatgagtatgccttcactaakggaaagatgagyttcattgcgcaagattttgataatcttaatattatcactgttcttgaaggcagaacacaagctgtcatccgaaatcactttcttcgctacgatagagccgttcgttgtcaagtgaaaatcattacgatggatatgtttagtccttactatgacttggctaaacagctttttccgtgtgctaaaatcgttctagatygtttccatattatccaacatctcagccgtgccatgagtcgtktkcrtgtycaaatyatraatcagtttsawcgaaaatcycatgaatacaagrctatcaarcgytactggaaactyatycaacaggatagycgtaaaytsagygataarcgwttttatcgycctacttttcgyatgcacttaacaaataaagaaattcttgacaagmttttragctattcasaagacttgaaacaycactatcagmtctatcaactcttrctktttcacttycagaayaargamccdgagaaatttttcggactyattgaggacaatctkaagcaggttcatcctmtttttcagactgtctttaaaaccttyctaargrayaaagaraaratyrtcaacgcycttcaaytacmytattchaaygcmaaaytggaagcgaccaataatctcatcaaacttatcaarcgmaaygcctttggwtttcgraactttgaaaacttcaaaaaamggattktyatcrcyytgaayatcaaaaaagaaagracraawtttgtcctttctcragcttarctaat

SEQ ID NO: 725 - DNA, 119 bp, Streptococcus pneumoniae
  misc_feature (1)..(119): tiling:Spneumo1:WAN024CLC; Cluster includes WAN0241UA SP19 38||15901762|NP_346366.1|1841484..1841597|-|114 bp|hypothe tical protein upstream of lytA|S.pneumoniae|TIGR4|NC_00302 8.1|ORF|021
atgaaaaggacatatagagactgtaaaaatatacttttgaaaakctttttagtctggggtgttattgtagatagaatgcagaccttgtcagtcctatttacagtgtcaaaatarctaat

SEQ ID NO: 726 - DNA, 1419 bp, Streptococcus pneumoniae
  misc_feature (1)..(1419): tiling:Spneumo1:WAN024AZ2; Cluster includes WAN023ZZG |||A AA21852.1|||1398 bp|transposase|S.pneumoniae||U04047|ORF|0 00
atgaaaaggatccaactgaatatgaatgaaacgaaaaaatatcttgtrataaaagctatagcccaaggaaagaaaacaaagaaacgggcctgtgtcgaactcaatctttctgaaagacaaatcaatcgtcygytactagcctatcaacagaaagraaargaagccttcagacacggaaacagaaatcgaaaaccaaaacatgcaatccctgatgaaatcaaagaacgtrtcctaaagaaatacctctcctatgaaacatataaaccaaatgtccttcatttctgtgaattactagctgaagaagagggaattaagctctctgatacaactgttagaaaaatactctataagaaaaacatcctttctcctaagtctcacagaaagacaaagaagagagtaagaaaacaagctaaactgaacctgaatcaacccctagacaatccaatcttaccgacgrctaaagacttcctggaagaccctaaaaaggtacatcctagtagacccagaaagaaatttgctggagaactcattcaaatggatgccagccctcatgcctggtttggaccagaaaccaccaacttacacttagccattgatgatgcttcyggcaatatcctaggsgcttattttgacaaacaagagaccttgaatgcctactaccatgtcctcgaacaaatcttagccaatcacggcattccccttcaaatgaaaactgataagagaacggtctttacctatcaagcatccaactctaagaaaatggaggacgacwcctatacacaatttggatacgcctgtcaccaactagggattctccttgagaccacctctatccctcaagctaaagggagggtcgaaagactcaatcagacactacaatcacgcctgcctatcgaactggaacgaaacaagattcatacattggaagaagccaatactttccttctttcctacatccaaacctttaatgaacagtttggaaayaagacaaaactctctgtttttgaggaggctcctaacccctctgaacggaatctcattctagctagactggcggagagagtcgtcgatagtggacaccatatccgattccaaaaycgttrctatatycctaccgaacaaggaaaagaagtctatttcatcagaaagacgaaagcattagttmtaaaagcatttgayggwgacatctacctcaatatcgctgacaaaatctatcacacaaaggagctactaratcatgaactctattcgaaaaactttgaacaagaaccagaacaaaaaaaagaaagacgcaagtatatccctccacaaacccatccgtggaaactcacatctttcaaacaataycttcataaaaayaaaaaggattatgaagagtttactagtgaggagmttmattctcctcaactacaagtataa

SEQ ID NO: 727 - DNA, 1449 bp, Streptococcus pneumoniae
  misc_feature (1)..(1449): tiling:Spneumo1:WAN024AZ3; Cluster includes WAN023PT1 pne1 4_3||||1144..1698|-|555 bp|Type 9L capsule operon, Glimmer 2.02 orf prediction|S.pneumoniae||WAN01UCJV|ORF|000
atgaaaaggatccaactraatatgaatgaaaygaaaaaatatcttgtgataaaagctatagcccaaggaaagaaaacaaagaaacgagcctgtgycgwrctcaatctttctgaaagrcaaatcaatcgtctrctactrgyctatcaacwgaaaggaaaagaagccttcagacacggaaacagaaatcgaaaaccaaaacatgcaatccctgatgaaatcaaagaacgtmtcctaaaraaatacctctcctatraaacatataaaccaaatgtccktcatttctgtgaattgctagctgaagaagaaggaattcagctctctgatacwactgttagaaaaatactctataagraaaatatcctgtcgcctaagtcccatagaaagacaaagargagastaagaaarcaagctaaactgaaccysaakcaacccctagacaakcyaatcttaccgacrgctgaarayttcctkgaaraccctaaaaargtacatcctagtagacycagaaagaaatttgctggwgaactcatycaaatggatrccagycctcatgcctggtttggagcmsaaacctctaacttacacctagccattgatgatgcttctggcaatatcctaggcgcttattttgayaaacaagagaccttgaatgcttactatcatgtcctcgaacaaatyttagmcaaycacggcattccysttcaaatyaaaacagataararaacdgtytttacctatcaaryctccaactctaagaaaatggaggacgayacccatacacarttyggatacgcctgtcaccaactrggrattctyctkgagacaacctctatccctcaagctaaagggagagtcgaaagactcaatcagayactacaatctckcctgcctatcgaactggaacraaacaakattcataccttggaagaagccaataccttyctgcyttcctayatycaaacctttaatgaacagtttggaaacaagacaaaactctctgtcttygagraggytcctaasccctctgaamgraatctcattctrgctaractggcggagagagtcgtcgatagtggacaccatatccgmttccaaaatcgttrctatatccctaccgaacaaggaaaagaagtctatttcakcagaaagacgaaagcattagttataaaagcatttgayggwgacatctacctcaatatcgctgacaaaatctatcacacaaaggagctactarwtcatgaactctattcgaaaaactttgaacaagaaccagaacaaaaaaagaaagacgcaagtatatccctccacaaacccatccgtggaaaytcacatctttcaaacaataycttcataaaaataaaaaggattatgaagagtttactagtgaggagcttrattctcctcawctacaagtmtarymwawtkmwmgctaaatgggaagcttttcct

SEQ ID NO: 728 - DNA, 1447 bp, Streptococcus pneumoniae
  misc_feature (1)..(1447): tiling:Spneumo1:WAN024AZ4; Cluster includes WAN024081 |||A AC69523.1|||672 bp|transposase|S.pneumoniae||AF057294|ORF| 000
atgaaaaggatccaactraatatgaatgaaaygaaaaaatatcttgtgataaargctatagcccaaggaaagaaaacaaagaaacgagcctgtgycgarctcaatctttctgaaagrcaaatcaatcgtctgctactagcctatcaacwgaaaggacaaagaagccttcagacacggaaacagaaatcgaaaaccaaaacatgcaatccctgatgaaatcaaagaacgtmtcctaaaaaaatacctctcctatgaaacatataaaccaaatgtccttcatttctgtgaattgctagctgaagaagaaggaattcagctctctgatacaactgttagaaaaatactctataaggaaaacatcctgtcgcctaagtctcatagaaagacaaagaagagagtaagaaaacaagctaaactgaaccccaagcaacccctagataatccaatcttaccgacggctgaaaacttccttgaagaccctaaaaaagtacatcctagtagacccagaaagaaatttgctggtgaactcattcaaatggatgccagccctcatgcctggtttggagcacaaacatctaacttacacttagccattgatgatgcttctggcaatatcttaggcgcttattttttaggcgcttattttgataaacaagagaccttgaatrcttactatcatgtcctcgaacaaatyttagscaatcacggcattccccttcaaatyaaaacagataaragaacrgtctttacctatcaagyctccaactctaagaaaatggaggacgayacycatacacarttyggatrcgcctgtcaccaactrgggattctyctkgagacaacctctatccctcaagctaaagggagagtcgaaagactymatcagacactacaatctcgcctrcctatcgaactggaacraaacaakattcataccttggaagaagccaakaccttcctgctttcctacatycaaacctttaatgaacagtttggaaacaagacaaaactctctgtcttmgaggaggttcctaacccctctgaaaggaatctcattctggcyagactggcggagagagtcgycgatagtggacaccatatccgattccaaaatcgttactatatccctaccgaacaagraaaagaagtctatttcatcagaaakacgaaagcattagttataaaagcatttgacggagayatctacctcaatatcgctgacaaaatctatcrcacaaaggagctactaratcatgaactctattcgaaaaactttgaacaagaaccagaacaaaaaaagaaagacgcaagtatatccctccacaaaccyatccgtggaaactcacatctttcaaacaatatcttyataaaaataaaaaggattatgaagagtttactagtgaggarcttaattctcctcaactacaaryatagyaaaatgaaataa

SEQ ID NO: 729 - DNA, 62 bp, Streptococcus pneumoniae
  misc_feature (1)..(62): tiling:Spneumo1:WAN024AOM; Cluster includes WAN024EOS-rc R 6.IG_431.1||||403802..403863|-|62 bp|Between spr0407 (+ st rand) and spr0408 (glnQ) (- strand)|S.pneumoniae|R6|NC_003 098.1|IG-rc|110
atgaaaaggcagattctctatctctactacttgaaggtcaagaatccgccgttatccaaaga

SEQ ID NO: 730 - DNA, 1080 bp, Streptococcus pneumoniae
  misc_feature (1)..(1080): tiling:Spneumo1:WAN024FMR; Cluster includes WAN023P6S pne5 3_33||||19162..20241|+|1080 bp|Type 25F capsule operon, Gl immer 2.02 orf prediction|S.pneumoniae||WAN01UCCQ|ORF|000
atgaaaagtaagataatattaaaaaataaaacaattcttgttacaggagcagctggctttattggtgctaatcttgtcatgagtttattacaagaagaaaatccattacagattattggaatagataatttgaatgattattatgatgtttctttaaaagagtatcgtttatcaacaattcaagaggagtgtcaatcatctttaaataaaaaatgggtatttatcaaaggagatattgctgattctgatttgatggaagaaatttttgagacgtatagacctcaaattgtagtgaatttggcagcacaagcaggtgttcgttattctatcactaatcctgatgtttatatgaaaagtaatatcattggatttcatactattcttgaaaaatgtagaaagtatcaagaaaatattgaacatttagtttatgcatcatcctcttctgtttatggtggaaatacaaaaattcctttttctgaattagatgcagtagacaatcctgtttctttatatgcagttacgaagaaaacaaatgaattagaagcacatgcgtattcaaaattgtacaatattccaacaacaggcctgagattttttacagtttatggaccagctggaagacctgatatggcttattttagttttacaaagcaattaattgataaaaagccaattgaaattttcaattatgggaattgtcaacgtgattttacttatattgacgatattgttgaaggcgttaaaagagtgatgactggagctcctcaaaaagaaattggagaagatgggttaccaattcctccttatgctatctataatattggaaatcaccaaccagaaaatttattgaattttgtcgaaatcttgcaagaaaaattgatagctgcttctattttaccagaagattatgatttctcatctgctcagaaacttgttccaatgcaagctggtgatgtagttgcaacctatgcagatataagtctattggagaaggattttaatttcaaacctaagactagtcttagaaatggcttgagaaattttgcagaatggtatagaaatttttatcaaaggggtgaa

SEQ ID NO: 731 - DNA, 1493 bp, Streptococcus pneumoniae
  misc_feature (1)..(1493): tiling:Spneumo1:WAN024CWR; Cluster includes WAN0243XH spr1 150||15903193|NP_358743.1|1151363..1152850|+|1488 bp|Conse rved hypothetical protein|S.pneumoniae|R6|NC_003098.1|ORF| 111
atgaaaagtataaaattaaatgctctatcttacatgggaattcgtgtcttgaatattatttttcccatcctaactggaacctatgtcgcgcgtgtcttggaccgaactgactatggttacttcaactcagtcgacactattttgtcatttttcttgccctttgcaacttatggtgtctatarctacggtttaagggctatcagtaatgtcaaggataacaaaaaagatcttaacagraccttttctagtcttttttatttgtgcatcgcttgtacgattttgaccactgctgtctatatcctagcctatcctctcttctttaytgataatccaatcgtcaaaaaggtctaccttgttatggggattcaactcattgcccagattttttcaatcgaatgggtcaatgaagctctggaaaattacagttttctcttttacaaaactgccttcatccgtatcctgatgctggtctctattttcttatttgttaaaaatgaacacgatattgttgtctatacacttgtgatgagtttatcgacgctgattaactacctgattagttatttttggattaaaagagacatcaaacttgttaarattcacctaagtgattttaaaccactctttctccctctgacagccatgttagtctttgccaatgccaatatgctcttcacttttttagatcgcctcttcctcgttaaaacagggattgatgtcaacgttagttactataccatagctcagcgaattgtgaccgttatagctggggttgtaacaggtgcaattggagtgagtgtgcctcgtctcagttactatctggggaaaggagacaaagaagcctatgtttctctggttaatagaggtagtcgaatctttaacttctttatcattccamtgagttttggactcatggttttaggaccaaatgccatcctactttacggtagtgaaaaatatatcggaggcggcatcttgacctctctyttcgcttttcgtacgattatyctggccttagataccattcttggttcccaaattctctttaccaatggctatgaaaaacgtatcacagtctawacmgtctttgctgggctactcaatttgggcttgaatagtctcctytttttcaaccatatcgtrgytccygaatactacttactgacaactatgytatcagagrcttctctacttgttttctatatyattttcatccatagaaaacaactcatccacttgggacatatctttagctatactgttcgatactckctcttttcactttcctttgtrgsaatttatttcctgattaatttcgtgtatcctgtrgatatggtcattaatttgccatttttrattaatactggtttgattgtcttgytatcagctatctcttatattagtctacttgtcttcacaaaagatagcattttctatgaatttttaaaccatgtcctagccttaaaaaataaattyaaaaaatcatarctaat

SEQ ID NO: 732 - DNA, 243 bp, Streptococcus pneumoniae
  misc_feature (1)..(243): tiling:Spneumo1:WAN024D9E; Cluster includes WAN0243WQ spr1 177|rpmE|15903220|NP_358770.1|1176610..1176852|+|243 bp|50 S ribosomal protein L31|S.pneumoniae|R6|NC_003098.1|ORF|11 1
atgaaaaragatatccatccagaatatcgcccagttgtcttcatggayacaactactggttaccarttccttagcggttcaacaaaacgctctaacgaaacagttgagttcgaaggcgaaacttacccattgatccgtgtgraaatttcatcagactcacacccattctacactggacgtcaaaagttcactcaagcagatggacgcgtggatcgtttcaacaaaaaatacggtctcaaataa

SEQ ID NO: 733 - DNA, 807 bp, Streptococcus pneumoniae
  misc_feature (1)..(807): tiling:Spneumo1:WAN024AYZ; Cluster includes WAN023OSX pne7 4_3||||894..1700|-|807 bp|Type 35F2 capsule operon, Glimme r 2.02 orf prediction|S.pneumoniae||WAN01UCCV|ORF|000
atgaaaargatccaactgaatatgaatgaaackaaaaaatatcttgtgataaaagctatagcscaaggaaagaaaacaaagaaacgrrcctgtgtcgagctcaatctttctgaaagacaaatcaatcgtctgctactagcctatcaacwraaaggaaaagargccttcagacacggaaacagaaatcgaaaaccaaarcatgcaatccctgatgaaatcaamgaaygtmtcctaaagaaatacctctcctatgaaacatataaaccaaatgtccttcatttctgtgaattrctagctgaagaagarggaattcagctctctgatacaactgttagaaaaatactctataagraaaayatcctgtcgcctaagtcycatagaaagrcaaagaagagagtaagaaaacaagctaaactgaaccysaakcamcccctagayaatccaatcttaccgacggctgaaaacttccttgaagmccctaaaaaagtacatcctagtagacccagaaagaaatttgctggwgaactcattcaaatggatgccagccctcatgcmtggtttggagcmcaaacatctaacttacacttagccattgatgatgcttctggcaatatcctaggcgcttattttgataaacaaragaccytgaatgcttactatcatgtcctcgaacaaattttaggcaatcacggcgttccccttcaaattaaaacagataagakaacggtctttacctatatcaagcctccaactcgaagaaaatggaggacgacacccatacacaatttggatacgcctgtcaccaac

SEQ ID NO: 734 - DNA, 855 bp, Streptococcus pneumoniae
  misc_feature (1)..(855): tiling:Spneumo1:WAN024CJD; Cluster includes WAN0242FK SP11 30||15900996|NP_345600.1|1064466..1065314|-|849 bp|transcr iptional regulator|S.pneumoniae|TIGR4|NC_003028.1|ORF|010
atgaaaataaataataaactcgttggagaacgtattcaaaatatccgtttaagccatggcgactctatggaaaaatttggagaaaaatttaatactagcaaaggtacagttaacaactgggaaaaaggtcgcaatttaccaaataaagaaaacctactaaaaattgcatctattggaaaaatgagtgttgaagagttactctacggcgattacaatacttatctacacttaaagattatggatttagctcctgaatgtataaaaaattatgatgagtataactctttacacgatgatataacaaataaagcgttacagatcgctcaaaataccatttctaagattgattatcaaatttcagacgaaacgatcaaaaaatttattgatttagctatcgaacaatcgagagatttgcaaggaaatttgttgaaaaataacttatctaattttgactattcactttttggaggtactagaaaccgagaatatttctattttgggtatagacttacctataaagaaaaatatctatacactgccttactagctatactgaacgagtcaacaaaaacgatatatattgatgatataaatacagcaagattttttaacttctttggcaatgatattcctaattcgtctttaaaaaaaattgactatatcgcaccttcagaaattgtttcatttagtacgtacgttcgacaacgttctaaagtaattcctaaaattttggaacatatattaaaatcaagttttttattagagaatatagatgtttctggttacactgtaaatattttagaagatcaattaacaaaacatagaacaatcaaaattagtaaaaacctaactaat

SEQ ID NO: 735 - DNA, 1416 bp, Streptococcus pneumoniae
  misc_feature (1)..(1416): tiling:Spneumo1:WAN024FYL; Cluster includes WAN0240C4 |cap 33fL||CAA07405.1|||1416 bp|repeating unit transporter|S.pn eumoniae||AJ006986|ORF|000
atgaaaatactaaaaaaytatgcctayaatctttcttatcaattgttggtgatcatactccctatcattacgactccctatgtaacgagggtttttagttctgacgatttaggaacgtatggctactttagctccattgttacctattttaccttgcttgcaactcttggtgttgccaactacggtaccaaagagatttcagcacatcgtaaggaaattgggaagaatttctggggaatttattctctccagtttggtgcaacttggctatccattttgctttatcttgccctttgtttcttatttacttcaatgcaaaatccggtagcttatatattgggattaagtttagtgtcaaaaggkttggatatttcttggttatttcaaggtttggaggattttagaaagattacagttcggaacatcactgttaagttagttggtgcaatctctattttcctatttgtaaaatcagctaatgacttatacttatatgtatttcttcttaccattttcgaattgttagggcaattaagcatgtggttacccgcaagacaatttattggtaaatcatattttgattggaaatacgctaagaagcatttgaaaccagttatcttgttattcttgccacagattgccatctcgctttatgtgactttggaccgtacgatgctgggggtgttggcttcgacaaaggatgttggaatttatgatcaagctttgaagcttgttaatattttactgactttggttacctcactggggagtgttatgttgccacgagtatctagccttttatcgtctggggattacaaagccgttaataagatgcacgagatgtcttttttaatctataacttggtgattttcccaatcatagcaggaatgttgattgtcaacgatgattttgttcgtttcttccttgggcaaaattttcaagatgctcgctatgcgattgctattatgaccttccgtatgttctttattggttggaccaatataatgggaattcaaatcttgattccgcacaataaaaataaggaatttatggtttcaacgacagttcccgctrttctgagtgtgggattgaatttgttgcttcttccccaatttggttatataggtgctgcgattgtttcagttttgactgaggcgtttgtatgggggattcagttattctatacacgtttttatttaaaagaagttcctattatcggttcaatgacaaaaactgcacttgcatctgctgttatgtatggtctcttgctaggttcaaaaacatctatacatttttcgccaaccataaatgttttaatattttcggtgctaggcggaattatctatctttttgcaattctatctctgaaagtggtagatgtgaaagaattaaaacaaataatcaggaaaaattag

SEQ ID NO: 736 - DNA, 1095 bp, Streptococcus pneumoniae
  misc_feature (1)..(1095): tiling:Spneumo1:WAN024FPS; Cluster includes WAN023PPA pne2 0_11||||8684..9778|+|1095 bp|Type 11A capsule operon, Glim mer 2.02 orf prediction|S.pneumoniae||WAN01UCJ5|ORF|000
atgaaaatactacayattccaacrggtggtttattttctgatggtataggaacttttatttattcatatttrgagtatatggacttaaacaagtatgatgtgacaattttagccactaatycccytttgaaaagtgataaggaaaaatttgaatrtttaggggttaaagttattgaaattgaaagraaaaaatcaaacctwtctaaatatgtatacarattraaaaaawtaataaaaaaagaaaaatttgayattatacatgttcacggaagtagcgcyttaatgtcaattgaattactgactgctaaarttgctggtatcccagttcgaattgcccatagycayaacactacttgtgagcatcataaaytagataaactactacgaccgatattttatcgagtttatactcaggcatgtgcttgyagtgttagtgctggtcartggctttttgaggaaaaaaattataagattatccataacgctagagatgtaaatargtatcagtatgatgccataaaamgaaaaaaacttagagaagaattgttrctrtctgatgagactattgctctaggtcatgttggacgttttaatactcaaaaaaatcaaygttttctagtgtctctratrgaaarattagtratyaaaaatatagatwtaaaattatttttagtagggacrggtgatactttrgaagaaatcaagaaattagtcattcagaaaaaactagaagataayattgtttttttaggtcaatttgatgatatgaaatcttttgtgtcatcaatggatataatgttrcttccaagtttatatgaagggttaccactagtatctgttgaatggcaaathaacggagtaraaagtatcctatctgaccgtgttacacaagagtgtatctatacagraactgttcaacaattatctatcgatagyatggaattatgggaaaaagaaattttraatttatctacttcagatagagaaagagtgtcattgcaaaatattcagttrataaraaatgcaggytatgatatttctttagaagttaaagaaatagaagaattatataattcactttatgatattkcraat

SEQ ID NO: 737 - DNA, 1235 bp, Streptococcus pneumoniae
  misc_feature (1)..(1235): tiling:Spneumo1:WAN024CKK; Cluster includes WAN0242ZG SP03 51||15900280|NP_344884.1|324633..325862|+|1230 bp|capsular polysaccharide biosynthesis protein Cps4F|S.pneumoniae|TI GR4|NC_003028.1|ORF|010
atgaaaatactatttgtttgccaacattataagccagaaccattcaggttgtcagatatttgtgaagatttagttcgaaaagggcatgaagtctctgttttggctgggattcctaattaccctgaagggaagatatatgcagattatcgtcataataaaaaaagacgtgagattatagaaggtgttacgatatatcgttcttatacaatccctagaaaaaaaagtgttgtatttcgattgttgaattattttagctttgcaattagttctactttaggagttttattggggaggtataaaacgaaagatggatcgaattttgactgtgtattcgttaaccaattgtctccagttatgatggcatgggctggtatggcttataaaaaaaaatataagaaaccgatgtttctatattgtatggatgtttggccagatagtttaaccgtaggtggagtgaaacaagatggcttgattttcaagctgtttaaatttatctcaaaaaaagtttaccgagctagtgattatatatttgtcactagtccatcatttaaaaattattttgtgaagcaatttgacatatccgaacaaaagattacatatttgccacaatatgcagaagatctttttatccctgatgaatctatagttaataaagaaagtgttgacctaacttttgctggtaatattggcaaagcacaaaatttggaaactattttgaaagctgccagtttgatagagaagaataccaatttacccaagaaaattcattttcattttgttggagatggtacggaattgttaagcatgaaagcattagctcatgaattggagttaaagaatatttccttctatggaagacgttctttggaggaaatgccatccttctataaaaaatcagatgctatgttagtttctttaataggagactcgatagtttctcgtactatacctgggaaggtacamtcttatatggcrgcaggcaaaccaattataggtgcaatttcaggagatgctaaaataattgtagaagaagcaaattgtggatatgttagtcccgaacgagawgtaaaacaattggcaaaaaatatttgtaaatttagtatgttatctattaagagacaaagagagttaggaaagaaagctcgttgttactatgaaaatcacttttcaaaagagcagtttatgcwcgarytrgaramrtrtttagagaggrawwktmmkmaagaataactaat

SEQ ID NO: 738 - DNA, 1337 bp, Streptococcus pneumoniae
  misc_feature (1)..(1337): tiling:Spneumo1:WAN024CYI; Cluster includes WAN0243B1 spr1 960||15904001|NP_359551.1|1946639..1947970|+|1332 bp|Conse rved hypothetical protein|S.pneumoniae|R6|NC_003098.1|ORF| 111
atgaaaatagatataacaaatcaagttaaagatgaatttcttatatcattaaaaaccttgatttcctatccttcagtactcaatgaaggagaaaatggaacaccttttggacaagcaatccaagatgtcctagaaaaaactttagagatttgtcragacataggtttcactacctatcttgaccctaaaggttattacggatatgcagaaatcggtcagggagcagagcttctggccattctctgtcatttggatgttgttccatcaggtgatgaagcagattggcagacaccgccatttgaagcaactatcaaagacggctgggtattcggacgtggtgtccaagatgataaaggcccttcgctcgcagctctytatgcagtaaaaagcttgctggaccaaggtattcagttcaaaaagcgcgtacgctttatctttggtaccgatgaggaaamcctctggcgctgcatggcacgctacaataccatcgaagaacaggccagyatgggctttgcacctgactcatcttttcctctgacctatgctgaaaaagggcttctacaggtcaaacttcatggccctggatcggatcaactagagcttgaagtaggaggcgcctttaacgttgtaccagacaaggccaactaccaaggtcycctctatgaacaggtttgtaacgrtctcaaagaagctggttatgattaccaawccactgaacaaaccgtaacggttctcggagtgccaaagcatgctaagratgctagtcaaggtatcaatgctgtcatccgactagctaccattcttgctcctctccaagaacaccctgctctcagytttcttgcaacacaagcaggtcaagacggcacaggaagacaaatctttggtgatatagcagatgaaccttctggtcacctatcctttaatgtcgcaggtctcatgatcaatcatgaacgttctgaaatccrtattgacattcggactcctgtcttagctgayaaggaagaactagtagagttgcttasaagatgtgcacaaaactaccaactccgctacgaagagtttgactatctagcgcctctatacgtcgcaraagacagtaaactcgttagcacactgatgcaaatctaccaagaaaagactggcgataacagtcctgctatttcatccggtggtgccacttttgctcgcaccatgccaaattgtgtagccttcggcgccttattcccaggagcraagcagacagaacatcaggcaaatgaatgtgccgttctagaagatttgtaccgtgctatggatatttatgccgaagccgtctatcgacttgcaacttaactaat

SEQ ID NO: 739 - DNA, 1233 bp, Streptococcus pneumoniae
  misc_feature (1)..(1233): tiling:Spneumo1:WAN024DJI; Cluster includes WAN02416W |cps 9vN||AAM62298.1|||1233 bp|putative UDP-glucose-6-dehydroge nase Cps9vN|S.pneumoniae||AF402095|ORF|000
atgaaaatagcggtagcaggaacaggttatgtaggattrtcaattgcygtgttgttggcacaacatcacgaaataaaagcagttgatattgttgctgaaaaagttgaattaatcaatcaaaaaaartctccaattcaggatgattatattgaaaaatatttagtggaaaaagatttaaatttggaagcaactatggatgctaagtatgcttatgaagatgcagaatttgttgttgttgcagcaccaacaaattatgattcgaaaaagaacttttttgatacatcagcagtagaggcggtcattcaacaagtaaaaaaaattaatcccaaagcggtaataattattaaatctacaatccctgttggattcacagagtccgttcraaagaaatatcagtataaaaatatcytatttagtccagaatttttacgcgaatctaaagcattatacgataacctgtatccaagtcgcatcattgttggaactgacttagaagatacttatttaaaagacaaagctaatatatttgcttccctactaaaagagggggctattaaagaagacatagatacacttttcatgggagtaacggaagctgaggcagttaaattatttgccaatacytaccttgcgttgcgtgtttcttactttaatgaattggatacttatgcagaggtgaaaggtttggatgcaaaagccattattgatggtattggcctagatccacgtataggaaatcattataacaatccatcctttggctacggtgggtattgtttacctaaagatagtaagcagttattagcaaattactttgatgtaccacaaaatatgatgacrgcaactgttgaaagcaatcgaacgcgtaaggattttatcgctcaacggattttagaaaaagctggagtatctgagactgatagtttagatgcgtttaagaacayacaagatattgttataggtatttatcgtttaacaatgaaaagtaattcggataacttccgtcactcctctattcaaggygttatgaaacgattgaaagctaagggagttacggttatcatctatgagccaactttgaaggacggggaaacattctttggtaataaagtggtaaatamtctagataaatttaaagaagctagtaatgttattgtagccaatcgttttgaaccttcactagaggatgtktctaataaagtttatagtcgrgatatwtttaagcgtgactaa

SEQ ID NO: 740 - DNA, 1179 bp, Streptococcus pneumoniae
  misc_feature (1)..(1179): tiling:Spneumo1:WAN024FMO; Cluster includes WAN023P66 pne5 4_10||||6231..7409|+|1179 bp|Type 25A capsule operon, Glim mer 2.02 orf prediction|S.pneumoniae||WAN01UCGY|ORF|000
atgaaaatagtaatacaaagaaggtctttgccagaaattttagctcttagtgcactaactatatttttagttatgtcaatttttgatgtgactttttatgttcagtatctgccgaaaattgttcacaggatactgatagctattttgcttattctgcttgttataaaagagtcgtacaaaagaaagcttgattatagaactatcataagtctattttctactgttttaatttatctccttatagggaagatgagtacttttagttctaatattgcaataggtttcatttttatttatgttttacgcgatatcccttttaaaagtgtggcaaaaatttctttagcggtaagtgtgttcatgttactctttgttatagctagcgcaaagttgggagttattataaattatttagagatttctgggccccgagtccgtagctatctaggtttcagatatgccttgtatccatcaatcctacttatgaatgtcattgcgattacactttatttaaagcaaaacaatataaggtattggcagtggttattactaaccttgtctgtttactgggtatatggacaaactgattctcgcttaacattttacaattcttgtatattattagtcttcaatatactaataaagtggttccctgatattttgtctaagttaggaaatgtgtttaaaatttttaggctgacctttattataaatgcaataattagcttttggatttcaataaattatctcggatcaaacaattcttttgtaaacagtttcttattcaagttaaatcacatgttaggtggtcgacttttcttagctaataaatctctagaattattcggttttggtttgtttggaaaacaggttgactggaatggaaatggtctgaccattgaaggagtcaggaattatcagacctatctttatgtcgataatttgtatattcaaattctacaaaaatttggtttactcgttctagttttaatgttagcgttgttaacgttaacactgtttaaagctataaagaaagatcagtgggtcattgcttttattttaatcgtaatgagttttcaatccatgatagacgatctaaacatgtaccttcattacaatatcttttggattttgataggaagtttaatatacactcagtatcactattctaatgaggggact

SEQ ID NO: 741 - DNA, 1176 bp, Streptococcus pneumoniae
  misc_feature (1)..(1176): tiling:Spneumo1:WAN024FPG; Cluster includes WAN023PON pne2 4_13||||10411..11586|+|1176 bp|Type 12B capsule operon, Gl immer 2.02 orf prediction|S.pneumoniae||WAN01UCJ2|ORF|000
atgaaaatagtccatgtagaagatttttttcatccagatgcaggttaccagattaatgttttaccaaaatatctagcaaagtttggtcatgaacargtgattatcacttcagaaatggataaaatccccgataatcttacccaattttttggacgagaaaatatagaagagagagatagaagttacgaagagaagcatcatgtgaagattattcgcttrcctcttcatggatttgtaagyggacgtgcgattttttctggaaagcttatttcggctattaagggtctttctccagaggtattgtatattcatgggaatgacacyttaacagggattcgtctccttttagctcgaaagaaacttaattgcagaatcgycaccgatagtcatatgcttgaaawggcatcaagaaatcctttcaacaactactttaggagattttataaaaccttgattactcccattttgataaaagaacagataccaattattcggacgcaagatgataattatgttgaaaaacacttgggaattcctttatcgcaagctccatggatttcttatgggtcggatacagcgttctttcacgcagatagccagattaaggaagattttcgttctcartatcaaatcscttcagatgctcttatttgtgtttacgcaggaaagttagatgagcataagggtgggatgtttttagcagagtctctaagtaaaaagttaaatacggagcaaccaattgttttcattatagtgggtaatacaaatggagagtatggagaagctgtcgagaaaagtttctcccaatctgaaaaccaaatyttgcgctttccgactcaaaaatatcaaaaattagcacagttttttcaggtagcagattttgctttatttcctaaacaatgtagtttaagtttttatgatgcacaggcctgtggtttaccagttttattggaagataataatatcaacctcgatagaacttctcattataatggttggacgttcaaggctaacagcaaattaagtttgagagattcattaaaaatgattgcgagtctagataaagagaagagacaagagtactctcagaatgcactgcactatatccttgaacattataattatgaagataaagcaagagaatatgaaaagattcttataggggaacgtacgaaa

SEQ ID NO: 742 - DNA, 447 bp, Streptococcus pneumoniae
  misc_feature (1)..(447): tiling:Spneumo1:WAN024FUM; Cluster includes WAN023PPD pne2 0_8||||7611..7685|+|75 bp|Type 11A capsule operon, Glimmer 2.02 orf prediction|S.pneumoniae||WAN01UCJ5|ORF|000
atgaaaatatgtttagttggrtctagtggaggtcatctgactcatttatatctattaaaacctttctggaaagataaggaaagattttgggttacttttgataaagaggatrcaagaagtatcttgggaaatgaracattttatccttgtcattatcctactaatcgtaatttgaaaaatcttattaaaaatacgrttcttgctttcaatattttgagaaaggaacgccctgatgttatcatctcatcaggggctgctgtagcagttcctttcttttacctaggaaaactatttggygctaagacagtctayattgaagtttttgaycgtattgatrcgccaacmttaacaggraaawtrgtatatccagtracagataagttcatagttcagtgggakgaaatgaaaaaagtatatccraaagcaatyaayctcggagggattttc

SEQ ID NO: 743 - DNA, 1269 bp, Streptococcus pneumoniae
  misc_feature (1)..(1269): tiling:Spneumo1:WAN024ERR; Cluster includes WAN023PJM pne3 2_11||||7713..8981|+|1269 bp|Type 16F capsule operon, Glim mer 2.02 orf prediction|S.pneumoniae||WAN01UCIC|ORF|000
atgaaaatattacattatactttaggatttcaaccccagcgaacaggtggtttggttaaatatgctgaggatttaatgmtagagcaaattgctcaaggttatcaagtrgcygccctatrtccaggragaattaagttcttttcaaaaaaaatagaaataattaaagmgacgtcaagrcagtttgagtgttatgarctgcttaatagcttacctatrgctttatttggaggkatatccgatccaactgctttcmtgacaccttgtgacaaaaatgtttatcgtacttttttagaaaaagtacaacccgacattatacatattcactcgtttatgggattgcataaagaattcctcgaaattgctaaaarcttgaatattagagtkgtttttacgagccatgattattatggattagcacccgtacctcatttctattttaatggggtggattatagtgataaaartacaaacttaacatggaatattatgtcttccaatgctttaagtgtgaaaaaactaagactttttcargtttcattttatcctactattcgtaaacttttgaaactattagggaaaaatccaaaatctaaaaagaatttagttattcgagatgttattgaggarcaagattatagtgarcttcgatactattataatgagatgtttcacttaatagatggttatttgtttaatagtagacttgcaaagaaggtatatgagataaaygagattmarycagytaatagtrtagtattatctataacaartagttcaattaawcatcatcagagattracractacaaataataarattagrgttgcttatattggtycagaygaagaatataaaggwtaytttgattttrttgactttgytgraactttagawcragartcmtatgaagtggyaacttatggycatttaccaaatgaagagtgyccttcattcattgaacaaaaaggatattttacyaaggaaaygattgacagtgtctatgaaaatattgatattytkattrtwscaagyaartgkaargaaacmtttggattgataacagtagaagcattatcctatggggtaaatgttttygtgagtgaaaatgttggrtcaaaagacttrcttccagaawcrcatgtttttaaaaatcagaatgatttartagttaaatttttaaaaaatgatatagaaaatacaaaattgaaaactttagatgaacactcgatagaagtgattcagtattatgaaagagtgataaatgatagt

SEQ ID NO: 744 - DNA, 651 bp, Streptococcus pneumoniae
  misc_feature (1)..(651): tiling:Spneumo1:WAN024DEJ; Cluster includes WAN024488 spr0 762|pcp|15902806|NP_358356.1|758322..758966|+|645 bp|Pyrro lidone-carboxylate peptidase (5-oxoprolyl-peptidase)|S.pne umoniae|R6|NC_003098.1|ORF|111
atgaaaatattggttacaggttttaatccttttggaggtgaaaagattaatccagctttggaggctgtaawattattaccatctgagattaatggggctgaagttcgctgggtagaaattccaacggttttttataagtcgtcagaagttttagaggcagaaatattacgatatcaaccagatgctgtactttgtattggacaagcaggcggcaggaccggcttaacacctgaacgagtrgctattaatcaagatgatgctcgcatacctgataacgaaggcaatcaaccaattgatacaccgattcgtattgatggagcatcggcctattttagtagtttacctatcaaagcgatggtacaagctatcaaaaaacagggacttccggcagttgtatccaatagtgcaggaacctttgtttgcaatcatttgatgtaccaagctctttatttagtggataaaaaattccctaatatgagagcaggtttcatgcatattccatatatgatggaacaagtagtaaataagccgaatactgcaggaatgagtctatgtgayattgtaagaggcatagaggtagctattgaagctattgtagactacaaagataaggatttgcagttagtaggcggtgagactcacykaactaat

SEQ ID NO: 745 - DNA, 1272 bp, Streptococcus pneumoniae
  misc_feature (1)..(1272): tiling:Spneumo1:WAN024ERQ; Cluster includes WAN0240UO |wci U||AAK20713.1|||1272 bp|WciU|S.pneumoniae||AF316642|ORF|00 0
atgaaaataytacattatactttaggatttcaaccccagcgaacaggtggtttggttaaatatgctgaggatttaatgatagagcaaattgctcaaggttatcaagtagcygccytatrtccaggragaattaagttcttttcaaaaraaatagaaataattaaagcgacgtcaagrcagtttgagtgttatgaactgcttaatagcttacctatrgctttatttggaggtatatccgatccaactgctttcmtgacaccttgtgacaaaaatgtttatcgtacttttttagaaaaagtacaacccgacattatacatattcactcgtttatgggattgcataaagaattcctcgaaattgctaaaaacttgaatattagagtggtttttacgagccatgattattatggattagcacccgtacctcatttctattttaatggggtggattatagtgataaaaatacaaayttaacatggaatattatgtcttccaatgctttaagtgtgaaaaaactaagactttttcargtttcattttatcckactattcgtaaacttttgaaactattagggaaaaatccaaaatctaaaaagaatttagttattcgagatgttattgaggarcaagattatagtgawcttcgatactattataatgagatgtttcacttaatagatggttatttgtttaatagtagacttgcaaagaaggtatatgagataaaygagattmarycagctaatagtrtagtattatctataacaartagttcaattaawcatcatcagagattracractrcaaataataarattagrgttkcttatattggtycagaygaagaatataaaggwtaytttgattttattgactttgytgraactttagawcragartcmtatgaagtggyaacttatggycatttaccaaatgaagagtgcccttcattcattgaacaaaaaggatattttacyaaggaaaygattgacagtgtctatgaaaatattgatattytkattrtwscaagyaartgkaargaaacmtttggattgataacagtagaagcattatcctatggggtaaatgttttygtgagtgaaaatgttggatcaaaagacttgyttccagaaacacatgtttttaaagacaaggaagatttgttggctaaaatcatcaataatcagttgragaaarttccgcttaaaacgatrgaaraacatgtagaagaagttattrgttattacaaacaggttagaagyaacaattaa

SEQ ID NO: 746 - DNA, 860 bp, Streptococcus pneumoniae
  misc_feature (1)..(860): tiling:Spneumo1:WAN024CBB; Cluster includes WAN0244PB spr0 147|ABC-SBP|15902191|NP_357741.1|155454..156308|+|855 bp|A BC transporter solute-binding protein - unknown substrate| S.pneumoniae|R6|NC_003098.1|ORF|111
atgaaaatcaaaaaatggcttggyctasyagcccttgctacagtcgcaggtttggctcttgcagcttgcggaaactcagaaaagaaagcagacaatgcaacaactatcaaaatcgcaactgttaaccgtagcggttctgaagaaaaacgttgggacaaaatccaagaattggttaaaaaagacggaattaccttggaatttacagagttcacagactaytcacaaccaaacaaagcaactgctgatggsgaagtwratttgaacgctttccaacactataacttcttgaayaactggaacaaagaaaacggaaaagaccttgtagcgattgsagatacttacatctctccaatccgcctttactcaggtttgaatggaagtgccaacaagtacactaaagtagaagacatcccagcaaacggagaaatcgctgtaccgaatgacgctacaaacgaaagccgtgcgctttayttgcttcaatcagctggcttgattamattggatgtttctggaactgctcttgcaacagttgccaacatcmaagaaaatccmaagaacttgaaaatcactgaattggrcgctmgccaaacagckcgytcattgtcatcagttgacgctgccgttgtaaacaataccttcgttacagaagcaaaattggactacaagaaakcacttttcaaagaacaagctgatgaaaactcaaaacaatggtacaacatcattgttgcraaaaaagattgggaaacatcacctaaggctgatgctatcaagaaagtaatcgcagcttaccacacagatgacgtgaaaaaagttatcgaagaawcatcagayggtttggatcaaccagtttggtaactaat

SEQ ID NO: 747 - DNA, 135 bp, Streptococcus pneumoniae
  misc_feature (1)..(135): tiling:Spneumo1:WAN024AT7; Cluster includes WAN0242VF SP05 11||15900425|NP_345029.1|494479..494607|-|129 bp|hypotheti cal protein|S.pneumoniae|TIGR4|NC_003028.1|ORF|021
atgaaaatcaaaaacacttyccaactgaaagaactacctccagtgacaaactttgagaaaaacggtagtagagctaaaaagagaaryaaaataggaagcatccgcattgttaaaatccktttggcactaactaat

SEQ ID NO: 748 - DNA, 93 bp, Streptococcus pneumoniae
  misc_feature (1)..(93): tiling:Spneumo1:WAN024F7S; Cluster includes WAN023SIL NC_0 03098.1_1942||||1514071..1514163|-|93 bp|Glimmer 2.02 orf prediction|S.pneumoniae|R6|NC_003098.1|ORF|101
atgaaaatcaaagaagaaactagcaagctagtagcagattgcccaaaacaccgcyttgaggttgtagataagactgacctatataatccaagg

SEQ ID NO: 749 - DNA, 138 bp, Streptococcus pneumoniae
  misc_feature (1)..(138): tiling:Spneumo1:WAN024BEO; Cluster includes WAN023VZO AX57 0767.1_1||||1..138|+|138 bp|Glimmer 2.02 orf prediction|S. pneumoniae||AX570767.1|ORF|000
atgaaaatcaaagaccaaactaggaagctagccgcaggctgctcaaagcactgctttgaggttgtagatagaactgacgaagtcagctcaaaacactgttttgaggttgtggatgaagctgacgtggttctaactaat

SEQ ID NO: 750 - DNA, 204 bp, Streptococcus pneumoniae
  misc_feature (1)..(204): tiling:Spneumo1:WAN024BDS; Cluster includes WAN0246R8 2036 67-17-8_6||||1496..1699|-|204 bp|Glimmer 2.02 orf predicti on from Patent Sequences|S.pneumoniae||WAN02470O|ORF|001
atgaaaatcaaagagcaaactaggaaactagctgcaggctgctcaaaacactgttttgaggttgtsgatarractgacgaagtcagctcaaaacactgttttgaggttgcagatagaactgacgaagtcagtaaccatacctacgryaaggcgacgttgackcggtttgaagagwttttcgaagagtataaaggtgtaccgaga

SEQ ID NO: 751 - DNA, 198 bp, Streptococcus pneumoniae
  misc_feature (1)..(198): tiling:Spneumo1:WAN024BDQ; Cluster includes WAN023SL3 NC_0 03098.1_1012||||792572..792769|+|198 bp|Glimmer 2.02 orf p rediction|S.pneumoniae|R6|NC_003098.1|ORF|100
atgaaaatcaaagagcaaactaggaaactagctgcaggctgctcaaaacactgttttgaggttgyagataagactgacgaagtcagctcaaaacatggttttgaggttgtagatgaaactgacgaagtcagtaaccatacctacggcaaggcgacgttgacgcggattgaagagattttcgaagagtataaatcttcc

SEQ ID NO: 752 - DNA, 153 bp, Streptococcus pneumoniae
  misc_feature (1)..(153): tiling:Spneumo1:WAN024BF2; Cluster includes WAN023SLG NC_0 03098.1_874||||690650..690793|-|144 bp|Glimmer 2.02 orf pr ediction|S.pneumoniae|R6|NC_003098.1|ORF|100
atgaaaatcaaagagcaaactaggaagctagccgcaggctgctcaaaacactgttttgaggttgtrgatgaaactgacgaagtcagtaaccatacatacggcaaggcaaagctgaygcggtttgaagagattttcgaagagtatctaactaat

SEQ ID NO: 753 - DNA, 192 bp, Streptococcus pneumoniae
  misc_feature (1)..(192): tiling:Spneumo1:WAN024BES; Cluster includes WAN023S7G NC_0 03028.1_2635||||2002186..2002368|-|183 bp|Glimmer 2.02 orf prediction|S.pneumoniae|TIGR4|NC_003028.1|ORF|010
atgaaaatcaaagagcaaactaggaagctagccgcaggttgctcaaagcactgctttgaggttgtagatagaactgacgaagtcagctcaaaacatggttttgaggttgtagatgaaactgacgaagtcagtaaccatacctacggtaaggcgatgctgacgtggtttgaatttgattttcatctaactaat

SEQ ID NO: 754 - DNA, 156 bp, Streptococcus pneumoniae
  misc_feature (1)..(156): tiling:Spneumo1:WAN024BE9; Cluster includes WAN023SGF NC_0 03028.1_158||||124833..124979|-|147 bp|Glimmer 2.02 orf pr ediction|S.pneumoniae|TIGR4|NC_003028.1|ORF|010
atgaaaatcaaagagcaaactaggaagctagccgtaggttgctcaaagcactgctttgaggttgtagatagaactgacgaagtcagtagccatacctacggcaaggcgacgttgacgcggtttgaagagattttcgaagagtatcaactaactaat

SEQ ID NO: 755 - DNA, 264 bp, Streptococcus pneumoniae
  misc_feature (1)..(264): tiling:Spneumo1:WAN024BF4; Cluster includes WAN023JYV 8306 2_623||||357239..357496|+|258 bp|EGAD orf prediction|S.pne umoniae|TIGR4|WAN01UC25|ORF|011
atgaaaatcaaagagcaaactaggaagytagccgcaggttgctcaaaacagtgttttgagattgtggatagaactgacgaagymrrctcaaaacatggttttgaggttgtagatgaaactgacgaagtcagtaaccatacctacggcaaggcgaagctgacgtggtttgaagagattttcgaagagtataaaatgatggggaaggctgggcaactagtctttttcgatgtttatagattagttaggcaagtaagcctarctaat

SEQ ID NO: 756 - DNA, 132 bp, Streptococcus pneumoniae
  misc_feature (1)..(132): tiling:Spneumo1:WAN024F7I; Cluster includes WAN023YKH AL44 9929.1_5||||4722..4844|+|123 bp|Glimmer 2.02 orf predictio n|S.pneumoniae||AL449929.1|ORF|000
atgaaaatcaaagatcaaactaggaaactagccgcaggttgctcaaaacactgttttgaggttgtagatggaactgacgtagtcagtatcctacacatacgacaaggcgatattgacgtgattctaactaat

SEQ ID NO: 757 - DNA, 2562 bp, Streptococcus pneumoniae
  misc_feature (1)..(2562): tiling:Spneumo1:WAN024CP8; Cluster includes WAN024447 spr0 907|phtD|15902951|NP_358501.1|892369..894930|+|2562 bp|Pne umococcal histidine triad protein D precursor|S.pneumoniae |R6|NC_003098.1|ORF|310
atgaaaatcaataaaaaatatctagcaggttcagtggcagtccttgccctaagtgtttgttcctatgaacttggtcgtcaccaagctggtcaggttaagaaagagtctaatcgagtttcttatatagatggtgatcaggctggtcaaaaggcagaaaatttgacaccagatgaagtcagtaagagagaggggatcaacgccgaacaaattgttatcaagattacggatcaaggttatgtgacctctcatggagaccattatcattactataatggcaaggttccttatgatgccatcatcagtgaagaacttctcatgaaagatccgaattatcagttgaaggattcagacattgtcaatgaaatcaagggtggctatgtgattaaggtagacggaaaatactatgtttaccttaaagatgcggcccatgcggacaatattcggacaaaagaagagattaaacgtcagaagcaggaacgcagtcataatcacaactcaagagcagataatgctgttgctgcagccagagcccaaggacgttatacaacggatgatgggtatatcttcaatgcttctgatatcattgaagatactggtgatgcttatatcgttcctcacggcgaccattaccattacattcctaagagtgatttgtctgccagtgaattagctgctgcccaagcctattggaatgggaagcagggatctcgtccttcttcaagttctagtcataatgcaaatccagctcaaccaagattgtcagagaaccacaatctgactgtcactccaacttatcatcaaaatcaaggggaaaacatktcaagccttttacgtgaattgtatgctaaacccttatcagaacgccatgtagaatctgatggccttattttcgacccagcgcaaatcacaagtcgaaccgccaatggtgttgctgtaccgcayggwraccattaycactttatyccttatkmacaamtgtcwsmwttggaaraaraattggctcgtattattccccttcgttatcgttcaaaccattgggtaccagattcaagaccagaacaaccaagtccacaatcgactccggaacctagtccaagtccgcaacctgcaccaaatcctcaaccagctccaagcaatccaattgatgagaaattggtcaaagaagctgttcgaaaagtaggcgatggttatgtctttgaggagaatggagttcctcgttatatcccagccaaggatctttcagcagaaacagcagcaggcattgatagcaaactggccaagcaggaaagtttatctcataagctagsagytaagawmmmtkacmwcymatctagtgatagagaattttacaataaggcttatgacttactagcaagaattcatcaagatttacttgataataaaggtcgacaagttgattttgaggctttggataacctgttggaacgactcaaggatgtctcaagtgataaagtcaagttagtggatgatattcttgccttcttagctccgattcgtcatccagaacgtttaggaaaaccaaatgcgcaaattacctacactgatgatgagattcaagtagccaagttggcaggcaagtacacaacagaagacggttatatctttgatcctcgtgatataaccagtgatgagggggatgcctatgtaactccacatatgacccatagccactggattaaaaaagatagtttgtctgaagctgagagagcggcagcccaggcttatgctaaagagaaaggtttgacccctccttcgacagaccatcaggattcaggaaatactgaggcaaaaggagcagaagctatctacaaccgcgtgaaagcagctaagaaggtgccrcttgatcgtatgccttacaatcttcaatatactgtagaagtcaaaaacggtagtttaatcatacctcattatgaccattaccataacatcaaatttgagtggtttgacgaaggcctttatgaggcacctaaggggtatastcttgaggatcttttggcgactgtcaagtactatgtcgaacatccaaacgaacgtccgcattcagataatggttttggtaacgctagcgaccatgttcaaagaaacaaaaatggtcaagctgataccaatcaaacggaaaaaccaaacgaggagaaacctcagacagaaaaacctgakgaagataaggracatgatgaagtaagtgagccaactcaccctgaatctgatgaaaaagagaatcacgytggtttaaatccttcagcagataatctttataaaccaagcactgatacggaagagacagaggaagaagctgaagatactacagatgaggctgaaattcctcaagtagagcattctgttattaacgctaagatagcagakgcggaggccttgctagaaaaagtaacagatyctagtattagacaaaatgctrtggagacattgactggtctaaaaagtagtcttcttctcggaacgaaagataataacactatttcagcagaagtagatagtctcttggctttgttaaaagaaagtcaaccgrctcctatacagtag

SEQ ID NO: 758 - DNA, 1191 bp, Streptococcus pneumoniae
  misc_feature (1)..(1191): tiling:Spneumo1:WAN024FLD; Cluster includes WAN023OS7 pne7 5_11||||6992..8182|+|1191 bp|Type 35A2 capsule operon, Gli mmer 2.02 orf prediction|S.pneumoniae||WAN01UCEX|ORF|000
atgaaaatcacyatcaaaaggtattcactgccagaaattttaggaytagcagcattagctatattcctactattttcgttattaagtataactctttatgcccaatatatatctattaaagtatattttattgcactttttggcattattttattaatatttctgaaggaacttatatctgagagttataatcttaaatctgtgattggattattcgtgatttttactctctgcttcatcataggtaccgtcacraattacgcatacttttttattttaggtctgtttttgatttatagtcttagaaatctccctttttcagacgtagccaaagtctcctttatcattagtattagtgtattgctcctagtagtattgagtagtaagcttggtattattcctgattatrttgagatttsgcctaccagagttagacactatcttggtttccgatattcattacttccatcaacgcttatgatgaatatcatagctatatcattttttttaaagcaagaaaaygcttcatatccgcgtcttcttgtattgtttttactttcaggatggttatacgtagaaacagattcacgtttgacttttattaattcgtgtttgtttctactggttaatttaataatgaaattgtcaccttccatcattgaaaaggtagggagactrttaaaacttttttcgttcacctactttattaatgcctgtttgagttactggattgcgaagacttacttaaacacctcaaatgttgttttgaatcaattcttttaccaagyggatcaatttcttggaggacgtatttattattctaatcgttcgttatctttatatggatataagttgttaggtcaaaagattgattggattggaaatggcttgagcatacaaggggagcgtagcacagaaacatatttgtatgtggataatttatatatccagattcttcaacattttggtttgatagtttcggtaattattttaagyctattaactataactttagtaaagcttttgaaaaaggggcagatggtattaggaattattttagttattttgagttttcatgctttaattgatgatttgatactaaatctatattataatatmttttgggttttgataggaatgttgatatataaaaartatcaattttatgayaaaaagcagttgacaatagaa

SEQ ID NO: 759 - DNA, 1065 bp, Streptococcus pneumoniae
  misc_feature (1)..(1065): tiling:Spneumo1:WAN024BHL; Cluster includes WAN023ZVH |aro B||AAL30933.1|||456 bp|dehydroquinate synthase|S.pneumonia e||AF436696|ORF|001
atgaaaatcagaatcgatattcctcatcatccttatgatattcagattgaaaaaggttgtctggctcaggctggtcaatggttgcgagaactctggcaaccacaaaaggtagtcattgtgacagataaccatgtagcttctctttatgcagagaaggtcaagctcagcctagaagatgctggttttcaggtagctgtttttgactttttagaaggggaagaaagaaagaatttaaccactgttcagaaagtctatgaattcctagttaagcaggggttgactcgtagcgatggaatcgtggctctcggtggtggtgtcgttggggacttggctggttttgtagcctctacctatatgcggggcattcattttgttcagataccgactagcttaacagcccaggtggattcttctattggtggaaagacgggtgttaacactccatttgccaagaatatggtaggaacttttgcccaaccagatggggttttgattgacccacttgttcttgaaacgcttggaaaaagagagttgattgaagggatgggtgaggttatcaagtatggcttgattgaggatccagaactgtgggctcttttgacggagctggatggttctgttgagagcattctggaacatgcagagaccttgattgaacattcttgtcaggttaagcgcaagatggtggttgaggatgagttggacaatggtgtacgcctttacctcaactttggtcacactattggtcatgctattgaagcaactgccggttatggtaaggtcatgcatggtgaggctgtggccatgggcatggtgcagatttccaaggttgctgagaaaaaaggcctcatgccagctggcataactcagtccattacagatatgtgtcagaaatttggcttgcctgttgactatgaaaactgggatgttgacaagctttatcaggctttgactcatgacaaaaaagcgcgtggcaataccttgaaattggtcttggtaccagagcttggttcagcgaccattcacccagtttctctggaagagatgaaagactacttggtaaaa

SEQ ID NO: 760 - DNA, 1073 bp, Streptococcus pneumoniae
  misc_feature (1)..(1073): tiling:Spneumo1:WAN024BHM; Cluster includes WAN0243V6 spr1 233|aroB|15903276|NP_358826.1|1230347..1231414|-|1068 bp|3 -dehydroquinate synthase|S.pneumoniae|R6|NC_003098.1|ORF|2 20
atgaaaatcagaatcgatattcctcaycatccttatgatattcagattgaaaaaggttgtatggcccaggctggtcagtggttgcgagaactctggcaaccgcaaaaggtagtcattgtgacagataaccatgtagcctctctctatgcagagaaggtcaagctcagyctasaagatgctggttttcaggtagctgtttttgatttcttrgaaggtgaagaaagaaagaatttaactactgttcakaaagtctatgaatttctagtcaagcaaggtctgackcgtagcgatggartcgtkgctcttggtggtggcgttgttggggacctggctggmtttgtagcctctacctatatgcggggtattcactttgttcagattccgactagtttgacagctcaggttgattcttctatcggtggaaagacaggcgttaayacaccatttgctaaaaatatggtggggacckttgcycaaccagatggggttytgattgatccacttgttcttgaaaccctcggaaaaagagagttgattgaagggatgggtgaagttatcaartatggcttgattgaggatccagaactgtgggctctcttgacgggrctgaatggttctgttgagagyattttggaacatgcagagaccttgattgarcattcttgtcaggtgaagcgcaagatggtggttgaagatgagttggacaatggtattcgtctttacctcaattttggccacactattggccatgccatcgaagcgactgccggttatggcaaggtcatgcatggagaggctgttgccatgggaatggtacagatttccaagrttgctgaggaaaaaggcctcatgccagctggcattacccaatctatcacagagatgtgtcagaaattcggyttgcctgttgactatgaaaattgggaagttgrcaagctttatcaggctytkactcatgacaagaaagcgygtggyaacaccttgaaattggtcttggtgccagagcttggttcagcgaccattcayccagtttctctggaagagatgaaagactacttggtaaaataactaat

SEQ ID NO: 761 - DNA, 500 bp, Streptococcus pneumoniae
  misc_feature (1)..(500): tiling:Spneumo1:WAN024D7X; Cluster includes WAN0243RC spr1 371||15903414|NP_358964.1|1353063..1353557|-|495 bp|Conser ved hypothetical protein|S.pneumoniae|R6|NC_003098.1|ORF|1 10
atgaaaatcagacaagcaagattagaagatttggatcggattgttgaacttgaatttgaaaatttttcggtcgaagaagccattcctccttctgtctttgaagcacatttgagagaaattcagacctcttttctggttgctgaaaaagaaggaagaatcatgggttatatcgaaggaccagttggcctgcaccgccatctgcaagaccagtcttttacagaagaaataaaagactatagtcatgagcctggtggttatatctctgtgacctgtctgtctattgccaaggaggcacagggactcggactgggycagaaattgctgacagccttgaaagaagttgctcttgaagatgagagagatggcattaatctaacctgtcatgactatctcatcgcytaytatgaaaaacatggatttgtcaacgaaggccagtcccagtcaacctttgcaggggaaacatggtatgatatggtctgggaaatgaaaaaataactaat

SEQ ID NO: 762 - DNA, 449 bp, Streptococcus pneumoniae
  misc_feature (1)..(449): tiling:Spneumo1:WAN024D6E; Cluster includes WAN0243O5 spr1 486||15903529|NP_359079.1|1462462..1462905|-|444 bp|Conser ved hypothetical protein|S.pneumoniae|R6|NC_003098.1|ORF|1 11
atgaaaatcattatccaacgggttaaaaaagcccaagtgagtatagaaggccagattcagggaaaaatcaatcagggacttttattgctggttggtgttggaccagaggaccaagaggaagatttggactatgctgtgagaaaactggtcaatatgcggattttttcagacgcagaaggcaagatgaacctgtctgtcaaagatattgaaggagaaatcctctctatttctcagtttaccctctttgcggatactaagaraggcaatcgtccagcctttacaggggcagctaaacctgatatggcatcagacttctatgatgctttcaatcaaaaattagcgcaagaagtgcccgttcagacaggyatctttggagcagatatgcaggttgagctggttaataayggacctgttaccattatcctagatactaaaaagagataactaat

SEQ ID NO: 763 - DNA, 636 bp, Streptococcus pneumoniae
  misc_feature (1)..(636): tiling:Spneumo1:WAN024EXZ; Cluster includes WAN0243O1 spr1 490||15903533|NP_359083.1|1466101..1466781|+|681 bp|Conser ved hypothetical protein|S.pneumoniae|R6|NC_003098.1|ORF|1 11
atgaaaatccataaaaccgtgaatcctgttgcctatgaaaatacctattatctagaaggcgaaaagyacctcatcgtcgtcgatcctggtagtcattgggaagccattcgtcagacaatcgagaagatcaacaaaccgatctgtgctattctcttgacccacrcccattatgaccatatcatgagtctggacttggttygcgagacgtttggcaatcctcctgtctatatcgcagagagcgaagccagctggctctacactcctgtcgataatctctccggtctccctcgccacgatgatatggcagatgtggtcacaaaacctgcagaacacacctttgtctttcacgaagaataccaactagaggaatttcrttttaaggttctrccgaccccagggcactctatcggtggtgtttccctagtctttcctgatgctcayctagtcttgacgggagatgctctattccgcgaaactatcggacggaccgaccttccgactggtagcatggagcaactccttcatagtatccagacccaactcttcaccctaccaaactacgatgtctatccaggacatggtycagctactactatcgctcacgaaaaggccttcaatccctttttyytarctaat

SEQ ID NO: 764 - DNA, 647 bp, Streptococcus pneumoniae
  misc_feature (1)..(647): tiling:Spneumo1:WAN024DJS; Cluster includes WAN0244LD spr0 289||15902333|NP_357883.1|291154..291795|-|642 bp|Hypothet ical protein|S.pneumoniae|R6|NC_003098.1|ORF|111
atgaaaatcgcattaatcaatgaaaatagtcaagctagcaagaatcacattatttacgatagtctaaaagaagcgacagataaaaargrctaccaattatttaactatggtatgcgtggagaagaaggagaaagtcaattaacttatgtgcagaacggactaatggctgccatccttttaaatacaaaggcagttgactttgttgttacyggctgtggtacgggtgtaggggctatgcttgctttaaacagcttccctggtgttgtctgtggtctagcagtggacccaactgacgcttacctttattctcaaatcaatggtggtaacgccttgtctatcccttatgccaaaggrtttggctggggggcagaactgaccctcaaattgatgtttgaacgcttatttgctgaagaaatgggcggtggctacccaagagaacgtgtaatccctgaacaacgyaacgctcgtatcttaaacgaggtgaaacaaatcacccacaatgatttgatgaccatccttaaaayaatcgaccaagacttcctcaaagacaccatctctggcaaatayttccaagaatacttctttgaaaactgccaagatgatgaagtygctgcttatttgaaagaagtattagccaagtaactaat

SEQ ID NO: 765 - DNA, 588 bp, Streptococcus pneumoniae
  misc_feature (1)..(588): tiling:Spneumo1:WAN024FNX; Cluster includes WAN0243SQ spr1 321||15903364|NP_358914.1|1307786..1308367|-|582 bp|Conser ved hypothetical protein|S.pneumoniae|R6|NC_003098.1|ORF|2 11
atgaaaatcggaatattggccttgcaaggggcctttgcagaacatgcaaaagtgctagatcaattaggtgtcgagagtgtagaactcagaaatctagatgattttcagcaagatcagagtgacttgtcgggtttgattttgcctggtggtgagtctacaaccatgggcaagctcttacgtgaccagaacatgctacttcccatmcgagaagccattctatctggcttaccagtgtttgggacctgtgcgggsttaattttgctggctaaggaaatcacttctcagaaagagagtcatctaggaactatggatatggtggtcgagcgtaatgctwatgggcgccaattaggaagtttctacacggaagcagaatgtaagggagttggcaagattccaatgacctttatccgtggtccgattatcagtagtgttggtgagggtgtagaaattytagcaayagtgaacaatcaaattgttgcagcccaagaaaaaaatatgttggtaagttcttttcatccagaattgactgatgatgtgcgcttgcaccagtactttatcaatatgtgtaaagaaaaaagtykaactaat

SEQ ID NO: 766 - DNA, 530 bp, Streptococcus pneumoniae
  misc_feature (1)..(530): tiling:Spneumo1:WAN024GBL; Cluster includes WAN02448V spr0 739|flaR|15902783|NP_358333.1|737238..737762|-|525 bp|Modu lates DNA topology|S.pneumoniae|R6|NC_003098.1|ORF|111
atgaaaatcrcaattatcggatattctggttctggtaagtcaactmtagcagaaaagttatctaactactactccattccaaaactgcacatggacacactccaatttcaacctggttggcaagacagtgacyrcgaatggatgttaaycgagataaaaaactttctcaccaagcataaagcttgggtcatcgatggtaattattcttggtgctactaccaagaacgaatgcaagaagctgaccaaatcatctttctcaatttttygccattgacctgtctctttagagcctttaagcgttatcttaaataccgtggaaaagtcagagaaagtatggcggyagattgccctgaacgctttgastgggagtttatcagatggattctttgggatggrcgtmgcaaaactcaaaaagaaaattaccaaaaactttgccaagaatattcacataaagtcactatycttcgaaatcagagagagctagatcaatttctggataagaaaaggaagtcctacaattcataactaat

SEQ ID NO: 767 - DNA, 545 bp, Streptococcus pneumoniae
  misc_feature (1)..(545): tiling:Spneumo1:WAN024EWC; Cluster includes WAN0243FW spr1 784||15903826|NP_359376.1|1758014..1758553|-|540 bp|Conser ved hypothetical protein|S.pneumoniae|R6|NC_003098.1|ORF|1 11
atgaaaatcrtatcaggaatctatgggggacgtcccctyaagacactagaaggcaagacracaagacctacttcggataaggttaggggagccatttttaacatgattggtccctactttgaagkgggacgagtcttggacctttatgcaggtagtggtggtttatctatcgaagcagtatcgcgtggcatgtccagtgctgttttggtggagcgagaccgtaaggctcagaccatcgtggctgaaaatatccagatgaccaaggaagttggaaaatttcaactcctcaaratggatgcagaragggcattggaacaggtatctggggaatttgacctcgttttcttagaccctccctatgccaaggaacaaatcgtagcagatattgaaaaaatggctragagagagcttttttctgaagatgttatggttgtgtgcgagacggataargccgttgaacttccagaagarattgcctgtctgggtatctggaaggaaaagatttatggaattagtaaggtgacagtctatgtcagataactaat

SEQ ID NO: 768 - DNA, 225 bp, Streptococcus pneumoniae
  misc_feature (1)..(225): tiling:Spneumo1:WAN024GAX; Cluster includes WAN023LPI 3145 17_1422||||751807..752031|-|225 bp|EGAD orf prediction|S.p neumoniae|R6|NC_003098.1|ORF|110
atgaaaatctggttttccaaaattagtcttagtttgtgtcttarccgctcccttaagcgcctctttragataagcactcatagcagattcttcattaataatcctgcaattttttcaaaccaagattttcaaactgctttttcacatagtcattcacatccgactctaatttccagtttactaacatattattttctttcattaaaacactgtcgyttcttctag

SEQ ID NO: 769 - DNA, 326 bp, Streptococcus pneumoniae
  misc_feature (1)..(326): tiling:Spneumo1:WAN024DEP; Cluster includes WAN02448S spr0 742||15902786|NP_358336.1|739237..739677|+|441 bp|Hypothet ical protein|S.pneumoniae|R6|NC_003098.1|ORF|121
atgaaaatcttaaaaygttacatattggaactctgttttattttaagttttgctttaccttttataaaaggarccaatgcagataatggtagatgctttgtggaaacctattacggttttacttttttgatggaacatgctattgtaacagctgtctttatytrttcgttyttaattgctttcttactaaaaaacgatggrcgaaatggattgctgcgggtagttattgctttttagtcctacggattgcgacagagggttatttcttccacatgtcactagaagatttgatacgactttggacaagtttggaaatcctgacataa

SEQ ID NO: 770 - DNA, 168 bp, Streptococcus pneumoniae
  misc_feature (1)..(168): tiling:Spneumo1:WAN024CGU; Cluster includes WAN023S5L cont ig_436_1||||466..633|+|168 bp|Glimmer 2.02 orf prediction| S.pneumoniae|670|WAN01UD3T|ORF|000
atgaaaatcttttcctgtcacatgcctcacgctcagactcgccaaagttttgagagcgtggggctttttttgtttgcaattatttccattttggaaacagttggttttattctttcgataagtgttgttgaagaattaaggccacgttggctttctcttcctctgtca

SEQ ID NO: 771 - DNA, 846 bp, Streptococcus pneumoniae
  misc_feature (1)..(846): tiling:Spneumo1:WAN024GND; Cluster includes WAN023ZC7 AL44 9924.1_98||||71590..72105|-|516 bp|Glimmer 2.02 orf predic tion|S.pneumoniae||AL449924.1|ORF|001
atgaaaatgaaaaaaatcaagggtgggacatttatgatgggaacaaattctgaagagggctttttagatgattttgaaggtcctcaagtcgctgttagtgtaaaggatttttccattgcggatactccagttacgaatcaagaatttgctcaatttgtgaaagaaacaggctataaaacactagctgagcgacaagagtggtcttttgtttttatattgttcgttccggaggcagaaagggagggatatcctcatcctgctggggctccgtggtggttacaagtttcgaacgcttgctggaaacatccctacggtgagaacagtaatctagtgggtttagaagaccatccagtagttcatgttgctttagaagatgcattggctttctgtaattggagcggaatgtctttaccgactgaagcacagtgggaatatgctgctagaggaggaagacaatctgaatatccttggggagatactcttttagaaggtggatattatcatgccaatacttggcaaggaagatttccttatgaaaatactgcctyagatggatttataggaacggctcctgtctatgaatttttacctaatgattttggtctatatcaaatgattgggaatgtttgggaatggtgtcgcaatccgagatataccttattagctagttttaatgaagatgactatgagttrccaaaatatgggatacaagatgaggagtatgctatcagaggaggttcctttttatgtcattgttcttattgtaatcgataccgagtagctgctagaaatggatgtatttctacttccactagtagccatctaggttttagatgtttgaaagaa

SEQ ID NO: 772 - DNA, 1155 bp, Streptococcus pneumoniae
  misc_feature (1)..(1155): tiling:Spneumo1:WAN024FXF; Cluster includes WAN0241AA |cps 15bN||AAP76299.1|||1149 bp|putative glycerol-2-phosphotran sferase|S.pneumoniae||AY250187|ORF|001
atgaaaatgrwtrttytacaawaydttaarwttttrgywagadyyrtttttatgbtwwtkatmagtryrgtgttaykrcctktcrrrwtaaarmmkaataagatwstwtttattaatttyaatggkaarggwtatggtgataatcckaaaagtatttgtgagtatcttmgarytacwtayccarakttagatttrgtttggcttrcaaragataaygaagrttttccaratggrgtkagrgttgtwaratatrrrwctytmcaakctttttatgagcaagckagttcgaaggtttgggtwtataatgtaagarmttttgmaagamtactaaaaaaacgmggacagwtttatwttcaaacttggcayggtgcttctagttttaarytgatagaamarcargctgatttaccawtaaawtatrttttagaagcwaagtatgatgcaagagtcacagatataatgatttcagatagcagaaaacaaactgaagaatttcaaaagtatttttggtattcaggagaaatttttgaggtggggatgccgagaaatgatgccttgtttcactataaggaagactacgacaagttaaataatatcagaaaaraactaagcattsattcagatrattatgttattttatatgcccctactttcagagatgatggggatgcatcttatttagatataaattttgaacggcttttgcaawgtrttgaacamgraattaaraagaaatgtaaawtyttaattagrttacaycctaatsactcycatttkwgtaataatatttcwtttaatmakrayataatyratgytacgytwtwytcagatatgcargarcttaywttrttggcagatgttttastsacagattattcttcckcgatatttgattttatgcttttaaacaagccttatgtcagatatgtgaatgatttagaaaaatatgctgagcttaggggrstatcagatacatattaygaattgccggayyckatyattaaaactgctgaagaattgtatgacttactgcctaaaaaaatagaaaattttgattatgattctataaaaaaatatagaaatgaaatactgtgtccaatctttaatggaaccgctagtgaaaatgtaggarggagaataattcaagagttgtga

SEQ ID NO: 773 - DNA, 240 bp, Streptococcus pneumoniae
  misc_feature (1)..(240): tiling:Spneumo1:WAN024BDK; Cluster includes WAN0243UX spr1 242||15903285|NP_358835.1|1242287..1242526|-|240 bp|Hypoth etical protein|S.pneumoniae|R6|NC_003098.1|ORF|110
atgaaaatgtctacttttttcaaaaaaagtttctggccaacctttatgattgttaaccaaactgctatactattccatttaaaggatggcttggatcgacaatacctaacaactgagtccatatattgggtgataggcacctttatatttggaaatattctagtagctgtgtttagtaatatgaaaatttgggataaaaagaaaaatggcagtaagaaaaaatatatcctgaaaaagtaa

SEQ ID NO: 774 - DNA, 485 bp, Streptococcus pneumoniae
  misc_feature (1)..(485): tiling:Spneumo1:WAN024CX4; Cluster includes WAN02438P spr2 044||15904085|NP_359635.1|2035744..2036223|-|480 bp|Conser ved hypothetical protein|S.pneumoniae|R6|NC_003098.1|ORF|1 11
atgaaaattaaagttgtaacagttgggaaactgaaagaaaagtatttaaaagatggtatcgcagagtattcaaaacgaatttctagatttgctaagtttgaaatgattgagttatcagatgaaaaaacaccagataaggccagtgaatcagaaaatcaaaagattttagaaatagaaggtcagagaattttatcaaaaattgctgaccgtgatttcgttattgtgttagccattgaagggaaaactttcttctcagaagaatttagtaagcagttagaagaaacttctataaaaggattttctactcttacttttattattgggggaagtttaggattrtcatcatctgtaaaaaatagagccaatctttctgtcagttttggtcgcctaaccttrccycatcagttaatgagactagttcttgttgaacaaatctatcgcgcttttacgattcagcagggattcccctaccataaatarctaat

SEQ ID NO: 775 - DNA, 1191 bp, Streptococcus pneumoniae
  misc_feature (1)..(1191): tiling:Spneumo1:WAN024CK7; Cluster includes WAN0242Z7 SP03 60||15900289|NP_344893.1|335259..336443|+|1185 bp|UDP-N-ac etylglucosamine 2-epimerase|S.pneumoniae|TIGR4|NC_003028.1 |ORF|010
atgaaaattaagacarattatagtgatattcaytttaaagataatggcaaacttaagttattgattattgtgggaacacgtccagagattatacgtctaagtagtgttatcactaaatgtcgaaagtattttgatgttattttggcacatactggacaaaactatgattacaatttaaatggtattttctttgatratttagggttagacactccggaygtatacatggatgctgttggagatgatcttggtgctactgtagggaatattattaatacttcatacaaattgatgaatcaaattaaaccagatgctttattgattttaggggatacaaattcttgtttatcagctattrctgccaagcgtttacatattccaatttttcatatggaggctggcaatcgctgtaargatgagtgcctrccggaagagactaatcgtcggattgttgatrttatttcagatgttaacttagcatactctgaacatgcacgtaagtatttacatgagtgtggtttacctaaagagcgcacatatgtaacwggttctcctatggcagaagtgytacataaaaatttayctgcyattgagtcttcagatatccatgaacgtttgggattgaaaaaaggaggttatatcttactttcagctcaccgtgaggaaaatattgatacagataaaaattttatytctctctttacrgcaattaatcaattagctgaaaartataatatgccaatcttatattcttgccatcctagatcaaagaaaaggctacaagagagcggttttaaactagataaacgtgtgattcagcatgagccactaggattccatgactataattgtttacagatgaatgcatttgttgtagtatctgattcgggaactttaccggaagaaagtagtttctttactagtcaaggttatccttttccyrctgtatgtattcgtacaagtacagaacgtcctgagtccttagataaggcaggatttattttggcaggcattgatgaaaattctcttcttcaagcagttgaaactgctgttagcttggcasaagatgaggattttggattaccggttccrgattatgttgaggaaaatgtctctactaaagttgttaagataatacagagctatacagggatagtggataaaatagtttggmggaaaagcykaactaat

SEQ ID NO: 776 - DNA, 1047 bp, Streptococcus pneumoniae
  misc_feature (1)..(1047): tiling:Spneumo1:WAN024DJM; Cluster includes WAN0240EE |cps 2G||AAD10176.1|||1014 bp|Cps2G|S.pneumoniae||AF026471|ORF| 000
atgaaaattaattttatccttccatttaagagaatgacaggtggaataagagttatctatacctatgcaaattaccttattgatcaaggacatgatgtggtttgttatgttcctatgattagttatagaggtagaaaccagacaattttttatcggataaaagcttctttggggaatactctaaaaaacgataattggtttgataagaagtttgatttaaaacggataccagtggtatcagaaaaatatatacgtgatgcagatgtagtaattgcgacagcttggcaaacagcctatgatgtcgcaaatttctcatcaagcaaaggtcacaaattttattttattcaagattatgaaatcttcaatggaggaaaggaagaggtggaggcatcgtatcgcttgccacttacattaattactgttacgaggagtttaaaaaaagctattcaaaagtttacagataaaactatttatgttgtatataatggtctttctgacaacgagtatcttcatacagaaaaaattagtcataaggacctcactttgatgatgatgtatcatgaaagtgagcataagaaaagtcaagaggggttacaaattatcgcaaaattaaagaagcgatatcctgatatgaagattaatatatttggacgccgtattccagaaaagttacctgatacctataatgtgttgattaatcctgaaagagaaaaaattttaaagatgtatcaggaatcggatgtctatctttttacaagtgaaattgaagcatggggactacctattgtagaagccatggcaaataaatgtgcagttgttggtagaagtcgaggagctttgttggaactctcaaatggtcagaatactatagttgtagaagagttatcagaaatatataataaggtagtacatttacaagaggatcgattattgttggcacaagttcaaaatgaagggtataaaactgttataccactaaattggagtaactcttgtttagaatttgagaagattatatcaggggtatatattgaaaacggtaaatag

SEQ ID NO: 777 - DNA, 1224 bp, Streptococcus pneumoniae
  misc_feature (1)..(1224): tiling:Spneumo1:WAN024DJF; Cluster includes WAN023P6R pne5 3_34||||20246..21469|+|1224 bp|Type 25F capsule operon, Gl immer 2.02 orf prediction|S.pneumoniae||WAN01UCCQ|ORF|000
atgaaaattactgtagtaggaatgggatatgtcggattgtccttggcggtattattagcgcaacatcatgaagtaacagcgttagatattattgataaaaaaattcaactcatcaatgagaaaaaatctccaattcaagatgagtatattgaacaatactttttagaaaaaaatcttcatttaagcgcaacaacaaacgaagtagaggcgtataaagatgcggaaatgattattatagctgctcctacagattatgatacacacaaaaatttctttgatacatctgccgtagaacaagtaatcgaaaatattatttctatgaataacgaggctttaattgtcattaaatcaactgttcctgttggctatacggagtcgattcgagaaaaatatggtaaaaagaatatactgtttagcccagaatttcttcgtgaagcaaatggattgtatgataatctttatcctaatcgaattatcgtaggtacagatttgaatgatggagcattagtttctaaagcacatgaatttgtgtctttaytacaagaaggtgctctcaaagagaatattgatactttaatcatgggattttctgaagcagaagctgtgaaattattttccaatgcttatctggctttaagagtgtcttattttaatgagttggatacttatgctgaactgaaaggattgaatacgaaagccattattgatggagtaggattggatcctagaattggtcagttttataacaatccatcctttggttatggtggttactgtttaccaaaggatagtaagcaactgttgtcaaattatcatgatgttcctgaaaatattatttcagcaattgtttctagtaatgaaactcgtaaaaaatttattgcagaacgtattcttgaaatagtcggagctaatcatattgatgaatactataatttgaagcaggaaatcgttgtaggtatttatcgtttagtcatgaaaaaaggttcggataattttagacattcttctatccaaggaattataaagagactaaaagcgaatggagtgacattaatgatctatgaaccttcacttccagatggacaattattttttggaagtgaagttgttcatgattttccaaaatttaaagaaaaaagccaccttattgtagccaatcgttttgatgaaacattaatggatgtaaaggataaagtatatacaagggatttgtttggaagagat

SEQ ID NO: 778 - DNA, 1173 bp, Streptococcus pneumoniae
  misc_feature (1)..(1173): tiling:Spneumo1:WAN024FUE; Cluster includes WAN0240PC |cps 14H||CAA59780.1|||1173 bp|putative polysaccharide polymera se|S.pneumoniae||X85787|ORF|000
atgaaaattagaatagaacctcagtattttctttataaatacctttggtttattatcctacttccaaaacagtttatgcaattaatattattctttttaattgctttaactcttttaccaacctatataaaagaaaaacaagtttttaaaatagatacaccgtctttttgtatggtgctatggactattatatattctatatctataatatttaattctctgattgatggattggctgttcaagtgttattttcagatttgagtaaagcatttaattggctaatagcagtatttttttataattattatttgaaaatgccaatcaatattgacaggataaagagatatatgtattataattttactatcttagttgtttttgtcggtttattctatatacaaagaggctccaatgtaattttgtttggaagaagtttgttagactgggacggatttacattagctactagttatggtgtaagatatacaggttttttagaatacgcaactttaaatggtcagttaattctttttttattaccgttaattagattgtttagatttagattttttacacaaactatcatttttgcttttcttctagaggttttggtactaagcaaatctagaatagcgattgttgcaatgcttatatatatagcatttgcagtagtcaatgagattaattcaaacaataaatggcttattggaattttctgtccaattattccttttatgttattttacaattttgaaaaaattaaacagattttttttcaaatgtttagttctagatcgggtagcaatgcgacacgctttagagtgtatgaggaatccctaaaagctattaatggaatggaaatgttacttggcgcaggtgtcagaattccctctacagtagatatattattggggtcacattctatgtatataagttttatttataggacaggagttttaggaagtataataataacagtaatgttttattatctgttttctaaatttttaaaatgtgattcatctgagagactaagaagtattggctatattctagctttgtcagtattttggctttttgaagagttagatccacattattggtgtttaattttatttttttcaacaataagtattttcataaacaatagaaaagaggaaatagttggatga

SEQ ID NO: 779 - DNA, 1170 bp, Streptococcus pneumoniae
  misc_feature (1)..(1170): tiling:Spneumo1:WAN024FUF; Cluster includes WAN023PKP pne3 0_10||||7105..8274|+|1170 bp|Type 15B capsule operon, Glim mer 2.02 orf prediction|S.pneumoniae||WAN01UCIK|ORF|000
atgaaaattagaatagagcctcaatattttctttataagtacctttggcttatcatactgctcccaaaacagtttatgcaattaatattattttctttaattgtcttaattctattaccggtctatataaaagatagacaaatttccaaaatagatgcaccgtctttttatatagttctatgggtcatgatgtattctatatcaataatttggaattttttaattagtggcttacctattcaagtgttgttttcagatttgagtaaggcattcaattggatattagcagtatttttttataattattatttgaaaaatcccattaacgttgacaagataaagaaatatatgttttataatttcgctatattagttattattgttgctttattctatgttcaaagaggcgctaatgtagtattgtttggaagaagcttattaggttgggacggattcgtatcagctaccagttacggagtaagatatgcaggatttttagaatattcaacattaaatgggcagttgattctttttttgttaccgttaattaggttatttaaacttagtttttttacacaagtaactattcttgcttttttgctacaggttttagtattgagtaaatctagaatagctattattgctctgattatatacatagtatttgtagtaatggttcagattacttcaattaataagcggatgattgtagcgttttatccaactatacctcttatattgctttataattgggaaaaaattaaacatatcttttttcaaatgtttaattcaagaacaggtagtaatgtgacacgttttatagtgtacgaagaatctcttaaagctattaatgggctgggaattttacttggagcaggaatcagaacacaatctacagtaggtatattattaggatcacattcaatgtatattagttttatttataggacagggattttaggaagtataataatagtaatactgttctattatttgttttctaaatttttaaaaagtgccccatctggaaagttaatcagtataggctatattttagctttattggtgttttggctttttgaagaattagatccacattattggtgtttaattttatttttttcaacaataagtattttcataaacaatagaaaagaggaaatagttgga

SEQ ID NO: 780 - DNA, 1355 bp, Streptococcus pneumoniae
  misc_feature (1)..(1355): tiling:Spneumo1:WAN024GLV; Cluster includes WAN0244HJ spr0 427|trkA|15902471|NP_358021.1|426922..428271|-|1350 bp|Trk transporter NAD+ binding protein - K+ transport|S.pneumon iae|R6|NC_003098.1|ORF|111
atgaaaattatccttgtcggagggggaaaagttggttttgccctctgtcgctccttggttgcagaaaagcatgatgttttgctgattgagcaagacgaagctgttctcaatcatattgtcagtcgctttgatatcattggtatccttggtaacggggccgattttgccattcttgagcaagccagcgtccaagattgtgatatctttatcgccctgactgagcacgatgaagtcaacatgattgcagcagttctagccaagaaaatgggagctaaagaaactatcgttcgggtgcggaaccctgaatattctaactcttatttcaaggaaaagaatattctcggtttttctcttatcgttaatcctgagctcttggctgcccgcgctatcgcgaatatcattgacttccccaacgccctgtctgtcgaacgctttgctggtggacgcgttagcctcatggaatttgtcgtcaagtccaccagcggtctttgccaaatgcccatttctgattttcgtaaaaaatttggtaatgtcattgtctgtgcgatagagagggakcatcaaattatcattccaagcggtgacatgactgtacrggataaagatagaatctttgtcactggtaaccgtgtcgatatgatactcttccataattattttaaatcacgcgccgtgaagagccttctcatcgttggrgcaggtagaattgcctattatctacttggtattctcaaagatagtcgtatcgatacaaaagtcattgaaatcaatcctgaaatcgccagcttctttagcgagaaattcccaaatctctacatcgttcaaggagatggaaccgcaaaagatatcctgctggaagaaagtgctcaacactatgatgccgttgcgactctaacaggwgtcgatgaggaaaatctgattacatctatgttccttgacagggtaggtgtacagaaaaatattactaaggtcaatcgtaccagtctcctcgagattatcaatgcgcctgatttttcaagtatcatcacacctaaaagcatcgctgtagatacgattatgcactttattcgtggtcgagttaatgcccagtattcagaccttcaagcyatgcaccatctagccaatggccaaatcgaaaccctgcaattccatatcaaggaagccaataaaatgactgccaaacctctttctcaactgaaattgaaaaaaggggttcttattgcagccattattcgaaagggcaagactattttcccaactggggaggatatgttggaagttggagacaagctcmtagtaacaaccttgttgccaaacatcaccaagatttatgacttgatygcgaggtaactaat

SEQ ID NO: 781 - DNA, 1920 bp, Streptococcus pneumoniae
  misc_feature (1)..(1920): tiling:Spneumo1:WAN024CFC; Cluster includes WAN0241M7 |tet (M)||AAR22397.1|||1920 bp|TetM|S.pneumoniae||AF376746|ORF| 001
atgaaaattattaatattggagttttagctcatgttgatgcrggaaaaactaccttaacagaaagcttattatataacagtggagcgattacagaattaggaagcgtggrcaaaggtacaacgaggacggataatacgcttttagaacgtcagagaggaattacaattcagacargaataacctcttttcagtgggaaaatacgaaggtgaacatcatagacacgccaggacatatggatttcttagcagaagtatatcgttcattatcagttttagatggggcaattctactgatttctgcaaaagatggcgtacaagcacaaactcgtatattatttcatgcacttaggaaaatggggattcccacaatcttttttatcaataagattgaccaaaatggaattgatttatcaacggtttatcaggatattaaagagaaactttctgccgaaattgtaatcaaacagaaggtagaactgtatcctaatatgtgtgtgacgaactttaccgaatctgaacaatgggatacggtaatagagggaaacgatgaccttttagagaaatatatgtccggtaaatcattagaagcattggaactcgaacaagaggaaagyataagatttcakaattgttcyctgttccctstttatcayggaagtgcaaaaaryaatatagggattgataaccttatagaagtkattackaataaattttattcatcaacacatcgaggtcmgtctgaactttgcggaaawgttttcaaaattgagtattcggaaaaaagacagcgtcttgcatatatacgtctttatagtggcgtactgcatttgcgagattcggttagaatatcggaaaaggaaaaaataaaaattacagaaatgtatacttcaataaatggtgaattatgtaaaatygataaggcttattccggggaaattgttattttgcagaatgagtttttgaagttaaatagtgttcttggagatacaaagctattgccacagagagagagaattgaaaatcccctccctctgctgcaaacgactgttgaaccgagcaaacctcaacaaagggaaatgttacttgatgcacttttagaaatctccgacagtgacccgcttctgcgatattatgtggattctgcgacacatgaaatcatactttctttcttagggaaagtacaaatggaagtgacttgtgctctgctgcaagaaaagtatcatgtggagatagaaataaaagagcctacagtcatttatatggaaagaccgttaaaaaaagcagagtataccattcacatcgaagttccaccgaatcctttctgggcttccattggtytatctgtakcacmgcttccrttrggragyggartrcagtatgagagctcggtttctcttggatacttaaatcaatcrtttcaaaatgcagttatggargggatacgctatggctgtgaacaaggattgtatggttggaatgtgacggactgtaaaatctgttttaagtatggcttatactatagccctgttagtaccccagcagattttcggatgcttgctcctattgtattggaacaagtcttaaaaaaagctggaacagaattgttagagccatatcttagttttaaaatttatgcgccacaggaatatctttcacgagcatacamcgatgctcctaaatattgtgcgaacatcgtagacactcaattgaaaaataatgaggtcattcttagtggagaaatccctgctcggtgtattcaagaatatcgtagtgatttaactttctttacaaatggacgtagtgtttgtttaacagagttaaaagggtaccatgttactaccggtgaacctgtttgccagccccgtcgtccaaatagtcggatagataaagtacgatatatgttcaataaaataacttag

SEQ ID NO: 782 - DNA, 1958 bp, Streptococcus pneumoniae
  misc_feature (1)..(1958): tiling:Spneumo1:WAN024BHB; Cluster includes WAN02447Q spr0 780|fruA|15902824|NP_358374.1|776031..777983|+|1953 bp|Fru ctose specific-phosphotransferase system IIBC component|S. pneumoniae|R6|NC_003098.1|ORF|111
atgaaaattcaagacctattgagaaaagatgtcatgttgctagatttgcaggcaactgaaaaaacagctgtcatcgacgagatgattaaaaatttgacagascacrgttatgtaacagattttgaaacatttaaagaaggaattttggcgcgtgaagctttgacttctactggtttgggtgatggaatcgcaatgcctcacagcaaaaacgctgctgtcaaagaagcgacagttctatttgctaagtcaaataagggtgttgactacgagagcttggatggacaagcaactgacctcttcttcatgattgcagctccagaaggtgccaatgatactcacttggcagccttggcagaattgtctcaatacttgatgaaagacggttttgcagacaaacttcgtcaagcaacatctgcagaccaagttatcgaactttttgaccaagcttcagaaaaaactgaggaacttgttcaagyacctgctaatgactctggtgactttatcgtagctgttacagcttgtacaacaggtattgcccacacttacatggcccaagaagcccttcaaaaagtagctgctgaaatgggggttggtatcaaggtcgaaaccaacggtgctagcggtgttggaaatcaactaactgcagaagatatccgtaaggctaaagctattatcattgcagcaracaaggccgttgaaatggatcgatttgatggaaaaccattgatcaatcgtccagttgctgacggtatccgtaagacagaagagctaattaacttggctctttcaggagatactgaagtctaccgtgccgctaatggtgcmaaagctgcaacagcctctaacgaaaaacaaagccttggtggtgccttstacaaacacttgatgagtggtgtatctcaaatgttaccattcgttatcggtggtggtatcatgattgcccttgccttcttgattgacggtgctttgrgtgttccaaatgaaaaccttggcaatcttggttcttaccatgagttagcttctatgttcatgaaaattggtggagctgcctttggtttgatgcttccagtctttgcgggttatgttgcctactctattgctgaaaaaccrggtttggtagcaggtttcgtggctggtgctattgccaaagaaggttttgcctttggtaaaattccttatgccgcaggtggtgaagcaacttcaactcttgcaggtgtctcatctggtttcctaggtgcccttgttggtggatttatcgcaggtgccttggttcttgccatcaagaaatacgttaaagttcctcgttcactcgaaggtgctaaatcaatccttctattgccacttcttggaacaatcttgacaggatttgttatgctagctgtgaatatcccaatggcwgcaatcaacactgctatgaatgacttcctaggyggtcttggaggaggttcagctgtccttcttggtatcgtccttggtggaatgatggctgttgacatgggtggaccagttaataaagcagcttatgtctttggtacaggtacgcttgcagcaactgtttcttcaggtggttctgtagccatggcagcagttatggctggaggaatggtgccaccacttgcaatctttgtcgcaactcttcttttcaaagataaatttactaaggaagaacgtaactctggtttgacaaacatcatcatgggcttgtcatttatcactgagggagcgattccatttggtgccgctgacccagctcgtgcgattccaagcttcatccttggttcagcagtagcaggtggactcgttggtcttactggtatyaaactcatggcgccacacggaggaatcttcgttatcgcccttacttcaaatgctctcctttacctcgtttctgtcttggtaggagcaatcgtaagtggtgtggtttatggttacctacgcaaaccacaagcataactaat

SEQ ID NO: 783 - DNA, 210 bp, Streptococcus pneumoniae
  misc_feature (1)..(210): tiling:Spneumo1:WAN024DBW; Cluster includes WAN02443B spr0 939||15902983|NP_358533.1|924630..924839|+|210 bp|Hypothet ical protein|S.pneumoniae|R6|NC_003098.1|ORF|121
atgaaaattcattgtttaaaattaaaaaataaagaattgaataaagaagtagcattctatttaacttcaattattaggcaagctttaaaaaatactgaatataaagatcaaatatctagcacagtattgccagatatcaaaattaaattaccgatagacagtagaggtactccagattggaattacatggaaagatatagagatagataa

SEQ ID NO: 784 - DNA, 441 bp, Streptococcus pneumoniae
  misc_feature (1)..(441): tiling:Spneumo1:WAN024DML; Cluster includes WAN0244SR spr0 023|dut|15902067|NP_357617.1|24776..25219|+|444 bp|Deoxyur idinetriphosphatase|S.pneumoniae|R6|NC_003098.1|ORF|111
atgaaaattcgtggttttgaattggtttcgagttttacagatgaaaatttattgcccaagcgtgagacagcgcatgcgrctggttacgacttaaaggttgctgtgcgtacagttgttgcgccaggagagattgtcttggttccracaggggttaaggcttatatgcagccgactgaggttctctacctctatgatcgttcttcaaatcctcgtaagaagggcttggttttaattaactcagttggrgtcattgatggggattattatggaaatcctggaaatgaagggcatatttttgygcagatgaagaatatcacagaycaagaggttgttcttgaagttggggarcgtattgtccaggctgtttttgctactttcttaattgcagatggagatgcrgctgatggcgttcgaactggtggatttggatcgacagggcac

SEQ ID NO: 785 - DNA, 78 bp, Streptococcus pneumoniae
  misc_feature (1)..(78): tiling:Spneumo1:WAN024DNJ; Cluster includes WAN023SIA NC_0 03098.1_2058||||1596488..1596565|-|78 bp|Glimmer 2.02 orf prediction|S.pneumoniae|R6|NC_003098.1|ORF|111
atgaaaattgaagtattttcaaaagctaattggagtgattttattcatgatgggataaatgatctggccaaaaatgat

SEQ ID NO: 786 - DNA, 1185 bp, Streptococcus pneumoniae
  misc_feature (1)..(1185): tiling:Spneumo1:WAN024DJH; Cluster includes WAN024029 |cap 3A||CAA78147.1|||1185 bp|uridine diphosphate glucose dehyd rogenase|S.pneumoniae||Z12159|ORF|000
atgaaaattgccattgcaggaagtggttatgtaggwctgtctttagcggtgctactagctcagcatcatgaagttaaggtcattgatgttataaaggataaggtagagtcgataaacaatagaaaatctccaattaaggatgaggcgattgagaaatacttagttgaaaaagagttgaatcttgaagcctccttagatcctgcacacgtttataaagacgtggagtatgctattattgctactccgactaattatgatgtagacttaaatcagtttgatacatcttcagttgaagctgctatcaagacttgtatggaatataatgatacttgtacaatcgtaatcaaaagtactattcctgaagggtatactaaagaagtgagggawaagtttaatacagatcgtattattttttctccagagtttctacgtgaatccaaagctttatatgataatttgtatccatctagaattgttgtaggaactgatttggatgattctgagttaacaaaaagagcatggcagtttgcagatctacttaaaggtggagctattaaggaagaggttccgatactggttgttgcttttaatgaagcagaggttgcaaaattgtttagtaacacttacttggcaactcgcgtassttattttaatgagatagatacatatagcgaggtaaaagrrcttaatcccaagacaattattgatattgtttgttatgatcctagaattggatcakactataataaccctagctttggttacggagggtattgcttaccaaaagacacaaagcaattgaaagcaagttttagggatgttcctgaaaatctgattacagctgtggtgcaatctaataaaacaagaaaagattatatagctggagctattctagctaaacaacctagtgttgtaggtatttatagattaattatgaaatctgattctgataattttcgttctagtgctgttaagggagttatggaacgtttggacaattatggtaaagaaattgttatttacgaacctactattgagtgtgatacttttatgggatacagagtaattaaatctttagatgaatttaagaatatttctgacattgttgtagcgaatcgtatgaacgatgatttaagggatatacaagaaaaactctatacacgcgatttatttggcagagaataa

SEQ ID NO: 787 - DNA, 1218 bp, Streptococcus pneumoniae
  misc_feature (1)..(1218): tiling:Spneumo1:WAN024DJG; Cluster includes WAN023OVX pne6 9_18||||13640..14857|+|1218 bp|Type 31(1) capsule operon, Glimmer 2.02 orf prediction|S.pneumoniae||WAN01UCDA|ORF|00 0
atgaaaattgcrgttgcaggtacaggmtatgtaggactrtctattgcagttttaatggctcarcatcatgaggtggtagctgttgatattatttctgaaaaggtcaatctgattaataatggaaaatctccaatwaaggatgactatattgaagaatayttagcawcaaagcccctcaacttagtggcaacattggatacaaatmtagcgtaccaaaatgcagattttgtwattatagcagctccaacaaattatgattcagaaaagaayttttttgatacatctgctgtagaakcagttattgaaacggtgttagagactaatcctaacgctgtaatggtrattaaaagtactgttcctgtaggctatactcaatcgrttcgtaataaatataaaacaartaatattttatttagtccagaatttttacgtgagtcaaaggctttatatgataatttatatcctagccgtataattgttgggcttgatatggacgatgcatatttaaaggagagagcmgaaacttttgcagaactrctacaagaaggagctrttaaagagrmtatagaaattctttacatgggatttacagaggcagaagcagtcaaactttttgcaaatacatatttagccttrcgwgtttcttatttcaatgagttggatacttatgcagaagttaaagggytagatacyaaagctattattgaaggtrttggcttagatccacgtatcggaarccaatataayaatccttcttttggatatgggggatattgccttccaaaagatagtaaacaactattggcaaactataaagatgttccacagaatatgataacagctatcgttgagagcaaycgtactagaaaagattttattgcagagcagattttgaaayttgcaggagtttcaartaatggggaaattyayccaaaagatgtaataataggmctttatcggttractatgaagagyaaytccgataattttcgtcaatcttctattcaaggtgttatgaaacgattgaaggcagaaggmrcaaatgtyataatttatgagccaactcttagtgatraygagacrtttttkggtagtaagattgtaaatgatttggarcactttaaatcaattagtaatgttatcgtggcaaatcgttatgatgatttgcttaaagatgtgagtgacaagrtttatagtcgtgatatttttaagagagat

SEQ ID NO: 788 - DNA, 855 bp, Streptococcus pneumoniae
  misc_feature (1)..(855): tiling:Spneumo1:WAN024CU5; Cluster includes WAN0243VC spr1 227|pheA|15903270|NP_358820.1|1225020..1225868|-|849 bp|Pr ephenate dehydratase|S.pneumoniae|R6|NC_003098.1|ORF|111
atgaaaattgcttatctaggtcccaarggatcattttcacaccacgttgtgcagayagcttttcctcatgaggaattgcaggcttttgcyaacattacagatgtcatcaaggcttatgagcaaggattagtgractattctgtggtgccagttgaaaattctattgagggtagtgttcatgaaaccttggactatctttttcatcaggctcacatccaagcagtagcagaaatcgttcagcctattcatcagcagttgatggtggttccaggccatactaagattgaaaagattttttcacatccacaggccttggctcaaggaaagaaattcatcgatgaacaatatccagaggctcaaatcgaggtaacagctagtacagcttatgcggcccgttttatttccgaacatccagaycagccctttgcagcarttgcacctagaagttctgctgaagaatatggattggaactgattgccgaggatattcaggaaatggaagccaatttcacacgtttctggsttctaggagctgaaaagcctagtattcccttgcaagcacaaactgaaaagatgagtttggccttgacattacctgacaaccttccaggtgcactttataaggccctgtcgacctttgcttggcgaggaattgacttgacaaaaattgaaaktygtccactcaagacagcactgggtgaatactttttcattatcgatgtggattataccgataaggacttggtccactttgcccaaaaagaattagaagcgattggaatccagtataaaattytgggtgcctatcctatttatccaatatcagaccatggaaaggagagaagaykaactaat

SEQ ID NO: 789 - DNA, 440 bp, Streptococcus pneumoniae
  misc_feature (1)..(440): tiling:Spneumo1:WAN024C5V; Cluster includes WAN0244LB spr0 291|PTS-EII|15902335|NP_357885.1|292900..293334|+|435 bp|P hosphotransferase system sugar-specific EII component|S.pn eumoniae|R6|NC_003098.1|ORF|111
atgaaaattgtacttgtagggcatggacattttgctacagggatttatagttctttacaattgattgcaggyaatcaagaaaatgtggaggcrattgactttgtggaaggaatgtcagcagatgaactcaagcaaaaaatcttacttgcaatttcaaatgaagaagaagttttaatcctaagtgatctcttgggaggawcgccattcaaggtttcttctaccataatgggagaaaatccagccaaracaatgaatgttctytcgggtttgaacttagccatgttaatggaagcagtctttgctagaatggctcatagctttgatgargttgttaataaatcagtagtggcggcccagggcggagtcgtaaatggtaaagaattgttttcaacggatgcagaggaagaggaagaagatttcgaatcgggtatttaactaat

SEQ ID NO: 790 - DNA, 159 bp, Streptococcus pneumoniae
  misc_feature (1)..(159): tiling:Spneumo1:WAN024D8Z; Cluster includes WAN0242FH SP11 33||15900999|NP_345603.1|1066164..1066316|+|153 bp|hypothe tical protein|S.pneumoniae|TIGR4|NC_003028.1|ORF|020
atgaaaattgttactttcaaaccaactaaacaaatagacgatgggttttatctgccaggtattgacattctatttgtctcagacaaagcagatgccaaggataaagaagatgtaattttatttctttcaagaaatgggttaaacaagtctykaactaat

SEQ ID NO: 791 - DNA, 105 bp, Streptococcus pneumoniae
  misc_feature (1)..(105): tiling:Spneumo1:WAN024DQB; Cluster includes WAN0242OP SP07 73||15900667|NP_345271.1|731335..731433|+|99 bp|hypothetic al protein|S.pneumoniae|TIGR4|NC_003028.1|ORF|121
atgaaaatttattttttgaaaaagtgggaaaacattgattctaagcgaattttgaatcatattcgaatgggagtttttaaaatcatgtttcagtggctaactaat

SEQ ID NO: 792 - DNA, 765 bp, Streptococcus pneumoniae
  misc_feature (1)..(765): tiling:Spneumo1:WAN024FN4; Cluster includes WAN023P72 pne5 3_23||||13526..14290|+|765 bp|Type 25F capsule operon, Gli mmer 2.02 orf prediction|S.pneumoniae||WAN01UCCQ|ORF|000
atgaaaatttcaattattatgggcattcataatggtgaaaagcgctttgaaacagctgttcaaagtattttcaatcaaacttatgataattgggaatttattatttgtgatgatgcttccacagataaaacgtttgaaaagttacaaggattatatggacaggattcacgttttatcttattaaaaaatgaaaaaaatgtaggtctttccgcgacattaaaccgttgcattgaagcaagtagtggagaatttattgctagaatggatgatgatgatatttgttatcccgagcgctttgaaagacaagtcgactatttgttccatcatccagagattgattttgtttcttcatctattgatatttttgatggagaagtagttgtaggtacacggattttacttgattttcctagtaaaaaggatttgatttggaatagcccctttgttcatcctgttaccatgtttcgtagagatgccttgcttgaagttggcggttatagagtttctccagaaactgttcgtgggcaagattatgatttgtttatgmgactatattcaygcgagaaaaaaggtggaaatattttagaaccactatttcgctatacgattgatcaaaatacgatgaagcgacgtacgtttaaagctcgaattggggaaatgattattcgctataaaggttatcgtgcgatgaaagttccattttataattatgtttttatatttaaaccattagtagctcatctagtaacactcgttaaaaggaga

SEQ ID NO: 793 - DNA, 1185 bp, Streptococcus pneumoniae
  misc_feature (1)..(1185): tiling:Spneumo1:WAN024FPF; Cluster includes WAN023POM pne2 4_14||||11631..12815|+|1185 bp|Type 12B capsule operon, Gl immer 2.02 orf prediction|S.pneumoniae||WAN01UCJ2|ORF|000
atgaaaatttgcattgtttcagtcggagtgrgcggactaccgattccagctgtaaaagggggagcagtagaaaatctcattgataattatttaagttacaatgagaaatataatcatgatgaaattacggtcgttagttgtgaccataaggaggcgcgtgaggcttcaaaaaaatacaagtatgcccaatttgtctatatagatattcattcacttaaatataaaataaacaaaacaatacgttatrccatyaataaatattcacctttcttcgtagggaacgcttatatcagtcaattgccagacttgtctggttttgatacagttttgattgaaaatcgccctgaatacggttattatattcgtaaaaagtttaaaggaaatcttgttttacatcttcacaatgatttattaatggacaatgagtattctgtagattatagcgtttatgataaaattatcacartatctgactatattaggrataggtcagaagtagtaaygtcaggtgttccgatacagactgtctataatggtattgacacagaacyttttttgcagaatttctctgaarttgatttatcagatcttaaaaatcagttggaaattttgtcggatgattttgtgattgttttttttggacgtatcaacaaaaataaaggtatcaaagaactgcttgaagccttcttgttgmtaccaaagaatttgaatataaaattactagctgttggtagttctatatttggtcagacggagttggatactttcacaacagagmtacggcaattggcaaaacaagcatcagataaagttgtttttacaggctatgttaattacaaagacattcctaagtatcatcatattgcagattgcattgttrttccatctatttgggaggaaccagcgrstttgacggtctgtgaagctttgatatcagggaaatatgttattacaacagatrctggagggayaccagagmttgtagctggcagtgawgcccttgtggtagcaaatgatgagtgtatagttgaacacctcaaaacagccctattgagtgtctaccaaaaagggaaatgctcttcggttattacttctaatagagatagaggarcctatttttctattgaaaaatatggaagaracttacgraaagagctcacacaaaatgaaagaatyattaacata

SEQ ID NO: 794 - DNA, 663 bp, Streptococcus pneumoniae
  misc_feature (1)..(663): tiling:Spneumo1:WAN024DH4; Cluster includes WAN0244EQ spr0 528|vncR|15902572|NP_358122.1|527330..527986|+|657 bp|VncR , response regulator|S.pneumoniae|R6|NC_003098.1|ORF|111
atgaaaattttaattgtagaagatgaagagatgatccgtgagggggtcagtgattatttgacggattgtggctatgaaactattgaggcagcggacggtcaggaagctctggagcaattttctagctatgaggtggccytggttttactggatatccagatgcccaagctyaacggcttagaagtyctagctgagattcgtaaaaccagtcaggttcctgtcttgatgttgacagcttttcargatgaggaatacaagatgagtgcctttgcytctttggcagatggctatctggaaaaacctttctcyctctccctyttaaaagtgagggtggacgcgattttcaagcgctactacgatacaggacgaatcttttcttacaaggataccaaggtggactttgaaagctacagtgcaagcmtcgcaggtcaagaagtgcctatcaatgccaaagagttggaaattctggactatctagtgaaaaatgaaggccgggccttgactcgrtctcagattatcgatgccgtctggaaagcgacagatgaggttccctttgaccgtgttattgatgtttatatcmagraattgcggaaaaagctagacttggattgtatcctcactgtgcgcaatgttggttataaattggagcgaaaaykaactaat

SEQ ID NO: 795 - DNA, 690 bp, Streptococcus pneumoniae
  misc_feature (1)..(690): tiling:Spneumo1:WAN024CJT; Cluster includes WAN02439R-5 sp r2006|cbpD|15904047|NP_359597.1|1999012..2000358|-|1347 bp |Choline binding protein D|S.pneumoniae|R6|NC_003098.1|ORF |212
atgaaaattttaccgtttatagcaagaggaacaagttattacttgaagatgtcagttaaaaagcttgttccttttttagtagtaggattgatgctagcagctggtgatagtgtctatgcctattccagaggaaatggatcgattgcgcgtggggatgattatcctgcttattataaaaatgggagccaggagattgatcagtggcgcatgtattctcgtcagtgtacttcttttgtagcctttcgtttgagtaatgtcaatggttttgaaattccggcagcttatggaaatgcgaatgaatggggacatcgtgctcgtcgggaaggttatcgtgtagataatacaccgacgattggttccattacttggtctactgcaggaacttatggtcatgttgcctgggtgtcaaatgtaatgggagatcagattgagattgaggaatataactatggttatacagaatcctataataaacgarttataaaagcaaacacgatgacaggatttattcattttaaagatttggatrgtggcagtgttgggaatagtcaatcctcarcttcaacaggcggaactcattattttaagaccaagtctgctatyaaaactgaacccctagttagtgcaactgtgattgattactattatcctggagagaaggttcattatgatcaaattctcgaaaaagac

SEQ ID NO: 796 - DNA, 638 bp, Streptococcus pneumoniae
  misc_feature (1)..(638): tiling:Spneumo1:WAN024C3Q; Cluster includes WAN0244JU spr0 344|rr03|15902388|NP_357938.1|348677..349309|+|633 bp|Resp onse regulator|S.pneumoniae|R6|NC_003098.1|ORF|111
atgaaaattttactagtagatgaccatgaaatggtccgwttgggyttgaaaagctactttgacctccaagacgatgtagaagttgtgggtgaggcgtccaacgggtctcaagggattgacttggccttggaactgcgtccagatgtcattgtcatggatattgtcatgcctgagatgaatggrattgacgcgaccttagcaatccttaaagaatggcctgaagccaagattttgattgtgacctcttatttggacaatgaaaaaatcatgccagtcttagatgctggtgccaaaggctatatgctcaagacttctagtgcagatgaattgcttcatgccgtcagtaaggtagctgctggcgagctggccattgagcaagaggttagcaagaaggttgaataccaccgcaatcatatggaacttcatgaagaattgactgcgcgtgagcgagatgttctccaactcatcgccaagggctacgaaaatcagcgcatcgcagatgacctctttatctctctcaagacggtcaagacccacgtgtccaayattcttgccaaacttgaagtyagcgatcgtacccaggcggctgtctatgcctttcagcaccatttggtsgggcawgaggagttttarctaat

SEQ ID NO: 797 - DNA, 1439 bp, Streptococcus pneumoniae
  misc_feature (1)..(1439): tiling:Spneumo1:WAN024G5E; Cluster includes WAN02440Q spr1 032|glgA|15903076|NP_358626.1|1014454..1015887|+|1434 bp|G lycogen synthase|S.pneumoniae|R6|NC_003098.1|ORF|221
atgaaaattttatttgtagcagcagagggtgcaccyttttcaaaaacaggtggtttgggagacgtcattggcgctcttccaaaatcactggtaaaagctgggcacgaagttgcagtgattttaccctactatgatatggtagaggctaaatttggaaatcagattgaagatgtgcttcattttgaggtgagcgttggttggcgyagacagtattgtggaattaagaaaacagtattaaatggtgtaaccttctactttattgacaatcaatattatttcttccgtggtcatgtttacggtgattttgatgacggagaacgctttgcctttttccaactggctgccattgaggctatggaaaggattgmctttattcctgatcttctccatgttcatgactaccatacagctatgattcctttcttgttgaaggaaaaatacygttggattcaagcctatgaggacattgaaacagttttaaccattcataatttagaattccaaggacaattttcagaaggaatgttgggtgatttgtttggagttggcyttgaacgttacgctgatggcacccttcgatggaacaactgtctgaactggatgaaggcaggtattctctatgcgaaccgtgtttcaacygtttcacctagctatgctcatgaaattatgactagtcagtttggatgtaatttggatcakattcttaaaatggagtctggtaaagtatctggtatcgtgaatgggattgatgctgatctttataatcctcagacggatgctcttttagactatcatttcaatcaggaagatttgtctgggaaagccaaaaataaggcaaaattgcaagaaagagttggcttgcctgttagarcwkacsttccactggtgggaattgtttctcgtttgacacgtcaaaaaggttttgatgtggtggtcgaaagtcttcaccatatcttgcaagaagatgttcagattgttcttttgggaactggcgatccagcctttgaaggagctttctcatggtttgctcagatttacccagrcaagctatcarcaaatatcacttttgatgtcaaacttgctcaggaaatctacgctgcttgtgacctcttcctcatgccaagtcgttttgaaccgtgtggyttgtctcaaatgatggctatgcgttatggaaccttgccattggtccatgaagttggaggcttgcgagatacagttygcgctttcaatccaatcgaaggaagcggtactggctttagctttgacaatctatctccttattggttaaattggactttccaaacagcattggacttgtatagaaaccatccagacatttggagaaacctacaaaaacaagctatggagagtgacttctcatgggatacagcctgcaagtcataccttgacttgtaycatagtttagttaattaactaat

SEQ ID NO: 798 - DNA, 108 bp, Streptococcus pneumoniae
  misc_feature (1)..(108): tiling:Spneumo1:WAN024CLZ; Cluster includes WAN0242NJ SP08 21||15900709|NP_345313.1|772645..772746|+|102 bp|hypotheti cal protein|S.pneumoniae|TIGR4|NC_003028.1|ORF|020
atgaaaatttttgtgaatttggactataaaaaaatcctatttgtgagacaaaaaggattttacttagacatgcagggacaatcccagcttgttttagatctarctaat

SEQ ID NO: 799 - DNA, 198 bp, Streptococcus pneumoniae
  misc_feature (1)..(198): tiling:Spneumo1:WAN024BF6; Cluster includes WAN023SHJ NC_0 03098.1_2461||||1911498..1911674|-|177 bp|Glimmer 2.02 orf prediction|S.pneumoniae|R6|NC_003098.1|ORF|101
atgaaaatyaaagagcaaactaggaagctagccgcaggttgctcaaaacactgttttgargttrtggatagaactgacgaagtcagctcaaaacatggttttgaggttgtagatgaaactgacgaagtcagtaaccatacmtacggyraggygamgctgacgtggtttgaagagattttmgaagagtatctaactaat

SEQ ID NO: 800 - DNA, 393 bp, Streptococcus pneumoniae
  misc_feature (1)..(393): tiling:Spneumo1:WAN024D5Q; Cluster includes WAN0243ME spr1 549||15903592|NP_359142.1|1531451..1531843|-|393 bp|Hypoth etical protein|S.pneumoniae|R6|NC_003098.1|ORF|101
atgaaaaytaagaaattattgaaaatggttattcctgttttaatgataagtgctgttggaactactttcgtagaagcaaatcagataggtgcttttagtaattttgttattactaccagttataagagaacaggttatttgactaaagaaaatgaaggtgcggaatatatcatgaacttaaatccttgtagaaatttacatcccatgactgttaagcatcgtatagtaaattctaatggagaagctcgtagtggagaatcgttaacaacctgtggtactcgttcaactcatggtaattgggcaacggttggctatgtttatgcagcagatatggcaagacaaaattggtgggatttatcagctgccatttcaggtagttggtcaccaaattaa

SEQ ID NO: 801 - DNA, 582 bp, Streptococcus pneumoniae
  misc_feature (1)..(582): tiling:Spneumo1:WAN024BEH; Cluster includes WAN0241Y6 SP17 93||15901622|NP_346226.1|1708730..1709305|-|576 bp|hypothe tical protein|S.pneumoniae|TIGR4|NC_003028.1|ORF|010
atgaaacaaaaacaaccgattgtttctagaacgaaacaacatacatttgaagagcttattcaagaccaaaagttagaaagattggctaagttgtcgcccgatttggttggaaggtatggttttactgctagctgtgcgtcttcatttgcgaacttgattaaagaagcgtatgggggtaaaaatctaaacgtagtttatgcgagtcggatgttggctctctggaatattgcttgcagttgttatcataaggctgatgggtattctttagcagatgcgctttttagtgataaaaaaatttgtctagattcttactattaccacaagaatacctctaataccataactagtgatgtgataaaagatgtttacgataattataataattatatggttttaactcgagaagcgacacctgaatacatttatgttgtacaaactgaaatgccaaaagattcagatttatatttttatattagagaagttctgggattatcgtttagtaccatgcattatgcatttttagtcaaggttcttgcaggagcgcttgctagaaaatataagccatatcgaaatykaactaat

SEQ ID NO: 802 - DNA, 294 bp, Streptococcus pneumoniae
  misc_feature (1)..(294): tiling:Spneumo1:WAN024GHR; Cluster includes WAN023YCA AL44 9931.1_21||||16246..16539|+|294 bp|Glimmer 2.02 orf predic tion|S.pneumoniae||AL449931.1|ORF|001
atgaaacaaacagttaaaaarttagctcttgtagcgagcattgcagcaacattaggtggargtgtakcagttgcctctgcagycgttcaatacccagaaggtggtgtttggacttatggttcaggtaacggtggtgcttactcaaactactatcacccttcaaaataccatagttcaacagttgttagcagaaaaactggttcatctgacaagggatatgctggtgctggagggacttctcgtgcrtggattcgtacttcttggggagagaaagttgcattctactataatgtt

SEQ ID NO: 803 - DNA, 1044 bp, Streptococcus pneumoniae
  misc_feature (1)..(1044): tiling:Spneumo1:WAN024B3B; Cluster includes WAN0240LK |ddl ||CAB64535.1|||141 bp|D-alanine--D-alanine ligase|S.pneumo niae||AJ388006|ORF|000
atgaaacaaacgattattcttttatatggtggacggagtgcagagcgtgaagtctctgtcctttcagctgagagtgtcatgcgtgcggtcaattacgatcgtttcacagtcaagactttctttatcagccagtcaggtgactttatcaaaacgcaggaatttagtcagactccaggtcaagaggaccgtctcatgaccaatgcgaccattgattgggataagcaggttgcaccaagtgccatttacgaagaaggcgcagtggtctttccagttcttcatggtccgatgggagaagatggctctgttcaaggattcttggaagttttgaaaatgccttatgtcggctgcaacatcttgtcatccagtcttgccatggataaaatcacgactaaacgtgttttggaatctgctggtattgcccaagttccttatgtggccatcgttgaaggggatgatttgactgctaaaattgctgaagtggaagaaaaattgacttatccagtcttcaccaaaccatcaaacatgggttcaagtgtcggtatttctaagtctgaaaatcaagaagaactccgtcaagctttgaaacttgccttccaatatgacagccgtgtcttggttgagcaaggggtgaatgcccgtgaaatcgaggttggtctcttgggcaactacgatgtcaagagcacgctgccaggagaagttgtcaaagatgttgccttttatgactacgatgccaagtatatcgataacaagattaccatggatattccggcaaagatcagtgatgatgtggtasctatcatgcgtcaaaatgcaraaacggccttccgtgccattggaggcctcggtctatctcgttgcratttcttctatacagataagggtgaratttycctaaacragcttaataccatgccaggtttyacccagtggtcwatgtayccactdctttgggayaatatgrgaatcagctayccagamytaatcgagcgwttggttgaycttgccaaggaaagttttracaagckcgaagcgcatttgctataa

SEQ ID NO: 804 - DNA, 1044 bp, Streptococcus pneumoniae
  misc_feature (1)..(1044): tiling:Spneumo1:WAN024B3A; Cluster includes WAN0241M0 |ddl A||CAE75669.1|||441 bp|D-alanine:D-alanine ligase|S.pneumo niae||AJ608940|ORF|000
atgaaacaaacgattattcttttatatggtggacggagtgcggaacgcgaagtctctgtcctttcagctgaaagtgtcatgcgtgcggtcaattacaaccgtttcacagttaagactttctttatcagtcagtcaggtgattttattaaaacgcaagaatttagtcagactccggggcaagaggatcgtctcatgaccaatgcgaccattgattgggataagcaagttgtaccaagtgctatttacgaagaaggtgcagtggtctttccagtccttcacggtccgatgggagaagatggctctgttcaaggattcttagaagttttgaaaatgccttatgttggttgcaacatcttgtcatccagtcttgccatggataaaatcacgactaagcgtgttctggaatctgctggtattgctcaagttccttatgtggccatcgttgaaggggatgatgtgactgctaaaatygcygaagtkgaagaaaaattgrcttatccagtcttcactaagccgtcaaacatggggtctagtgtcggtatttctaagtctgaaaatcaagaagaactccgtcargctttgraacttgccttccratatgacagtcgtgtcttggtagagcaaggrgtraatgcccgtgaaatcgaggttggtctactgggcaactacgatgtcaaragcacscttccaggagaagtagtcaaggatgttgccttttatgactacgatgccaagtatattgacaacaagattaccatggacatyccagctaaaatcagtgatgatgtggtagctgtcatgcgtcaraatgcagaaacrgccttycgtgcsattggwggcctcggtctmtctcgttgcgatttcttctatacagayaagggagagattttcctmaacgagctyaataccatgccaggyttyacccagtggtctatgtayccactactttgggataatatgggaatcagctacycagacctaatcgagcatttggttgmccttgctaagsaaagttttgayaagcgcgaagcgcatttgctataa

SEQ ID NO: 805 - DNA, 1049 bp, Streptococcus pneumoniae
  misc_feature (1)..(1049): tiling:Spneumo1:WAN024B3C; Cluster includes WAN0243NC spr1 515|ddl|15903558|NP_359108.1|1492390..1493433|-|1044 bp|D- alanine-D-alanine ligase|S.pneumoniae|R6|NC_003098.1|ORF|2 21
atgaaacaaacgattattcttttatatggtggacggagtgcggaacgcgaagtctctgtcctttcagctgagagtgtcatgcgtgcggtcrattacgaccgtttcacagtyaagactttctttatcagtcagtcaggtgaytytatcaaaacrcaggaatttagtcakrctccrggkcaagargaccgtctcatgaccaatgmraccattgattgggataagaargttgcaccaagtgcyatytacgaagaagrkgcagtggtcttyccagtycttcacggkccratgggagaagatggytctgttcaaggattcttggaagttttgaaaatgccktaygtyggytgcaayatyttgtcatcmagtcttgccatggataaaatcacgactaagcgtgttytggaatctrctggtattgcccaagttccttatgtggcyatcgttgaaggcgatgatgtgactgctaaaathgctgaagtkgaagaaaaattgryttatccagtcttcrywaarccrtcaaacatgggktswagtgtcggtatttctargkctgaaaaycaagargaacthcgtcmagcyttrraacttgccttycratatgayagycgtgtcttggtwgagcaaggagtgaatgcccgtgaaattgaggttggyctcttgggtaactmcgatgtcaagagcacgctrccwggagaagttgtcaaggaygttgccttttatgaytacgatgccaagtatattgayaacaakrttactatggatattcctrccaaaatcagtgatgatgtggtrrctgtcatgcgtcaaaatgcagaaryagccttccgtgccattggtggccttggtctatctcgttgcratttcttctatacagatargggagagatttttctcaacgagctcaatacyatgccaggtttyacccagtggtctatgtwyccactactttgggahaatatgggratyagytacccaramctaatcgarcgwttggtkgaycttgccaaggaaagytttgacaagcgcgaagcgcatttrmtataactaat

SEQ ID NO: 806 - DNA, 1859 bp, Streptococcus pneumoniae
  misc_feature (1)..(1859): tiling:Spneumo1:WAN024F64; Cluster includes WAN0244MN spr0 243|proS|15902287|NP_357837.1|236774..238627|+|1854 bp|Pro lyl-tRNA synthetase|S.pneumoniae|R6|NC_003098.1|ORF|221
atgaaacaaagtaaaatgcctatcccaacgcttcgcgaaatgccaagcgatgctcaagttatcagccatgctcttatgttgcgtgctggttatgttcgccaagtttcagcaggtgtttattcttatctaccacttgccaaccgtgtgattgaaaaagctaaaaacatcatgcgccaagaattcgaaaagattggtgctgttgagatgttggctccarcccttcttagtgcagaattgtggcgtgaatcaggtcgttaygaaacytayggtgaagacctttacaaactaaaaaaccgtgaaaaatcagactttatcttaggtccaactcacgaagaaacctttacagctattgtccgtgattctgttaaatcttacaagcaattgccactcaacctttatcaaattcagcccaagtatcgtgatgaaaaacgcccrcgtaatggacttcttcgtacacgtgagtttatcatgaargatgcttatagtttccacgctaactatgatagtttggatagtgtttatgatgagtacaaagcagcctatgagcgtattttcactcgtagtggtttagacttcaaggctattattggtgacggtggagccatgggtggtaaggatagccaagaatttatggccattacatctgctcgtacagaccttgaccgctgggttgtcttggacaagtcagttgyctcatttgacgaaattcctgyagaagtgcaagaagaaatcaaggcagaattgctcaaatggatagtctctggtgaagataccattgcttactcaagtgagtctagctatgcagctaacttagaaatggcaacaaacgagtacaaaccaagcaaccgtgttgtcgctgaagaagaagttactcgtgttgcaacgccagatgttaaatcaattgatgaagttgcagcyttcctcaatgttccagaagaacaaacgattaaaaccctcttctacattgcagatggtgagcttgttgcagcccttctagttggaaatgaccaactcaacgaagtcaagttgaaaaaycacttrggagcagatttctttgacgttgctagcgaagaagaagtggcgaatgttgttcaagcaggatttggttcacttggaccagttggtttgccagagaatattaaaattattgcagatcgtaaggtrcaagatgttcgcaatgcagttgtcggtgctaacgaagatgrctaccacttgactggtgtgaacccaggccgtgattttactkcagaatatgtggatatccgtgaagttcgtgagggtgaaatttccccagatggacaaggtgtccttaaytttgcgcgtggtattgagatcggtcatattttcaaactcggaactcgctaytcagcaagcatgggagcagatgtcttggatgaaaatggtcgtgctgtgccaatcatcatgggatgttacggtatcggtgtcagccgtcttctttcagcagtgatggagcaacacgctcgcctctttgttaacaaaacgccaaaaggtgaataccgttacgcttggggaatcaatttccctaaagaattggcaccatttgatgtgcatttgattactgtcaatgtcaaggatgaagaagcgcaagccttgacagaaaaacttgaagcaagcttgatgggagctggttatgaagtcttgacagatgaccgtaacgaacgtgtcggtgttaaatttagcgatagtgacttgattggtcttccaatccgtatcactgttggtaaaaaagcggccgatggcattgtagaagttaagatcaaggcaactggtgacaccattgaggttcatgcagataacgtgcttgaaacgcttgaaatcctaagcaagaaataactaat

SEQ ID NO: 807 - DNA, 315 bp, Streptococcus pneumoniae
  misc_feature (1)..(315): tiling:Spneumo1:WAN024CZT; Cluster includes WAN0243EH spr1 835|ptcB|15903877|NP_359427.1|1810176..1810484|+|309 bp|Ph osphotransferase system system, cellobiose-specific IIB co mponent|S.pneumoniae|R6|NC_003098.1|ORF|111
atgaaacaaattttattagtatgtaatgcgggaatgtcgacaartatgcttgttaaaaaaatgcaacaaagtgcgactgaacgtgggattgaaatytctatccaagcaaaatcaatgacagaagctaaaaaraatatccatgaagcagatgtcattctaattgggccacaaattcgttatgagttacttgctgtgaaagaaattgcaggaaatayccctgtagataccattgatatgcgggattacggaatgatgaatggagcaaaagttctggaacaagcacttgmatggataggagaaataagaykaactaat

SEQ ID NO: 808 - DNA, 809 bp, Streptococcus pneumoniae
  misc_feature (1)..(809): tiling:Spneumo1:WAN024FYV; Cluster includes WAN0243XG spr1 151|licD1|15903194|NP_358744.1|1152860..1153663|+|804 bp|R equired for phosphorylcholine incorporation in teichoic an d lipoteichoic acids|S.pneumoniae|R6|NC_003098.1|ORF|111
atgaaacaactaaccrttgaagatgccaaacaaattgaattagaaattttggattatattgatactctctgtaaaaagcacaatatcaactatattattaactacggtactctgattggggcggttcgacatgagggctttatcccttgggacgacgatattgatytrtccatgcctagagaagactaccaacgatttattaacatttttcaaaaggaaaaaagcaagtataagctcctatccttagaaactgataagaactactttaacaactttatcaagataaccgacagtacgactaaaattattgatactcgaaatacaaaaacctatgagtctggtatctttatcgatattttccctatrgatcgctttgatgatcctaaggtcattgatacttgttataaactggaaagcttcaaactgctgtctttcagtaaacataaaaatattgtctataaggatagccttttaaaagattggatacgaacagccttytggttrctccttcgaccggtttctcctcgttattttgcaaataaaatcgagaaagaaattcaaaaatatagtcgtgaaaatgggcartatatggcttttatyccttcaaaatttaaggaaaaggaagtcttcccaagtggtacctttgataaaacaatcgatttaccctttgagaatttaagccttcctgcacctgaaaaatttgatactattttgacacaattttatggagattatatgaccctaccaccagaagaaaaacgcttctacagtcatgaatttcacgcttataaattggaggattarctaat

SEQ ID NO: 809 - DNA, 2624 bp, Streptococcus pneumoniae
  misc_feature (1)..(2624): tiling:Spneumo1:WAN024CSU; Cluster includes WAN0243UZ spr1 240|alaS|15903283|NP_358833.1|1238887..1241505|-|2619 bp|A lanyl-tRNA synthetase|S.pneumoniae|R6|NC_003098.1|ORF|441
atgaaacaactatctagtgcacaagtacgccaaatgtggcttgatttctgggcgaccaaagstcactcagtagaaccatcagtaagtttggttcctgtaaatgacccaactcttttgtggatcaactctggggtagcaacycttaagaaatactttgacgggacyatyatccctgaaaatccacgtattaccaatgcccaaaaggctatycgtacyaacgayatcgaraacgtagggaagacygcrcgtcaccataccatgtttgaaatgytgggkaacttctcwatcggggattacttccgtgaygaagcyatcacttgggcttatgagcttttgacaagccctgaatggtttgayttcccwgctgaraaactttacatgacytactatccagaygataaagattcttacaaccgctggattgaagtgggagtggatccaagtcacttgattccaattgaggacaacttctgggaaatyggtgcgggaccttctggaccagatacagaaatcttctttgaccgtggggaagcctttgacccagaaaatatcggtcttcgcctgcttgcagaagatattgaaaacgaccgttatattgaaatctggaacatcgttttgtcacaatttaacgcagaccctgctgttcctcgtagcgaatacaaggaattgccacataagaacattgatacgggcgctggtttggagcgtttggtggcygttatccaaggggctaagaccaactttgaaacggacctcttyatgccgattatccgtgaagtcgagaaattgtctggtaaggtttatgaccaagatggcgacaacatgagcttcaaggtyatcgcwgaccacatycgttcwctttcatttgcyatcggtgatggtgcccttccaggaaatgarggtcgtggttatgtycttcgtcgtcttctccgtcgtgcttctatgcatggtcaaaaattgggwatcaacgarcctttcctttacaaaytbgttccaactgttggaaamatcatggaaagctactacccagaagtgcttgagaaacgtgactttattgagaaaatcgttaagagcgaagaagaatcatttgcccgtacccttcactcaggtcaacactttgcccaaggcattgtrgcagacttgaaagaaaaaggtcaatctgtyatygctggtymagatgtcttyaaactctatgatacwtayggrttcccagttgaattgaytgaagaaatygctgaagaagctggtatgactgtagaccgtgaaggttttgaagcagccatgaaagaacarcaagaacgcgcgcgtgcstcagctgtcaagggtggctcaatgggtatgcaaaatgaaactcttcaaaacatcactgtagaaagtgycttcaactacaatrctagccaattgtcttctaaattggtagctatcgtkgckgacaatgcagaagtagragctgtttcagaaggaactgcctctcttatctttgcggaaacgtcattttatgctgaaatgggtggacaggtagctgactacggacaaatcttggatgagtcaggtaagrttgtggctactgtgaccaatgttcagaaagccccaaatggtcaagcccttcatacagttgaagtccttgcaccgcttgccttgaaccaagaatataccttggcaattgatagcaatcgccgtcaccgtgtcatgaaaaaccacactgcgactcatttgcttcacgctgcccttcacaatatccttggaaaccacgcaacacaggcaggatctcttaacgaagttgaattccttcgctttgactttacccacttccaagcwgtaactgctgargaaytkcgtgcsattgaacagcaagtyaacgaraaaatytgggaagcwcttgaagtkaagacagttgaaacggatattgacactgctaaagaaatgggagctatggccctctttggtgagaaatacggcaaggaagttcgtgtcgtgactatcggtgactactctattgaactttgtggtggtactcatgttgrcaacacttctgagattggtctcttcaaaattgtcaaagaagaaggaatcggttcaggaactcgccgtatcttggcagtgactggtaaggaagcctttgaagcctatcgtgaacaagaggatgctcttaaagctrtcgcagcaaycttgaaagcacctcaagtcaaggaagtacctcacaaggtagaaggacttcaagaacaacttcgtcaacttcaaaaagaaaatgctgagttgaaagaaaaagccgcagctgcagccgcaggcgatatcttcaaagatgytaaggaagtcaacggtcatcgttacattgctagtcaaktgtctgtatccgatgccggtgcccttcgtacttttgcagataactggaaacaaaaagactactctgatcttcttgtcctagttgccgctatcggtgacaaagtcaatgtccttgtagcaagcaagacaaaagaccttcatgcaggaaaccttgtcaaagaattagcaccaatcatcgatggacgtggtggtggtaaaccagayatggccatggcaggaggaagmaaccaasctaagatccaagaattgttggatgcagtagcaggtaaattgtaactaat

SEQ ID NO: 810 - DNA, 623 bp, Streptococcus pneumoniae
  misc_feature (1)..(623): tiling:Spneumo1:WAN024D3X; Cluster includes WAN0243R9 spr1 374||15903417|NP_358967.1|1355373..1355990|-|618 bp|Hypoth etical protein|S.pneumoniae|R6|NC_003098.1|ORF|111
atgaaacaagaacgatttccattggtgtcagatgacgaggtcatgttgactgaaatgccagtcatgaatctctatgatgagtctgatctgatcagtaatatcaagggtgagtatcgagataaaaattatttagaatgggctcctattrctgaagaaaaaccagtaaaaccgattgaaaagcaagtmgrraaacctaaaaargctcctttaggggttaaaaaagaaggaaagagctatgcggaggtggcgcgtgaagaagcgcgtgcrgacttgaaaaagaaacgctctgctaactayctaactcaggatttcagccttgcgagacgtcattctcagcccagtctagttagacagggcaatcaaccgacarctcctttccaaaaggaaaatcctggtgaatttgtcaaatatagccaaaaattgacccagtctcattatatcttggcggaagaagttcattctatccctaccaagaatgaagaagtgtcagcacctgctccaaagaaaaacaattatgattttctaaagaagagccaaatctacaataaaaaaagtaaacaaacagaacaagaacgtcgggttgcccaagagttgaatctgaccagaatgacagaatarctaat

SEQ ID NO: 811 - DNA, 1121 bp, Streptococcus pneumoniae
  misc_feature (1)..(1121): tiling:Spneumo1:WAN024CDO; Cluster includes WAN0244R0 spr0 086||15902130|NP_357680.1|93718..94782|-|1065 bp|Hypotheti cal protein|S.pneumoniae|R6|NC_003098.1|ORF|112
atgaaacaagaatggtttgaaagtaatgattttgtaaaaacaacaagcaagaacaagcctgaagagcaagctcaagaggttgcagacaaggctgaagaaasgatasccgatytcgatacaccaattgraaaaaatactcarktagaggaggaagtcyctcaagctgaagtcgaaytggaaagccagcaagaaragaaaattgaarctcctgaagwcdgtgaagcgagaacaraaatagaagaaaagaaggcatctaattctactgaagaagagycagacctttctaaagaaacagaaaaagtcactatagctgaagagagccaagaagctcttcctcagcaaaaagcaaccacgaaagagccacttcttatcagtaaatctttagaaagtccttatatccccgaccaagmtccaaaatctagggataaatggaaagagcaagtgcttgatttttggtcttggctagtggaagcgatcaaatctcctacaagtaagttkgaaacaagtatcacacacagttacacagcctttctcttgctcattctgttttctgcatcttcctttttctttagtatctatcacatcaaacatgcttactatggacatatagcaagcattaacagtcgcttycctgagcagctagctcctttaactcttttttctatcrtctctatcctagtagcgacaacactcttcttcttttcattcctcttgggtagtttcgttgtgagacgatttatccaccaggaaaagkactggacgctagacaaggttctccaacaatatagtcaactcttggcaattccaatcttcctcactkctattgctagtttctttgctttctttgatagcctacgatttacagccctcttgtgtgtrattagcattggaatcattctgcttgccagtctccatatcattacaagaccaagtcaagcaagtgaaaccgactccttctatcaattattcttgtctgtccttgtgaacggagttattatcctcctcttctttgtagctgaagtggcactgattggagattatcttcgtatcttggcctttctttaaaattcaatcctgtcatccttggcaggattttttctatgtcaaaaaagcaagtcgat

SEQ ID NO: 812 - DNA, 896 bp, Streptococcus pneumoniae
  misc_feature (1)..(896): tiling:Spneumo1:WAN024EZJ; Cluster includes WAN024466 spr0 836|holB|15902880|NP_358430.1|836898..837788|+|891 bp|DNA polymerase III, delta' subunit|S.pneumoniae|R6|NC_003098.1 |ORF|111
atgaaacaagatcaactaaaggcttggcaaccagctcagtttgaccgttttgtccgtatcttagaacaagaccagctcaatcacgcctatctcttttcaggtttctttgraagcttggaaatrgcgcaatttttagctaagagcctyttttgtacggataaagttggcgtcttaccatgtgagaaatgccgaagttgcaagctgattgaacaggragartttccmgatgtcaccttgattaarccagtyaatcaggtcatyaagacrgaacgcattmgrgaattggtgggwcagttttctcaagcagggattgaaagccagcaacaggtctttatyatcgagcaagcggataaaatgcatcccaacgcagccaattctctgctcaaggtcatcgaagaaccccagagtgaagtttatattttcttcttgactagcgatgaggaaaagatgttaccgacaatccgaagtcggactcagatcttccactttaaaaagcaagaagaaaaacttatcttactcttagaacaaatgggacttgttaagaaaaaagcgactcttttagctaagtttagtcaatcgcgagctgaagcagaaaagttggcwmatcaggcaagtttttggaccttggtcgatgaaagtgaacgcctgctgacttggttagtagctaagaaaaaagaaagttatctacaggttgccaaattagccaacttggcagatgataaggaamaacaggatcaggttttacggattcttgaagttctctgygggcaggacctcttgcaggtaagagtaagagtgattctacaagatttactagaagctagaaaaatgtggcaagctaatgtcagctttcaaaatgccatggaatatctggtcttgaaagaaatataactaat

SEQ ID NO: 813 - DNA, 950 bp, Streptococcus pneumoniae
  misc_feature (1)..(950): tiling:Spneumo1:WAN024CA6; Cluster includes WAN0244OO spr0 170|corA|15902214|NP_357764.1|178139..179083|-|945 bp|Magn esium and cobalt transporter|S.pneumoniae|R6|NC_003098.1|O RF|210
atgaaacaagtttttctytytacaacaactgaatttaaagagatcgatacgcttgaaccgggtacttggatcaatctcgtcaatccgactcaaaatgaatcactcgaaatcgccaacaccttcgatattgatattgcygaccttcgagcaccgctcgatgcggaagaaatgtctcgtattaccattgaagacgagtataccctgattatcgtagacgtgccggtcacggaggaaagaaataaccgcacctactacgtaaccatcccgcttggtattatcatcactgaggaaaccattatcactacgtgtttggaaccactacctgtccttgatgtctttatcaaccgtcgattgcgtaatttctataccttcatgcgttcacgttttatctttcaaattctttatcgcaatgcagagctttacctaacagcccttcgttcaatcgaccgcaaragtgaacaaatcgaaagtcaactgcatcaatcaactcgtaatgaagaattgattgagctcatggaattggaaaaaactatcgtctatttcaaggcctccctcaaaacaaatgagcgcgtgattaagaaattgaccagttcaaccagcaatatcaagaaataccttgaggacgaagacctgcttgaagacaccctgattgaaacccaacaggccatcgagatggcagatatttatggaaacgtcttgcattctatgacagagacctttgcctctatcatttctaacaaccagaacaacatcatgaaaaccttggcccttgtgaccatcgtcatgtccatcccaaccatggtcttttctgcctacgggatgaactttaaggataatgaaatccccctaaacggagagccaaatgccttctggttaatcgtctttatcgcctttgctatgagtgtctcgctcactctctatctcatccataaaaaatggttctaactaat

SEQ ID NO: 814 - DNA, 947 bp, Streptococcus pneumoniae
  misc_feature (1)..(947): tiling:Spneumo1:WAN024DXE; Cluster includes WAN0243C2 spr1 923||15903964|NP_359514.1|1905946..1906887|-|942 bp|Conser ved hypothetical protein|S.pneumoniae|R6|NC_003098.1|ORF|2 11
atgaaacaarcaaaacgaattaagcggtggcgctattatctgcgccgctttgcttatcagataaaaattttacgtgtcttacaaagtatctctcgagaaaagtatgatgagaagatttcggcctctctggtctatggttttttatcagcagtagcagttaatttctttttccaaccagggcatgtgtattcgagtggtgcaacaggtctggcacagattatctctgccttgagtaatcactggtttggttttcatattccgatttcgctaascttctacgccattaacttccctttgatggtcttagcttggtatcagattggccataagttcaccgtctttacctttatcacggtatctatgagttccttctttatccagtttgtccctgtggcaaccttgacrgaggatcccattatcaatkccctttttggkggtgttgttatgggtttggggattggttttgctyttcgaaacaatatctccagtggtgggacggatatcgtcagcctgactattcgyaagaaaacgggtaagaatgtcggtagtatttctttcttggtaaatggaactatcatgctgatagcaggtttracctttggttggaaatacgctctttattctatgattaccatctttgtctctagccgtgtgacagacgcagtctttactaagcaaaagcgtatgcaggccatgattgtgacaaatcatccagagaaggtaattgaaaaaatccataaaaaattgcaccgcggagcaaccatgatccacgatgcagaaggaacctataatcacgagagaaaggcagttttaatcactgtcattacacgtgcagagtttaatgaatttaaacagattatgacacaagtggatccaagctcctttgtctctgtctcggaaaatgttcatattctaggaagatttgtkgagatagataattarctaat

SEQ ID NO: 815 - DNA, 387 bp, Streptococcus pneumoniae
  misc_feature (1)..(387): tiling:Spneumo1:WAN024CBY; Cluster includes WAN0244Q4 spr0 118||15902162|NP_357712.1|125317..125703|+|387 bp|Hypothet ical protein|S.pneumoniae|R6|NC_003098.1|ORF|101
atgaaacaatttcaactaaggaggagaaaacaaatggaacttgtattaccaaataattatgttgtgattgatgaagaagaratgatgtaycttgatggggragcttatttaagcaagcgtgcttgtcaaggaattygcgyagctttagctatgagtycaggmayttttatagcattagctggagctgcagttttaaccaaaaaactaataaactatattaargttggaggycttggaggytggcttattggtgcagcagcaggtgtattggctrsrgcrgcaggraraatagcttactrtattggatatggtgytcttaatagaggttgtgatattarcgggaacccttatccttgggatggattcatatctgcracagtaagatga

SEQ ID NO: 816 - DNA, 1157 bp, Streptococcus pneumoniae
  misc_feature (1)..(1157): tiling:Spneumo1:WAN024BFO; Cluster includes WAN0243P2 spr1 453|MFS transporter|15903496|NP_359046.1|1435804..1436955| -|1152 bp|Major facilitator superfamily transporter - effl ux?|S.pneumoniae|R6|NC_003098.1|ORF|211
atgaaacaatttttagaacgggccagcattttggctctctccctcgttttgattacctccttttccatttcgagtgcyctaccagccatgtttgactattatcagggttattctaaggaacaaattgagctcttggtgagcttgccttcctttggaatcatgatgatgttactgctaaatggtttcttagaaaaaatatttcctgagcgcttacagattagtttgggcttgctgattttatcattgagcggtacagctcccttctggtaccaagcctatccctttgtctttggaacacggcttctctttggtttgggtcttgggatgatcaatgccaaggccatttctattatcagtgaacgctaccaaggaaaaaggcgaattcagatgttagggctacgcgcttctgcagaggtcgttggagcttctctcattaccttggccgtcggtcagttgttggcctttrgttggacagctatctttctagcctatagtgctggatttttggtgmtgcccctttatctgctctttrtcccttatggaaaatcaaagaaagaagtcaagaaaagagcgaaggamgcaagtcgtttaactcgagaaatgaamggcttgattttwaccttrgctatcgaagcggcagttgtagtttgtaccaatacagctattaccatccgtattccaagtttgatggtggaaagaggattgggggatgcccagttatctagttttgttcttagtatcatgcagttgatcgggattgtggctggggtgagtttttctttcttgatttctatctttaaagagaaactgctcctctggtctggtattacctttggcttggggcaaatygtgattgccttgtcttcatccttgtgggtggtagtagcaggaagtgttctggctggatttgcctatagtgtagtcttgacgacggtctttcaacttgtctctgaacgaattccagctaaactcctcaatcaagcaacttcatttgctgtattaggctgtagtttcggagcctttacgaccccattygttctaggtgcaattggcttactaactcacaatgggatgttggtctttagtatcttaggaggttggttgattgtaatctctatctttgtcatgtacctacttcagaagagagcttarctaat

SEQ ID NO: 817 - DNA, 197 bp, Streptococcus pneumoniae
  misc_feature (1)..(197): tiling:Spneumo1:WAN024DDJ; Cluster includes WAN02446V spr0 811||15902855|NP_358405.1|813001..813192|-|192 bp|Hypothet ical protein|S.pneumoniae|R6|NC_003098.1|ORF|120
atgaaacacaaagaacatatactcatcggacttctctatctgctctctccattcatcggtcagctcttagttgaacacacacactttatcrgtacagaatttaccggcactgcttatgttatttgctggttatcagttgttatcagcatccaccatttttccaaaaatgtattgtctcarcagcaaaaatarctaat

SEQ ID NO: 818 - DNA, 1383 bp, Streptococcus pneumoniae
  misc_feature (1)..(1383): tiling:Spneumo1:WAN024CEX; Cluster includes WAN023RVY cont ig_1609_46||||32800..34182|-|1383 bp|Glimmer 2.02 orf pred iction|S.pneumoniae|670|WAN01UDCD|ORF|001
atgaaacagcgtggtaaaaggattcgcccatctggtaaagatttagtctttcattttacgatagcgtcactcctgcctgttttcctgctggttgtcggactgtttcatgtgaagacaatccagcagatcaactggcaggattttaacctatcacaagcagataagattgacattccctatttaattatcagtttcagtgtcgcaattcttatctgcttgctggtagcgtttgtattcaaacgggttcgctatgatacggttaaacaactttaccaccgtcaaaaactggcaaagatgatacttgaaaacaagtggtatgaatctgaacaggtcaaaacagagggtttctttaaagatagtgctggtcgtacaaaggaaaagataacctacttccctaaaatgtattatcgacttaaaaatggcttgatacagatacgggtggaaatcacgctgggaaaatatcaagaccaactcttacacttggaaaagaaattagagagtggcttgtactgtgagctgacggataaagagttaaaggattcctatgtggaatatactttgctctatgacaccatagccagtcgtatttctattgatgaagtagaagctaaagatggtaaacttcgcttaatgaaaaacgtatggtgggaatatgataagctccctcatatgttgattgctggtggtacaggtggcggtwaaacttactttatactgacactgattgaagccttgcttcatacagattcaaaactgtatattcttgacccgaaaaatgctgaccttgcggacttaggttctgtgatggcaaatgtctactatagaaaagaagacttgctttcttgcattgaaacattctatgaagaaatgatgaaacgtagtgaggaaatgaagcagatgaagaactataagactggcaaaaattatgcttacttaggtctcccggcacacttcttaatctttgatgaatacgtcgctttcatggaaatgctgggaacaaaagaaaacaccgcagttatgaataagctgaaacagattgtcatgttaggtcgtcaagctggcttctttctaatactggcttgtcaacgtccagacgcaaaatatttaggcgacggaatccgtgatcagtttaatttcagagtggctttaggtcgtatgtctgaaatgggctatggcatgatgtttggcagtgacgtacaaaaggatttcttcttaaagcgaatcaaaggtcgtggctatgttgatgtaggaacaagtgtcatatcagagttttatactccccttgtaccaaaaggatatgatttcttggaggaaattaaaaagttatccaacagcagacagtccacgcaggcgacgtgcgaagcggaagtcgcaggtgtggac

SEQ ID NO: 819 - DNA, 1170 bp, Streptococcus pneumoniae
  misc_feature (1)..(1170): tiling:Spneumo1:WAN024DY6; Cluster includes WAN023PB9 pne4 5_10||||6528..7697|+|1170 bp|Type 22F capsule operon, Glim mer 2.02 orf prediction|S.pneumoniae||WAN01UCHA|ORF|000
atgaaacagtcagtttatatcattggttcaaaggggattcctgccaagtatggaggatttgaaacctttgttgagaaattaacagaatatcaaaaagatggtaacatccaatactatgttgcctgcatgcgcgaaaattctgcaaagtcaggatttacagcagacacatttgagtacaacggtgctatttgttacaacattgatgtgcctaatattggtcctgctagagccattgcttacgatattgcagcggtcaataaggctattgaattgtctaagggaaacaaggacgaggctcccattttttacattctagcttgtcgtatcggaccttttatttctggacttaagaaaaaaattcgttcgatcggaggccgtttgctggtaaatccagatggtcatgagtggcttcgagctaaatggagcttgccagttcggaagtattggaaattttcggaacagttgatggtcaaacatgcagatttattagtctgtgatagcaaaaatatcgaaaaatatattcgagaggactataaacagtatcagcccaagacgacttatatcgcctatggaacagatacaagcaagtctattttaaaacctgatgacgaaaaagttcgtaattggtatcaggaaaaaggcgttgctgaaaacggatattatctagttgtgggacgatttgttcccgaaaacaactatgaaaccatgattcgtgaatttatcaagtctaagtccaataaggactttgtccttattacaaatgtagaacaaaataaattttacgatcagttgctcaaggatacaggctttgacaaagacccgagagtcaaatttgttgggactgtctatgatcaagaattgctcaaatatatccgagagaatgcttttacctacttccatggccatgaagttggtgggacaaacccatcgcttttagaagctcttgcttcaacaaagcttaatttactgctagatgttggctttaaccgtgaagttggtgaggatggagccatttactggaaaaaagatgagctagcgcatgtaatcgaagaagtggaacgatttgatgaaggtgctatttcggaattagacgaaaggtctagccaacgaattgcggatgcatttacgtgggaaaagattgtgtcagattatgaggaagtgtttaaagga

SEQ ID NO: 820 - DNA, 1185 bp, Streptococcus pneumoniae
  misc_feature (1)..(1185): tiling:Spneumo1:WAN024DY5; Cluster includes WAN023OVD pne7 0_12||||9469..10653|+|1185 bp|Type 32F1 capsule operon, Gl immer 2.02 orf prediction|S.pneumoniae||WAN01UCC2|ORF|000
atgaaacagtcagtttatatcattggttcaaaggggattcctgccaagtatggaggatttgaaacctttgttgagaaattaacagaatatcaaaaagatggtaacatccaatactatgttgcctgcatgcgcgaaaattctgcaaagtcaggatttacagcagatacatttgagtacaacggtgctatttgttacaacattgatgtgcctaatattggtcctgctagagccatcgcttacgatattgcagcggtcaataaggctattgaattggctaagggaaacaaggacgaggctcccattttttacattctagcttgtcgtatcggaccttttatttctggacttaagaaaaaaattcgttcggtcggaggccgtttactggtaaatccagatggccatgagtggcttcgggctaaatggagcatgccagttcggaagtattggaaattttcggaacagttgatggtcaagcatgcagatttattagtctgtgatagcaaaaatatcgaaaaatatatccgagaggactataaacagtatcagcccaagacgacctatattgcttatggtacagatactaccccttcaagtctaaaatcagaagatgtcaaagttcgaaactggtatcgtgaaaagggagtaagcgaaaatggctattatctagtggtgggacgattcgttcccgaaaacaactatgaaaccatgattcgtgaatttatcaagtctaagtccaataaggactttgtccttattacaaatgtggagcaaaataaattttacgatcagttgctgaaggaaacaggtttcgacaaggatccaagagtcaaatttgtgggaacagtctatgaccaagaattgctcaaatacatccgagagaatgcttttgcttacttccatggccatgaagttggtgggacaaacccatcgcttttagaagcccttgcatcaacaaaactaaatttgttactagatgttggttttaaccgtgaagttggtgaggatggagctatttattggaaaaaagatgttggtgatttagccagattaattgacattgttgacagaaaggatgagacgtttcgggaaaagcttggcttaatggcgaaagatagaattgaaacagcatatagttggcaattcattgaaaaagagtataaggagatttgggatgaggaagcgata

SEQ ID NO: 821 - DNA, 1170 bp, Streptococcus pneumoniae
  misc_feature (1)..(1170): tiling:Spneumo1:WAN024DYB; Cluster includes WAN023PW4 pne0 8_9||||6536..7705|+|1170 bp|Type 7A capsule operon, Glimme r 2.02 orf prediction|S.pneumoniae||WAN01UCKE|ORF|000
atgaaacagtcagtttatattattggttcaaaggggattcctgctaagtatggaggatttgaaacctttgttgaaaaattaaccgaatatcaaaaagacagcaacatacaatactatgttgcttgtatgcgtgaaaattcagctaaatctggcatcatggatgatcagtttgagcacaatggagccatttgtttcaacatcgatgtacccaatattggaccagctcgtgccatcgcttacgatattgcagcggtcaacaaagctattgaattggctaagaaaaataaggacgaagctcccattttttacattctagcttgtcgcattggtccttttatttctgggcttaagaaaaaaattcgtgccatcggaggccggttgttggtaaatcctgatggtcatgaatggttgcgagcaaagtggagtttaccagttcgtaagtattggaaattttcagagcagctcatggtcaaacatgcagatttactggtctgtgacagtaaaaacattgaaaaatatatccaagaggattataagcagtaccaaccaaagaccacctatattgcctatggaacggatactactccttcaatcctgaaagcagaagatgccaaagttcgggattggtatcaggaaaaaggagttagcgaaaatggctattatctagtggtggggagattcgttcctgaaaataactacgaagcaatgattcgtgaatttatcaagtccaagtccaagaaggactttgtcctcatcacaaatgtggagcagaataaattttacgaccagttgttacaggatactggttttgataaagatcctagggttaaatttgttgggactgtctatgaccaagagttgctcaagtacatccgtgagtatgcctttgcctatttccatgggcatgaggttggagggaccaacccttctctattggaagccctagcatccacaaaactgaatttgttgctagatgttggctttaaccgtgaggttggtgaagacggggccatttattggaaaaaagatgagttggctcgtgtcattgaggaagtagaaggatttgatcaggcagcaataactgacttggatttcaagtcaagccaaagaatcctctcagctttcacatgggaaaagattgtgtcagattatgaagaagtgtttaaagga

SEQ ID NO: 822 - DNA, 1317 bp, Streptococcus pneumoniae
  misc_feature (1)..(1317): tiling:Spneumo1:WAN024C4F; Cluster includes WAN023Q1I cont ig_1216_8||||6062..7378|+|1317 bp|Glimmer 2.02 orf predict ion|S.pneumoniae|670|WAN01UEKW|ORF|000
atgaaacatacacttgaaactatcaatagtagaactcagtggtttagagaagcaagatttgggatgttcattcattgggggttatattctattccaggaaaaggggaatggattcgtagtcatcagaaattatctattgaagattatgaaccatattttcgagcttttgatcctaaggaatataaccctagagaatgggctaaacaagcaaaagctgcagggatgaagtatatggttttaacggctaaacatcatgatgggttttgtttgtttgattcaaaatttacagattataaagcaacaaatacacctgcaggtagagatttagttaaagaatttgtagatgctgttcgagctgaaggtttaaaagtaggcttatattttagtttgattgactggcaccatcctgatttccctaaatatgctgatctaaatcatccaatgagaggaaatgaagcctatcgagatgagaaaattaactttgacagttatttggagtatttacacaatcaagttaaagaaattgtaactggttatggtcagattgacatattatggtttgattattcttatgaagacatggtgggtgaaaaatggggagcttcaaaattaatagacatggttcgtcattatcagccaaacgttatcgtagataatagattagaaacatcaggtgaaggattcggaagtatcgttacagatgaaattacctcttacgctggagattttgttagtccagagcaaattgttcctcacgaaggtattcgaaactttaaaggtgaacctgttccttgggaactttgtctaactatgaataacaattgggcttataatcctacagattatctatataagtctagtcaaactttgataagaaagttagtggaatgtgttagtaaaaacggaaatatgattcttaatgtaggcccagatgctttgggaagaattaatgattcaagtaagaaaatattagataattttcatcgatggatgtctcgaaatggtgaggcaatttatggatgtagtggagatgaaaatttaccaaaaccagattggggatactatactcgtaatggaaatacggtttatgctcatgtatttgaacaacctataggtcctttagctcttcttggtattagtaaagaaaacgtaaaaagaatgagctttcttcatgatggaagtgaggtgaaaatttcagaaagctggacgaccaatgcctacaaaggaatttgttttgcacagtttggagaagttccacattttacctatccattaccagacttgattgatagcgtaatcaaaattgagttgagagag

SEQ ID NO: 823 - DNA, 223 bp, Streptococcus pneumoniae
  misc_feature (1)..(223): tiling:Spneumo1:WAN024CZI; Cluster includes WAN0243DV spr1 857||15903899|NP_359449.1|1831470..1831652|-|183 bp|Hypoth etical protein|S.pneumoniae|R6|NC_003098.1|ORF|111
atgaaacatgattttaaccacaaagcagaaactttcgattyccctaaaaatatcttcctcgcaaacttggtatgtcaagcagycgagaaacagattgatmttytatcakacaaagwaattttagatttcggtggtggcacgggtctattagccttgcccctaacccctagccaagcaggctaastmakttactcttgtagacatttctgagaaaatgttggag

SEQ ID NO: 824 - DNA, 1839 bp, Streptococcus pneumoniae
  misc_feature (1)..(1839): tiling:Spneumo1:WAN024FJX; Cluster includes WAN0243QG spr1 403||15903446|NP_358996.1|1380265..1387920|-|7656 bp|Hypot hetical protein|S.pneumoniae|R6|NC_003098.1|ORF|200
atgaaacattcacataaaaaatcatttgactggtatagcatgcaacaacgttattctattcgtaagtattactttggtgcagctagtgtcttgctcggtaccgctttggtattaggtgcagcagctagtgtccaaacagtacaagcggaagaaaacaaacaagaaactaccaatagtatttctgttggtaggggagaagcagctactaaaccagcagaggtttctgcgtctaataaagagaaaacctatgcagctccaactgtagctaatccagtagaaacgactccagttaaaactgaagaagttactaaaccagcagaaaaagttgaagaagcaaaagacaaaaaagaggaagtaacgcatcaagatgccgttgacaagtcaaaattattaacggctctttcgcgtgctaaaaaattagaaagcaagttatatacagaagcaagtgctgctaacttgcaaacaagtatccaagctggtcaaagcttgcttggaaaagcagatgcaactgaagctgaattatcagcagcagagtcatctattcaatcatttattattggtctagaacttcgttctaactctaataaagaaactgtatcagaaacgcctgtagcgaagaaagctgatgcagttgaatcaaaagaaggggctaaaccagctgcaacaactgaacgttcagctgttgatagcgctattttgccaactagcacagctgacaaagtagaaacaacttcagctccagcatctattaatgaaatcttgaaactaggtttgagcctttctgatgctcgccaaaatccagctatccgtaaggaagatgttaatagagggtatagtggttttagagcggctagcaatccagccaacccaattgtctcaggttctggaaatacagttgcatttgcagatattagccaaggtggtcgtagctatagtttccgtggctacgggaactcacgtggtggaaattctattcattacgatgtaacaacagtacgtagtggtaatagtgttaactttacaattagttattctgcgccaggagattctagagagtttgttaataataattttatcttggataaaggggatggatttggaaatccttcaaatgcaacgatcacaagttcaaatccaagagtaagggagcaatcaaaatctattagtcagggtgccaactacgtatctcactcaggatacagtatgacctctgctatttcaacaaatacggaacaaactatcagatttagtttgcctatcattaatctaaatggtgatttgtctgttcgtttgaaacctgttacttttaacgtggaccaaggtggtggtggtgccgctactagcaatgacccatacagtaactctaactattattatagagcaaacccactatacttggatgcaaacccttatggtggtactaataataagactgtttcagaagacattgacttccaaactgtctatcttccaactagtaagttaccagaaggtcaaactagattagttcgagaaggtgaaaaaggacaacgtcaaattacctataaagttcatcgatttggtaacgaaacacttttaggattgccgattagtaatagtgttactaaagaagctaagccacgtattatgcaaattggtgtggctaaagatctaatcgatacagtaaaaccacgtgttgatcaaaataaagtcggtgatacaaataacctcactttctatcttgataacgatggaaacggtgtttatactgaaggtgtagacgaacttgttcaaaaaattgctattaaagatggagctaaaggtgaaaaaggagaccaaggtgaacgcggtctaactgga

SEQ ID NO: 825 - DNA, 1142 bp, Streptococcus pneumoniae
  misc_feature (1)..(1142): tiling:Spneumo1:WAN024DIZ; Cluster includes WAN0244JF spr0 359|mtlD|15902403|NP_357953.1|358009..359145|+|1137 bp|Man nitol-1-phosphate 5-dehydrogenase|S.pneumoniae|R6|NC_00309 8.1|ORF|112
atgaaacattctgttcattttggtgccggtaatatcggtcgtggttttataggtgaaattctatttaaaaatggtttccatattgattttgtggatgtcaataatcagataattcatgctctraatgaaaagggcaagtatgaaattgaaattgcacagaaaggacagtctcgtatagaagtaactaatgtggctggmattaatagcaaagaacatcctgagcaagtcattgaagcgattcaaargacggatattattactactgcaatcggacctaatatactcccttttatcgcygaacttctagccaaaggaatcgaagctcgccgagttgcaggraatacacaggyattggatgttatggcctgtgaaaatatgattggcgggtctcaatttctttatcaagaagtcaagaaatatttaagtccggaaggtttgacatttgctgataactacataggttttccaaatgctgcagtagacaggattgttccarcacaaagtcacgaagattccctttttgttrtggtcgagccctttaatgaatgggtcgtggaaaccaagcgtcttaaaaatccagatttacgtctaraagatgtgcattatgaagaagatttagaaccctttattgagcgaaaacttttttcagtcaattctggacatgcaacttcagcttacattggtgcgcattatggtgccaagacaattttggaagctcttcaaaatcctaatatyaaatctcggattgaatctgtattagctgaaattcggagtctcttgattgccaaatggaactttgataaaaaagaattggagaattatcacaaagtcattatagaacgryttgaaaaycctttcatagtggacgargttagtcgcgtagctcgtactccaatccgaaaattaggctataatgaacgattcatccggccgatacgtgaattgaaagaactcagtttgtcatataaaaacctacttaaaacagttggctatgyctttgactatcgcgatgtaaatgatgaagaaagtattcgattaggtgaattgttggctaaacaatyagtcaaagatgttgttatacaagttacaggtttagacgaccaagaattgattgagcraattgtagagtatatttaactaat

SEQ ID NO: 826 - DNA, 282 bp, Streptococcus pneumoniae
  misc_feature (1)..(282): tiling:Spneumo1:WAN024G45; Cluster includes WAN023LVR 3142 41_1077a||||563207..563488|-|282 bp|EGAD orf prediction|S. pneumoniae|R6|NC_003098.1|ORF|110
atgaaacattgtttcatcacccgcaaacccagatcctgcgtcagaatacattttgtaagagaaaatttgtgcattaggtgcaattccatctatgccgttaaagtttttgatrtcttgttcagtatcatttccagcaagaatccctgcaatatgcatcccatgtgggtcaaaataatcccttccatcatcatatttttctacagtgattttgccaccattataataattgaacgcatgagggattttatcactcaaccaataatttttatcagtkccttttaa

SEQ ID NO: 827 - DNA, 576 bp, Streptococcus pneumoniae
  misc_feature (1)..(576): tiling:Spneumo1:WAN024DB4; Cluster includes WAN02441J spr1 003||15903047|NP_358597.1|986356..986925|-|570 bp|Conserve d hypothetical protein|S.pneumoniae|R6|NC_003098.1|ORF|111
atgaaacatttagaaattgaattgaaaacactattgaaaaaagatgaatacaatcgtctaaaagaccagttcacaggtgtcactcctgttcttcaaacaaattactacatcgacacgcytgattttgaactgcgagaaaagaaagtcgctatgcgcattcgaacctttgaagactgggctgagttgacactcaaagtcccgcagagtgttggaaacatggaatacaaccaaaaattgcaactaaaagatgctgagaactatctgagtaaggaagaacttcctcaagggctagtactggatgaattggcgaaacatggtatccaaagtaagaactggcaggttcttggttgtctaacaacgcttcgctatgaaatgaaaacagctattggtctcatggcactggatcagagccgatactttgatatracagattacgaattsgagcttgaagtggaaaatcatgagcaaggcaaacaggatttycgacaatttttagagaaaaatcagatttcctaycaaaaagctccttcaaaattggttcgatttgtcaaaagtatgaaaaatagcykaactaat

SEQ ID NO: 828 - DNA, 612 bp, Streptococcus pneumoniae
  misc_feature (1)..(612): tiling:Spneumo1:WAN024AUB; Cluster includes WAN02408C |mut T||AAC95437.1|||612 bp|MutT|S.pneumoniae||AF068901|ORF|000
atgaaaccaagtgattttgttaagtatctgcaaagaatgattgcccttacagatactggcttaacctttacaaaagatccttttgaccgtgagcgctacgaggacttgcgaagtctgttatctgaaatgttgaatcagggatcagacctggatgcagaagaagtagcagaagtcttgaaaccaacttcagcttatgcgactcccttaatggacgtccgtgcttggattgttgaggatgagaagatttgtctggttaggggacaaggagagggtagttgggctttgccaggtggctttggtgaagtcggctattctccaactgaaaatattctcaaggaaattgaagaagaaaccggttttaaagccaaagttgaaagactgctagctgtttttgatatcaatcgtttccaactacagagcaaacaatatgcaaagtttgtttttgaatgtaagcttctcgatggacaattccaagaaaatcaagaaattgcagaccttcaattttttgccattgatcaactgccagtcttatctgaaaaacgcattaccaaggagcaaatagagattctttggcaggtttatcaaggtcagagggagcaatatcttgactaa

SEQ ID NO: 829 - DNA, 663 bp, Streptococcus pneumoniae
  misc_feature (1)..(663): tiling:Spneumo1:WAN024C4K; Cluster includes WAN023XR7 AX11 0915.1_1||||160..822|+|663 bp|Glimmer 2.02 orf prediction| S.pneumoniae||AX110915.1|ORF|000
atgaaaccaatcacagactatgctcctgccttggagtacggtgtctacgattcaactgctactatcgttcacgatgagccctataactaccctgggacagatatccctctctataactgggatcgagcatatttcggtaatattactctgcaatatgcccttcaacaatctcgtaacgtacctgccgttgaaacactaaacaaggtcggtctagataaggctaaaaccttccttaatggtcttggtatcgactatccaagcatgcattatgcaaacgccatttcaagtaatacaactgaatccaacaaaaaatatggtgcaagtagtgaaaaaatagctaccgcctatgccgcattcgcaaatggtggtatttaccacaaaccaatgtacatcaataaagttgtctttagcgatggtagcgaaaaagaattttctgaccctggcacaagagccatgaaagaaacgactgcttacatgatgacagaaatgatgaaaacagtctggacgtacggaactggtcgtggtgcctacctgccttggcttcctcaagctggtaaaacaggtacctctaactatactgacgaagaaattgaaaagtatatcaagaacactggttacgtagctccagaygaaatgtttgtgggttatacccgtctaactaat

SEQ ID NO: 830 - DNA, 2090 bp, Streptococcus pneumoniae
  misc_feature (1)..(2090): tiling:Spneumo1:WAN024DWF; Cluster includes WAN0243B8 spr1 953||15903994|NP_359544.1|1936914..1938998|+|2085 bp|Conse rved hypothetical protein|S.pneumoniae|R6|NC_003098.1|ORF| 121
atgaaaccactacttgawaccatcgatacccgytttggwactrcyarcaagcatgccttytctyggggaaataccctgccatacacaggcgtgcctttkgggatgaattaytttgtgccccagaccagtgaccaggrtggatcttggttttttgatccrcatctgcctatctttcaggggattcgattaactcaccagcccagtccttggattggggactactcttggctccttctgacacctgtcaccagtcaactgggkggagacagcctctttcaccgccagtcttcttatgatatagataaagcttgcttccagcctcactatttgaagctcttttcyctgcgytatcarattgaaacccagctcacaccracttgctatggtgcttctattcgtttgaakcaaaagcaaggcaaagccctctccctctatcttcacgcagcagatgaactracagtwgagcargtagataagcgractctkgcyctsmgacaagaaggkaaaacwgaracyaayaaaaatycrctraygmtsttcactgccctgcaaatgaacacggatattcttgctatcagccaagaagctggrgactggcgaattgacttagyaagtagtcaaaccgagatgcaactagccacttctttcatctctccttctcaagctctaatcaatctacctcaagaagattttgatagctgtaaawcaagtgcccaagyggattgggaaaatctcctccatcgttttgacattatagagacaggagaggctgaccgaaccttctttgaccactgcctctacagactcttcctcttcccacagactttttatgagrttratgartcagggmaagccatccacatggatctggctactggtactgtcaagcctggtgtcctctttagcaacaatggtttctgggataccttccgcaccaccttccccctctttgcccttatcatacckgagcactatcaacgctttttagaaggtttcctcaatagctaccgcgatactggtttccttccaaaatggctggctccagatgaacggggtatgatgccaggtacactkytagayggyattatcgcagatagcgcctgyaaggacrtgrccccygacctagaaggagaactcttccaagccatgctcgaaacagccagcaaagccgaccctctcggmatcaatggccgccacggactagcccaataccaagaactaggttacctctctaccgaccaccacgaaagtgttagccatactctagactatgcctatagtgacttttgtatcgcyagctgtgccaaaaaactagagaacatagaaatcgctgaaacctacaaggctgcttcacaaaattaccgccagctatttgacgctgagacaggttacatgcgagcacgagacaatcaaggaractttcaccctgacttctctccttatagttgggggcgagactacgctgaatkctctgccattcaagctactttaggcgttctccacgacatccctggcttaatccaactkatgggtggaaaagaaacctttagcaactatcttttgaaarcytgtcaagatgctcccctctttgaaacaacaggctatggttaygaaattcacgaaatgagcgagatggctactgctccttttggacaaatagccatttccaaccagcctagtttccacatyccttatctcttccgytacagcgattaccctgactacactgcccttcttatcaagacgctccgtcagaaagcttttcacccaagttgggaagcctatcctggagatgaagacaatggtagtctctctgcttggtacatctggtcagctctcggattttatccaacctgtccaggaaaaccaagctatgayctcggaatccctctctttgaccatctacgagtctacctmgctaaagaarataaatggctrgatatycatactrarcaaaaccacarccattttaactttgtcaaagaatgccgactgracaaaacactcgtatcaactattcaacaccaagacctcytaaaagctgaacaactaactttcaccctcagctggytaccaartcactaactaat

SEQ ID NO: 831 - DNA, 1355 bp, Streptococcus pneumoniae
  misc_feature (1)..(1355): tiling:Spneumo1:WAN024CHK; Cluster includes WAN0244S6 spr0 044|comB|15902088|NP_357638.1|44068..45417|+|1350 bp|Trans port protein ComB|S.pneumoniae|R6|NC_003098.1|ORF|111
atgaaaccagaatttttagaaagtgcggagttttataatcgtcgttaccataatttttccagtagtgtgattgtacccatggcccttctgctygtgtttttacttggctttgcaactgttgcagaraaggagatgagyttgtccactagagctactgtcgaaccyagtcgtatccttgcaaatatccagtcaactagcaacaatcgtattcttgtcaatcatttggaagaaaataagctggttaagaagggggatcttttggttcaataccaagaaggggcagagggtgtccaagcggagtcctatgccagtcagktggacatgctaaaggatcaaamaaagcaattggagtatctgcaaaagagcytgcaagaaggggagaaccactttccagaggaggataagtttggctaccaagccacctttcgcgactacatcagtcaagcaggcagtcttagggctagtacatcgcaacaaaatgagaccatcgcgtcccagaatgcagcagctagccaaacccaagccgaaatcggcaacctcatcartcaaacagaggctaaaattcgcgattaccagacagctaagtcagctatkgaaacaggtrcttccttggccrgtcagaatctagcctactctctttaccagtcctacaagtctcagggcgaggaaaatccccaaactaaggttcaggcagttgcacaggttgaagcacagatttctcagttagaatctagtcttgctacttaccgtgtccagtatgcaggttcagstacccagcaagcctatgcgtcagggttaagcagtcaattggaatcccttaaatcccaacayttggcaaaggttggtcaggaattgasccttctagcccagaaaatyttggaggcagagtcaggtaagaaggtacagggaaatcttttagacaaggggaaarttacggcragtgaggatggggtgcttcatcttaatcctgagaccagtgattctagcatggttgcagaaggtrccctactagcccaactttatccatctttggaaagagaagggaaagccaaactcacagcytatctaagttcaaaakatgtagcaagaatcaaggtcggtgattctgttcgctatactacgactcatgatgccgggaatcaacttttyctagattctactattacaagtattgatgcgacagctactaagactgagaaagggaatttctttaaaatcgaggcggagactaatctaacttcggagcaggctgaaaaacttaggtacggggtggaaggccgyytrcagatgattacgggcaagaaaagttayctacgttattatttrgatcaatttttgaacaaagagtaactaat

SEQ ID NO: 832 - DNA, 420 bp, Streptococcus pneumoniae
  misc_feature (1)..(420): tiling:Spneumo1:WAN024CFE; Cluster includes WAN023RWE cont ig_1609_27||||16747..17166|-|420 bp|Glimmer 2.02 orf predi ction|S.pneumoniae|670|WAN01UDCD|ORF|001
atgaaaccatcttcttttcagaccacaatagaaaatcagtttgactatatctgtaaacgtgctatggaagacgagcgaaagaattatatgctttatctttcaaggattgcaaagcgtgaggtgtccttttcggatgttggcgattatcttgttagccagtttgcgacaacagataactattcaactgactttcagatttttacactcaatgggttatcagtaggcgttgaaaatgatttgttgagtgaagcattacgtgagttgccagacaagaaacgtgaaattctactgctgttttactttatggacatgagcgattcagaaattgcagacctgttgaaattgaaccgttctactgtctatcggcatagaaccagtggactagccttaattaaaaagtttatggaggaatttgaagaa

SEQ ID NO: 833 - DNA, 900 bp, Streptococcus pneumoniae
  misc_feature (1)..(900): tiling:Spneumo1:WAN024GCQ; Cluster includes WAN023QRQ cont ig_1347_5||||2397..3296|-|900 bp|Glimmer 2.02 orf predicti on|S.pneumoniae|670|WAN01UE5Y|ORF|001
atgaaaccctcaattcatagtttggyacatcaaaccatgcaggaatgggtattggagcagggagaaaagaaattccgtgcagatcaaatctgggaatggctctaccgtaaacgtgtgcagtcatttgaagaaatgaccaacctttccaaggatttgattgctaagctcaatgaccagtttgtggtcaatcccttgaaacaacgtattgtgcaagagtctgctgatggtacagtcaaatatctctttgaattgccygacggtatgttaattgagactgtactcatgcgtcaacactatggtttatctgtctgtgtgaccactcaggtcggctgtaatatcggttgtaccttctgtgcctctggtttgattaagaagcarcgtgacctcaataacggtgaaatcgtagcgcaaatcatgctggttcagaaatactttgctgatgaaggggttcaggtcaatcttgccgtgtctcttcacgcacccaacaatgaacttcgttcaagtaycatgaagattaaccgtgcctttccgattgaaaaactctttgctgctattgaatactacattgagacaacaaaccgtcgtgtaacctttgaatatatcatgcttaatgaagtcaacgacggtgtrgaacaagccttggaattggctgaattgctcaagaacatcaagaaattgtcttatgtaaacttgattccttataacccagttagtgagcatgaccaatatagccgtagtcccaaagagcgcgtgttggctttctatgatacgcttaagaaaaaaggggtcaactgtgtggttcgtcaagagcatggtacagatattgacgcagcttgtggacaattgcgctctaacacaatgaaacgtgaccgccagaaggcagtcgcagcggtaaatcct

SEQ ID NO: 834 - DNA, 1092 bp, Streptococcus pneumoniae
  misc_feature (1)..(1092): tiling:Spneumo1:WAN024GCS; Cluster includes WAN0244AM spr0 676||15902720|NP_358270.1|681354..682439|+|1086 bp|Conserv ed hypothetical protein|S.pneumoniae|R6|NC_003098.1|ORF|11 0
atgaaaccctcaattcatagtttggyacatcaaaccatgcaggaatgggtattggagcagggagaaaagaaattccgtgcagatcaaatctgggaatggctctaccgtaaacgtgtgcagtcatttgaagaaatgaccaacctttccaaggatttgattgctaagctcaatgaccagtttgtggtcaatcccttgaaacaacgtattgtgcaagagtctgctgatggtacagtcaaatatctctttgaattgccygacggtatgttaattgaractgtactcatgygtcaacactatggtttatctgtctgtgtgaccactcaggtcgrctgtaatatcggttgtaccttctgtkcctctgrtttgattaagaagcaacgtgacctcaataacggtgaaatcgtagcgcaaatcatgctggttcagaaatactttgmtgagcgtggtcaggatgaacgcrtcagccatatcgttgtcatgggaatcggtgagccctttgataattacaacaatgtcttgaatttckttygtactatcaatgatgataaaggaatggctatcggtgctcgtcacatcacggtttcaacctcaggtttggctcataaaattcgtractttgctgatgaaggggttcaggtcaatcttgccgtgtctcttcacgcaccyaacaatgaacttcgttcaagtatcatgaagattaaccgtgcctttccgattgaaaaactctttgctgctattgaatactacattgagacaacaaaccgtcgtgtaacctttgaatatatcatgcttaatgaagtcaacgacrgtgtagaacaagccttggaattgrctgaattgctcaagaacatcaagaaattgtcttatgtaaacttgattccttataacccagttagtgagcatgaccaatatagccgtagtcccaaagagygcgtgttggctttctatgatacgcttaagaaaaaaggggkcaactgtgtggttcgtcaagagyatggtacagatattgacgcagcttgtggacaattgcgctctaacacaatgaaacgtgaccgccagaaggcagtcgcagmggtaaatcctstaactaat

SEQ ID NO: 835 - DNA, 261 bp, Streptococcus pneumoniae
  misc_feature (1)..(261): tiling:Spneumo1:WAN024G29; Cluster includes WAN023LDM 3151 29_2049||||1107541..1107801|+|261 bp|EGAD orf prediction|S .pneumoniae|R6|NC_003098.1|ORF|110
atgaaacctaacaaaatcaggataaagataaaatctctggtaaaaatggtttgtttcagtaaatcaagcattatttctcatgtaataccctacaccacggcgcgtcaagatatactctggtcggctgggcgtatcttcaatcttctcacgcagacgtcgtacagtcacatcaactgtrcggacatcaccaaaatagtcataaccccagacagtctcaagcaagtgttcgcgcgtgatgacttgacctgtatgcgatgctaa

SEQ ID NO: 836 - DNA, 261 bp, Streptococcus pneumoniae
  misc_feature (1)..(261): tiling:Spneumo1:WAN024C83; Cluster includes WAN023M8B 3153 58_435||||221988..222248|-|261 bp|EGAD orf prediction|S.pn eumoniae|R6|NC_003098.1|ORF|110
atgaaacctgttgcaatagctccatatactatcacagctgcaagtacaggaacaagaatgaaaggtacaaacataactggattcatgacaatcggaaatccaaatacaactggctcatttacgttaaatattgctggaaaagctgcaacttttcctaaggcttggtattgttttgattttgctgcaaaaagcatggcaactacaagaccaaacgtaatccctgaacctgatagaattaaaaatgaatctaaaaattgttga

SEQ ID NO: 837 - DNA, 78 bp, Streptococcus pneumoniae
  misc_feature (1)..(78): tiling:Spneumo1:WAN024C56; Cluster includes WAN023V1J AX57 1761.1_407||||335374..335451|-|78 bp|Glimmer 2.02 orf pred iction|S.pneumoniae||AX571761.1|ORF|000
atgaaacctgtttttctaacacttcattatatcacatttttaatgaatttcaatagggaaatccatacaaaaacaaga

SEQ ID NO: 838 - DNA, 1334 bp, Streptococcus pneumoniae
  misc_feature (1)..(1334): tiling:Spneumo1:WAN024GH2; Cluster includes WAN0244EP spr0 529|vncS|15902573|NP_358123.1|527983..529311|+|1329 bp|Vnc S, histidine kinase|S.pneumoniae|R6|NC_003098.1|ORF|111
atgaaacgaacaggtttatttrcaaagatatttatctataccttctcgatatttagtgttctggttatctgccttcatttagctatttattttctttttccttcgacttatctgagtcatcgtcaggaaaccattggtcaaaaggcaacagccattgcccagtccctagaagggaaagataggcagagtatcgagcaagtgttagacttgtattcccagactagtgatatcaagggraccgtcaaaggtgagatgacygaggacaagttagaagtcaaggacagtcttcctctggacacagaccgccagacaacctctctctttattgaggagcgcgaggtgaaaacgcaagacggtgstactatgattctccagtttctagcttccatggatttacaaaaggaagcrgagcaaatcagtctccagtttcttccctataccttgctggcctcctttctgatttccctyttggtggcctacatctacgctyggactattgttgcaccgattttggaaatcaagcgggtgacccgtcggatgatggacctggattcccaagtgcgattgcgcgtggattctaaggatgagataggtaatctcaaggaacaaatcaatagcctctaccagcatctcttgactgttattgcggacttgmatgaaaagaatgaagccattctccagctggagaagatgaaggtcgaattcytacgaggagcttctcatgaattgaaaacaccgctggctagtttgaaaatcctaatcgaaaatatgagagagaatatcggtcgttataaggatagagaccagtatctgggagttgccttggggattgtggatgaactcaatcaccatgttctgcagatactttccctytcttctgtgcaggaattgcgagatgatagggaaacaattgacctcctccagatgacgmaaaatctggtcaaagattatgccttgytagccaaggaaagagagctccagatagacaatagtttgacccatcagcaggctkatctaaacccatcagttatgaagttgattctttctaatctcatcagcaatgccattaagcactctgttccaggtggcttagttcgaattggagaaagagaaggagaactttttatcgaaaatagctgtagctcagaggaacaagaaaaactagcccagtctttttctgacaatgcyagtcgcaaggtcaaggggtctggtatggggctctttgtggttaagagtctattagaacatgaaaaattagcttatcgtttcgagatggaggagaatmgtttaaccttctttatagattttccaaaagtcgyccaagactarctaat

SEQ ID NO: 839 - DNA, 1602 bp, Streptococcus pneumoniae
  misc_feature (1)..(1602): tiling:Spneumo1:WAN024BFQ; Cluster includes WAN0243QC spr1 407||15903450|NP_359000.1|1390809..1392404|-|1596 bp|Hypot hetical protein|S.pneumoniae|R6|NC_003098.1|ORF|111
atgaaacgaatagtctttgaacttatttttatcgcaacgacctggtatatctttttaccgccccttaacctgaccagctgggaatttctcttcttcctctgtgggcatttgttagttgtggcaatmttatttggctttggcaaggggataaaccttgtcaaaacggttcatgtgcgccacggtaaggcggaagctgccttaaatcttgagggtttcaaaatcaatcggttagggaaaattctgttagcttcgattggwggaattcttctcttggcagctttggtttccttggtaacttcyagcatgtttcaggctaaaaattatgccaatgtagtcackgttacggaaaaagactttactgaatttcctargagtgacaccagtaaggttcctatcctagatagaagtactgctgamaaaattggagaccgctacttgggttccctaaccgataaggtgtcgcwatacgtrgcggcagatacctatacccaattgacaattgatgggaaaccttatcgggtcacaccactagaatatgcagaccctatcaaatggtttaacaatcaagccaagggaatyggtgagtatatyaaggtggacatggtaactggaaatgcggatttggtggacttgaagacaccaatcaagtattcagactcggagtattttaaccgtgatgtcaaacgtcacctgcgcttgaagtacccgacyaaaatctttaaaactccatcttttgaggtggacgatgagggcaatcctttctatgtagcaacggtttaccaaaagcaatttggacttgckgttcctcgtcctgcttcagtcattatcttggatgctacaaatggagaaaccaaggaatacagcttatcagatgttccagaatgggtggacaggrtctatccagcagaggaaaccattgagcaaatyaactacaacggcaagtacaargacggtttcttgaatgccatgatttcsaagraaaaygtgacccagactwccaakggstataattacttgtctatcggtaatgacatctatctctacacaggtgtgacgtcggctaatgcggatgagagtaatcttggtttcatccttgaaaatatgcgaacaggagamatyactaagtatagcttggcttctgcgacaraagaatcagcccgtgaatcagcagaaggtgctgttcaggagaaatcctacaaagcaaccttcccaatcctcatcaacctcaatgacaagcmtctctacatcatgggcttraaggacaatgctggcttggtcaaagagtacgccctggtagacgcagtcgagtaccaaaatgttatcgttgctactacagtggaagagatgctcagcaagtatgccaataaaaacgaccttgaaattgacaatgcaacgacagaaagcatcaakggagtagtagcagacctcaaatcagctgttatcaagggmgacacygtctacttctttaaagttgatggcaasathtacaaggthaaggcytcagtatccgatgaccttccttaccttgaaaatggtaraaccttcgaaggtcaagtaggaaaagacarytatctcaagacctttaarstacrrmtaactaat

SEQ ID NO: 840 - DNA, 780 bp, Streptococcus pneumoniae
  misc_feature (1)..(780): tiling:Spneumo1:WAN024CE8; Cluster includes WAN02408R |||A AC98424.1|||285 bp||S.pneumoniae||L29323|ORF|001
atgaaacgaattaccgcaaatcaataycawacttcagaacggtattayaaattacctaaaattctttttgaggatgaraaatatatggatatgaaactagaagtaaaggtggcttattctattttaaaagatcgtttagaattatctctyagtcgtggttggatagatgaagaaggrkcrgtytatttagtattttctaaytctaaactgatgarrytgttaggttgttckaagtcaaaattactgtcyatmaaaaaaaytcttaaagaatatgacttaattgatgaagtycaacagtcttcmagtgagaaaggragrctwgctaataagatttatttaggggarttrtcttctaccccagtagstarttcaaacaggsctagtgttaaaaaaaramtagggcaggwtgaaaatgaaackgcccccgtctcacattcagcccctagtgagactgaagttagtgagactaaatatagtgagactgattctttatttaktgaggatgaggaggakaggdatactcawcctatcttgaaaagaaaagtagaaaaggtcacaaaatatgatcragattatatttggggattggtrcaagatcaatttagacgagarggkttttctgaaacagccagtgaaattgctatgackgattttgagagaatctatcagtatgctcttgacaatgttcgctttgttagamgagcggaagtacttgctgaatttgtrtttaayggcytgtattcygtttggaayaaycgtgttagaaaaggaggtggttaa

SEQ ID NO: 841 - DNA, 249 bp, Streptococcus pneumoniae
  misc_feature (1)..(249): tiling:Spneumo1:WAN024D42; Cluster includes WAN0243IK spr1 688||15903730|NP_359280.1|1659978..1660220|-|243 bp|Conser ved hypothetical protein|S.pneumoniae|R6|NC_003098.1|ORF|1 10
atgaaacgaattttaatagcgcytgtgcgcttttaccaacgttttatctcaccagtctttccaccctcttgtcgctttgagctgacttgttccaactacatgattcaggctattgaaaaacatggktttaagggggtattgatgggcttggctcggattttacgttgtcatccctggtcgaaaacaggtaaggaccccgttccagaccrcttttcccttaaacgaaatcaagaaggggaaykaactaat

SEQ ID NO: 842 - DNA, 363 bp, Streptococcus pneumoniae
  misc_feature (1)..(363): tiling:Spneumo1:WAN024CJJ; Cluster includes WAN0242HK SP10 54||15900924|NP_345528.1|991301..991657|+|357 bp|Tn5252, O rf 10 protein|S.pneumoniae|TIGR4|NC_003028.1|ORF|010
atgaaacgagatgtgcgtgatattcggaaacaatttcgtttaacagaagcagaagaaaagcaaattctagctttgatgagagagcggggagagactaatttctctgattttcttcgtaaaagtttactttcctctgatttacaaaaacagatggagacatggtttgccctctggcaatcccaaaaactagaacaaatcagtcgtgacgttcatgaagttttaatcttggcacagtcagaacgtcaagtcacccaagagcatgtatctattctcttaacgtgcgtgcaggaattgattcaagaggttgcaaacaccatacccctcagtaaagaatttcgtgagaagtacatgaggctaactaat

SEQ ID NO: 843 - DNA, 954 bp, Streptococcus pneumoniae
  misc_feature (1)..(954): tiling:Spneumo1:WAN024FQ9; Cluster includes WAN023PQW pne1 7_17||||12120..13073|+|954 bp|Type 10A capsule operon, Gli mmer 2.02 orf prediction|S.pneumoniae||WAN01UCJH|ORF|000
atgaaacgaggaaatatgaaacargcttatatwataattgcacataataagtttgaacagttgaaatttttaatttctctgttggattataaggaacatgatatttttattattrtagryagcaaagttaatgtgggggagtctacaattacttcrcttaartcyagtgcratacattcmaatgtyattctcgtagatagwgttcctatttattggggaarywattcwcwrakttctgcagagatgttaggattycgttatgcatataattaygataaytatagtatgttccatttgttrtcaggtgtagatttaycattagtgymggcmgayaaattatttaaattctttgatcagaacaaatcaarkaattttytgagyaykgtctctgatgagattttraaatcmaataaagtrtatgagcgtgtamaatttagatayttrttycctagattcttagctagaaatattcagaacaaatatgttcgtaaatttgtagcatattaccgtaagctagagattaaaattcaamgttyratgaaaatagattgttttaaaaaatataacatgagattgrgttatgcatctaackgggkatctattaatcaggatttagttagaataatactagaagaagagaaaaatattgaaaaaatatttaaayattcgatagtraatgatgaactrttyattcctacgataatgtataaatacaatttgatggaatcgttatattcatcttcaccgatwacagatgmyccaratgattttcaaggaaatctaagatatatcaattggtgggatggaratcctcataymtggactgaytctgagcatgatatagaacaattgaarcgtggtaaakctttaggtcataagttttctagaaaatttgatttagararatatccgartcttaaagaagaaattctaattatcataaataggacagat

SEQ ID NO: 844 - DNA, 236 bp, Streptococcus pneumoniae
  misc_feature (1)..(236): tiling:Spneumo1:WAN024CYV; Cluster includes WAN0243C0 spr1 925||15903966|NP_359516.1|1908980..1909210|-|231 bp|Hypoth etical protein|S.pneumoniae|R6|NC_003098.1|ORF|111
atgaaacgagtaattttattagcagtgattcaggcagtmgttctatttttcatcattggagcgctagcttatgccttcaaaggcgatttcttctataactatctagcagttgtctttgctcctattgcaggtgtactgcgttttgggacggcttacataacggaaattgtcttgcctcgaaaggcagccgaaatcgctgaaaagcgtaaagcaggcaaaaattcaaaataactaat

SEQ ID NO: 845 - DNA, 1337 bp, Streptococcus pneumoniae
  misc_feature (1)..(1337): tiling:Spneumo1:WAN024DYT; Cluster includes WAN0243CV spr1 894|phoR pnpS|15903935|NP_359485.1|1872878..1874209|+|1332 bp|Histidine kinase|S.pneumoniae|R6|NC_003098.1|ORF|111
atgaaacgctaccttcaattttggctagtcaatctaagtgttagcctcattctgattgcagggatggcattaacttggatcagtaaaggcatcggtctctttcttctagccctttctttgggacwaggtggctactggctcttttgcctttggaaatgggaagttgcttttgagaccttgcaccaacctctcttgaccagtagtgaatactttttagaaaaagggcaagaagacttaaagtctttggctcagtatgtgtctgscctaaaaaccaaagtctcccaacaggatcagcaatacaaggayctagccgaaacaatggaggttcttctgtcrcacctaaccatggggacgtttttagtttccgctcaaggtcagatgttattatccagtcgctctctgcctcattattttcccgatgtggacggcgacataagttcacttgatgacctcaaacggatggatattcgraatttagttcaccaagcctttgatcaaaaaacaaggttaaaacaagaagtaagtgggtttcatgagggtgacttgattttagaagtgacagcagttcccgtttttagccccacccaatctgtggaagctgtgctcgtcttgctatatgatttaacaacgattagaacttatgaaaagttaaatttagcctttgtctcaaatgcctcccatgaattgaggacaccagttacttcrattaagggctttgctgaaaccattaaggggatgtcagctgaagaagaagcgctcaaggatgactttctagacattatttacaaagaaagyttgcgtcttgagcatattgttgagcatcttcttaccttatctaaggctcaacaaatgcctatacaatggacgaccctttctttggcwgaatttgtacaggatttgactcaaagcttgcaacctcagctcaagaagaaggatttacagctaaaggtgcaggtgccagatgatgtcaccctcgtatcagatagtcaattactttcccaaatcttactcaatcttttatccaatgccatccgttacactgaacaagggggraaaattgaggtcaagacccaaaaggtgaacgaaggcattaagatttctgtatcagatacagggattggtattagtcaattagagcaggatcgtatttttgaacgtttttaccgagttaataaaggtcgaagcagacaaactggtggcactggtcttggccttgccattgtcaaagaactcagtcaattattaggtggccaagtcacggtgacragtcagcttggcagaggcagttgcttcacgatttttcttcctaaccaatctttcgcacaggactaactaat

SEQ ID NO: 846 - DNA, 1146 bp, Streptococcus pneumoniae
  misc_feature (1)..(1146): tiling:Spneumo1:WAN024FRH; Cluster includes WAN023PW3 pne0 8_11||||7712..8857|+|1146 bp|Type 7A capsule operon, Glimm er 2.02 orf prediction|S.pneumoniae||WAN01UCKE|ORF|000
atgaaacggattttatacttgcatgctggtgcagaaatgtatggagcagataaggttttattggaattgatcaaaggattggattccaaagaatttgaagctcatgtcatcctgccaaatgatggtgttttagtcaaggccttgcgtcaagttggggctcaggtcagtgtgttggattatccgattttacgtagaaaatactttaatcctaaggggattttagaatatctgaaatcctatcggcgctactctcaaaaaatttcccaatatgtgcgtgagaatgggatagatcttgttcataacaatacgacagccgttctggaaggaatctatctcaagagaaaagtaaaactccccttaatctggcatgttcatgagattattgtcaagcccaaggctatttcagattttatcaactttttgatggggcgatatgcagataagatcgtaacagtatctcaagctgtttccagccatgtcaaacaatctccttttatcaaagaaggtcaggtacaggttgtatataacggagtggacaatgctgtctatcatcccatgcaagcaagcacagtgcgtgaacaatttgctattccagaagaatctcttgtcattggtatggtaggccgcgtcaacgcttggaagggacagggagattttctagaagcagtggcgccgattttggagcagaatcccaattctatcgcttttctggcaggaagtgcctttgcgggagaagagtggcgagttgaagaactcgaatctacgattgccaaatcaagtgtagcctcacaaatcaaacgaattgactattatgagcatacgactgagctttataatatgtttgatatctttgtcttgccaagcaccaatcccgatcccctaccgacagtggtactagaggcgatggcatgtggcaaaccagtagttggctatcggcatggtggtgtctgtgaaatgattaaggagggcaaaaacggtctcctagccactccaaataagcctgcagaattgtctaaggctattcaagaattggctgacaatatcgagaaaagagaacagttaggaagtgcatctttccaacgtcaaaaagaattcttttcgttggaaagttatattcggaatttctcagagctatataaaaaatac

SEQ ID NO: 847 - DNA, 1155 bp, Streptococcus pneumoniae
  misc_feature (1)..(1155): tiling:Spneumo1:WAN024FRG; Cluster includes WAN023PB8 pne4 5_11||||7704..8858|+|1155 bp|Type 22F capsule operon, Glim mer 2.02 orf prediction|S.pneumoniae||WAN01UCHA|ORF|000
atgaaacggattttatatttacatgctggtgcagaaatgtatggagcagataaggttttattggaattgatcaaaggattaaatcctcaagaatttgaagctcatattatcctgcctaatgacggtgttttagtcgaagccctacgccaagttggcgctcaggttagcgtgttggattatccgattttacgtagaaaatactttaatcctaaagggattttggaatatctgaaattttatcgtcgttactcccaaaaaattgcccaatatgtgcgtgaaaatggaatagatcttgtacataacaatacaacagctgtcttggaaggaatctatctcaaaagaaaggtgaaacttcccttgatctggcacgttcatgagattattgttaagcccaaggctatttcagattttattaacttcttgatggggcgttatgcagataagattgtaacagtctctcaagctgtggccagtcatgtcaaacagtctccctttatcaaagagggtcaggttcaggttatctataacggagtggacaatgcgatctatcatccgatgcagtcaagtgcagtgcgtgaaaaatttgggatcccagaggatgctctcgtcattggtatggttggacgtgtcaacgcgtggaaggggcaaggagattttctagaagctgtgacaccgattttggagcataatccgaattccgtagcttttctagcggggagtgcctttgctggtgaagagtggcgagttgaagaattagagtctaagatttccaaatcaagtgtagcctcacaaatcaaacgaattgaatattatgagcatacgrctgaactttataatatgtttgatatctttgtcttaccaagtaccaatcccgatccactaccaacagtggtactagaggctatggcttgtggtaagccagtagtcggctaccgtcatggtggtgtctctgaaatggttgttgaaggaaccaatggcttactggcaatcccaggacaatcacaagaactatcggatgcgattttggagttggtttctgatccagaaaaacggctccaatttggccaagcatcagtaagaagacaaggagaatcgttttctttggaatcttatatccgtagtttctcagaattatataagagttataaaaatgaa

SEQ ID NO: 848 - DNA, 590 bp, Streptococcus pneumoniae
  misc_feature (1)..(590): tiling:Spneumo1:WAN024EW3-5; Cluster includes WAN0243C1 sp r1924|aspS|15903965|NP_359515.1|1906865..1908628|-|1764 bp |Aspartyl-tRNA synthetase (aspartate-tRNA ligase)|S.pneumo niae|R6|NC_003098.1|ORF|221
atgaaacgtagtatgtatgctggtcgtgttcgtgaggaacacatcggacaagaaataaccttgaaaggatgggttggccgtcgtcgtgaccttggtggtttgatctttatcgatcttcgtgaccgtgaaggaatcatgcagttggttatcaaccctgaaaaagtatctgcagaggttatggcaacagctgaaagccttcgtagcgaatttgttattgaggtgactggtcaggtcgctgcgcgtgagcaagccaatgataagttgccaactggtgcggttgagttaaacgtgacagctcttattgtgcttaacacagctaagacaacaccatttgagattaaggatggcattgaggcaaatgacgatacacgtttgcgttaccgttaccttgaccttcgtcgtccagaaatgttggaaaatcttaaacttcgtgccaaggtgacccactctatccgcaactacttggatgagttggagtttatcgacgtggagacaccattcctttctaagtcaacgcctgaaggggcgcgtgattatttagtgccgtctcgtgttaataaggggcatttttacgctcttcctcaaagtcc

SEQ ID NO: 849 - DNA, 1013 bp, Streptococcus pneumoniae
  misc_feature (1)..(1013): tiling:Spneumo1:WAN024G9Y; Cluster includes WAN02447A spr0 796|pfkA|15902840|NP_358390.1|799177..800184|+|1008 bp|6-p hosphofructokinase I|S.pneumoniae|R6|NC_003098.1|ORF|221
atgaaacgtattgctgttttgactagtggyggagacgcmcctggtatgaacgctgcyatccgtgcagttgttcgtcaagcaatttcagaaggaatggaagtktttggtatctatgacggatatgctggtatggttgccggtgaaattcatcccctagatgcagcttcmgtarsdrayatcatttctcgtggtggtactttycttcactcagctcgttayccagagttcgctcaacttgaagggcaacttaaagggattgagcaattgaaaaaacacggaattgaaggtgtagttgttatcggtggtgacggwtcttaccacggcgctatgcgtttgactgaacatggcttcccagctattggtcttccaggtacaatcgataacgatatcgttggtactgactttacaatcggttttgacacagcggttactactgccatggacgctatygataagattcgtgatacatcatcaagtcaccgtcgtacttttgtaatcgaagttatgggacgtaacgctggtgatatcgctctttgggctggtattgcaactggtgctgatgaaatcatcatccctgaagcagrcttcaagatggaagatatcgtagcaagcatcaaagctggttatgaatgtggtaaaaaacacaatatyatcgtcttagctgaaggtgtgatgtcagcggctgaatttggtcaaaaacttaaagaagctggagatayaagcgaccttcgtgtaacagaacttggacatattcaacgtggtggttctccaactscgcgtgaccgtgttttggcgtcacgtatgggtgcacatgctgttaaacttcttaaagaaggtatcggtggtgttgcggttggtattcgtaacgaaaaaatggttgaaaatccaattcttggtactgcagaagaaggggcattgtttagccttactgcagaaggtaagattgtggttaacaacccacacraagccgatattgagctatctagcttgaataagagcttgtcataactaat

SEQ ID NO: 850 - DNA, 1077 bp, Streptococcus pneumoniae
  misc_feature (1)..(1077): tiling:Spneumo1:WAN024DAP; Cluster includes WAN02440C spr1 046|xerC|15903090|NP_358640.1|1040078..1041148|+|1071 bp|I ntegrase/recombinase|S.pneumoniae|R6|NC_003098.1|ORF|111
atgaaacgtgagattttactggaacgaatcgacaaactaaaacaactcatgccctggtatgttctggaatactaccaatctaarctggctgtrccctacagttttacaaccctgtacgaataccttaaggaatatgaccgatttttcagctgggttttggagtctggtatttcaaacgctgataaaatatccgatattcctttatcagttttggaaaatatgtctaagaaagacatggaatcctttatcctttatstacgtgaacgtcccttgctgaatgctaatacaacaaaacaaggtgtttcacagacaactatcaatcgaaccttatcagcactttctagtctttacaagtatctaaccgaggaggttgaaaacgatcagggggaaccttatttctatcgtaatgtaatgaaaaaagtttcmaccaagaaaaagaaagaaacccttgctgccagagctgaaaatatcaagcaaaaactctttctaggtgatgaaacagaaggttttctaacttatatcgatcaagagcacccacaacagctttcaaatcgagctctctcatcattcaacaaaaataaagaacgwgatttagccattattgcccttctcttggcatctggtgttcgcttatctgaagctgttaatctagatctaagagatctcaatctaaaaatgatggttattratgttactcgaaaaggtkgcaaacgtgactcagtcaatgtcgctgcttttgctaaaccttatttagagaattatctggccattcggaatcaacgctataaaacggaaaaaacagatacagccctttttttaactctctacagaggtgttcctaatcgtatcgatgcttctagcgttgagaaaatggttgctaaatactcagaggattttaaagtrcgtgtaacaccccataaactgcgccatacrctagcaactaggctctatgatgckactaaatcacaagttttagtcagtcaccaactaggacatgcyagcacacaagtcactgacctctatacccatattgttartgatgaacaaaagaatgctctrgatagtttaykaactaat

SEQ ID NO: 851 - DNA, 1229 bp, Streptococcus pneumoniae
  misc_feature (1)..(1229): tiling:Spneumo1:WAN024ETN; Cluster includes WAN02449M spr0 712|rodA|15902756|NP_358306.1|713340..714590|+|1251 bp|Rod shape determining protein|S.pneumoniae|R6|NC_003098.1|ORF |111
atgaaacgttctctcgactcwagagtcgattayagtttgctcttgccagtattttttctactggtcatcggtgtggtggctatctatatagccgttagtcatgattaycccaataatattctgcccattttagggcagcaggtcgcctggattgccttggggcttgtgattggttttgtggtcatgctctttaatacagaatttctttggaaggtgaccccctttctatatattttaggcttgggacttatgatcttgccgattgtattttataatccaagcttagttgcatcaacgggtgccaaaaactgggtatcaataaatggaattaccctattycaaccgtcagaatttatgaagatatcctatatcctcatgttggctcgtgtcattgtccaatttacaaagaaacataaggaatggagacgcacggttccgctggactttttgttaattttctggatgattctctttaccattccagtcctagttcttttagcacttcaaagtgacttggggacggctttggtttttgtagccattttctcaggaatcgttttattatcaggggtttcttggaaaattattatcccagtatttgtgactgctgtaacaggagttgctggtttcttagctatctttattagcaaggacggacgagcttttcttcaccagattggaatgccgacctaccaaatyaatcggattttggcttggctcaatccctttgagtttgcccaaacaacgacttaccagcaggctcaagggcagattgccattgggagtggtggcttatttkgtcagggatttaatgcttcgaatctgcttatcccagttcgagagtcagatatgatttttacggttattgcagaagattttggctttattggctctgtcctggttattgccctctatctcatgttgatttaccgtatgttgaagattactcttaaatcaaataaccagttctacacttatatttccacaggtttgattatgatgttgctcttccacatctttgagaatatcggtgctgtgactggactacttcctttgacggggattcccttgcctttcatttcgcaagggggatcagctattatcagtaatytgattggtgttggtttgcttttatcgatgagttaccagactaatytagytgaagaaaagagcggaaaagtyccattcaaacggaaaaaggttgtattaaaacaaattaaataactaat

SEQ ID NO: 852 - DNA, 245 bp, Streptococcus pneumoniae
  misc_feature (1)..(245): tiling:Spneumo1:WAN024DF6; Cluster includes WAN0244A8 spr0 690||15902734|NP_358284.1|690411..690650|+|240 bp|Conserve d hypothetical protein|S.pneumoniae|R6|NC_003098.1|ORF|111
atgaaactaaaaaaggagaagaaaatrgcagaatttacatttgaaatcgaagagcacttgttgactctttctgaaaacgaaaaaggttggaccaaggaaattaaccgtgtgagctttaatggtgcccctgcaaagtttgatattcgtgcttggagtccagaccatactaaaatgggcaaagggattactctctcaaatgaagaatttcaaacgatggtggatgcctttaaaggcaactaactaat

SEQ ID NO: 853 - DNA, 1058 bp, Streptococcus pneumoniae
  misc_feature (1)..(1058): tiling:Spneumo1:WAN024CUP; Cluster includes WAN0244R9 spr0 077|hk08|15902121|NP_357671.1|84533..85585|+|1053 bp|Histi dine kinase|S.pneumoniae|R6|NC_003098.1|ORF|111
atgaaactaaaaagttatattttggttggatatattatttcaaccctcttaaccattttggttgttttttgggctgttcaaaaaatgctgattgcgaaaggcgagatttactttttgcttgggatgaccatcgttgccagccttgtcggtgctgggattagtctctttctcctattgccagtctttacgtcgttgggcaaactcaaggagcatgccaagcgggtagcggccaaggatttycctycaaatttggaggttcaaggtcctgtwraatttcmscawttagggcaamcttttaatgaratktyccatgatttgcmggkwagctttgatyccttggaaraaascsaacgaraaaagggcttraysmytgcycagttgtcgcatgatattaagacycctatcacttcgatycaagcgacggtagaagggattttggatgggattatcaaggagtcggagcaagctcattatctagcaaccattggacgccagacggagaggctcaataaactggttgaggagttgaattttttgaccctaaacacagctagaaatcaggtggaaactaccagtaaagacagtatttttctggacaagctcttaattgagtgcatgagtgaatttcagtttttgattgagcaggagagaagagatgtccacttgcaggtaatcccagagtctgcccggattgagggagattatgctaagctttctcgtatcttggtgaatctggtcgataacgcttttaaatattctgctccaggaaccaagctggaagtggtggctaagctggagamkrrccagctttcaatcagtstracyratgaagggcagggtattgccccagaggatttggaaaatattttcaaacgyctttatcgtgtcgaaacttcgcgtaacatgaagacaggtggtcatggattaggacttgcgattgcgcgtgaattggcccatcaattgggtggggaaatcacagtcagcagccagtacggtctaggaagtacctttaccctcgttctcaacctctctggtagtgaaaataaagcctaactaat

SEQ ID NO: 854 - DNA, 1241 bp, Streptococcus pneumoniae
  misc_feature (1)..(1241): tiling:Spneumo1:WAN024F42; Cluster includes WAN0244IS spr0 382|fabF|15902426|NP_357976.1|381116..382360|+|1245 bp|Bet a ketoacyl-acyl carrier protein synthase|S.pneumoniae|R6|N C_003098.1|ORF|111
atgaaactaaatcgagtagtggtaacaggttatggagtaacatctccaatcggaaatacaccagaagaattttggaatagtttagcaactgggaaaatcggcattggtggcattacaaaatttgatcatagtgactttgatgtgcataatgcggcagaaatccaagattttccgttcgataaatactttgtaaaaaaagataccaaccgttttgataactattctttatatgccttgtatgcagcccaagaggctgtaaaycatgccaatcttgatgtagaggctcttaatagggatcgttttggtgttatcgttgcatctggtattggtggaatcaaggaaattgaagatcaggtacttcgccttcatgaaaaaggacccaaacgtgtcaaaccaatgactcttccaaaagctttaccaaatatggcttctgggaatgtagccatgcgttttggtgcaaacggtgtttgtaaatctatcaatactgcctgctcttcatcaaatgatgcgattggggatgccttccgctccattaagtttggtttccaagatgtgatgttggtgggaggaacagaagcttctatcacaccttttgccatcgctggwttccaagccttaacagctctctctactacagaggatccaactcgtgcttcgatcccatttgataaggatcgcaatgggtttgttatgggtgaaggttcagggatgttggttctagaaagtcttgaacacgctgaaaaacgtggagctactatcctggctgaagtggttggttacggaaatacttgtgatgcctaccacatgacttctccacatccagaaggtcagggagctatcaaggccatcaaactagccttggaagaagctgagatttctccagagcaagtagcctatgtyaatgctcacggaacgtcaactcctgccaatgaaaaaggagaaagtggtgctatcgtagctgttcttggtaaggaagtacctgtatcatcaaccaagtcttttacaggacatttgctgggggctgcgggtgcagtagaagctatcgtcaccatcgaagctatgcgtcataactttgtaccaatgacagctgggacaagtgaagtatcagattatatcgaagctaatgtcgtttatggacaaggyttggagaaagaaattccatacgctatttcaaatacttttggttttggaggccacaatgcagttcttgctttcaaacgttgggagaatagataactaat

SEQ ID NO: 855 - DNA, 159 bp, Streptococcus pneumoniae
  misc_feature (1)..(159): tiling:Spneumo1:WAN024AYU; Cluster includes WAN02431D SP02 77||15900211|NP_344815.1|255665..255817|+|153 bp|hypotheti cal protein|S.pneumoniae|TIGR4|NC_003028.1|ORF|120
atgaaactaagaatatttgcggaagataagccggctaagaaggtatttgaatatcaattagaacttgctgatcgtacaattcttctatcgacagcactcttgtcaggtgctattgctttagcaggaatcttttctgctttgaaagaaaaactaactaat

SEQ ID NO: 856 - DNA, 315 bp, Streptococcus pneumoniae
  misc_feature (1)..(315): tiling:Spneumo1:WAN024DTU; Cluster includes WAN023KBA 3142 26_3747||||2027116..2027430|-|315 bp|EGAD orf prediction|S .pneumoniae|R6|NC_003098.1|ORF|110
atgaaactaatattatccaagatagtttcaccatcaatctttacagttarattttctactgtcaagagatcattaccaatctcacgttccgctttaaagttgataaatggatatttacgactagatggyacaatctcttctagctcaatcttatcaagcattttcttacgtgatgttgcctgccttgacttagaagcattggcagagaaacgagcaacraattcttgcaattgtttaattttttcttctgctttagcattacggtctgctagcaatttagcagcaagctcagaagattccttccagaagtcgtag

SEQ ID NO: 857 - DNA, 737 bp, Streptococcus pneumoniae
  misc_feature (1)..(737): tiling:Spneumo1:WAN024F3Z; Cluster includes WAN0244IT spr0 381|fabG|15902425|NP_357975.1|380372..381103|+|732 bp|3-ke toacyl-acyl carrier protein reductase|S.pneumoniae|R6|NC_0 03098.1|ORF|111
atgaaactagaacataaaaatatctttattacaggttcgagtcgtggaattggtcttgccatcgcccacaagtttgctcaagcaggagccaacattgtcttaaacagtcgtggggcaatctcagaagaattgctcgctgagttttcaaactatggtatcaaggtggttcccatttcaggagatgtatcagattttgcagacgctaagcgtatgattgatcaagctattgcagaactgggttcagtagatgttttggtcaacaatgcagggatyacccaagatactcttatgctyaagatgacagaagcagattttgaaaaagtgctcaaggtcaatctgactggtgcctttaatatgacacaatcagtcttgaaaccgatgatgaaagccagagaaggtgctatcattaatatgtctagtgttgttggtttgatggggaatattggtcaagctaaytatgctgcttctaaggctggcttgattggctttaccaagtctgtggcacgcgaggtcgctagtcggaatatacgagtcaatgtgattgctccaggaatgattgagtctgatatgacmgctatcytrtcagataagattaaggaagctacactagctcagattccgatgaaagaatttgggcaggcagagcaggttgcagatttgacagtatttttagcaggccaagattatctaactggwcaagtgrttgccattgatggtggcttaagtatgtarctaat

SEQ ID NO: 858 - DNA, 635 bp, Streptococcus pneumoniae
  misc_feature (1)..(635): tiling:Spneumo1:WAN024D6T; Cluster includes WAN0243ON spr1 468||15903511|NP_359061.1|1449999..1450628|-|630 bp|Conser ved hypothetical protein|S.pneumoniae|R6|NC_003098.1|ORF|1 10
atgaaactagcagttattgcagcaaatggacaagyggggaargcaattgttgaagaagyagtcaaacgaggacatgaagtaacggctattgttcgttctgaaaacaaaagtcaakctgagtctattattaaaaaagatttatttgagttgacaaaagatgatcttactggatttgatgctgttatttcagcgtttggtgcttatacaccagatacgctaccgctccayagcaaatcaatygaactatttaatcagcttcttgctggaacacagacacgttttctagttrtagggggagcagraagyctttatatagatgaamcaaaaaygacacgacttttagawacgycygattttcctgaagaatttaagycactagcaaaagctcaagcggatgaattggatcttcttcgtacaaaaaataatctcaactggacttttgtcagtcctgctgtagattttattcccgatggtgaaaaaacaggaaactacattctagcaggagaaatttttactactaatgraaaaggaataagccagattagttatgcagattatgctattggattggtagatgaacttgaaaaaggtcatcatataaaagaacgtatctctttacttgaaaaataactaat

SEQ ID NO: 859 - DNA, 1194 bp, Streptococcus pneumoniae
  misc_feature (1)..(1194): tiling:Spneumo1:WAN024D7K; Cluster includes WAN0243QK spr1 399|aspB|15903442|NP_358992.1|1377486..1378673|-|1188 bp|A spartate aminotransferase|S.pneumoniae|R6|NC_003098.1|ORF| 111
atgaaactatccaaccgtgttttagaaatggaagaaagtgtgactttggctgctggagcccgtgccaaagcactgaaggctgagggtagagatattttgtctctaaccttgggtgagccagatttcactactcccaaaaatatccaagatgccgccattgcatcgattcgagatgggcgtgcttctttttatacagtaacctcaggtctgccagagcttaaggcggyggtcaatagctactttgagcgcttttacggctattctgtagcgtcaaatcaagtgacagtcgctgcgggagccaaatattctctctataccttctttatggctgtggtcaatccaggtgatgaagtcatcatcccaaccccatactgggttagctatggagatcaggtcaagatggcagaaggcgttcccgtctttgtttctrctaaggaagacaatcactttaaggtgaccgtagakcagttagaagcagctcgcactgacaagaccaaggttttggtgctgaattcgccatctaatcccacaggtatgatttacacccgtgaggaactcttggcaattggaaactgggctgtaraaaatgatattctcatcctagcagaygatatctatggccgcttggtttataatggtcatgagttcacaccgatttctagcctatcggaagcgattcgcaagcaaacagtggtcatcaatggtgtgtctaaaacytatgccatgactggttggcggattggttatgccgttggagaagcagayattatcgctgccatgtccaagattgcaggtcaaacaacttcgaatccgtcagcagtagcccaatatgcagcagttgaggctctatcaggtgagcaagatactgtagaaagcatgcgtcaggcctttgaggaacgtcttaataccatctatcccctccttgcagaggtrccaggatttgaagtggtcaaaccrcaaggggccttctatctcttcccaaatgtcaaaaaggccatggagatgaaaggytacacggatgtgacagactttacaactgytatcttagaagaagccgaagtggccttggtaacaggagctggatttggagcaycagaaaatgtccgcctcagctatgcgacagacctagacacgcttaaagaagcagtcgaacgcttgaaagcatttatgggtagtgagaatgatykaactaat

SEQ ID NO: 860 - DNA, 877 bp, Streptococcus pneumoniae
  misc_feature (1)..(877): tiling:Spneumo1:WAN024GEA; Cluster includes WAN0244C6 spr0 620|ABC-SBP-truncation|15902664|NP_358214.1|629408..629956 |-|549 bp|BC transporter substrate-binding protein - unkno wn substrate, trun...|S.pneumoniae|R6|NC_003098.1|ORF|321
atgaaactattcaaaccactcytaactgttttagcacttgcctttgcccttatctttatcactgcttgtagctcaggtggaaacgctggttcatcctctggaaaaacaactgccaaagctcgcactatcgatgaaatcaaaaaargcggtgaactgcgaatcgccgtgtttggagataaaaaaccgtttggctacgttgacaatgatggttcttaccaaggtacgctacgatattgaactarskaaycaactagctmaagaccttggtgtcaaggttaaatacatttcagtcgatgctgccaaccgtgcggaatacttgatttcaaacaaggtagatattactcttgctaactttacagtaactgacgaacgtaagaaacaagttgattttgcccttccatatatgaaagtttctctgggtgtcgtatcacctaagactggtctcattacagacgtcaaacaacttgaaggtaaaaccttaattgtcacaaaaggaacgactgctgagacttattttgaaaagaatcatccagaaatcaaactccaaaaatacgaccaatacagtgactcttaccaagctcttcttgacggacgtggagatgccttttcaactgacaatacggaagttctagcttgggcrcttgaaaataaaggatttgaagtaggaattacttccctcggtgatcccgataccattgcggcagcagttcaaaaaggcaaccaagaattgctagacttcatcaataaagatattgaaaaattaggcaaggaaaacttcttccacaaggcctatgaaaaracacttcacccaacctacggtgacgctgctaaagcagatgacctggttgttgaaggtggmmawgttratctarctaat

SEQ ID NO: 861 - DNA, 1248 bp, Streptococcus pneumoniae
  misc_feature (1)..(1248): tiling:Spneumo1:WAN024DX2; Cluster includes WAN0243BT spr1 932||15903973|NP_359523.1|1913038..1914285|-|1248 bp|Conse rved hypothetical protein|S.pneumoniae|R6|NC_003098.1|ORF| 212
atgaaactattgtttagaaatcmagcttatmgmmtwttgactttrtcacgcttcttcaatgcttttggtgyttcgattttcaayctggtctttatcgtctatgcatcgaccttgtcacaagcatcttttgctgttgctatggcgaatattgtcatgmttcttccgacyytctttacagtttttgyagggattcgggcagattacacgagggmcaaggtcaaatggatggtctatagcggtttgtttcaggcggttytattttttctrgcagccctagttgttcagcaagctagtytmtttgccttttctagcctgtgtttgatcaatgtcattagtgatatcatcagtgattttgcaggtggcctgcgtatgcctcttattaaggaaaaagtagctgaagatgatytgatggaggcttattctttttcacagttcatcacctatatttcagctattggtggtcaagctttcggagtctggctcttagctctatcggtcaacaatttttcyctcgttgcgggaatyaatgcytgctttttcctmgtatcagccactatcctctttttaggaaaaagcaaattgagcctgtcaatgtcatctgctgatggtgaaaacttaaaaaatgakaagctttctatcaaagaccagttcctaacaatttaccgaaatttacgtctcgtttttcttaaaagtggacagaaaaactttggttttatgctctttgctgtcttgcttattaattccttgggtggcgctttgggtggaatttataatatcttctttttgagccattctctcttgaatttttcttatacagaggcactatttatcaatcaattctgtgttttagtakcartcatcatcagtagccttacgggcaatgattattttgggaagcagtccttgcctagattgatgatgtgggmgaccgtaggacttagtctagttggtttggctaatttattcaatcaagtcgtgcttggtttgctatttctcttctttacyctgtatgtgtctggtaaagttcaaccaaagattagtgccatgctcatgaaaaatctagctccagaggttctagctcrtactagtaattttttaggtctattgtttaccttatccatacctgtgggaacagcttgtttttcactagtagccgtatggaayatrcagttgacttggatgctatttgttggtctttccttgctagctatttttttracaattcttaatctcaaaaatgatatctaa

SEQ ID NO: 862 - DNA, 2798 bp, Streptococcus pneumoniae
  misc_feature (1)..(2798): tiling:Spneumo1:WAN024F5R; Cluster includes WAN0243NP spr1 502|ileS|15903545|NP_359095.1|1480465..1483257|-|2793 bp|I soleucyl-tRNA synthetase|S.pneumoniae|R6|NC_003098.1|ORF|1 11
atgaaactcaaagayacccttaatcttgggaaaacwgmwttcccaatgcgtgcaggccttcckaccaaagagccagtttggcaaaaggaatgggaakatgcaaaactttaycaacgtcgtcaagaaytraaysaaggraaacckcatttyrycttgcatgatggccctccatacgcwaacggaaatatccacgttggacatgcyatgaaymakatytcaaaagatatyatyrttcgttctaagtctatgtcaggwtttwacgcrccwtwtatyccwggttgggatactcatggtctgccaatcgagcaagthttgkcaaarcaaggtgtsaarcgyaaagaaatggacttggttgagtacttgaaactytgycgtgagtacgctctttctcaagtwkataaacaacgtgawgatttyaaacgyttgggkrtktcwggtgactgggaaaatyyatatgtgacyttractccwgactatgaagcagcycaaatycgtgtmtttggtgagatggctaataagggttatatctaccgtggtgcyaagccagtttactggtcatggtcatctgagtcagcmcttgcygaagcrgarattgaataccatgayttggtttcracttcmctttaytatgccaayaaggtaaaagatggcaaaggwrtyctasatacagatacttatatcgtwgtctggacaacractccatttacyatcacagcytctcgtggtttgackgttggtgcagatattgattacgttttggttcaacctgytrgtgaarctcgtaagtttgtcgttgctgcwgaattrttgactagcttgtctgagaaatttggctgggctgatgttcaagtkttggmaacttaccgtggycaagaactyaaccacatcgtaacagaacacccatgggatacagctgtagawgagttggtaatycttggtgaycacgttacsactgactctggtacaggtatygtccatacagcccctggttttggtgaggacgaytacaatgttggtattgctaatrrtcttgaagtcgcagtgactgttgaygaacgyggtatcatgatgrmgaatgctggtcctgartttgaaggtcarttctaygamaaggtwgtwccaactgttattgaaaaacttggtaacctccttctwgcccaagaagaaatctctcactcatayccatttgactggcgtactaagaaaccaatcatctggcgtgcagttccacaatggtttgcctcagtttcwaaattccgycaagaaatcttggaygmwattgawaaagtkaaattccaywcagaatggggtaaagtmcgtctwtayaatatgatycgtgaycgtsgtgactgggttatctctcgtcaacgtrcttggggtgttccacttccwatcttctaygcwgaagayggtacagctatcatgryagctgarackattgaacaygtrgckcaactytttgarrwayatggttcaagcatttggtgggaacgtgatgccaaagayctcttrccagaaggatttacwcatccaggttcwccaaayggsgagttcaaraaagaaacwgatatyatggaygtwtggtttgactcaggttcatcatggaatggwgtkktggtaaaycgtccwgaattgacttayccagcygacctttacctwgaaggttctgaccaataccgtggttggttyaactcatcactyatyacatctgttsccaaccatggcgtagcaccttacaaacaaatcttgtcacaaggttttrcccttgatggtaaaggtgagaagatgtctaaatcwcttggaaatacyattgctccaagygatgttgaaaaacaattyggtgcwgaaatcttgcgtctctgggtaacaagtgttgactcaagyaatgacgtgcgtatctctatggatatyttsagccaagtttctgaaacttaccgtaagattcgtaacactcttcgtttcttgattgccaatacatctgactttaacccagctcaagatryagtcgcttacsatgarcttcgttcagttgataagtacatgackattcgctttaaccagcttgtcaagaccattcgtgatgcctatgcrgactttgaattcttgacratctacaaggccttggtgaactttatcaacgttgacttgtcagccttctaccttgattttgccaaagatgttgtttacattgaaggtgccaaatcaytggaacgccgtcaaatscagactstyttctatgacattcttgtcaaaatcaccaaactcttgacaccaatccttcctcacactgcggaagaaatytggtcatatcttgagtttgaarchgaagacttcgtycaattgtcagaattrccagargytcaaacttytgctaaycaagaagaartcttggatacatgggcagccttcatggacttycgtggacaagcwcaaaaagccttggaagaagctcgtaatgcaaaagtwatcggkaaatcrcttgaagcacacttgacagtttatccaaaygaagtkgtgaaaactctactcgaagcagtaaacagcaatgtrgcwcaacttttgatcgtgtcwgasttgaccatcgcagaagrrccagctccrgaagctgcccttagcttcgaagatgtagccttcacagttgaacgygctrcwggtsaagtatgtgaccgttgccgtcgtatygacccaacaacascagaacgyagctaccaggcagtyatctgtgaccactgtgcaagcatcgtagaagaaaaytttgcggawgcagtcgcagaaggatttgaagagaaataactaat

SEQ ID NO: 863 - DNA, 626 bp, Streptococcus pneumoniae
  misc_feature (1)..(626): tiling:Spneumo1:WAN024DCR; Cluster includes WAN02444R spr0 887|gpmB|15902931|NP_358481.1|877383..878003|-|621 bp|Phos phoglycerate mutase|S.pneumoniae|R6|NC_003098.1|ORF|111
atgaaactctactttgtccgccacggtcgtaccctctggaaccaagaaggtcgttttcaaggtgctagyggtgattctcctcttcttcctgaatccattgaaaccctaaaacgacttggycagtatctcaaggaaattccttttgatcagatttattcaagtgatttacctcgagcggtcaaatctgctgagattatccaaagtcaactcyataccccctgttctttagaaatcgttcctaatctccgtgaatggcaacttgggaagttagaaggtttgaaaattgcaaccytggaagctatttacccgcaacaaatccaggcttttcgttcaaatcttgctcaatttgacactcgaatgttcggagccgaatccctctatagtacaactcarcggaccatccaatttatcaaatcattaaaagatagtccagctgarcgtattctaattgtcggacacggcgccaatcttactgccagtcttcgtactctcctaggctataaagaaccacttcttcgtaaagatggcggtctagcaaatgccagcctgaccattatagaaacccatgattttgaaacattcactcycaatacttggaatgatacttcttatcaatcataactaat

SEQ ID NO: 864 - DNA, 450 bp, Streptococcus pneumoniae
  misc_feature (1)..(450): tiling:Spneumo1:WAN024G9N; Cluster includes WAN02446X spr0 809||15902853|NP_358403.1|811867..812316|+|450 bp|Conserve d hypothetical protein|S.pneumoniae|R6|NC_003098.1|ORF|110
atgaaactgactgattaygtcaagcaggtttcactagaagacttcggsagascttttatccatcatgtccagtggaataggcgtctacgttcgacaggtgggcgatttttccccaaagatgggcatytggattttaatcccaaggtttatcagraactgggkwtggasgtttttaggaaaattgtccgacatgaactctgtcattatcacctytatttycaagggaarggctatcaacacaaggatcgggattttaaggaactgttgaaagcagtggatggattamggtttgtaccatccttgcccaawagtaactcyaarccamtcaagctytatcgttgycaatcctgccagcaaasktatcagcgyaagcgwaggattgataccmaacgctatcgctgtggactttgtcgaggwaarttgctattrrywaatcagcctgaggactga

SEQ ID NO: 865 - DNA, 1268 bp, Streptococcus pneumoniae
  misc_feature (1)..(1268): tiling:Spneumo1:WAN024CGT; Cluster includes WAN0244RY spr0 052|purD|15902096|NP_357646.1|55644..56906|+|1263 bp|Phosp horibosylglycinamide synthetase|S.pneumoniae|R6|NC_003098. 1|ORF|331
atgaaactgcttgttgtcggttckggtggtcgtgagcatgcgattgctaaaaagttacttgaatcaaaagacgtkgaaaaagtctttgtagctcctgggaatgayggkatgactctggatggtytggaattggtaaatatmtctatttccgaacattmtaaattgattgacttcgcaaagrccaaygatrttgcttggacctttatcggtccagatgaygcccttgckgctggtatcgtggatgatttymaysmagctggdctyaargcctttggtccgacwagrkykgcagcggagctggagtggtccaaggatttygccaaggaaatcatggtcaaatayggygttycgacagcarcmtatggcacattttcagatttcgaggaagcmaargcctatatcgaaaagcatggtgcgcctatcgtagtcaaggcggatggcttggcrcttgggaagggtgtcgtcgttkctgagacggttgagcaagcggtcgaagccgctcatgagatgcttttggacaataaatttggtgactcaggtgcgcgcgtggttattgaggaattccttgaaggagaggaattttcactctttgcctttgtyaatggtgataagttctacatcatgccaacggctcaggaccacaaacgtgcctaygatggcgacaaagggcctaacacgggtggtatgggtgcctatgcgccagtyccacacttaccacagagtgtagttgatacagcggttgacaccattgtcaagccagttctagaagggrtrattaaagaaggtcgcccttatytrggwgtymtttacgcaggrcttatcytgacagcwgayggrccgaargtcatygagttcaackctcgrttyggagatccwgaaactcagattatmttgcctcgyttgacmtctgaytttgckcaaaatatcacrgatatyctggatrgcaaggagccaaatatcatgtggacggacaagggtgtgactctgggtgtggttgtcgcatccaagggctacccgctagactatgaaaggggcgttgagttgccagccaagacagaaggcgatgtcatcacctactatgcaggggctaagtttgcggaaaatagcagagcactgctctcaaacggcggacgagtttatatgctcgttaccacagcagataccgtcaaagaagcccaagccagcatmtaccaagaactatmccaacaaaaaatagaaggactcttctaccgaacagatatcggaagcaaggcaattaagtaactaat

SEQ ID NO: 866 - DNA, 212 bp, Streptococcus pneumoniae
  misc_feature (1)..(212): tiling:Spneumo1:WAN024C94; Cluster includes WAN0244NX spr0 197|rpmC|15902241|NP_357791.1|200331..200537|+|207 bp|50S Ribosomal protein L29|S.pneumoniae|R6|NC_003098.1|ORF|111
atgaaacttaatgaagtaaaagaatttgttaaagaacttcgtggtctttctcaagaagaactcgcgaagcgcgaaaacgaattgaaaaaagaattgtttgaacttcgtttccaagctgctactggtcaattggaacaaacagctcgcttgaaagaagttaaaaaacaaatcgctcgyatcaaaacagttcaatctgaagcgaaataactaat

SEQ ID NO: 867 - DNA, 669 bp, Streptococcus pneumoniae
  misc_feature (1)..(669): tiling:Spneumo1:WAN024CG3; Cluster includes WAN023S1E cont ig_1623_2||||429..1097|+|669 bp|Glimmer 2.02 orf predictio n|S.pneumoniae|670|WAN01UDAF|ORF|000
atgaaacttaatgaattgattaagaaatataaaaaacttgagggtgtatggaatgctgaaggagcagaactagctcgtcaaatttttctgcaagacttggaacaactagacgaatccgaaataggttacgcagatgaagctccacgctacgtaaagaacatactagcacgattgcgagaattgccattgcatgatagagaggtttggttaaaggctatcatgagcgaatttgaacaggattttagccgtgcaaaatggcgagagggctacgagcaaggtaaaattgagggtatggttgaacgtgaaaaagtcaaagttccgcggtttgtggctgaatggattgaggaagctagaaaagcttgtaaagacgtggtagaattattcgaatttgatttcacgaacgatgaagttagaaaatggtttatgcaagaaagaccatttgatttagtagctagagcatggcttgayggctacgaggtcgaggaagagaagcggtatttggtgactttaaaaaataggcagcctttggtcaaatcgcaatcagggagtactctttattttagycaagatataacagctaggaattataaaggtactcaaaaagaactagaagamgcwrrcytcggmtgggtgttygattgtgaaggwrttgagattgaggaggtggar

SEQ ID NO: 868 - DNA, 446 bp, Streptococcus pneumoniae
  misc_feature (1)..(446): tiling:Spneumo1:WAN024C8N; Cluster includes WAN0244NM spr0 208|rplO|15902252|NP_357802.1|205156..205596|+|441 bp|50S Ribosomal protein L15|S.pneumoniae|R6|NC_003098.1|ORF|111
atgaaacttcatgaattgaaacctgcagaaggttctcgtaaagtacgtaaccgcgttggtcgtggtacttcatcaggtaacggtaaaacatctggtcgtggtcaaaaaggtcaaaaagctcgtagcggtggcggagttcgccttggttttgaaggtggacaaactccattgttccgtcgtcttccaaaacgtggattcactaacatcaacgctaaagaatacgcaattgtgaaccttgaccaattgaacgtctttgaagatggtgctgaagtaactccagttgttcttatcgaagcaggaattgttaaagctgaaaagtcaggtattaaaattcttggtaacggtgagttgactaagaaattgactgtgaaagcagctaaattctctaaatcagctgaagaagctatcactgctaaaggtggttcagtagaagtcatctaactaat

SEQ ID NO: 869 - DNA, 351 bp, Streptococcus pneumoniae
  misc_feature (1)..(351): tiling:Spneumo1:WAN024C6X; Cluster includes WAN023M6S 3153 53_501a||||258306..258656|-|351 bp|EGAD orf prediction|S.p neumoniae|R6|NC_003098.1|ORF|110
atgaaacttcccttctgcaatggtcacacggatttggctytgattcttttctgyatctrtggawasaakctccagtmtagcgggytgacaggtaaagtctttgagaggaataccctcagcaaatgtctccacatcttcttgggtcatgattcccttgacttgtgccagataagtcttgtccacatgacgcttgggcgaaagaagaacatgagccagctgaccatcattggtcaagagcaaaagaccatgcgtgtyaatatccaagcgtcctactgggaaaacttccttactccgcgccaagtcatccaacaagtccagaacggttctgtgcttgggatcctcagtcgctga

SEQ ID NO: 870 - DNA, 443 bp, Streptococcus pneumoniae
  misc_feature (1)..(443): tiling:Spneumo1:WAN024DJ2; Cluster includes WAN0244JG spr0 358|mtlF|15902402|NP_357952.1|357510..357947|+|438 bp|Mann itol-specific enzyme IIA component|S.pneumoniae|R6|NC_0030 98.1|ORF|111
atgaaacttgaaaaacatttgattaagcttaataaacaattttctaacaaggaggaagctatttgttattgtgggcaagttctttatgagggtggatatgttaatgaagactatattgaagccatgattgagcgagataaagagytatctgtttacatgggtaactttatcgccataccgcatggaacagatgcagcaaaaaakgatgtmctyaagtctggtattacagtcgttcaagtcccyagaggggttgattttgggaatgtatctaaccctcaagtggcaacggttctttttggtattgctggtattggtaatgaacacttagaaattattcagaaaatttctatcttctgtgcagatgtrgataatgttcttaaactagcagatgctcagtcaaaagaggaagtattgcgcttatttgatgctgttgaataactaat

SEQ ID NO: 871 - DNA, 690 bp, Streptococcus pneumoniae
  misc_feature (1)..(690): tiling:Spneumo1:WAN024FMP; Cluster includes WAN023P6A pne5 4_6||||3390..4079|+|690 bp|Type 25A capsule operon, Glimme r 2.02 orf prediction|S.pneumoniae||WAN01UCGY|ORF|000
atgaaagaaaataaagaaattacgattgaygtttttcaattgtttaaagtcctttggaagaagaaaacctctattatactaactgcgattgtagcagctgtcctagcttttgctgtaagtagttttgtactgacacctgagtattctagtacgacacgtatttatgtggtcaatcgaaatcaatcggaaaaagcagggttgacgaaccaggatttgcaggctggracctatctggtaaaggactataaggaaatcatcmtctctcaagatgtacttgagraagtcatttcaaatcttaaactagagaaaacagttaaggaattaagcaagaagattcaggtaacagtacctgtggatactcgtatcgtatcaattactgtaaaaaatgcacaaccagaagaagctagccgtatcgcaaatgctcttcgtgaagtggctgctgaaaaaatcatttctgtaactcgtgtatctgatgtgacaacattggaagaagcmaggscagccctaagtccttcatcacctaatattcgtcgtaataccctgytagcttttytagygggaggagcagtgatggtagtttcagtcttgttacttgagttgttggatgatcrtgttaaacgaccagaagaygtggaagaagtaatgcagattgcacttctagggrttrttcyagatttgaataagttaaaa

SEQ ID NO: 872 - DNA, 114 bp, Streptococcus pneumoniae
  misc_feature (1)..(114): tiling:Spneumo1:WAN024GAZ; Cluster includes WAN0242MQ SP08 53||15900738|NP_345342.1|800278..800385|+|108 bp|hypotheti cal protein|S.pneumoniae|TIGR4|NC_003028.1|ORF|011
atgaaagaaaataatatgttagtaaactggaaattagagtcggatgtgaatgactatgtgaaaaagcagtttgaaaatcttggtttgaaaaaattgcaggattatctaactaat

SEQ ID NO: 873 - DNA, 168 bp, Streptococcus pneumoniae
  misc_feature (1)..(168): tiling:Spneumo1:WAN024DNX; Cluster includes WAN023S9M NC_0 03028.1_2046||||1540788..1540955|-|168 bp|Glimmer 2.02 orf prediction|S.pneumoniae|TIGR4|NC_003028.1|ORF|010
atgaaagaaaatgagccaaccgctataaatcaaaatccagtcccaagtaagcccccttttaaatgtcaaaaatgccagcatgattccatcaatgacaaggagttgaatggttttgatgaagatgatttttttcatgctaaaacctccttttctttagagacactccca

SEQ ID NO: 874 - DNA, 1019 bp, Streptococcus pneumoniae
  misc_feature (1)..(1019): tiling:Spneumo1:WAN024D84; Cluster includes WAN0243RP spr1 358||15903401|NP_358951.1|1340907..1341920|+|1014 bp|Conse rved hypothetical protein|S.pneumoniae|R6|NC_003098.1|ORF| 111
atgaaagaaactgtttattttggaacttatacacgtcgtacttctcaagggatttacaaggcagactttgatacagaaactggtcagctttcaaatctagaactttttgcagctgagccaagtccaacctaccttgcctttgaccagcaccaacatttatacactgttggtagccaagacgatraggggggaattgcagcctatcaaactgacgggactgtgttaaatcatgttgttgaagaaggagctccccactgttatgttgctgtcgatgaaaagcgtgatttggtttacgcagcyaactatcacaagggacaagtccttgtttataaacgccaggaagatggtagtcttctacttagtgatatggatcaacacagtggccaaggtccacatgaaaatcaagcttccccccatgttcactatacagatttaacacctgaccactatctagtgacctgcgacttgggaactgaccaagtcatcacctatgacctcgatcaagaaggaaaattatctaagctctatacctatcacagcaagccaggagcaggctcacgccatatcattttccataaccactataaaatcgcttatctcatttgtgaactcaatagtactatcgaagttttaatctacgatggcgttggcgaatttgwacgtatgcaggtyatttcaactttaccrgaagcttacgaaggctttaatggaaccgctgctattcatctctctaaagacggtaaatacctctacgcttctaaccgtggccatgattctatcgcagtatataccatccttgcggacggtagcttagagttattagaaatcgttccaacgcatggtcagactccacgtgattttgatttgacacccgaccaaaaatttctcattgttgtccatcaagactctgacaatgcaactgtctttaaacgtaattgtgacaatggtcgtctagcagaactctccaacgamttccatgttcccgaagcagtctgcatccgttttgctccttaactaat

SEQ ID NO: 875 - DNA, 1329 bp, Streptococcus pneumoniae
  misc_feature (1)..(1329): tiling:Spneumo1:WAN024CPK; Cluster includes WAN0244LZ spr0 267|sulB|15902311|NP_357861.1|268968..270290|+|1323 bp|Dih ydrofolate synthetase|S.pneumoniae|R6|NC_003098.1|ORF|111
atgaaagaaattsaaaacaatcartggattgctaactaccggacggaycaaccgcattttggmttggaacgaatggwggaactrttagctttgcgtggcaatccccatctcaaactcaaggtcmtccatatcggaggracyaayggcaagggytcgacyattgcttttttgaaaaagatgctagaaaagctagggytgagagttggsgtgttyagctcgccctatctcattcattayacagaccagattagcatcaatggggaatckatcycagargykagrctagaagcyctcatggsagactatcagtctttgctggarggrgaakcggyyrccaatttrcagggsacaacygagtttgaratwatyacagcymtrgcctatgaytactttgcctcagagcaartagatgtggcyatcatggaagtkggyatgggtggactyttkgatagtaccaatgtctgycagcccattttracaggmattacractattggmytggaycatgtrgcyytacttggtgacaccttggargycatagcagagcagaargcwggtattatcaaacaaggratkcccttggtracaggkcgtatygctccagaagccttgrctgtgattgaccgcattgcggaagrgaaagatgcgccgagacttgcctacgggayagattatcaggtymgycatcaararagtgtggtkacaggsgaagtctttgactatacaagtgytgtcagacaaggtcgcttccagactrgcctgcttggtttgyaccaratagagaatgctgggatggccatagctttacttgatactttttgtcaagaagatggtcgagarctagcaagcaatsayttkcttgstcaagcyttggaagaaacaagttggccagggcgtttggaaatcgtgtcaagagatcccttgatgattttggatggagcccayaatycccatgctatcaaggcyttrttrgyaaccttgcaagaacgytttgcggatyatcrtaaggaaatcctcttyacttgyatcaaaaccaargccttggaggatatgttggayttgytgggagcmatsccagwtaccgagctyacyctracacattttgmsgatagtcgggcgackgatgaaarcgtgctgaaagaggcagcyaagtctagaaatctcagctaycargrttggcakgattttctagagcagaawktgacagataaaaaagaagagaaacaaacagttaggattgtcacaggttccttgtatttcttgagccaagtgagrgyctatctgatggagaggaasaacgaraatggatacacaaaagatykaactaat

SEQ ID NO: 876 - DNA, 819 bp, Streptococcus pneumoniae
  misc_feature (1)..(819): tiling:Spneumo1:WAN024GI3; Cluster includes WAN023OV6 pne7 0_19||||17274..18092|+|819 bp|Type 32F1 capsule operon, Gl immer 2.02 orf prediction|S.pneumoniae||WAN01UCC2|ORF|000
atgaaagaactaactactcgagagatgcaagaagtatcgttggagattttacacacgattgctagtatttgtgaaaaacaccattttcgctatgctttgatttacgggactttaattggtgcggttaggcataaagggtatattccttgggatgatgatgttgacattatgatgcctcgaccagattatgaccgcctattggagtatttgaaggaaaatatcgccgattatccacatttaaaagtattcaatcgagaagagtgtccagaatatccttatatgattactcgaattagtgatcagagataccggattgagatggaaaatgagaaaccttttgatttgggggttttcattgatatctatccctatgatggtttgggagatacgaaagaagaggcggttgactttggtatgaagggggatcgtttatcgtcgttttgttatcaggcaactagagaacattttgcgattgaaacgacaacatcaacttttaggaagttgattaagtatccagtttatttattctctaaaatgattgggaaagattacttccaaaagcaactagccaagttagccagagttaaagactacgataacagtgaatatgtaggttgcgttatttggttgtcatggggagaaaaagatatttttccgcgtgaatggtttgatgagactattttggttccttttgagaaatatgaatttaggattcctaaagaatttgataaagttctacggcatgaatatggagattacatgattttgcctccagagaaggatagagtagggcatcactattttaaagcttataaaaaa

SEQ ID NO: 877 - DNA, 1907 bp, Streptococcus pneumoniae
  misc_feature (1)..(1907): tiling:Spneumo1:WAN024B5Z; Cluster includes WAN0244L5 spr0 297||15902341|NP_357891.1|296952..298853|+|1902 bp|Hypothe tical protein|S.pneumoniae|R6|NC_003098.1|ORF|121
atgaaagaagaaagaagacaattttttgaaagartcgatggaaaycaatgtcgtgattatatcttgtcscactgttcaaaagactatgagaaagtcaagagttcccttgaacgcttgatrgacaatcgttttatgtttgatagtccttgggatatggagccttgttcaaaaatccatcaaatccagccgatggtatgggatcaagtatttgaagatgatccagaatggkcttatatgctcaatcgacaagaatatctcttgcagtttatgatagggtatstggtagaaggagataaggrctatatycaaaagtgcaagttctttctatttgattggattgagcaggtgagagaattttctcctcaatccttgatgactagaaccttggatacgggtattcgttcctttacttggttgaaactactcttgctcctcttgaaatttgacttgctagaggagaaagaactagagaaaattttggtcagtctagaaaagcagattgactttatgaaaagcyactatcgcgccaagtacacccttagtaactgggggattttacaaacaattccgatgcttgctatctatyatttcttttcagataagatggayctagaagaagcttaccattttgcttcagaggagttgaaacagcaaattgagacacagattttaggagatggaagycagtttgaacagtcgattctctatcatgtagaggtttataaagccttrctggatttgtgtctcttgcttccagacttgcaagatagttaccragagttgctggaaaagatggcgacctatattcaaatgatgacaggcttagatggacgractttggcttttggtgatagcgattctacagaaacgacagaaatkttgagcctgtctgctgtggttttgaacmaggaagaccttcttaacggtctggatgttaaagtygatttgcttagcmtcttgttcctggggcgagaaaaggtcaagcgactgcaggaatttgaaargagagcttggcagcctaagtccatgatctttgaagactctggacatgtctgcattaaggatgaacatcgttatctatttttcaaaaatggtccgctaggaagtgcccatagycatagtgacgagaatagtttttgcttacagtatcaaggccaacctattttcatagatgctgggcgttattcttatcgggagatatatgaacgttatctcttaaagagtgcttggagtcattcgacctgcattgtagatgggaaagctccggaaagaatcacgggatcctgggaatatgaatactatcctcactccctgttttgtcaccataaagaaagggagggartgcattatattgarggggcttattggtcagcagaacctgatttgccttatcttcacargagaaaaatcctcatgttggtagaggatgtctggctcttggtagatgacatcaggtgtcaaggtcarcatgaggygttgactcagtttatccttgacaaggatgtgacctatcaagatgggaaaatcaatcagttgagactatggagtgaagttgattttgatttggaagatrmcatsatttsksctaaatmcaatkakcwysmmarawstarcaaactcaccarrmkccwwkyctywrakaatcagatgctggattataccatcattgcgcatgagagttttgaaatyatccgtcattctgtctaccagacagatgatcgtgaagtggaaaatgctytggcttttgaagtgaaaaatgaygaaacagacaagctgattctgttattaagcgaggatattsgtgtaggtgaaaaattgtgcctcgttgacggaacaaaaatgcgtggaaaatgtytagtatatgataaaataaatgagagaatgattcgcttgcagtgctarctaat

SEQ ID NO: 878 - DNA, 1688 bp, Streptococcus pneumoniae
  misc_feature (1)..(1688): tiling:Spneumo1:WAN024GLM; Cluster includes WAN0244HG spr0 430|ABC-NBD|15902474|NP_358024.1|430192..431874|+|1683 bp| ABC transporter ATP-binding protein - cobalt transport|S.p neumoniae|R6|NC_003098.1|ORF|111
atgaaagaagctataattgartggaaggatttctctttccggtatgaaacacaacaagaaccgaccttgcaagggatagacttgaccatttacaagggagagaaagtcttaattgttggaccatctggrtcaggtaaatctaccttgggtcagtgtttgaatgggattattcccaatatttacaagggtcakacatatggagaatttttgataaagggtcaaryagcctttgatatgagcatctatgataagtctcatctggttagcacagttttrcaggatacagatgggcagtttattggcttgtctgtggcagaagatttggcgtttgctctggaaaatgatgtgacagccctagatgagatgaaaggtcgtgtttataaatgggctgaaaagctggaccttcttcctttactggatcagcgycctcaggatttgtcwggtggrcaaaagcagcgagtcagtctrgctggtgtcttgattgatgaragtccgattctcttgtttgatgagccactcgccaatctwgatcccaagtcaggtcaggatattatcgaattgattgaccagattcataaggargaggggacgacgacyctkattatcgagcaccgtttggaggaygttctgcatygccctgtggatcggattrtcttgataarcgatggtcgtatcctttttaatgggagccctgaccagttrctkgcgactgatttrttgacycaaaatggaattcgmgaacccctttatctmacsactctccgtcaattrggtgtggayttagtcaaggaagaacarttagcrratctggataacwtgtctatctcaaaaggkcarrtycagytrcrgamkgaactggyaaaagaaacyccagmattgcagtcactctttadaytagaggamgtrtckttytcttatratgatagaccgattttaaaatcyctwcatttagatattaaaaagggtgaaaagattgcyattgtcggaaaaaatggagcagggaartcaactctagccaaggcywtragtagctttatycagackgaaggmcgctatctttgggaarracaggatataaaaggmgattctgttgcagagcgggcggaacgagtaggmtatgtgctrcaaaatccyaatcaaatgatttcaaccaatatgatttttgatgaggtggctctrggrctccgtttgcgaggtgtgraygagmaggaaattgaaacgagagtmtatgaaaccttgaaaatctgtggwctytatgaattccgtaattggccyatttctgccctgtcatttggtcagaaaaaacgtgtsacyattgcytcaattttggtcttaggmgctgaaattatyctcctagatgaaccgactgcrggtcaagaycagaagaactatactgagattatggaatttctcraagarytrcatcaamaagggcataccattgtcatgattacccatgatatgcaattgatgctggattattcagaycgrgyccttgtcatggtggatggrgaattgattgcygatactgwtccagcyagtctgttgagcratcctgagctgttagtaaaagccaayctaaaagaracytcyatcttyaacttggctaagaaactmgaygtggrtccactkgmtttaacggcattttacaaagaaaggagagarggatgcaagctaaattaactaat

SEQ ID NO: 879 - DNA, 1020 bp, Streptococcus pneumoniae
  misc_feature (1)..(1020): tiling:Spneumo1:WAN024D8B; Cluster includes WAN0243SC spr1 335|mocA|15903378|NP_358928.1|1321864..1322925|+|1062 bp|O xidoreductase|S.pneumoniae|R6|NC_003098.1|ORF|111
atgaaagaaggatttaaaatcggaaaaggagtatttatgctaaaattaggtgtcatcggaactggcgctatcagccatcatttcatagaagcagcccataccagtggagaataccaactggtcgcaatctattctagaaaactagaaactgcagcaacctttgcttctcgctatcagaatatccaactattcgatcaattagaagtcttcttcaaatcttcttttgatttagtctatatcgccagtccaaactccttacattttgctcaggcaaaagctgccttgtctgctggtaaacatgttattctygaaaarccagctgtcwctcaaccacaagaatggtttgatttgattcaaacagctgaaaaaaataactgttttatctttgaagcagctcgtaattaycacgagaaagcctttactactatcaaaaactttttagcagataagcarrwgwtargagcagatttyrwctatgccaratactsttccaagatgcctgacttrttgrctggacaaacaccaaatgtcttttcaraccgttttgctggtggagccctcatggatttggggatttatcccctctatgctgctgttcgtctttttgraaaagcyaatgacgcgacttaccatgctcaacagcttgacaatagcattgacctaaatggagatggtatcctcttctacccagactatcaagttcacatcaaggctggaaaaaacatcacttccaatcttccttgcgagatttatacaacagatggaaccttgactctcaacacgattgagcatattcgctcagctatttttaccgaccaccaaggaaatcaagtccagcttcctatccaacagrctcmtcatacgatgactgaggaagtcgctgcatttgcacacatgatccagcaaccagatctgaatctctaccaaacttggctgkatgatgcaggctctgttcatgagctactatataccatgcgccagactgctggyrttagatttgaggcagaaaaaykaactaat

SEQ ID NO: 880 - DNA, 1220 bp, Streptococcus pneumoniae
  misc_feature (1)..(1220): tiling:Spneumo1:WAN024ESG; Cluster includes WAN0243F8 spr1 808|aspC|15903850|NP_359400.1|1778347..1779561|-|1215 bp|P otential aminotransferase|S.pneumoniae|R6|NC_003098.1|ORF| 221
atgaaagaatataacaagtctagtaagttagagcatgttgcttatgatatccgtggtcctgtattggaagaagccatgcggatgcgagcgaatggagaaaagattttacgtctgaatacaggaaatccagcagaatttggctttacagcgccagacgaggtcattcatgacttgattatgaatgcgcgtgatagtgaaggctattctgactccraaggrattttctcagcccgtaaggccatcatgcagtattgccagctgaagaaattcccaaacgtagataytgatgatatttaccttggaaatggtgtcagtgagttgattgtcatgtccatgcaggggcttttggacaatggggatgaggtcttagtgccaatgccagactatcctctatggacggcggctgtcagcctagctggaggaaatgccgttcactatatctgtgatgaagctgtkgaatggtacccaratattgacratatcaagtcaaaaatcacttccaataccaaggcaatygtccttatcaatccaaataacccaactggagccctttatcctaaggaactcttgctggagattattgagattgcccgtcaaaaygatttgattatctttgcggatgaaatctatgaccgcatggtaatggacggacatgtgcatacgcctgtggcgagcttggcaccagatgtcttctgtgtcagcatgaatggtctgtcaaaatcccaccgcatagcaggtttccgtgtgggttggatggtcttgtctggccctaagactcatgttaagggctatatcgaagggctcaatatgctgtccaatatgcgcctttgctctaacgttttggcccaacaagtcgtacaaacttccttggggggtcaccaatcagtcgatgaattgcttcttcctggtggacgaatctacgagcaaagaaatttcatctataatgccattcaagatattccaggtttgtctgccgttaaacccaaggcggggctctatatcttcccaaaaatcgaccgcaatatgtaccgtatcgatgatgatgagcagtttgtccttgatttcttgaagcaggaaaaggttctcttggttcatggtcgaggctttaactggcaggaaccagaccacttccgtatcgtttaccttcctcgtgttgatgagttagcccaaatccaagaaaagatgactcgtttcttgaaacagtatcgtagatarctaat

SEQ ID NO: 881 - DNA, 704 bp, Streptococcus pneumoniae
  misc_feature (1)..(704): tiling:Spneumo1:WAN024FZN; Cluster includes WAN0243Y4 spr1 127|rncS|15903170|NP_358720.1|1130665..1131363|-|699 bp|Ri bonuclease III|S.pneumoniae|R6|NC_003098.1|ORF|111
atgaaagaattacaaactgtactaaagaaycattttgmaatcgaatttrcagacaaaaakttactggaaactgcctttactcatacgagttatgccaatgagcaccgcctcttaaaaatttcacacaatgaacgcttggaatttttaggagacgctgttctacagttattgatttcagaatatctrtataaaaaatatcctaaaaagcctgaaggtgacctatcaaaactccgtgctatgattgtccgtgaggagagtttrgctggytttgcgcgtgattgccagtttgaccagtttatcaagytgggtaarggggaagaaaaatcwggtggkcgcaatcgtgayaccattcttggtgatgcctttgaagcctttcttggtgcccttcttttggayaaggatgtggcmaaggtcaaggaatttatctaycaagtyatgattcctaaggtwgaagcaggcgartttgagatgattacagactataaaacccatctccaagagttgcttcaggtcaatggtgatgtggctattcgttatcargtgatttctgaaacrggkcctgctcacgataaggtytttgatgtagaagttcttgttgaaggtaagagcatcggtcaaggycaaggtcgttctaagaaattagcagagcaggaagctgccaaaaatgccgttgagaargggctggattcatgtatttaactaat

SEQ ID NO: 882 - DNA, 1055 bp, Streptococcus pneumoniae
  misc_feature (1)..(1055): tiling:Spneumo1:WAN024GJQ; Cluster includes WAN0244GM spr0 460|ABC-MSP|15902504|NP_358054.1|467597..468646|+|1050 bp| ABC transporter membrane-spanning permease - unknown subst rate|S.pneumoniae|R6|NC_003098.1|ORF|211
atgaaagacttgtttttaaagagaaagcaggcctttcgtaaggagtgycttggttatctgcgctatgtgctcaatgaccactttgtcttgttcctgcttgtcctgttgggctttctagcctaccagtacagtcaactcttacaacattttcctgaaaatcattggcctatccttttgtttgtaggaattacgtctgttttactyttactttggggaggaaytgccacctatatggaggctccagacaagctctttctcttagttggagaagaggaaatyaagctccatctcaagcgtcaaactggcatttccctagtcttttggctctttgtacagacccttttcttgctgttatttgcgccyttrtttttagcaatgggttatggcttgccagtttttctgctctatgtgcttttattgggggtaggaaaatatttccactttygtcaaaaggccagcaaatttttyactgaaactggrctggactgggactatstyatttcycaagaaagcaagcgtaagcaagtcttgcttcgtttctttgccctctttacgcaggtmaagggaatttcaaacagygtyaarcgtcgtgcctatctggactttatyttaaaggctgttcagaaggtgyctggraagatttggcaaaatctctatctgcgttcttatctgcgaaatggcgacctctttgctmtcagtcttcgtcttctmttrctttccktrctggcgcaggtttttatcgagcaagcttggattgcgacagcagtggtagttctctttaactacctcttgctcttccagttgctggccctctatcatgcctttgactaccagtatttgacccaactctttccgctggacaaggggcaaaaggaaaaaggcttacaggaggtagttcgaggattgaccagttttgttttacttgtggaaktagttgttgggttgattaccttccaagaaaaactrgcccttctagccttactaggagctggtttggttttactagtcttgtatttgccttatcaggtaaaacgtcagatgcaggactaactaat

SEQ ID NO: 883 - DNA, 747 bp, Streptococcus pneumoniae
  misc_feature (1)..(747): tiling:Spneumo1:WAN024FOG; Cluster includes WAN023PIR pne3 3_18||||11591..12337|+|747 bp|Type 16A capsule operon, Gli mmer 2.02 orf prediction|S.pneumoniae||WAN01UCI4|ORF|000
atgaaagagaggaaattggagatgatatcacttatatgtgtatcgaataattacgataagttaaatacaattcttaaatcatctttatctagacaaaaggatgttaattatgaacttattatagtggattctaataaatatggatttaattctgctgctgaggctttgaattttggaggcaaacaagcaaaaggtgattatctattttttgttcatcaagatattagttttcaagatgactttgagttagcaaaactagaatcttattgtagaaattccatatttggagtagcaggagtagcaggggtaaagaatattgagggaaaggtcgtcagtttttcaaatatttttcatggggacccgaaaacaaaggcggctggtaaatctataagtgcccctgttgaagttgacgcaattgatgagtgtttgattattattccgaaaaaagtttttagtacaaatcaatttagtataatcggtcctacctggcatttatatggaacagactatgcattacagatgaagttaatcaattcgccagtattagtttttccaagtgagttatggcatgtgtcagatgggaaatctttaaaccttaattattttgatgcgatacaatggttattgaaaaaatactctaaaaattattcagtaatatacactttttttggagtttggccaagtaatcctattctattaaaatttaaatgtctttataggaaattaaggttttatattaagggagtg

SEQ ID NO: 884 - DNA, 566 bp, Streptococcus pneumoniae
  misc_feature (1)..(566): tiling:Spneumo1:WAN024EWA; Cluster includes WAN0243FC spr1 804||15903846|NP_359396.1|1775501..1776061|-|561 bp|Conser ved hypothetical protein|S.pneumoniae|R6|NC_003098.1|ORF|1 11
atgaaagagaraatttcycaagtwatygtggttgaaggkcgygatgatacggtcaatctcaarcgttatttcgatgtggagacctatgagacwcgaggttctgccatcaatgmycaggayatagagcgrattcagcgyctrcaccaacgtcatggagtcattgtctttacagacccagattttaatggggarcggattcggcgcatgatyatgayggycattccaacagttcagcatgcctttctcaagcgagatgaagctgttcccaagtccaagaccaaggggcgttctctgggaattgagcatgccagctatgaagacctgaaaacggctctagctcargtgacagaacaatttgaacatgagagtcagtttgacattagtcgtagcgayttgattcgccttggttttctagyaggggcagacagccgtaagcgtagrgaatatctcggagagactctccgaatcggctattcyaacggcaagcaactcctcaaacgcctagagttgtttggggttactttggcagaagtggaagaagctatgaaatcttatgagtarctaat

SEQ ID NO: 885 - DNA, 1011 bp, Streptococcus pneumoniae
  misc_feature (1)..(1011): tiling:Spneumo1:WAN024FD8; Cluster includes WAN0243K1 spr1 635|trpD|15903677|NP_359227.1|1607862..1608866|-|1005 bp|A nthranilate phosphoribosyltransferase|S.pneumoniae|R6|NC_0 03098.1|ORF|221
atgaaagagattattgaaaaactagcaaaatttgaaaatttatcaggtgtggaaatgacggatgtcattgagcgtatcgtaactgggcgtgtaactgaagcgcagattgcttctctcctcttagctcttaagatgaagggggaaacacctgaagaacgyacagccattgcccragtcatgagaggacatgcccagcatattccaactgagattcatgatgcyatggacaactgtggtacaggtggggacaagtctttcagttttaatatttccacaactgcagcctttgtcttggctggtggcggtattcacatggccaarcayggtaaccgctcgatwtcttctaaatctggttccgcagatgtcctcgaagccttgggaatcaatcttgacctcaaaccagctgaactaggtaaggtctttgataaaactggmatcgtctttctcttcgctaaaaatatgcacccagctatgaaatacatcatgccagctcgtttggaattgggaattccaacgattatgaacttgactggtccactgattcatccaatgrctttagaaacacagcttcttggaattagtcgtccagaactcctagaaagtacagctcaggttttgaaaaatatgggtcgcaaacgtgccatcgtggttgctggaccagaagggttggatgaagctggcttgaacggaacaaccaagattgcacttcttgaaaatggcgaaatcagcttgtcaagctttactccagaggatttgggaatggaagrctatgctatggaagatattcgtggtgggaatgctcaggaaaatgcagaaattttgcttagcgttctgaaaaacgaagcaagtccattcttggaaacgacagtcttgaatgctggtcttggtttctatgctaatggtaagattgatagcatcaaggaaggrgttgccttggcycgtcaagtgattgctagaggcaaggcccttgaaaaactcagactgttacaggagtaccaaaaaykaactaat

SEQ ID NO: 886 - DNA, 2360 bp, Streptococcus pneumoniae
  misc_feature (1)..(2360): tiling:Spneumo1:WAN024G8E; Cluster includes WAN024450 spr0 878|rnr|15902922|NP_358472.1|867934..870288|+|2355 bp|Exor ibonuclease R|S.pneumoniae|R6|NC_003098.1|ORF|111
atgaaagatagaataaaagaatatttacaagacaagggaaaggtgactgttaatgatttggctcaggctttgggaaaagacagttccaaggattttcgtgagttgattaaaaccttgtccttaatggaaagaaagcaccarattcgytttgaagaagatggyagtctgacmttrgaaryyaagaaaaaacatgagattaccctcaaggggatttttcatgcccataaaaatggytttggytttgtyagyctrgaaggsgargaggacgacctttttgtaggraaraaygatgtcaactatgctattgatggtgataccgtygaggtmgtsatyaagaaagtcgctgaccgcaataagggaacagcagcagaagccaaaattattgatatcctagaacacagtttracaacagttgtcgggcaaatcgttctggatcaggaaaarcctaagtatgytggctatattcgttcaaaaaatcagaaaatyagtcaaccgatttatgttaagaaaycagccctaaarttagaaggaacagaagttctcaargtctttatcgataaatayccaagcaagaaacatgatttctttgtcgcgagtgttctcgatgtrgtgggacactcaacggatgtcggaattgatgttcttgaggtyttggaatcaatggacattgtatccgagtttccagaagctgttgttaaggaagcagaaagtgtgcctgatgctccgtctcaaaaggatatggaagrycgtctggatctaagagatgaaattacctttaccattgacggtgcggatgccaaggacttggacgatgcagtgcatatcaaggctctgaaaaatggcaatctggagyttggggttcacatcgcagatgtttcttattatgtgaccgaggggtctgcccttgacaaggaagcccttaaccgtgcgacttctgtttacgtgacagaccgagtggtgccaatgcttccagaacgactatcaaatggcatctgctctctcaatccccaagttgaccgcctgacccagtctgctattatggagattgataaacatggtcgtgtggtcaactataccattacacaaacagttatcaagaccagttttcgtatgacctatagcgatgtcaatgatatcctagctggcgatgaagaaaagagaaaaraatatcataaaattgtaycaagtatcgaactcatggccaagcttcatgaaactttagaaaacatgcgtgtgaaacgtggagctctcaattttgataccaatgaagcgaagattttagtggataaacaaggtaagcctgttgatatcgttcttcggcagcgtggyattgccgagcggatgattgagtcttttatgttgatggctaatgaaacagttgccgaacatttcagcaagttggatttgccttttatctatcgaattcacgaggarcctaaggctgaaaaggttcagaagtttattgattatgcttcgagttttggcttgcgyatttatggractgccagtgagattagtcaggaggcacttcaagacatcatgcgtgctgttgagggagaaccttatgcagatgtattgtccatgatgcttcttcgctctatgcagcaggctcgttattcggagcacaatcacggccactatggactagctgctgactattatactcactttaccagtccaattcgtcgttatccagaccttcttgttcaccgtatgattcgggattacggccgttctaaggaaatagcagagcattttgaacaagtgattccagagattgcgacccagtcttccaaccgtgaacgtcgtgccatagaagctgagcgtgaagtygaagccatgaaaaaggctgagtatatggaagaatacgtgggtgaagagtatgatgcagttgtatcaagtattgtcaaattcggtctctttgtcgaattgccaaacacagttgaaggcttgattcacatcactaatctrcctgaattttatcatttcaatgagcgtgatttgactcttcgtggagaaaaatcaggtatcactttccgagtgggtcagcagatccgtatccgtgttgaaagagcggataaaatgactggagagattgatttttcattcgtacctagtgagtttgatgtgattgaaaaaggcttgaaacagtctagtcrtagtggcagagggcgtgrttcaaatcgtcgtycrkataagaagsaagacaagagaaaatcaggacgctcaaatgataagcgtaagcattcacaaaaagacaagaagaaaaaaggaaagaaayctttttacaaggaagtagctaagaaaggagccaagcatggcaaagggcgagggaaaggtcgtcgcacaaaataactaat

SEQ ID NO: 887 - DNA, 1059 bp, Streptococcus pneumoniae
  misc_feature (1)..(1059): tiling:Spneumo1:WAN024DM3; Cluster includes WAN0244Q9 spr0 113||15902157|NP_357707.1|121084..122142|+|1059 bp|Hypothe tical protein|S.pneumoniae|R6|NC_003098.1|ORF|100
atgaaagatgatcagaaatatttattagcgggactttattcgcttctagttgcaatattttattttccattgattgaktccaaggggatttttgtaagtatattgatggcggttttacttttatatttaatatacttcattgcaacagtcattcatattgtgataattaagtttataagaaaaaaatcttttaagtatttggttctatatccatttacttmygatgggagctggagatttcaacctataaacttactctactttccagaaatggtgagagatgtcattccgattaatttagttcaagaatattgccaaggacaaccttacggactgttaaaaaagatgctgaaaagaattcgattgtcacgagagatakctttactcctggctaccattatcgtctatttttttacgcatagaattctacctytttcagtatttacgttcatrttytcttayatattgmtatttgyacaatcttatttgggtrgyaataccgcttggattggaaatagaagattaataatagatgatgaatttgaaaaaatcttgctttcaaaaagttatrtaaaagaaatatcatctgcacgatactcrgaatacttgayatgtgaatacaaaaaccttacaccaatcatattgwtagctatttttgaaaatttgcttgactcctacttgcttcagaatcagagtgaggttgacttagatattttttataaagttttacctttgctttataaagaaaaatatactatgggattcaattactttgtaagtttaaattatttactatataaggttggatttttgggaatcatttacgataatgaagcattaagagatttgtcaaaacaatatttaaacaaaaatatttcggaattacaagatggttctttcgagggcggtatacaagatgctgttgcctctaaacaaatagtagttataaatgaatttatagcttgtttaaattccagatgcgtgccatcccaatatgatagatttttttataaagatagaccttatattttttccagaaagagtcctattaaggggtga

SEQ ID NO: 888 - DNA, 1191 bp, Streptococcus pneumoniae
  misc_feature (1)..(1191): tiling:Spneumo1:WAN024DCW; Cluster includes WAN02445I spr0 860||15902904|NP_358454.1|853830..855011|+|1182 bp|Hypothe tical protein|S.pneumoniae|R6|NC_003098.1|ORF|112
atgaaagatgttagtctatttttattgaaaaaagttttcaaaagycgyttaaactggattrtcttasytttatttgyatctgtactcggtgttaccttttatttaaatagtcagactgcaaactcaswcagcttggagagcaggttggaaastcgymttgyagmcmrygagagrgyyatcaatgaaaatgaagmgaaactytcccaaatgtctgayaccagctcggaggaataccagtttgctaaaartaatttagamktgcaaaaaaatcttttgamgcgaaagacagaaattctractttaytaaaagargggcgctggaaagargcctactatytgcagtggcaagatgaagagaagaattatgaatttgtatcaaatgacccgactgctagcyctggcttaaaaatgggggttgaccgcgaacggaagatttaccaagccctgtatcccttgaacataaaagcacatactttggagtttccgacccacgggattgatcagattrtctggattttagaggytatcatcccaagyttgtttgtggttgcdattatttttatgctaacacaactatttgcagaaagatatcaaaatcatctggacacagctcacttatatcctgtttcaaaagtgacatttgcaatrtcytctcttggagttggagtgggmtatgtaactgtgctgtttatcggaatctgtggcttttcttttctagtgggaagtctgataagtggttttggacagttagattatccctacccratttatagcttagtgaawcaagargtaactattggraaratrcargatgtattatttcctrgcttgctcttagctttcttagcctttatcgtcattgtggaagttgtgtayttgattgcttactttttcaagcaaaaaatgcctgtcctctttctttcactcattgggattgttggyttattgtttggyatccaaacmattcagcctcttcaaargattgcacatctgattccctttacttacttgcgttcagtggagattttatctggaagattayctaagcarattgataatgtcratctaaattggagcatgggratggtcttrcttccttgcctgattatcyttttgytaktgggrattctatttatygaaagmtggggaagttcacrkaaaaargaaktttttaatagwttmstarctaat

SEQ ID NO: 889 - DNA, 449 bp, Streptococcus pneumoniae
  misc_feature (1)..(449): tiling:Spneumo1:WAN024D48; Cluster includes WAN0243IS spr1 680||15903722|NP_359272.1|1652006..1652449|-|444 bp|Hypoth etical protein|S.pneumoniae|R6|NC_003098.1|ORF|111
atgaaagatrgtcatttgctagcccatcatattcgtttgttgaatgggcggatttttcaaaagttactgagtcaagatcctgaggctctttataggggtgaacagggcaagattttagcggttttatggaatagtgaaactggctgcgcaactgcgacagatatcgcgcttgcgactggrcttgcgaataatacgctracgactatgataaaaaagctagaggaacaaaagcttgtaattgttagtccgtgtggaaaagacaagcgtaagaagtatttagttttaacggagttaggcaagtcccagaaagaagtggggcatcgtgtcagtcagaaattggatactatcttttacaaaggattttcagaggaagaaattcaccaatttgaaggttttcaagaaagaattttggcgaatytgaaagagaagggaaatgaggtttarctaat

SEQ ID NO: 890 - DNA, 369 bp, Streptococcus pneumoniae
  misc_feature (1)..(369): tiling:Spneumo1:WAN024D4J; Cluster includes WAN0243JW spr1 640||15903682|NP_359232.1|1613097..1613465|-|369 bp|Hypoth etical protein|S.pneumoniae|R6|NC_003098.1|ORF|111
atgaaagattataaaatcaattttgatttaggtaaaatagaatattttgataataattgtttgatacaagtatacaaatttatttctttttatgatatttgtgaaatggtgtttgcctttcatttacctcctgatgagttgataacaaatgttatctttaaagaaaaaattaactctatgttaaaatgttacattgacaggctattatatgtttttataaatcctacacattttactgaaaaagttaatctacaattttatggyagytttttctcatatgaatttatttgtcgtgaagttggaaacattcttaaaaataaaggtgtgaaatgcaatttaaacttttttgaagggraagaatatttgtaa

SEQ ID NO: 891 - DNA, 296 bp, Streptococcus pneumoniae
  misc_feature (1)..(296): tiling:Spneumo1:WAN024CJX; Cluster includes WAN02439S spr2 005||15904046|NP_359596.1|1998466..1998756|-|291 bp|Conser ved hypothetical protein|S.pneumoniae|R6|NC_003098.1|ORF|1 12
atgaaagcaagcattgccttgcaagttttacccctagyacaggggattgatcggatagctgttattgatcaggtcattgcttatctgcawactcaagaagtgmcgatggtagtgacaccatttgaaacggtcttggaaggggagtttgatgagcttatgcgcattctaaaagaagcgctggaagtggcagggcaggaggcagacaatgtctttgccaatgtcaaaataaatgtaggagagattttaagtattgatgagaaacttgaraagtatactgagacgacacattarctaat

SEQ ID NO: 892 - DNA, 705 bp, Streptococcus pneumoniae
  misc_feature (1)..(705): tiling:Spneumo1:WAN024FXD; Cluster includes WAN0241A8 |cps 15bP||AAP76301.1|||705 bp|putative glycerol-2-phosphate cy tidylyltransferase|S.pneumoniae||AY250187|ORF|001
atgaaagcacttattttagcagcagggttaggaacacgtctagcyccaattaccaatgaggtaccaaaatctttggtaccagtcaatggtaagccaattttgatgaaacaaattgaaaatttatatcaaaataatattacagatattacgattattgctggatataagtcatctgtattaacagatgcagttactgaaaagtatccagaaattaatattattgataatgttgattttaaaacgactaataatatgtattcagcctatctaggaaaagctgcaatgggtgatagtgacttcttaatgatgaatgcagatgtattttatgatgcttctgttattaaaagtctgttgcttcataaagctccaaatgcaattgtaactgayttaggtayttatattgaagagtctatgaaagtcgtagaaaaaaatggkcgtttagtrgaaatttctaaacagatttcacctgaggarrctttaggrgyttctattgatgtttataaattctcttatgaagcaggtgcwcgattctttgaaaagtgtaaggaatttattgaagataaacgagaacttcaaatgtggagtgaggttgctcttaatgcaatycttycwgaagttgartttrtagcatgtccattrgakggycgttggttagaaattgataatcatgaagacytagytgytgcagaaaaactatttgcttga

SEQ ID NO: 893 - DNA, 1262 bp, Streptococcus pneumoniae
  misc_feature (1)..(1262): tiling:Spneumo1:WAN024D35; Cluster includes WAN0243GM spr1 758|cinA|15903800|NP_359350.1|1726299..1727555|-|1257 bp|C ompetence induced protein|S.pneumoniae|R6|NC_003098.1|ORF| 111
atgaaagcagaaatcattgctgttggaacagagattttgacaggrcagattgtcaacaccaatgcccagtttttgtcggaaaaactagctgagattggggtagatgtatattttcagacggctgtaggagacaatgaagttcgtctcttgtctttgcttgagattgccagtcaacgtagcastctggtgattttgacaskmrstwtggggscaactgaggacgacctaaccaaacaaacyctagctaaatttttagggaaagcattagtctttgatcctcaggctcaggagaagttggatatcttttttrccctgcgaccagactatgcccgaacaccgaataacgaaagacaagctcaaattgtagaaggagcgattccactgccaaacgaaacaggactggctgttggaggaaaattagaagtagacggagtgacctatgtcgtccttccaggtccgccaagtgaattgaaacccatggtcttaaaccaacttctacccaagttgatgacagggarcaagctgtattcccgagttcttcgtttctttgggattggcgagagccagytggttacgattttggctgatttaattgataatcagatcgatcctaccttggccccttatgccaagacaggagaagtcactctacgtctgtcaacaaaggctagcagtcaagaagaggcgaatcaagcgctggatatcttggaaaatcaaatcttggactgccagactttcgaaggaatttctttacgagacttttgctatggttatggggaagaaactagtttagccagcattgtggtagaagaactgaaaaggcaagggaaaaccatcgcggctgcagagagtttracggcaggtcttttccaagctaccgtggcgaatttttctggagyttcaagtatatttragggtggttttgtgacctatagcttggaggaaaaatcaaggatgttggatattcctgccaagaatttggaagaacatggtgtggtgtctgaatttacagctcagaagatggctgagcaggcacgaagcaagacccagtctgattttggaattagtttgacyggagtggcaggaccagatagcctagaaggacacccagttgggacagtcttcataggcttggcgcaagakcaaggaactgaggttatcaaggktaatattggaggcagaagccrrgcagatgtacgtcayattgcggttatgcatgcctttaacctagttcgcaaggctttattaagtgactaactaat

SEQ ID NO: 894 - DNA, 1044 bp, Streptococcus pneumoniae
  misc_feature (1)..(1044): tiling:Spneumo1:WAN024CE6; Cluster includes WAN0244RL spr0 065|galM|15902109|NP_357659.1|71831..72868|+|1038 bp|Aldos e-1-epimerase (mutarotase)|S.pneumoniae|R6|NC_003098.1|ORF |111
atgaaagcatacacagagcgtgtatttggaaatgttgagggygaggatgtcttggcctatcgatttgagacagacggtggctaccaacttgaggttatgacttatggtgcgacyatcttgcgctatgtcgcacctgacaaggctggaaattttgccaatgttatcttgggatttgatgactttgatagttatgtaggcaatagtcccaagcatggagcaagtgtaggtcctgtagcgggtcgtattgcaggtgcgacctttgagctcaatggtaagacctatgaccttgaggttaataatgctagcaactgtaatcacagtggttcaactggttgggattccagcttgtttgaagttgaagaagtaagcgatcatggcttgactctctacacagagcgtacagatgggacaggagggttmcctggaaatctcaagatttggatcagttatcacttggaagaaactggtgcctatgaaatcagctacaaggtracgaccgatcaggatacgctggtcaatccaaccaaccacagctatttcaacwtgtctggtgatttcacgcagacgattgaccgtcatgtcttccaactaaacacagagggcatttactcaatcgctcmtgacggtgtycctgccaaaactccagaagccaaccgtgatgtggtcaaacacgtctacaatggtaccttgttgaaggatatctttgcagaagaagatgagcaaatccagctggcatcaggtttggatcatycatttgcccttcctgcaggccatgacaatgctggattcctttatgaccaaaattcaggtcgcttcctgcttttcaagacagaagctccttgctttgtggtctacacagcaaactttgtggatgaaagtgtcatcataggaggtcagccaatgctacagcacaatgggattgctcttgaagcgcaagctttaccagatgccattcacagtgaccttaaaggccaagtcattcttaaagctggtcaaaccttcaccagtaagacacgttatgaacttgttgtgaarmtaactaat

SEQ ID NO: 895 - DNA, 447 bp, Streptococcus pneumoniae
  misc_feature (1)..(447): tiling:Spneumo1:WAN024AV4; Cluster includes WAN0243VV spr1 208||15903251|NP_358801.1|1206423..1206701|-|279 bp|Hypoth etical protein|S.pneumoniae|R6|NC_003098.1|ORF|112
atgaaagcattaaataragaatcaatactagattgtgatgrattagaaacagaattacatgatgcagaartcaaacagctggatgaacaattatttttgatarccaattatccatgtgagtttgaagtracatttttagatgattaccataaaaaacayaaytacccactattttacgartcctatcttcaaaacgtkatggaattccttgaaagtcaagacataaagaatggggttgatgcctttgtagatgatcatcaaaatctygtttttgttttatatggacaaggctatcgagccgagggaaaagagggaatacttacaacccaagtaactgtaaaagcttatgatgaagacaagaaaccgattaacttckcaaatttattagattccttaatyrtmthakaatatcaaatggaascraatytktkggaggtctccyatgat

SEQ ID NO: 896 - DNA, 450 bp, Streptococcus pneumoniae
  misc_feature (1)..(450): tiling:Spneumo1:WAN024AUZ; Cluster includes WAN02408U |||A AC98423.1|||450 bp||S.pneumoniae||L29323|ORF|000
atgaaagcaytaaataaagaatcaatactagattgtgatgaattagaaacagaattacatgaygcagaaatcaracagctggatgaacaaatatttttgatgcccaattatccatgtgagtttgargtramatttttagatkattaccataaaaaacayaaytacccmctattttaygaatcctatcttcaaaacattatggaattccttgaaagtcaggatataaagaacggagctgatgcytttgtagatgatmatcagaatcttgtttttgttttatatggrcaaggctatmgagcygagggaaaagagggaatacttacaacccaagtaactgtaaaagcttwtgatgaagacaagaaaccgattaacttckcmaatttattagattccttaatcgtctcagaatatcaaatggaaccgaatctttgggaggtctcccatgattga

SEQ ID NO: 897 - DNA, 1064 bp, Streptococcus pneumoniae
  misc_feature (1)..(1064): tiling:Spneumo1:WAN024E22; Cluster includes WAN0243DN spr1 866|adh|15903907|NP_359457.1|1836091..1837149|-|1059 bp|Pu tative alcohol dehydrogenase|S.pneumoniae|R6|NC_003098.1|O RF|111
atgaaagcctatacttatgttaaaccaggacttgcttcttttgttgatgtagacaaaccagttattcgcaagccaacagacgctattgtgcgtattgtaaaaaccactatttgtggaacagacctccatattatcaaaggggatgttcctacttgccaaagtggtaccattcttggccacgaagggattgggattgttgaagaagttggggaaggagtttccaacttcaaaaaaggygacaaggtcttgatttcttgcgtctgtgcctgtggtaaatgctactactgtaaaaaaggaatttatgcycactgtgaagacgaagggggctggattttcggtcacttgattgatggtatgcaggctgaatatctacgtgtccctcatgcagataatactctttaccatactccagaagacttgtcagatgaagctttggttatgctgtcagacattctgcctactggatatgaaattggtgtcttaaaagggaaagtagaacctggttgcagcgtagccattattggttcaggtccagttggattggctgctcttttaacagcccaattctattcaccagctaaattgattatggtagacctagacgataaccgcttggaaactgccctatcattcggtgcgactcataaggttaattcttcagaccctgaaaaagccattaaagaaatttatgatttgacagatggtcgtggtgtggatgtcgctatcgaagctgttggtattcctgcaacatttgatttctgtcaaaagattatcggtgtagacggaacggttgccaactgtggtgtgcatggtaaaccagttgaattcgatttagataaactttggattcgcaacatcaatgtaacaactggtttggtatctacaaatacgactccacaattgttgaaagcrcttgaaagtcataagattgaaccrgaaaaattggtaactcactatttcaaactcagtgaaattgaaaaagcctaygaagtcttcagtaaggcagcagaccaccatgccattaaggtcattatcgaaaacgatatctcagaagcctaactaat

SEQ ID NO: 898 - DNA, 195 bp, Streptococcus pneumoniae
  misc_feature (1)..(195): tiling:Spneumo1:WAN024DGI; Cluster includes WAN0244D3 spr0 587||15902631|NP_358181.1|602140..602328|+|189 bp|Hypothet ical protein|S.pneumoniae|R6|NC_003098.1|ORF|110
atgaaagctgctttttgctcttctggttcgattactttctttttaaatgcgtatactgcacctgcaacggcagcgacagttcctgcgacacctgttacaagacctttagcgaatcctttagccatgagtcttcctcctttatattctcaatcagccagcctcctcaagaggtcacatttttctgacykaactaat

SEQ ID NO: 899 - DNA, 1025 bp, Streptococcus pneumoniae
  misc_feature (1)..(1025): tiling:Spneumo1:WAN024BFL; Cluster includes WAN0244M4 spr0 262|adhP|15902306|NP_357856.1|263358..264377|-|1020 bp|Alc ohol dehydrogenase, propanol-preferring.|S.pneumoniae|R6|N C_003098.1|ORF|112
atgaaagctgttgttgtaaatccagaaagcactggtgttgctattgaagaaaaagtactccgtccacttgaaactggggaagcacttgtagaagktgaatactgtggcgtttgccacaccgacctccacgttgctcatggtgactttggtcaagtcccaggacgtgttcttgggcacgaaggtatcggtatcgttaaagagattgctccagatgtgaaaagccttamagtcggtgaccgmgtcagcgttgcttggttctttgaaggatgtggcacttgcgaatactgtacaactggtcgcgaaaccctttgccgtacagtgaaaaatgctggctactcagtagacggtggtatggctgaacaatgtatcgtaactgctgactatgctgtcaargttcctgacggacttgatccagcccaagcttcttctatcacatgtgctggagtaacaacctataaagctatcaaagaagcaaaagttgaaccaggccaatgggttgttctttacggtgctggtggacttggtaacctcgctgttcaatacgctaaaaaagtattcaatgctcatgttatcgcagtcgatatcaacaatgacaaacttrcccttgcaaaagaagtaggcgctgacattgtgattaacggcctcgaagttgaagatgtagctggactcatyaaagaaaaaactgatggaggagctcattcagctgtcgtaactgcygtgtctaaagttgccttcaaccaggctgttgactccrttcgtgctggtggtcgcgtcgtcgctgttggtcttccttctgaaatgatggaactcagcatcgttaaaacagtcctcgatggaatccaagtcatcggttctcttgtcggaactcgtaaagacttagaagaagccttccaatttggtgcagaaggtctggtagycccagttgttcaaaaacgtccagtagaagatgctgttgccattttcgacgaaatggaaaaaggycaaatccaaggacgtatggtactcgacttcacccactaactaat

SEQ ID NO: 900 - DNA, 447 bp, Streptococcus pneumoniae
  misc_feature (1)..(447): tiling:Spneumo1:WAN024AV3; Cluster includes WAN023SB1 NC_0 03028.1_1662||||1257907..1258110|-|204 bp|Glimmer 2.02 orf prediction|S.pneumoniae|TIGR4|NC_003028.1|ORF|010
atgaaagctttaaataaagagtcaatactagattgtgacgaattagaaacagaattacatgatgcagaaatcaaacagctggatgaacaaatatttttratgcccaattatcyatgtgagtttgargtracatttttagatgattaccataaaaaacataaytayccactattttatgaatcctatcttcaaaacgttatggaattcctygaaagtcaggatataaagaacggagytratgcctttrtagatgataatcagaatcttgtttttgttttatatggacaaggctatcgagccgagggaaaagagggaatacttacaacccaagtaactgtaaaagcctatgatgaagacaagaaatcaattaacttctcagatctattagattccttaatcgtctcagaatatcaaatggaaccgaatctttgggaggtctcccatgat

SEQ ID NO: 901 - DNA, 557 bp, Streptococcus pneumoniae
  misc_feature (1)..(557): tiling:Spneumo1:WAN024ERY; Cluster includes WAN0243EW spr1 820|nusG|15903862|NP_359412.1|1795747..1796298|-|552 bp|Tr anscription antitermination factor|S.pneumoniae|R6|NC_0030 98.1|ORF|241
atgaaaggaaatatcatggatagttttgataaaggrtggtttgttttacaaacttattctggttatgaaaataaggtgaaagaaaatctattacaacgtgcacaaacctacaatatgttggataatattctacgcgttgaaattccaacacaaacagtgcaagttgaaaaaaatggaaagagaaaagaagtagaagaaaatcgctttccaggttatgttcttgtagaaatggtcatgacagatgaagcttggtttgttgttcgaaacacaccaaatgttacaggatttgtcggatcacacgggaacagatcaaaaccaactccattattggaacaagaaattcgygacattttggtatctatgggacaaactgttcaagaatttgatttcgatgttgagattggtcaaactgtacgtattattgatggtgcttttgcagactacactggtaagattacagaaattgataataacaaagtgaaaatgattatctctatgtttggtaatgacacagttgcagaagtaaayctaaaccaaatcgcagaattataactaat

SEQ ID NO: 902 - DNA, 980 bp, Streptococcus pneumoniae
  misc_feature (1)..(980): tiling:Spneumo1:WAN024FBR; Cluster includes WAN0243IO spr1 684|fatD|15903726|NP_359276.1|1656023..1656997|+|975 bp|AB C transporter membrane-spanning permease - ferric iron tra nsport|S.pneumoniae|R6|NC_003098.1|ORF|111
atgaaaggacggggtatgaaactttctcattatttaattggcttacttctactcctagtctttctctctattagcattgggaccagtgatttttcatggggaaagctatttgatttcgaccagcagacctggctcctctttcaagagtcccgtctcccaagaactatcagtattctcctgactgcctctagtatgagtatggcaggccttctcatgcagactattacccaaaatcagtttgctgcaccgagtacagttggaacgactgaagccgccaaactgggratggtgctgagcctttttgtctttccatcggctagtctgacccamaagatgctcttcgcttttrtttcatccatcgtattcaccctcttcttcctagcctttatgaccatttttactgtaaaggaaaggtggatgttrcctctgattgggatcatctatagcggrattatcggctcagtcacagaagttatcgcctatcgtttcaatctggttcagagtatgactgcctggacccagggctccttctccatgattcagacccatcagtatgagtggctcttcttaggcctcatcatcctgataaccgtttggaaattatcccaaaccttcaccatcatgaatctagggaaagaaaccagcgagagtttggggatttcctactccctacttgaaaaactrgccctctttctggtggcgctaacgacaagcgtcaccatgattaccgtgggtggcytaccatttctcggagttatcgttcccaatcttgttcgcaagygctatggagataatctaagtcaaaccaaactcatggtcgcactggttggtgccaatctagttctggcttgcgatatcctatcccgagttctgattaggccctatgagttgtctgtcagtctcttgytaggaatcatcggtagtctcgtctttatcctacttctctggagagggggacgaaaagatgcagactaactaat

SEQ ID NO: 903 - DNA, 2079 bp, Streptococcus pneumoniae
  misc_feature (1)..(2079): tiling:Spneumo1:WAN024CEL-5; Cluster includes WAN023RVP co ntig_1609_55||||39772..45984|-|6213 bp|Glimmer 2.02 orf pr ediction|S.pneumoniae|670|WAN01UDCD|ORF|002
atgaaaggagcgagtatggaagtaatrmaattattggctatgtttcgtggaacaattccaaaagatagggakaaaatggacctatttcttcgytatcargcgcaacattttgatgagaaatggcaggayttggtagagagttttttgrctgaagaggrsaagatagaagagatwcctcaygtctattcktttsatcaagayattrtttctttcytagaggcyagttctgaaaataatgaccaagatytagaaagttayacaagaaattttggacaagcaggwctarrtaaattatctcaattaagtarttkkgagaaaaayttggtgctaraagtcgcaasctataayctttccactcgattttacatccaatctgaaaaagagaarytarmaccattaagtgarcttgtatktcwtcagaatcaggatgtyaatttagtcaatgtctatcgggttgcgaataatctatctgaccgyrttagtagagatatagaggartttcttctaatggttgaytcmaaagarstwamaaaagaagttcytgagattcattttgaagaaaaagarggagatgttctagcytatttgggttcwgaattrrtggctactttagatayygtkacggatcttgtccatcatgaagaaaactacmhacaactcccactgacacaaaagctgaagattattactcattttgatgawgtaaaagctaraagcgaaaagtctaatcaagtagagraarttttatctccttcaagtgrtattgaacaggaaacggaagaaackaactcyttttctaatgtcgataaaattgtagaagaagctttgarggaatatccaatcggttcacaagtaagttataaaggacaagtwtttcagttggtttcgattgaaaatgcrcagttaaatgacttarttcgcctagarytattcaatgattccaaccagttatttgaagaraatcctatcttatacttgaacastttggaagagattgaacaagtattgtctcwyktagaacttgaaaaagaagattcagagattgagattgattcatcaagtraaagtcaggaaatagatttgttttcmtacctggaagaagaaaawgwaaatgaaaaggataaggahamrgaaacraaayctttawtktcrggyataraagagacggatgtccctgttcwagattttgtttttccagatgatttagaggacttttatcctaagacaaatcgagaaaagattgaaacgaatatcgccgcaattgaacttgttaaaagattagaaaaagagrgacgacaagcrartccagaagaacaagarctactmgccaagtatgtyggmtggggyggycttgccaatgaatttttygatgaactcaatccaaagtatgarrcagaacgtttaactcttaagagcttagtaagtaaatcagaatactckaccatraaacaaagttctctcacagcctattatacagacccratgattattcgccagatttggcaaaarttactggatgatggttttgagggaggaagratwttagatccttctatggggactgggaacttctttgcggcgatgcctagaagtatacgagakaaatcagaactctatggrgttgaattagacagtgtgacwggygcaatcgcaaaamaactycaycccaatacycatattgaagtgcgaggatttgaagaagttccctatcaaaataatagttttgatttagtcttaacgaatgtwccwtttggaaattttcgcattgcmgataaaaaytatgataraccttatatgattcatgaytactttgtcaaacactcacttgatttagtaagagacggaggacaagtktcgattatctcatctatyggsacaatggataagcggacrgataatgtcttacaagagattaaawccaryactcattttttagggggagttcgkttgccrgatacggcttttaaaarsattgcaggtacycgagtgaccacagaymtcctmttctttcaaaaggatcaagcaaagaatcttmatgargaggarcttgtytttagtggctctrttccctttgaggag

SEQ ID NO: 904 - DNA, 1313 bp, Streptococcus pneumoniae
  misc_feature (1)..(1313): tiling:Spneumo1:WAN024DXI; Cluster includes WAN0243C6 spr1 919|malC|15903960|NP_359510.1|1901454..1902761|+|1308 bp|A BC transporter membrane-spanning permease - maltose/maltod extrin|S.pneumoniae|R6|NC_003098.1|ORF|111
atgaaaggagttaatatggaaaagcaacaacctagtaaagcagccctgctgtctatcattcctgggttaggacagatttacaataaacaaaaagccaaaggttttatcttccttggtgtaaccatcgtatttgtcctttacttcctagcacttgcaacccctgaattgagcaacctcatcactcttggtgacaaaccaggtcgtgataattccctctttatgctgattcgtggtgccttccatctaatctttgtaatcgtttatgtactcttttatttctcaaatatcaaagatgcacatacgattgcaaaacgcattaacaatggaattccagttccacgcacactcaaagacatgatcaaagggatttatgaaaatggcttcccttacctcttgatcattccatcttatgttgccatgaccttcgcgattatcttcccagttatcgtaaccttgatgatcgcctttaccaactacgacttccaacacttgccaccaaacaagttgttggactgggttggtttgaccaactttacaaacatttggagcttgagtaccttccgttctgcctttggttctgttctttcttggactatcatttgggctttggcagcttctactttacaaatcgtaattggtatcttcacagctatcattgcyaaccaaccatttatcaaaggaaaacgtatctttggtgttattttccttcttccttgggctgtcccagccttcatcactatcttgacattctcaaacatgtttaacgmtmgtgtcggtgctatcaacactcaagtattgccaatcttggctarattccttcctttccttgatggagctcttattccttggaaaacagacccaacttggactaagattgccttgattatgatgcaaggttggctcggattcccatacatctacgttytgacyttgggtatcttgcaatctattcctaacgacctttacgaagcagcttatattgacggtgccaacgcttggcaaaaattccgcaacatcactttcccaatgattttggctgttgcggcacctactttgattagccaatacaccttcaactttaacaacttctctatcatgtacctcttcaatggtggaggacctggtagtgtcggaggtggagctggttcaaccgatatcttgatctcatggatctaccgtttgacaacaggtacatctcctcaatactcaatggcggcagctgttaccttgattatctctatcattgtcatctcaatctctatgrtygcattcaagaaactacacgcatttgatatggaggamgtctaactaat

SEQ ID NO: 905 - DNA, 484 bp, Streptococcus pneumoniae
  misc_feature (1)..(484): tiling:Spneumo1:WAN024D39; Cluster includes WAN0243H2 spr1 742||15903784|NP_359334.1|1716369..1716851|-|483 bp|Hypoth etical protein|S.pneumoniae|R6|NC_003098.1|ORF|231
atgaaaggagttacgaatatgacgccagaagaaatgtacctgacagagcgattagacgtacagatagctcattttttaaagaaaagcgttcaacatcgtaggcgctataaggtattaaaaataacagaaatcgtggcaggtttcctcatagctgtcttttgtgctattcctatgccaggtgatcgctaccgtttgatttcggttgccttatccagtctcggcttgctgtgtgaggggattatcaatttgtataatgcaaaggaaaattggatttcttaccaaaaaactgcgcaactcctggagaaagaaaaattcctctatcaatgccaaacggagaaatatgcaggaaagaccaaggcttttgccctatttgtcaagacatgcgaaggtcttatctcagaggagattaaccagtgggaaagtatccagtcaaaagaagtggcagctagtgcagatgctccagttaaaaaagagtarswrrtag

SEQ ID NO: 906 - DNA, 678 bp, Streptococcus pneumoniae
  misc_feature (1)..(678): tiling:Spneumo1:WAN024FPR; Cluster includes WAN023PP9 pne2 0_13||||9782..10459|+|678 bp|Type 11A capsule operon, Glim mer 2.02 orf prediction|S.pneumoniae||WAN01UCJ5|ORF|000
atgaaagggaagagttttcttttgaagatgttacaaaatttaaaaccaataaaacggaaattaaaaccaattaagagaacttataagagaatcgtttattctatcactaagtcaaatatgaggaagaggctcaaaaatacagatttttcaattatcagtgataattgctggggaggacgggtatatgaagaattgggtctgccgtatagaacaccatttataggtctgtatattttttccgaggattatgtgaaactgttgaaaaacttcagaaagtatatggaatatgagctaacttttaccaataattcaaaatggaacacagaatatgacggggagtatcctataggcatacttaaggatattgaacttcattttttacattatgctaatcaagaagaggcttatgagaaatggaataaaagaaagaacaggattaattatgaaaatatcttttttaagatgaatgatgataataaatgttctttgaaattgcttaaggaatttgatactttagatttgaaaaataaaattatttttgctgcattcaattataaagaactagataatcttattcattttaccratcctagagggaatggtaatgtaggtacagacttattttattatgatcaatattttgatgttgtaaattggctgaatggagagacacaaaca

SEQ ID NO: 907 - DNA, 867 bp, Streptococcus pneumoniae
  misc_feature (1)..(867): tiling:Spneumo1:WAN024AXZ; Cluster includes WAN02410R |cps 6aL||AAL82788.1|||145 bp|glucose 1-phosphate thymidyl tran sferase Cps6aL|S.pneumoniae||AY078347|ORF|000
atgaaaggtattattctagcaggtggttcgggaactcgcttgtatcctttgactcgcgctgcatcaaaacaacttatgccggtttatgataaaccgatgatttactacccactttcaacattaatgttggctgggattarrgatattttgattatctcaactcctcaagatttgcctcgttttaaagagcttcttcaagatggttatgagtttggtattaaactttcttatgctgagcaaccaagtccagatggtttggcacaagcctttatcattggggaaaagtttattggtgatgatagtgttgcgctaatcttaggcgacaatatctaccatgggcctggtctttctaagatgctacaaaaggtatcaagtaaggagtcgggagcaactgtttttggctaccatgtcaaggatccagagcgctttggtgtagttgagtttgacaaggatatgaacgctatttctatcgaagaaaagccagagcaccctcgttcaaactatgcagttacaggactctatttctatgataatgatgtagtagagattgccaaaagtataaaaccaagccctcgtggtgaactggaaattacagatgtaaacaaggcttacctagatcgtggagatttatccgttgaggttatgggacgaggctttgcttggctggatactggaactcatgaaagtttattagaggcttcacagtacatcgagacagtgcaacggatgcaaaatgttcaggtggcaaacttagaagaaattgcctatcgcatgggttatatcagtcgtgaagatgtattgaccttagctcaaccacttaagaaaaatgaatacggacagtatctgctccgtttgattggagaagca

SEQ ID NO: 908 - DNA, 870 bp, Streptococcus pneumoniae
  misc_feature (1)..(870): tiling:Spneumo1:WAN024AY2; Cluster includes WAN0240UG |rml A||AAK20721.1|||870 bp|RmlA|S.pneumoniae||AF316642|ORF|000
atgaaaggtattattctagcaggtggttcggggacacgtttatatcctttgactcgagctgcatcaaaacaactgatgccggtttatgataaaccgatgatttactatccactttcaacattgatgttggctgggattagggatattttgataatctcaactcctcaagatttgcctcgttttaaagagcttcttcaagacggatctgagtttgggattaaactttcttatgcagagcaaccaagtccagatggtttggcacaagcctttatcattggggaagagtttattggtgatgatagtgttgctttgatcttgggggacaatatctatcacggccctggtttgagcaaaatgcttcaaaaagcagccaagaaagagaaaggtgcgactgtctttggctaccatgtcaaggatccagaacgctttggtgttgtagaatttgatgaaaatatgaatgctatctccatcgaagaaaaaccagaacagccgtgctctaactatgcagtgacaggactgtatttctatgataacgatgttgtcgagattgccaaaagtattaaaccaagtcctcgtggtgaattggaaattacagatgtaaacaaagcttacctagatcgtggtgatttgtctgttgagcttatgggacgcggctttgcttggttggatactggaacacatgaaagtttactggaggcttcacagtacatcgaaacagtgcaacggatgcaaaatgttcaggtagcaaacttggaagaaattgcctatcgcatgggttatatcagtcgtgaagatgtattgaccttagcccaaccacttaagaaaaatgaatacggacagtatctgctccgtttgattggagaagtctag

SEQ ID NO: 909 - DNA, 858 bp, Streptococcus pneumoniae
  misc_feature (1)..(858): tiling:Spneumo1:WAN024AXY; Cluster includes WAN02402J |cps 19bL||AAB66526.1|||181 bp|glucose-1-phosphate thymidyl tra nsferase|S.pneumoniae||AF004325|ORF|000
atgaaaggtattattctagcaggtggttcggggacwcgyttrtatcctttgactcgcgctgcrtcaaaacaactkatgccggtttatgataaaccsatgatttactacccactttcaacattgatgttggctggrattagggatattttgattatttccactccacaggatttacatcgatttcaagagcttcttcaagacggatctgagtttgggatcaaactttcttatgcagagcaaccaagtacagatggtttggcaattggggaagagtttatttctgacgatagcgttgccttgattttaggcgacaatatctaccatggtcctggtctgagcacaatgcttcaaaaagcagccaagaaagagaaaggtgcgactgtttttggctaccaagtgaaggatccagagcgttttggtgtggttgagtttgatacagacatgaatgctatttccatagaagaaaaaccggagtatcctcgctccaactatgcagtgacaggactgtatttctatgataacgatgttgtcgaaattgccaagagtattaaaccaagccctcgtggtgaactggaaattacagatgtaaacaaggcttacctagatcgtggtgatttgtctgttgagcttatgggacgtggctttgcttggctgaatactggaactcatgaaagtttactagaggcttcacagtacatcgaaacagtgcaacggatgcaaaatgttcaggtagcaaacttagaagaaattgcttaccgtatgggctatatcagtcgagaagatgtattggccttagcccaaccacttaagaaaaatgaatacggacagtatctgctccgtttgattggagaagcatag

SEQ ID NO: 910 - DNA, 870 bp, Streptococcus pneumoniae
  misc_feature (1)..(870): tiling:Spneumo1:WAN024C4Z; Cluster includes WAN0240F7 |cps 19aL||AAC78674.1|||870 bp|glucose-1-phosphate thimidylyl t ransferase Cps19aL|S.pneumoniae||AF094575|ORF|000
atgaaaggtattattcttgcaggcggctcaggtacccgcctgtacccacttactcgggctgcgtcaaaacagctgatgccggtttatgataaacctatgatttattatccgttgtcgacattaatgttggctggaattaaagatattttgattatctcaactcctcaagatttgccccgktttaaggacttgctcttggatggttccgaatttgggatcaagctttcctatgcggaacaacctagtcccgatggacttgctcaggcttttcttatcggtgaagaatttatcggtgacgatagygttgccttgattttrggcgacaatatctaycatggwcctggtytgagcamaatgcttcaaaargcagccmagaaagagaaaggtgcgactgtttttggctaccaagtgaaggatccagagcgttttggtgtggtygagtttgatacagacatgaatgcyatttcyatagaagaaaarccrgagwatcctcgctccaactatgcmgtgacmggwctgtatttctatgataatgatgttgtrgarattgctaaasrkatyaaaccwagtgcwcgtggcgagttagaaattacagayrtyaacaaggcttacctaaatcgtggtgacctttctgttgagctgatggggcgtggttttgcctggttggatacgggaacccatgaaagcytgctagaagcttctcagtatatygaaacrgttcarcgkatgcagaaygttcaagtkgcaaayytrgaagaaattkcctatcgyatgggctayatyagtygtgaagaygtgctsgarttggckcarcytctkaagaaraatgaatacggacratatttgctccgtttgattggagaagcatag

SEQ ID NO: 911 - DNA, 867 bp, Streptococcus pneumoniae
  misc_feature (1)..(867): tiling:Spneumo1:WAN024C52; Cluster includes WAN023PVS pne0 8_22||||17331..18197|+|867 bp|Type 7A capsule operon, Glim mer 2.02 orf prediction|S.pneumoniae||WAN01UCKE|ORF|000
atgaaaggtattattcttgcaggtggttcgggracrcgmytrtayccwytkactcgrgctgcrtcaaaacarctkatgccggtttatgayaaacccatgatttaytatcctttgtcaaccctratgttgrctggaatmaaggayattttgattatctcaacaccacaggatttgccccgttttaaggacytgctcttggatggttccgaatttgggatyaagctttcctatgcggaacaacctagtcccgatggacttgctcaggcttttmttatcggtgaagartttatcggtgacgatagcgttgcsytgatyttaggtgacaatatytaycayggtyctggtytgagcamaatgctwcaaaargcagcsarkaargagwmrggwgcractgtytttggctaccawgtsaaggatccagarcgytttggtgtkgtwgartttgatrmarayatgaakgctatytcyatygaagaaaarccagarcavcckcgytcwaactatgcagtkacaggwmtstatttctatgataaygatgtwgtmgarattgccaaragtathaaaccaagycctcgyggwgaaytrgaaatyacagatgtmaacaaggcttacytrgrtcgtggwgatttrtchgttgagsttatgggacgwggctttgcttggytggatactggmactcatgaaagtttaytagaggcttcrcagtacatcgaaacagtscaacggatgcaaaatgttcaggtagcaaacttagaagaaattgcytaycgyatgggytatatcagtcgwgaagatgtattgrccttagcccaaccacttaagaaaaatgaatacggacagtatctgctccgtttgattggagaagca

SEQ ID NO: 912 - DNA, 870 bp, Streptococcus pneumoniae
  misc_feature (1)..(870): tiling:Spneumo1:WAN024C4Y; Cluster includes WAN0244KI spr0 320|cps2L|15902364|NP_357914.1|320264..321133|+|870 bp|The type 2 capsule locus of Streptococcus pneumoniae|S.pneumo niae|R6|NC_003098.1|ORF|200
atgaaaggtattattcttgcgggtggctcaggtacccgtctgtatccacttactcgagctacatcgaaacagctgatgccggtttatgataaacccatgatttactatcctctgtcaactttgatgttggcgggtattaaggatattttgattatttcaacgccacaggatttgccgcgctttaaggacttgctcttggatggttccgaatttgggatcagactttcctatgcggaacagcctagtccagatggccttgctcaggcctttcttatcggtgaggattttattggtgacgatagcgttgctttaatcttgggtgacaatatttatcacggtccaggtttgagcaagatgctccaaaaaactgtttcgaaagaaaagggtgcgactgtttttggttaccaagtgaaggatccagaacgctttggtgttgtagaatttgatgaaaatatgaatgctatttccatagaagaaaaaccagagtgtcctcgctccaactatgcagtgacaggactgtatttctatgataacgatgttgtcgaaattgccaagagtatcaaaccaagtgctcgtggtgagttagaaatcacagatgtcaacaaggcttacttggatcgtggtaatttatctgtcgaagtcatgggacgtggctttgcttggcttgatacaggaacccatgaaagcttgttggaagcctctcaatatattgaaacggttcaacgcatgcaaaatgttcaagttgccaatttggaagaaatcgcctatcgcatgggttatattagtcgtgaagatgtgctggagttggcgcaacctcttaagaagaatgaatacggacagtatctgctccgtttgattggagaagtctag

SEQ ID NO: 913 - DNA, 870 bp, Streptococcus pneumoniae
  misc_feature (1)..(870): tiling:Spneumo1:WAN024AY3; Cluster includes WAN024117 |cps 6aL||AAL68426.1|||870 bp|glucose 1-phosphate thymidyl tran sferase|S.pneumoniae||AF246898|ORF|000
atgaaaggtattattctwgcaggtggttcgggracwcghttrtatcctttgactcgsgctgcatcaaaacaacttatgccggtttatgataaaccgatgatttactayccactttcaacattratgttggctggrattagggatattttgataatctcaactcctcaagatttgcctcgttttaaagagcttcttcaagacggatctgagtttgggattaaactttcttatgcagagcaaccaagtccagatggtttggcacaagcctttatcattggggaagagtttattggtgatgatagtgttgctttgatyttgggggacaatatctatcacggccctggtttgagcaaaatgcttcaaaaagcagccaagaaagagaaaggtgcgactgtttttggctaccaagtgaaggatccagagcgttttggtgtggttgagtttgatacagacatgaatgctatctccatcgaagaaaagccagaataccctcgttcaaactatgcagtgacaggactctatttctatgataatgatgtwgtmgarattgccaagagtatcaaaccaagtcctcgcggagaattagaaatcacagatgtcaacaaggcttacttggatcgtggagacttatccgttgagcttatgggacgtggctttgcttggctggatactggaactcatgaaagtttactagaggcttcacagtacatcgaaacagtgcaacggatgcaaaatgttcaggtagcaaacttagaagaaattgcttaccgtatgggctatatcagtcgagaagatgtattggcyttagcccaaccacttaagaaaaatgaatacggacagtatctgctccgtttgattggagaagcatag

SEQ ID NO: 914 - DNA, 800 bp, Streptococcus pneumoniae
  misc_feature (1)..(800): tiling:Spneumo1:WAN024G49; Cluster includes WAN02443C spr0 938|ABC-NBD|15902982|NP_358532.1|923268..924062|+|795 bp|A BC transporter ATP-binding protein - iron transport|S.pneu moniae|R6|NC_003098.1|ORF|111
atgaaaggtctgtggtcaaatartcttacctgcggttatgatgaaaaaataatcttggaaaatataaatataaaaatacctgaagaaaaaatatcagttattattgggtcaaatggttgtgggaaatcaacactcattaaaaccttgtctcgacttataaagccattaragggagaagtattgcttgataataaatcaattaattcttataaagaaaaagatttagcaaaacacatagctatattacctcaatctccaataatccctgaatcaataacagtagctgatcttgtaagccgtggtcgtttcccctacagaaagccttttaagagtcttggaaaagatgaccttgaaataataaacagatcaatggttaaggccaatgttgaagatctagcaaataacctagttgaagaactttctgggggtcaaaggcaaagagtatggatagctctagccctagcccaagatacaagtatcctacttttagatgagccaactacttacttggatatctcatatcaaatagaactattagacctcttgactgatctaaaccaaaaatataagacaaccatttgcatgattttgcacgatataaatctaacagcaagatacgctgattacctatttgcaattaaagaaggtraacttgttgcagagggaaagcctgaagatatactaaatgataaactagttaaagatatctttaatcttgaagcaaaaattatacgtgaccctatttccaattcgcctctaatgattcctattggcaagcaccatgttarctcttaactaat

SEQ ID NO: 915 - DNA, 1305 bp, Streptococcus pneumoniae
  misc_feature (1)..(1305): tiling:Spneumo1:WAN024DUD; Cluster includes WAN02439K spr2 013|comFA|15904054|NP_359604.1|2005956..2007254|-|1299 bp| nvolved in transformation; required for DNA uptake but not for binding; Rela...|S.pneumoniae|R6|NC_003098.1|ORF|111
atgaaagtaaatttagattatctcggtcgtttatttactgagaatgaattaacagaagaagaacgtcagttggcggagaaacttccagcaatgagaaaggagaaggggaaacttttctgtcaacgytgtaatagyactattctagaagaatggtatttgcccatcggtgcttactattgtcgagagtgcttgctgatgaagcgagtcagaagtgatcaaactttatactattttccgcaggaggattttccraagcaagatgttctcaaatggcgcggccaattaactccttttcaagagaaggtgtcagagggaytgcttcaagyagtagacaagcaaaagccaaccttagttcatgcggtaacaggagctggaaagacagaaatgatttatcaagtagtggctaaagtgatcaatgcgggtggtgcagtgtgtttggctagtcctcgcatagatgtttgtttggagctgtacaagcgcctgcaacaggatttttcttgcggdatagctttgctacatggagaatcggaaccttattttcgaacaccactagttgttgcaacaacccatcagttattgaagttttatcaagcttttgatttgctgatagtggatgaagtagatgcttttccttatgttgataatcccaygctttaccaygctgtcaagaatagtgtaaaggagaatggattgagaatctttttaacagcgacttcgaccaatgagttagataaaaaggtccgtttaggagaactaaaaagactgartttaccgagacggtttcatggaaatccgttgattattccaaaaccaatttggttatcggattttaatcgctacttagacaagaatcgtttgtcaccaaagttaaagtcctatattgagaagcagagaaagacagcttatccgttactcatttttgcttcagaaattaagaaaggggagcagttagmagaaatcttacaggagcaatttccaaatgagaaaattggctttgtatcttctgtaacagaggatcgattagagcaagtacaagcttttcgagatggagaactgacaatacttatcagtacgacaatcttggagcgyggagttaccttcccttgtgtggatgttttcgtagtagaggccaatcatcgtttgtttaccaagtctagtttgattcagattggtggacgagttggacgaagcatggatagaccgacaggagatttgcttttcttccatgatgggttaaatgcttcaatcaagaaggcgattaaggaaattcagatgatgaataaggaggctggtctaykaactaat

SEQ ID NO: 916 - DNA, 1041 bp, Streptococcus pneumoniae
  misc_feature (1)..(1041): tiling:Spneumo1:WAN024DZJ; Cluster includes WAN0240C9 |cap 33fG||CAA07400.1|||1041 bp||S.pneumoniae||AJ006986|ORF|000
atgaaagtaactattattggacaaataaaaaataagagaacaggtcttggaaaggcgattaatgattttagggattattgttgcaatcgtgctacaagagtaacggaaatagatataacaaataattttaattttttaagctctctttttcaaattttaatatctgatacagatgtttattattttactccagctggttcagtagctggtaatattagggattcactgtttttgttctttatgataatgaaaaggaaaaaaatagtgacccattttcataatagtgcttttggaaatgtgatgagacaacatccgactctaatgataataaatagaatattgtattctaaagttgatttgattatattattgggagagaaatcgaaaataatgtttcaacaactaagaattttagacgaaaaatttaaaataattaggaatggtgtggatggatatttatttattgaaaaaaatgaattaaataaaaaaatgarygatctacccataaatattattttttttagtaatatgattagagaaaaaggttacgaaattttattagaagttgctaagaagatggtgggggatgagaaatatcacttttatttttctggaaaatttcaggataataatttaaagactaggtttattaatgaaatttatagtatgaataatktaacatatttagatggtgtatatggtagtgataagaaaaagttattgcaaaaaatgcattactttgttttaccatcgtattataaagatgaaactttacctatcagtatgttagaagcaatggcaaatggtctctatattattgtaagcgatgtgggagttgtgtcagaggtgattaataaagaaactgctagtcttattgaaatgataaacgaagaaacagcagacagtatcatagaaattattaatcagacttcaaataaacttaatgagttmgattttaatgtatcaaaatataagcaagagttgttaaatgaaaatatacaagcatcaatttatcagcaattagagaggatagcaaattga

SEQ ID NO: 917 - DNA, 122 bp, Streptococcus pneumoniae
  misc_feature (1)..(122): tiling:Spneumo1:WAN024C8H; Cluster includes WAN0244NI spr0 212|rpmJ|15902256|NP_357806.1|208068..208184|+|117 bp|50S Ribosomal protein L36|S.pneumoniae|R6|NC_003098.1|ORF|110
atgaaagtaagaccatcggtcaaaccaatttgcgaatactgtaaagttattcgtcgtaatggtcgtgttatggtaatttgcccagcaaatccaaaacacaaacaacgtcaaggataactaat

SEQ ID NO: 918 - DNA, 1358 bp, Streptococcus pneumoniae
  misc_feature (1)..(1358): tiling:Spneumo1:WAN024GEL; Cluster includes WAN0244CN spr0 603|murD|15902647|NP_358197.1|615371..616723|+|1353 bp|UDP -N-acetylmuramoyl-L-alanine--D-glutamateligase|S.pneumonia e|R6|NC_003098.1|ORF|331
atgaaagtaatagatcaatttaaaaataagaaagtycttgttttaggtttggccaagtctggtgaatctgcrgctcgtttgttggacaagytaggtgccattgtgacagtaaatgatgggaarccwttcgaggacaatccagctgcccaawgtttgctggaagaagggatcaaggtcattacaggtggccatcctttggaactcttggatgaagagtttgccctyatggtraaaaatccaggtatcccctacarcaatcccatgattgaaaaggctttggccaagrgaattccagtcttgactgaggtggaattggcttatttgatttcagaagcaccgattattggtatcacaggatcgaacggtaagacaaccacaacgactatgattggggaagttttgactgctgctggscaacatggtcttttatcagggaatatcggctatccwgcyagtcaggttgctcaaatagcrwcagayaagrayacgcttgttatggaactttcttctttccaactcatgggtgttcaagaattccatccwgagattgcggttattacyaacctyatgccaactcatatcgaytaycatggrtyatttkmkgaatatgtagcagccaagtggaatatccagaacaagatgacagcagctgatttccttgtcttgaactttaatcaagacttggyaaaagacttgrcttccaagacagaagccactgttgtaccattttcaacacttgaaaaggttgatggagcttatctrgaagatggtcaactctacttccgtggtgaagtagtcatggcagcgaatgaaatcggtgttccaggtagccacaatgtggaaaatgcccttgcgactattgctgtagccaagcttcgtgrtgtggacaatcaaaccatcaaggaaactctttcagccttcggtggtgtcaaacaccgtctccagtttgtggatgacatcaagsgtgttaaattctataacgacagtaaatcaactaatatcttggctactcaaaaagccttrtcaggatttgacaacagcaaggtcgtcttgattgcaggtggtttggaccgtggcaatgagtttgacgaattggtgccagayattmctggactcaagaagatggtcatcctgggtcaatctgcagaacgtgtcaaacgggcagcagacaaggctggtgtcgcttatgtggaggcgacagatattgcagatgcgacccgcaaggcmtatgagmttgcgactcaaggagatgtggttcttcttagtcctgccaatgcyagctgggatatgtatgctaactttgaagtacgtggcgacctctttatcgacacagtagcggagttaaaagaataactaat

SEQ ID NO: 919 - DNA, 458 bp, Streptococcus pneumoniae
  misc_feature (1)..(458): tiling:Spneumo1:WAN024DUF; Cluster includes WAN02439O spr2 009|rplI|15904050|NP_359600.1|2002111..2002563|-|453 bp|50 S Ribosomal protein subunit L9|S.pneumoniae|R6|NC_003098.1 |ORF|111
atgaaagtaatctttttagcagatgttaaaggaaaaggtaaaaaaggcgaaattaaggaagtaccaacagggtatgcgcaaaaytttcttatcaaaaagaatctagccaaagaagcgactgctcaagctgtaggtgaacttcgtggtaaacaaaaatcggaagaaaaagctcacgctgagatgattgcagaaggaaaagcaattaaagcacaacttgaagcagaagaaactgttgtagaatttgttgaaaaagttggtccagatggtcgtacctttggttctattaccaataagaagattgcagaagaattgcaaaagcaatttggaattaagattgataaacgtcatattcaagtacaagctccgattcgagcggttggtttgattgatgtgccagtgaaaatctatcaagatatcacaagtgtaatcaatcttcgtgtgaaagaaggataactaat

SEQ ID NO: 920 - DNA, 1410 bp, Streptococcus pneumoniae
  misc_feature (1)..(1410): tiling:Spneumo1:WAN024FYF; Cluster includes WAN023PQV pne1 7_18||||13078..14487|+|1410 bp|Type 10A capsule operon, Gl immer 2.02 orf prediction|S.pneumoniae||WAN01UCJH|ORF|000
atgaaagtactaaaaaattacgcctataacctctcctatcaactattactcattatactacctatcattacaactccctatgtgacacgggtcttttctttgaatgatctagggacttatggttattttaactccatcgttacttattttattcttttagcaactttaggagttgctaactatgggaccaaggtcatttcagggcatcgcaaggaaattgaaaaaaatttttgggggatttactccctgcaattgggtgcgacagttctttctatgttyttgtaccttgttctttgtctaaytcttccttttatgcaaaatccaktcgcctatattctaggcttgagtttggtttctaaaggcttagatatttcctggctctttcaaggattagaggattttcgtaagattacagcaagaaatatcattgtgaaactcgtaggtgtaagttcgatttttttatttataaaatcagctagtgacctttacctttaygtatttcttttgacaatatttgagttgttgggacagttaagcatgtggttacccgctcgggaatttattgggaaaccayattttgatttaagctatgcaaagcagcatctgaagccaattgttttattattccttcctcaggtagcgatctccttatatgttactctarawcgtacgatgcttggtgctttatcttctacaaaagatgtaggaatttatgatcaggctcttaaattggtaaatattttattaacattggtaacatcgcttgggagtgttatgttacctcgagttgctaatttattagcaacaggtgattacaaagctgttaataagatgcatgaaatgtccttcctcatttataatttagtgatttttccaattatggctggaattttgattgtgaatgatgattttgttcagtttttccttggtcaagattttcaggatgcacgttatgcaatcgccattatgatcttccgtatgttcttcatcggttggaccaatataatgggaattcagattttaattccccataataaaaataaagaattcatgatttcaacaacagyttctgcaattatcagtgtaggattaaacatgcttttcctaccaaagcttggctatattggagcagccattgtttctgtattaacagaagcacttgtatgggcaattcaattgttctatactcgcagatatctcaaagaagttcctatcatagtatctatgacaaaaattgttctagcatcagttatcatgtatggcattttgctaggttcaaaaatatttatacatttttccccgactataaatgttctagcatttgcagtacttggtggaatcatttacctttttgcaattttatctatgaaagtaatagatgtgaaagaattaaaacaaatcataaaaaaa

SEQ ID NO: 921 - DNA, 447 bp, Streptococcus pneumoniae
  misc_feature (1)..(447): tiling:Spneumo1:WAN024CAL; Cluster includes WAN0244OZ spr0 159||15902203|NP_357753.1|167276..167797|-|522 bp|Conserve d hypothetical protein|S.pneumoniae|R6|NC_003098.1|ORF|211
atgaaagtagaactacagattagtgagacttacgaggaggaaaagctgattgtccaagcacctcarsmracmgawwaagtccagaaagtcatcgagttcgcagaaaatctggaccaaagagaaaaaatcaaaggraaaatcgatgatcaggtctatctagttgagattggcaagattcagcgcttctatatcgagaatcggaaggttctagcagaaaccgcgagtcagacctacagcattgatttgcgactctatcaggttcttaaactcttgccaascaattttatccaaatttcccaatcagaaatcatcaatatcgattccatctctcacctcaagctcacgccaaacggtctggtagaaattttcttgaaaaacgaaagcttcacctactcttcacgccgttatctaaaaaccatcaaggagaaattagaactaykaactaat

SEQ ID NO: 922 - DNA, 717 bp, Streptococcus pneumoniae
  misc_feature (1)..(717): tiling:Spneumo1:WAN024FPC; Cluster includes WAN023PI5 pne3 4_11||||8605..9321|+|717 bp|Type 17F capsule operon, Glimm er 2.02 orf prediction|S.pneumoniae||WAN01UCHZ|ORF|000
atgaaagtagcratwttaacwgcttcaggyatyggragcmgrattggtcaagatatccctaaacaatttattcatgttgaaaataagycagtcattatctatacccttgaaaaatttcaaaatcatccagaaattgatgaaatctgtattgtyattttaaaaggstgggascagatggttaargcttatgcggaacaatttggaattacaaagttaaagatgataactttgggagggaagtctggtcaagaatcaatttataacggtcttagagmagttaagaaagctcatcccaatgaggatgtgactgtattaattcatgacggraatcgtcctttagtgagcaatratattattagyaacgctttagcaacataccaacrgtttggaaatgctgttgcagckataccaacgactgaggtagtatttgttttagaaaacccacaatcaacttcrtccacagaagcattgaatcgtgacttgttgagacgaacacaaactcctcatgtttaccatcttgataatattctatcgcttcatgaaaaagcattagaaaatgggataactgatgttgcagcatcatgccaactcatgcaactattyggtgraragagttatttctctcttggawcagagaaaaacttgaaaattacgactgtagaagatctygatatttttaaagcyttattgagttcaactmgagataagtggattaaa

SEQ ID NO: 923 - DNA, 450 bp, Streptococcus pneumoniae
  misc_feature (1)..(450): tiling:Spneumo1:WAN024FUO; Cluster includes WAN0240PE |cps 14F||CAA59778.1|||450 bp|putative glycosyltransferase acti vity enhancer|S.pneumoniae||X85787|ORF|000
atgaaagtatgtctagttggatctagtggaggycatttaactcatttgtatttattaaaacctttctggaaagataragaaagattttgggtkacttttgataaagaagatgcaagaagtattttrgraaatgaaatattttayycatgtyattatcctactaatcgtaatctaaaaaatcttattaaaaatacgattcttgctttcaawattttgagaaaggaacrccctgatattatcgtmtcatcaggggcagctgtagcagttcctttcttttatctagggaaaatatttggtgctaagacagtctatatagaagtatttgatagaattgatgctccgacaatgackgggaaacttgtttatccagtaactgacaggtttattgtmcaatgggaagaaatgaaaaaagtatayccraaagcaatyaayctmggagggatwttctaa

SEQ ID NO: 924 - DNA, 1422 bp, Streptococcus pneumoniae
  misc_feature (1)..(1422): tiling:Spneumo1:WAN024FYE; Cluster includes WAN023P62 pne5 4_14||||10837..12258|+|1422 bp|Type 25A capsule operon, Gl immer 2.02 orf prediction|S.pneumoniae||WAN01UCGY|ORF|000
atgaaagtattaaaaaactatgcctacaacctttcttatcagttgttgataattatactccctatcattactactccctatgtgacacgagtcttttcttcggatgatttaggatcatatggttatttcaattcgatagtgacttattttatcttgttagcaacacttggggttgctaactatggtacaaaggtaatttcaggacatcgtaaaaacattgaaaagaacttttggggcatctattcgttacaattaggtgcgacagttctttcactgttattctatgtcattctatgtctctctatatcttttatgaaaaatccaacagcctatattcttggattgagtttaatatcaaaaggcttggatatttcctggctttttcaagggatagaggattttcgaaaaattacagtaagaaatataactgtaaaagtcattggggtaacctcggttttcttatttgtaaaatcagctagcgacctctatctttatgtttttcttttaacgatatttgagttattagggcaacttagtatgtgggtaccagctcgggaatttactgggaaaccgcactttgactggttgtatgctaaacaacatttgaaaccagttatcttattatttttaccacaggtcgctatatcgctttatgtgactttagatagtactatgcttggttctctatcttcaattagagatgtaggaatttatgatcaatctttgaaacttgtcaaaatattattaacattagtaacttcattaggaagtgtcatgttgccacgagtttcaaatcttttatcttcaggggatcataaagcagttaataaaatgcatgagatgtcatttctggtttataacttggttatttttcctattatggcaggaatgctaattgtaaatgatgactttgtaacctttttcctcgggcaagattttcaagaggcacgttatgcgatagcaattatgatttttagaatgttctttattggttggaccaatattatggggattcaaattttgatacctcataataaaaataaagaatttatgctgtcaacaacaattcctgctattgttagtgtaggcttaaatcttctcttgcttccaaagctgggctatataggtgcggcaattgtatctgttttaacagaggtactagtatggctgatacagttattctatactcgttcttatttgagagaggtgcccattctaggttcattgatcaaaattataatctcatctggagttatgtatggtatcttgttatttataaaacaattcctaaatgtatcaccgataatcaatgtgggactatatgctattctgggagcaatgatctatctcgtattaattttgatttttaggattataaatccaaatgagttaaaacaacaattattaaaaaataaaggagca

SEQ ID NO: 925 - DNA, 690 bp, Streptococcus pneumoniae
  misc_feature (1)..(690): tiling:Spneumo1:WAN024CNC; Cluster includes WAN0244PT spr0 129||15902173|NP_357723.1|137885..138568|+|684 bp|Conserve d hypothetical protein|S.pneumoniae|R6|NC_003098.1|ORF|111
atgaaagtattagcttttgatacgtccagcaaggctctttctctsgytattttagaggataagcaggttcttgccgagacgacgattaatattaagaaaaatcacagtattacycttatgcctgccatmgattttttgatggcaagtttggattggacaccmaaggayttggaccgaatcgtggtagctgaagggccgggtagctatacaggcttrcgaatygcggtagcmactgcyaaracyytrgctyayacyctgaayatygagttrgttggkatgtckagtctmttggctctggtgccmyrycaacaagaaggyttgktkrtyccywtsatggatgcgcgtcgcaayaatgtytatgcaggmttttatgaaaatgccaaacctgtcatggcagaagcrcayctrycttttgamgaggtsmtwgarmwartcaagggyrctagtcaggtaacctttgtcggagaagttgscccctttgtkgagcagattcaaraayacttgccaaggactrattwyaaagaaacmttgcchaatgcagcyaatctwgctctttkrgcytgggacaargaagcagactccttgcaygaytttgtgccraattayctcaarcgwgtygaggcwgaggaaaactggctcaagaaccayacmgagtctggygagtcytacattaaacgcctaykaactaat

SEQ ID NO: 926 - DNA, 651 bp, Streptococcus pneumoniae
  misc_feature (1)..(651): tiling:Spneumo1:WAN024CXI; Cluster includes WAN0243DI spr1 871|pcp-truncation|15903912|NP_359462.1|1842688..1842903|- |216 bp|Pyrrolidone carboxyl peptidase, truncation|S.pneum oniae|R6|NC_003098.1|ORF|311
atgaaagtattagtgacaggttttgagccctttggaggggaaaagggcaatysarctttkgagrccattaaaggtttaccagctgaaatccatggtgctgaggtccgytggctagaggtgccgacagtttttcacaaatctgctcaagtattggaagaagagatgaatcgttatcaacctgactttgtcctttgtattgggcaagctggtggaagaactagtttgacacctgaacgagtgrccattaatcaagacgatgcaygyayttctgataacgaagataatcaaccgattgaccgtcccattcgccyagatggtgcttcsgcctactttagtagtttgccgattaaagcgatggttcaagctataaaaaaagarggmttaccggcctctgtttccaatacggcagggacttttgtctgcagccatttgatgtatcaggctctctatttggtagaaaagaaatytccatatgttaaggcaggttttatgcatattccttatatgatggaacaggtggtgaacagacmgactaytccarctatgagtttagtggatattcggcgagggatagaagcagcaatcggcgctatratagaacatggagatcaggaactcaagttggtaggcggagaaaytcatykaactaat

SEQ ID NO: 927 - DNA, 1413 bp, Streptococcus pneumoniae
  misc_feature (1)..(1413): tiling:Spneumo1:WAN024FYJ; Cluster includes WAN023PPS pne1 9_18||||11756..13168|+|1413 bp|Type 10C capsule operon, Gl immer 2.02 orf prediction|S.pneumoniae||WAN01UCJ7|ORF|000
atgaaagtaytaaaaaactacgcytayaatctttcttatcarttrttrgtgattatactyccdatyattacgactccctatgtracacgggtcttttcttcggatgayytagggacrtatggwtaytttaaytccatygtbacytaytttatcctcttrgcracrctrggagttgcyaactatgggacyarggtcatttcaggryatmgsrargaaattvaaaaaaayttttggggwatytaytctytrcaaytaggkgcaacmgttctttctctrkcyttrtatrbtsttytttgyctrayycttccctttatgcaaaatcckgtagcctacattytaggcttgagtttrgtttcwaaaggwttagayatwtcmtggctytttcaagggytrgargattttcgwaagattackgttcgaaatatyacrgthaarythgttggagtswtytcmatcttymtctttgtcaaatctgcaaaygacctmtatctctatgtytttttrctwacyatatttgaactyttrgggcarctaagtaygtggttvcctgctcgkgagtttatygrtagwbctcattttrrywtagaatatgctargcmtcatttraarccsgtyatattattattycttcctcaagtagcwatytctttgtayrttacbytrgatcgtaccatgcttggagcmytrgcktctacaaaagatgtaggratytatgaycaggchctwaarttrgtaaatatmcttytgayyttggtaacttccttgggaagygttatgttgcctcgwgthgckmayttrttagcracaggwrawcayaragcrgtyaayaaratgcatgaratrtccttcctcatttataatytagtgattttcycaatgatggcaggaattttratygtsaatgatgattttgttagctttttccttgggcagrattttcaggatgcacgttatgcaattgccattatgakcttccgtatgttctttatcggttggaccaatatcatgggaaytcagatwytratwccycayaatmaaaataaagarttcatgayttcaacaacagytcccgcaattrtcagtgtaggtttgaacttactattccttcctaaayttggatatatmggagcagccattgtttctgtttygacagaggcgttrgtatgggcgatacaattatactttacccgtagatacctaaaagaagttccrattatcggatytttgacaaaaatwrtyctagcwtcagctatcatgtatggyatyytgctaggttyaaaaacasttatacawttttyrccaayyataaatgttatagtatttgcagtgcttggtggaatcatttatctttttgcaattctatctytraaagtggtagatrtmaaagaattaaaacawatyattarraaaaaa

SEQ ID NO: 928 - DNA, 395 bp, Streptococcus pneumoniae
  misc_feature (1)..(395): tiling:Spneumo1:WAN024DI4; Cluster includes WAN0244HB spr0 435||15902479|NP_358029.1|435075..435464|+|390 bp|Hypothet ical protein|S.pneumoniae|R6|NC_003098.1|ORF|111
atgaaagtcaayatagcagatcttcatcygactcaactatatttatcagaaaagaagttgcaagatattcagatgctttaccagtcggcagaaacaawccaagtcgatccaatcagtattcttgcctttggagattgtttgctgattacagatgggcatcacagggcttatcagrctttattggcagrtcgggatacgatttctgctgagtgggatagagatggtggtgatgaactatatcatctctatgcgcaagcttgcgaggaaagaaagatttactctgtttttgatttagaagatcgtatcctagctcaagatgggtatgaagcaaaatggtataactggtgtgatggttttaatcaagcagcaactcttttgttgaaaaggtarctaat

SEQ ID NO: 929 - DNA, 228 bp, Streptococcus pneumoniae
  misc_feature (1)..(228): tiling:Spneumo1:WAN024EZG; Cluster includes WAN023LLL 3146 51_1630a||||865278..865505|-|228 bp|EGAD orf prediction|S. pneumoniae|R6|NC_003098.1|ORF|110
atgaaagtcctgcatgcttccatcttccccaaaggcattggtataagtccgaatggtggarccrcctttttcaacagcctggcccaaaacagcaatggtctggtcatgaatggcagtcgcttcttctgctgtcaaagtctgggaaggtctagctggatgaacctgagctcgccagagaacctcatccacatagatattgccaagtccagctaccaaggtctggtctag

SEQ ID NO: 930 - DNA, 1265 bp, Streptococcus pneumoniae
  misc_feature (1)..(1265): tiling:Spneumo1:WAN024F89; Cluster includes WAN0243VP spr1 214|trzA|15903257|NP_358807.1|1208515..1209981|-|1467 bp|N -ethylammeline chlorohydrolase|S.pneumoniae|R6|NC_003098.1 |ORF|131
atgaaagtctttcagcatgtaaatatcgtgacttgtgatcaagatttccatgtttatcttgatggaatcttagcagtcaaggattctcaaatcgtctatgtcggtcaagataagccagcgtttttagarcaagctgagcagattatagactatcagggagcttggattatgcctggtttggtcaattgtcacacccattctgcaatgacaggtctgagagggatccgagatgacagcaatctccatgaatggctcaatgactatatytggccagcagaatctgagtttactcccgacatgactaccaatgcggtcaaagaagccytracagagatgctccagtcaggaacaacaacctttaacgatatgtataatcccartggtgtggatatccagcaaatttatcaggtggtgaaaacttccaagatgcgttgttatttttctccgactctcttttcttcagagacagaarcaactgctgagactataagyagaactcgatccatcatagacgaaatcttaaaatataaaaatccaaatttcaaggktatggtagcacctcattctccgtatagctgcagtagagacttgctggaagcgagtttggaaatggcaaaagagctaaatattccgctccatgtccatgtggcggagaccaaggargagtcaggaattatcctcaaacgrtacggcaaacgcccccttgcttttctkgaagaactgggttatttagatcatccgtccgtatttgctcacggggtcgaattaaacgagagagaaattgaacgcttggcatcttytcaagtggctatcgcccacaatcctatcagtaacctcaaactggcatcaggaattgctccaattatccagctccaaaaagcgggagtagcagtcggaattgcgactgactcggttgcttccaataacaatctagatatgtttgaggaaggaaggactgcagctcttcttcagaagatgaaaagtggggatgccagccagtttccaatcgaaacagctctcaaggtactgacaatcgaaggggctaaggyccttggaatggaaaatcagataggaagtctggaagtcggcaagcaagcagattttctggtcattcaaccacaagggaaaattcatctccaacctcaggaaaatatgctgtctcacctggtttatgcagttaaatctartgatgtagatgatgtttatatcgccggagaacaggttgttaagcaaggtcaagtcctgacagtagaactttaactaat

SEQ ID NO: 931 - DNA, 873 bp, Streptococcus pneumoniae
  misc_feature (1)..(873): tiling:Spneumo1:WAN024DET; Cluster includes WAN024494 spr0 730||15902774|NP_358324.1|729423..730295|+|873 bp|Conserve d hypothetical protein|S.pneumoniae|R6|NC_003098.1|ORF|100
atgaaagtgattaatcaaaccttattagaaaaagttattattgaacgttctcgttcaagtcataaaggagattatggtcgtctgctgctgcttggtggtacttatccttatggwggtgcyatcatcrtggctgctttrgcagctgtraaaaryggkgcaggattggtgacygttggaacggayagggaaaatatccctgctctgcacagtcatttacctgaggctatggcctttgctcttcaagacaagcaattgttaaaagagcagttggagaaggcagaagttgttttgctgggacctggtttaggagacratgcttytggagaagatttagttaaacaggtctttgctggcttaaaacagaatcagattttgattgtagacggaggtgccttgacyattcttgctaggacaagtytgtcatttccytcwagccagcttatcctaactccccaccaaaaggagtgggaaaaactgtctggaattacgattgaaaagcaaarggaagatacaacggctagtgccctgacttctttccctaaaggaacaattttggtggagaaaggtccggctactcgtgtttggcaagctggccagtctgattattaccagttacaggttggcggtccctatcaggcaactgggggaatgggagatactctggctgggatgatcgcaggatttgtaggccaattccgacaggccagtctctacgagcgtgtagcagtagcgacccatcttcattcagccatagcccaagaactatctcaagaaaattatgtggtcttaccgacggaaatcagcaggtatcttcccaaaataatgaaaattatttgtcaacaagagagggtaagcaaagataaacttgtttaa

SEQ ID NO: 932 - DNA, 252 bp, Streptococcus pneumoniae
  misc_feature (1)..(252): tiling:Spneumo1:WAN024DEV; Cluster includes WAN023JNF 8381 7_1185||||670279..670530|+|252 bp|EGAD orf prediction|S.pn eumoniae|TIGR4|WAN01UC25|ORF|010
atgaaagtgattgatcaaaccttactagaaaaagtcattattgaacgttcttgtacaagtcataaaggagactacggtcgtctgctgttgcttggtgggacttatccttatggtggtgccatcatcatggctgctttagcagctgtaaaaagcggtgcaggattggtaaccgttggaacggacagggaaaatatccctgctctacacagccatttgcctgaggctatggccttttctctgcaagatcagtaa

SEQ ID NO: 933 - DNA, 870 bp, Streptococcus pneumoniae
  misc_feature (1)..(870): tiling:Spneumo1:WAN024DER; Cluster includes WAN023YOJ AL44 9927.1_363||||290017..290886|-|870 bp|Glimmer 2.02 orf pre diction|S.pneumoniae||AL449927.1|ORF|001
atgaaagtgattratcaarccttaytagaaaaagttattattgaacgttctcgtwcwagtcataaaggagaytatggycgtctgctgytkcttggtggwacttatccttatggwggtgccatcatcatggctgctttrgcagctgtaaaaagcggtgcaggattggtgaccgttggaacrgayagggaaaatatyccrgcyctgcacagccatttacctgagkctatggccttttctcttcaagaccagcarttgttaaaagagcaattggagaaggcagaagttgtcttgctggggcckggtttacgagacgatgcttytggagaaratctagtwaaacaggtctttgytrryttaagmcaaaatcagattttgattgtagacggaggtgccttgaccattcttgctaggacaagtttgtcatttycctcaagccagcttatcctaactcctcaccaaaaagaatgggaaaaattatctggaattacgattgaaaagcaaaaggaagatgcaacggctagtgyyctracttccttccctcaaggaacaattttggtggagaaaggyycagctactcgtatttggsaagytggccaatcwgattattaccagttacaggttggyggtccytatcaggcgactgggggaatgggagatackctkgctgggatgatygcaggatttgyaggccarttymrrcargcyagtctytacgarcgtgtggcagtagcgacccatcttcattcagccatagcccaagaactakctcaagaamaktatgtggtyttrccracggaratyagyarktrtcttccyaaartaatgaaaaktatwtgtcaacaagagagggtaagcaaagataaacttgtt

SEQ ID NO: 934 - DNA, 1370 bp, Streptococcus pneumoniae
  misc_feature (1)..(1370): tiling:Spneumo1:WAN024GNL; Cluster includes WAN0244J0 spr0 374|lysC|15902418|NP_357968.1|374072..375436|-|1365 bp|Asp artate kinase|S.pneumoniae|R6|NC_003098.1|ORF|111
atgaaagttgttaaatttggaggtagttctcttgcctctgctagtcaattagaaaaagttttaaacatcgtcaaaagygattcagagcgtcgttttrtagtcgtttctgcgcctggtaaacgcaatgctgaagatactaaggttacggatgccctgattaaatactaccgcgactatgttgcgggtaacgatattagcaagarccaaagctggattatcgaccgctatgctgctatggttartgaattgggactaaaaccagctgtgctagaaaaaatttctawaagyattcacgccttggccrctcttcctattgaagaaaatgaatttctctacgatactttcctagcagccggtgaaaataacaatgccaaattgattgctgcctactttaaccaaaatggtatcgatgcacgctatatgcaccctagagaagctgggattgtggtcacaagtgaacctggtcacgctcgcatcattccatcaagttatgacaagattgaagaattgacaamcaccaatgaagtccttgtcattcctggtttctttggtgtcactaaggaaaatcaaatctgtactttctcacgtggaggwtctgatattacaggttctatcattgctgctggtgtcaaagyygacctctatgaaaactttacggacgttgatggtatctttgcagcycaccctggtattatccaccaaccacactcgattcctgagttgacctaccgtgaaatgcgcgagttggcctatgcaggcttctcagtccttcatgacgaggctcttcttcctgcctaccgtggaaaaattcctctggttatcaagaataccaacaaccctgaccatccaggtactcgtatcgttctaaaacacagtaatgatgaatttccagttgtgggaattgctggtgactcaggctttgtcagcattaayatgtcgaaatacctcatgaaccgtgagrttggatttggccgcaaggttctgcaaatcctggaagaacttaacatcggttgggaacatatgccaacaggtatcgacgwtctttctatcattctccgttctcgccaactaactcccatcaaggaagaagaaatcctgcgtcagttggttcaaaaggctaaagtagatcatgcagaaatcgaacacgacctttctatcattatgattgttggtgaaaaaatgaagagccayatcggagtgactgctactgcgacacgcgctctatctgaaaacaaaatcaacatccagatgatgtctcaaggttctagtgaagtttctattatgtttgttgtcaataaagaccaagagaaagcagcaattaaagccctctacaatgccttttttggagaaagtaaggaagactaactaat

SEQ ID NO: 935 - DNA, 759 bp, Streptococcus pneumoniae
  misc_feature (1)..(759): tiling:Spneumo1:WAN024CX5; Cluster includes WAN02438S spr2 041|comE|15904082|NP_359632.1|2033242..2033994|-|753 bp|Re sponse regulator|S.pneumoniae|R6|NC_003098.1|ORF|111
atgaaagttttaaytttagaagatgttattgaacatcaagtgagactagagagaatattggatgaaatttcgaaagaatcgaataytccaatatcatacaagacaacgggaaaagtccgtgaatttgaagaatacattgaaaaygatgaagtaaatcarctttatttcctagatatcgatattcatggaattgagaaaaagggatttgaagtkgctcarctcattcgtcattacaatccttacgctrttatygtctttatcacyagtcgatcagagtttgcgactctracmtataaataccagrtatcagccctagattttgttgataaggatatcaaygatgagatgtttaagaagmgaattgarcaaaatatcttctacacgaagagtatgttacttgaaaatgaagatgttgtagattatttcgactacaattacaaggraaatgatttaaaaattccttaccatgatattttgtatattgaaacracaggrgtmtctcataaattgcgcattattggtaagaattttgcmaaagagttttatggtaccatgacagatattcaggaaaaggacaaacatrctcagcgattttattctcctcayaartcatttttggtaaatataggyaatatcagagaaattgatcgaaaaaacttagaaattgttttctatgaagaccatcgttgtcctatttcaagattaaaaattrgaaaattaaaagatattttagagaaaaaatctcaaaagykaactaat

SEQ ID NO: 936 - DNA, 447 bp, Streptococcus pneumoniae
  misc_feature (1)..(447): tiling:Spneumo1:WAN024FUN; Cluster includes WAN023PM3 pne2 8_10||||6517..6963|+|447 bp|Type 15F capsule operon, Glimm er 2.02 orf prediction|S.pneumoniae||WAN01UCCC|ORF|000
atgaaartatgtytagttggatctagtggaggycatytractcatttrtatytwttaaaacctttctggaawgataaagaaagattttgggttacttttgataaggcggacgctcggagtgtactctctgaggaagttgtatatccctgttattatccaaccaatcgtaatataaaaaatttaataaaaaatacttttctcgcctataaaattttaaaaaaagagagaccagatttgattatttcttctggtgccgctatcgctgttcctttcttttatattgggaagttatttggatcaaagacagtgtatatagaagtktttgatagaattgatgcttcaacactgacaggaaaacttgtttatccagtaacggataggtttattgtwcaatgggaagaaatgaaaaaagtatayccaaargcaattaayctmggagggatwttc

SEQ ID NO: 937 - DNA, 1935 bp, Streptococcus pneumoniae
  misc_feature (1)..(1935): tiling:Spneumo1:WAN024FSN; Cluster includes WAN02402M |cps 19bR||AAB66523.1|||1938 bp||S.pneumoniae||AF004325|ORF|000
atgaaartgtttgatatatctcaaataaaaacaaaaacagttgcatttgatttttttgatactrttgtgcataggaattgtcatcctgagcaaattttgtatcagtgggctaaggaaatggctttggaggtgaatttcaatatatctccttcaatattataycaaatcagaaaaagtgtcgaaaacaataaaaagttaggcactgaagaaatgtgttatctagaccttttgtctggaatatataatgaaattaaagataagataaaaaatacatcgaaagaagagtttattcatagagctaaaattctagagttgaaaattgaattacaacatatttatttggattcggaaattaaagaagttttaaaaaaattgaaaagtgattcaaaacagattatcttagtttctgatttttatactgataaagaattaatagaaactgtattaaaaaagtttgaartttttgattatttctcttctatctatatttcgagtgagaaaggytgccgtaaatccacaggaaatttatataagttaattttaaaagaattaggcttaaatcctawagaaattaccatgataggagataattrtaaatctgattatgaagtgccrcgttctctaggattaaatgctatttatagacratayatagataaaaatwcaayagtrkcagaraaagagttggtaagactmtatratcaaattttattttctaacagtaaaaaagcaccgtttaatatttttttagctgacatcgtattytttatttcgraattgcataaaaagatgattcargatgatgttcaaatagcactcttttgctcaagagaaggacagttattgaaaakactttttgatatatatcaaratacttttttgrgagaaaatcaaaagatttgtacagaatatttttatgtttctagacgatcgacattatattcttcttttacttctttagakaatgaagartttgagaygatytttcgtcaatataaaaaaattacrttacaaaatttcttrttaaayttraacttttctrataatgaaatcayattgatttgtcaagatttaaawgwgaaaccwacatatgtattaacagtagacgatcatttattagagaamctmaraaaacaycctcagttyattamgaagttcaatmaagagaaaaaagayagycaattactacgtgaktatatwragyatttaacwaaaaaccraaatgargyatatttagtygatgtrggttggaaaggaacgatacaagatartatcaaaaaggctcttccagacaagagaatagtaggwtattatctrggattgatrctcaatgyttaytcagtagaaaataaaayggataaaactggtttattrttttctgattatccaagtaaatcgaaattttatgatattgtgagtagaaattttggtttttatgaagatatttttgtagcagatcatggtccagttttgaaatataaaaaagagagtgatattatccccattattgacgatgataagaaacatgtgagtatttatcaggcagttaaagattatcaagaagagttagtattaggattttcagaaattttggaagcttataagaaaatgragtttctcccttttgaacaaaaaaatctgtggctaaygatgtcgctaaaaaaagaatgtatttatatacctaagttacaatcattttctgaatctttaaaagaaaaagttgttgaaaatttkggtgagatagtaactcttaagactacgaaaaaatctataaaaacgttattaagaragaawagcgatttactttgggttgatttcgtttatagattgtttggtggtgtcaatttcctatttattccagaattatatacaagagttatatttttattgaaatatttagatttgaaattgaggttgaaaaattatggggaataa

SEQ ID NO: 938 - DNA, 606 bp, Streptococcus pneumoniae
  misc_feature (1)..(606): tiling:Spneumo1:WAN024D27; Cluster includes WAN0243F2 spr1 814|rr11|15903856|NP_359406.1|1784762..1785361|-|600 bp|Re sponse regulator|S.pneumoniae|R6|NC_003098.1|ORF|111
atgaaastaytwgtygcagaagatcaaagtatgttgcgagatgccatgtgycarttgctcaygcttcaaccrgatgtrgagtctgtcyttcaarccaagaatgggcaagaagcaatccaactattagaaaaggagtctgtasatawckmcatccttgacgtagaaatgcctgttaagacrggyctygaagtcttggagtggatacgakcagaaarrctygaaacaaaggtggttgtggtgacgaccttcaagcgtscwgggtattttgaacgtgcggtcaaggctggagtrgatgcttatgtattaaargaamgaarcrttgcagacctcatgcaaaccttgcacaccgtcctcgaaggacgcaaggagtattcgcctgaattgatggaartggtgatgayscrtcccaatccrttracrgarcaagaratygcwgtyttaaagggratygcycrgggcttmtcyaaccaagaaatygcagaymarctttayctmtcmaacggaacwrtycgaaactatgtcaccaatattctttcraaaytrgatgcwggtaatcgaacagaggcagctaatatcgcraaagaatctggttggttaykaactaat

SEQ ID NO: 939 - DNA, 114 bp, Streptococcus pneumoniae
  misc_feature (1)..(114): tiling:Spneumo1:WAN024G2K; Cluster includes WAN0242DA SP12 16||15901078|NP_345682.1|1146369..1146476|-|108 bp|hypothe tical protein|S.pneumoniae|TIGR4|NC_003028.1|ORF|120
atgaaatacagaaaacgcttcctaaaacctaaagtttgtgatataattatcaagaaaaaagatttaggagtttattatgrtttcttcrgaatttatctcaaagatykaactaat

SEQ ID NO: 940 - DNA, 995 bp, Streptococcus pneumoniae
  misc_feature (1)..(995): tiling:Spneumo1:WAN024CYT; Cluster includes WAN02440B spr1 047|lplA|15903091|NP_358641.1|1041221..1042210|-|990 bp|Li poate protein ligase A|S.pneumoniae|R6|NC_003098.1|ORF|221
atgaaatacattatcaatcattcaaatgacactgcttttaatattgccttggaagaatacgcctttaaacaccttttggatgaggatcaaatcttcctactttggattaacaagccatctatcattgttggtcgtcaccagaacactatcgaagaaatcaaccgtgattatgttcgcgaaaatggtattgaggtagttcgccgtattagtggtggtggagctgtttaccacgatttaaataacctcaactacacgatcatctccaaagaagatgaaaataaggcatttgacttcaagagcttctcaactccggttatcaataccctggctcaactyggggttaaagctgagttcacaggtcgtaatgaccttgagattgatggtaagaagttctgtggcaatgcccaagcctatatcaacggccgtatcatgcaccacggttgcttgctctttgacgttgatttgtcagtcctcgcaaatgcccttaaggtttcaaaagataaatttgaatcaaaaggtgtgaaatccgtccgtgcccgtgtaacyaatattatcaatgaattaccaaaaaaaatcacagtcgaaaaattccgtgatttactcytggaatacatgaaaaaagagtacccagagatgactgaatacgtcttttcagaagaagaattggccsraatmaatcrcatcaaggatactaagtttggaacttgggactggaactatggtaaatcacctgaatttaacgtccgtcgtggaaycaaattcactagtggtaaggttgaagtctttgctaacgttactgaatcaaaaawccaagacatcaagatttatggtgacttctttggtattgaagacgttgctgcagtagaagmtgtccttcgtggggtgaaatacgaacgcgaagatgttcttaaggcgctaaaaaccattgatatcacacgctacttcgctggtattagccgtgaagaaatcgctgaagcggtagttggataactaat

SEQ ID NO: 941 - DNA, 2996 bp, Streptococcus pneumoniae
  misc_feature (1)..(2996): tiling:Spneumo1:WAN024D2Q; Cluster includes WAN0243GD spr1 767|cylM|15903809|NP_359359.1|1732567..1735557|+|2991 bp|C ylM protein, cytolytic toxin system|S.pneumoniae|R6|NC_003 098.1|ORF|111
atgaaatataaaattaaaaatgtgcataaaacattgtttattaaggaaagatatcaaatattatctgaacgaaatgataattccttaaataacttttcattaaataattggcgttctacaatgtcaattatttctgaaaaaacttttgaagaaatgttgaaattaaataattacaataaaaaaatattttctaacactgtgaactatgattataccgaggaacagataagactatattcagaatatgccaaaaattcggaatggtataaatttgcggagggttcatttgaaatatttagaaaacatccccaaagaattaattttaagaaagatttttctagaattttggaaccctttattattaatttgcttaaattaatcaataattatctagagaataaagaatacgagtggattgacaagaatggaaatattttttcctctctagtattttatttagaagatttaatctatccttggattgttaaacctttggttttagagataaattcattgcgtgaaaaaggtttacttgaaggggaatcggagcagcaacggtacaaatattttataacattgtttgacaaggaagagaatatattaaatttttataacaaatatcccgttttactgaggcaaatatcggagtcttgtcttcggttctatacttattttatagaaattttatcaaatttagaaaatgattttagtgtgctagaagaagaattagggctaagggggaaattaaatgatataaaatttggaaagggtgatacacacagccaaggaaaaactgttttgatactcttctttgatgacgcgaaaattgtttacaagcctaaaaatttaataatcaataactcactaaatactattgctgagtatatccgaaaggttgatgaaaaaattaggataagaatacctcgaactattgcttattcggatcacagctatgaagaatttattgattatctacctctagagcaaaagaaaaawttacctgaatattattataattttggtgtgcttttagcatttatatatttatttaatgggagtgatatacattttgaaaatttaatttcctatggagatatgcctgtaataatagactttgaaacaatgttacagcaacctctatttgatgataaaactggtcagagtttgctggataccctgtttcacagggtgactcgaactttgcttcttccaacagagggagtaaaaagggaggatggtcttgatgttgagatgagtgctcttacaggaaattttaagaaggatgcttttaatggtcaagttttaattaatttaaatactgataaggtaaagtttgatattgggaaaattgattttgaaggtgggaaaaacctgcctgttcgggatggtgatatagaatttrataagtatataaaagatttcaaaaaaggttttagggatttttatctgatatttgaagagttamataaaacagaagaatttaaaatgctattaaaagcaaacttgtatggtttaaagacaagggtactttttagagacacaaatagctatgcttcagtactatcttttttatatcatcctgatttttatgaagaaatgttagatagagaaaaagcattggaaaatctctggagcaataagttttctaatcaaggtattgtagcaagcgaatgtgaacaaatgaggttattagatattccgattttttatacagatacaaatatcaatgaaatctacgatgattttggaaatcattttatttccctacatcaattttctggatatgactattttatgaaatatttacctaataataatttggaaaatttagaaaagcaacttgatatcattgaaatttattttccaagctttgatcagcgaaaaaaaggatataaattaaacttatctaatagaaaaaaactcccaaatgaaagtttagttactattctgcataatgaagtagaaaatattgcagactctttggttattaataatatttatgacgaatatccaatttggagtatacctgttaattttaaaggttctaaatggtgtcttgaacaaacgggkaatgatatgtataggggtagagctggaatattactgtttatgtactatgtaaaattattgaaagataaatcatcatatactcaactgtacaataaaatgttatctgcaattccgccatctgtttctttatctaagaccacatttggtttaactggggatataggatatttcattgttctatccattatagaggattacgatacaaatactctcgcatgcttaaattatataaagagtgttttaactgagcttgaaaagactgattttgcaagtgtttcaaacaagtctgactatattaatggtcttctacctttaattaatacactggtaagatattataggaraggaatagagaaggaacgtgttctaaggctagtattaagtttaggtgatacgctatataatgatgtaagcgagagagataatagtaattttggatatagttttggccatggactatcaggtgtaatttttacattaaaaaatatttataaagtgacaagacttaaaaaatataaagaattaattttacaactagttcctagggagaaaatcaaaattcattctttgaagtggtgtagtggagaatttgggacattagttaatcatccccaaagtgttccagagggaattgtagctagtttagataatgatacattttgccatggaagtatggccataataaatttttacatcgactacatgaaagaaatggatactagtatggaattggagtctttattgtgtagtgttgtaatgaataaatcaaaagaaggagagtatcgtatcgtccaaacaagcaatttcccagatttttctttgtatacaggtgtgactggtattgcttatacttttttaaggtatatcgcactgaatcagaatgacaaaaagatagttatcccctcattacttgaaatctarctaat

SEQ ID NO: 942 - DNA, 774 bp, Streptococcus pneumoniae
  misc_feature (1)..(774): tiling:Spneumo1:WAN024FSA; Cluster includes WAN0243UB spr1 264|nagD|15903307|NP_358857.1|1260644..1261417|-|774 bp|N- acetyl-glucosamine matabolism|S.pneumoniae|R6|NC_003098.1| ORF|111
atgaaatataaaggctatttaatygatttagacggaaccatttataaggggaaagaccgaatccctgctggagagacttttgttcatgaattgcaaaagcgggacattccctatctctttgtaaccaacaatacaacccgcactccagagagtgttaaggagatgttggctcagaattttaatatcgatacgccyctatcgactgtctacacagcgactttrgcaaccatcgactatatgaatgatttggggcttgaaaagaccgtctatgtcgtcggagaagcaggactcaaggaagccatcaaggcggctggttatgtggaagacaaggaaaamcctgcctacgtggtagttggtctggattggcaagtcgactatgaaaaatttgccacagcaactcttgctattcaaaagggtgcccattttatcggaaccaatcctgacctcaacatcccgacggaacgyggtcttttgccaggtgctggctcactgattaygctgcttgaagtagcgacacgagtgaagccggtttatatcggraaaccmaatgccatcattatggacaasgcggttgagcacttaggtttggamsgtkaagagttwatcatggtwggggacaattatttgactgatatyygggctgggattgacaatggcattccaacrctcttggtgacgacaggttttacyaaggcagaagaagtagctggcctgccaatcgcaccgacacatgtggtttctagccttgcggagtgggattttgatgaaaactaa

SEQ ID NO: 943 - DNA, 1538 bp, Streptococcus pneumoniae
  misc_feature (1)..(1538): tiling:Spneumo1:WAN024DL4; Cluster includes WAN0244OE spr0 180|cls|15902224|NP_357774.1|187730..189262|+|1533 bp|Card iolipin synthase|S.pneumoniae|R6|NC_003098.1|ORF|111
atgaaatataggaaatttcaattattgatgtccaagtatggctttagtctttcgattatgctacttgaactttgtcttgtttttggtctctttctttatttaggacgcatggctcccattttatggattactgtcctcattctactgagtatcatcacaatcatttcgatagtcaaccgtaatacgactcctgagaataaggtaacctggttgttagtagcctttgtgccagtatttggtcccttgctctatctgatgtttggtgaaaggcgattgtccaaaaaagaaatcaaacaactgaagaagctaggctctatgcatttccaagaagcaaatagccagctactaaaagagaaattaaaagaaagtgacaaggcagcttatggagtcatcaagtccttattgagtatggataccaatgctgacatctatgatcaaactgcctctacattttttcctaacggagaagctatgtggaaaaagatggtagaagatcttaaaaaggctgagaaatttattttcttggaatattacattatagaagaaggtttgatgtggaatcgcatactagatatactagagcaaaaggtagctcagggtgtagaggttaagatgctctatgatgatatcggctgtatggctactttaacaggagattatgcacatcgacttcgtcagctgggcatcgaggcccataaattcaataaagttattcctcgtttgacagtggcttataataacagagatcatagaaaaatattgattgttgatggtcagatagcctatactggtggggtcaatctggcagatgagtacattaaccacgtcgagagatttggttattggaaggatagtggaattcgcttagacggactagcagtaaaagcyctgacacgcttatttttgaccacttggtacattaatcgaggagaaattagtgattttgatcaatatcatttagaaaatcattctatcccgagtgacggtttaaccattccatacggaagtggacccaagccaatttttcgagcgcaggtagggaaaaaagtttatcagagtttaatcaatcaagcaacagaatcggtctatattacgacaccttatttgattatagattatgatttaacagagacaatcaaaaatgcagctatgagaggggtcgatgttcgaattatcaccccttacataccagataagaagttcattcagttagtcacgagaggagcttatcccgaccttctttctgctggtgttcggatttatgagtatagtccaggttttattcatagtaagcagatgttggtagacgaagattttgcggtggtggggacaatcaatctcgactaccggagcttggtacaccattatgaaaatgcagtcttactctataaaactccttctataagggaaatcgcccgagattttcgaaatatatttgcagattctcaggaagtctatcctcattctatcaaaacgagctggtatcaaaagcttgtaaaagaaatcgcccagctattcgcccctatcttataactaat

SEQ ID NO: 944 - DNA, 821 bp, Streptococcus pneumoniae
  misc_feature (1)..(821): tiling:Spneumo1:WAN024D93; Cluster includes WAN0243UO spr1 251|glnH|15903294|NP_358844.1|1250615..1251430|-|816 bp|AB C transporter substrate-binding protein - glutamine-bindin g protein|S.pneumoniae|R6|NC_003098.1|ORF|111
atgaaatcaaaaaaatggatatttgttttatgtaattttcttgcaagtttcttcttagtagcttgycagtcaggttctaatggttctcagtcwgctgtkgakgcyatyaarcaaaargggaaattagttgtggcaaccartcctgactatgcaccctttgaatttcaatcattggttgayggaaagaaycaggtagtcggtgcagacatcgacatggctcaggctatcgctgatgaacttggggttaagttggaaatctcaagcatgagttttgacaatgttttgaccagtcttcaaactggtaaggctgacctagcagttgcaggaattagtgctactgacgagagaaaagaagtctttgatttttcaatcccatactatgaaaacaagattagtttcttggttcgtaaggctgatgtggaaaaatacaaggatttaactagcctagaaagtgctaatattgcagcccaaaaarggactgttccagaatcaatggtcaaggaacaattgccaaaagytcaattaacttccctaactaatatgggtgaagcagtcaatgaattgcaggytggaaaartagatgctgttcatatggatgagcctgttgcacttagttatgctgctaaaaacgctggcttagctgtcgcaactgtcagcttgaagatgaaggacggcgacgccaatgccgytgctcttagaaaaaatagtgatgatttgaaagaagtggtagacaaggtyrtccaaaaacttaagratgaaggaacttaccaaagctatcttgaaaaagcagcaagtctaactgaagttgaagaataactaat

SEQ ID NO: 945 - DNA, 855 bp, Streptococcus pneumoniae
  misc_feature (1)..(855): tiling:Spneumo1:WAN024G73; Cluster includes WAN02442Q spr0 960|mutR|15903004|NP_358554.1|940787..941641|-|855 bp|Simi lar to positive transcriptional regulator MutR.|S.pneumoni ae|R6|NC_003098.1|ORF|101
atgaaatcaaaacttggyrtcacacttagaaaarttcgtaarggmaaacaaattagtctatgytctgtagcwgatgarcatctttcaaaatcrcaaatmtctcgttttgaacgtggggartcagaratatcttgtattcgactratcaatattttagacaaattacayattackttrgatgagttycttrttttacacratgamgactataccarwwcygartcwtttgctaayytagtacagtayatycgtaarcaatattcatcacaaagtatcaataatatagcatgtctactttctgatacttctgattacactctaaattcttttgagaaaacaatggtaaaatctattttacacacaatggattcgaacatcattccatcagatgaagagcttcttcatctgacagactatcttttcaaaattgaaaaatggggctattatgaaatcattttattaggtaactgtgtacgcacaattaactacaactcctacttcttattaactaaagagatgttaaataactatatttactcatctctgaataaaactaataagcagattgtctctcagcttgctattaattgcttcattctaagcattgataaggaagaattttctaattgctcctatttaattagtaagataaagacattgttggataatgaactaaacttttatgaacaracagtttttctctatgcaacyggttactwtgaatttaaacgttgccaatyaasyagtggwattgaaamaatgaaacaagcyatacaagtyytcgatattttaggagaarayaagttaaaattacactatactrrccattttrataaacywgtaaacaawaaataa

SEQ ID NO: 946 - DNA, 351 bp, Streptococcus pneumoniae
  misc_feature (1)..(351): tiling:Spneumo1:WAN024DIB; Cluster includes WAN0244HN spr0 423|PTS-EII|15902467|NP_358017.1|421837..422181|+|345 bp|P hosphotransferase system sugar-specific EII component|S.pn eumoniae|R6|NC_003098.1|ORF|110
atgaaatcaaaagaagaaataaatatgcttggttttacaattgtcgcttacgcaggagatgcaaggtcagatttgatggatgctttggcgtttgcgagagatggatattttgaacaggcaagagaattggttgagtctgcaaacgactcaatagtgtctgcccatcgagaacagactaatttattagcggaggaggcatmtggagataattttgaagtgagytttatyatgattcatggtcaagatacyttgatgacaacgatgctattgtatgatcaggtmaagttttttattgatgaatatgaacgaattcgaaagattgaagaacatattggtttgcaaykaactaat

SEQ ID NO: 947 - DNA, 102 bp, Streptococcus pneumoniae
  misc_feature (1)..(102): tiling:Spneumo1:WAN024B4D; Cluster includes WAN023WZ6 AX56 8174.1_1||||1..102|+|102 bp|Glimmer 2.02 orf prediction|S. pneumoniae||AX568174.1|ORF|000
atgaaatcaactaaagaagaaatccaaaccatcaaaacacttttaaaagactctcgtacagctaaatatyataaacgccttcaaatcgttctactaactaat

SEQ ID NO: 948 - DNA, 1316 bp, Streptococcus pneumoniae
  misc_feature (1)..(1316): tiling:Spneumo1:WAN024CLH; Cluster includes WAN0243FZ spr1 781|murA|15903823|NP_359373.1|1754920..1756203|-|1284 bp|U DP-N-acetylglucosamine1-carboxyvinyltransferase|S.pneumoni ae|R6|NC_003098.1|ORF|120
atgaaatcaagagtaaaggaaacgagtatggataaaattgtggttcaaggtgscgataatcgtctggtaggaagcgtgacgatcgagggagcaaaaaatgcagtcttacccttgttggcagcgactattytagcaagtgaaggaaagaccgtcttgcagaatgttccgattttgtcggatgtctttattatgaatcaggtagttggtggtttgaatgccaaggttgactttgatgaggaagctcatcttgtcaaggtggatgctactggcgacatcactgaggaagccccttacaagtatgtcagyaagatgcgygcctccatcgttgtattakggccaatccttgcccgtgtgggtcatrccaaggtatccatgccaggtggttgtacgattggtagycgtcctattgatcttcatttgaaaggtctggaagctatgggggttaagattagtcagacagctggttacatcsaagcmaaggcagaacgcttgcatggygctcatatctatatggactttccaagtgttggtgcaacgcagaacttgatgatggcagcgactctggctgatggggtgacagtgwttgagaatgctgcgcgygagcctgasattgttgacttagccattctccttaatgaaatgggagccaaggtcaaaggtgctggtacagagactataaccattactggtgttgagaaacttcatggtacgactcacaatgtagtccargaccgtatysaascaggaacctttatggtagctgctrccatgactrrtggtgatgtcttgattcgagacrctgtctgggarcacaaccgtcccttgattgccaagttacttgaaatgggtgttgaagtaattgaagaagacgaaggaattcgtgttcgttctcaactrgaaaatctaaaagctgttcatgtgaaaaccttgccccayccaggatttccaacagatatgcaggctcaatttacagccttgatgacagttgcaaaaggcgaatcamccatggtggagacagttttygaaaatcgkttccaacacctagaagagatgcgccscatgggcttgcattctgagattatccgtgatacagctcgtattgttggtggacagcctttgcagggagcagaagttctttcaactgaccttcgtgccagtgcrgcyttgattttgacaggtttggtagcacagggagaaactgtggtcggtaaattggttcacttggatagaggttactacggtttccatgagaagttggcgcagytaggtgctaagattcagcggattgaggcaarygatgaagatgaataactaat

SEQ ID NO: 949 - DNA, 594 bp, Streptococcus pneumoniae
  misc_feature (1)..(594): tiling:Spneumo1:WAN024DM8; Cluster includes WAN02435U SP01 07||15900050|NP_344654.1|109404..109991|+|588 bp|LysM doma in protein|S.pneumoniae|TIGR4|NC_003028.1|ORF|011
atgaaatcaataactaaaaagattaaagcaactcttgcaggagtagctgccttgtttgcagtatttgctccatcatttgtatctgctcaagaatcatcaacttacactgttaaagaaggtgatacactttcagaaatcgctgaaactcacaacacaacagtkgaaaaattggcagaaaacaaccacattgataacattcatttgatttatgttgatcaagagttggttatcgatggccctgtagcgcctgttgcaacaccagcgccagctacttatgcggcaccagccgctcaagatgaaactgtttcagctccagtrgcagaaactccagtagtaagtgaaacagttgtttcaactgtaagcggatctgaagcagaagccaaagaatggatcgctcaaaaagaatcaggtggtagctatacagctacaaatggacgttatatcggacgttaccaattaacagattcatacctgaacggtgactactcagctgaaaaccaagaacgtgtagcagatgcctacgttgcaggacgttacggttcatggacwgctgctaaaaacttctggcttaacaatggctggtatctaactaat

SEQ ID NO: 950 - DNA, 833 bp, Streptococcus pneumoniae
  misc_feature (1)..(833): tiling:Spneumo1:WAN024CXG; Cluster includes WAN024397 spr2 026|stpA|15904067|NP_359617.1|2017097..2017924|-|828 bp|AB C transporter ATP-binding protein - unknown substrate|S.pn eumoniae|R6|NC_003098.1|ORF|112
atgaaatcaataattgatgtaaaaaatctttcttttcgctataaagaaaatcagaactactacgatgtgaaggatattacgtttcacgtgaaacgtggagaatggctttcgattgtagggcataatggtagtggtaaatcaackacggttcgattaattgatggcttactggaagcagaayycggagagattgtaattgatggccaacgtttgactgaggraaatgtttggaatatacgtcgtcaaatcggtatggtttttcaaaatccagacaatcaatttgttggagcgactgttgaagatgatgttgcttttggtttggaaaatcagggactttctcgtcaagaaatgaaaaagagagtggaagaagctctggctttagttggcatgttggactttaaaaagagagagccagcgcgtstatcaggtggccaaaagcaacgtgtggccattgcaggtgttgtagccctaagaccagctattttaatcttagatgaagcaacgagtatgttggatcctgargggcgtagagaacttattgggacagtaaaaggaattcgaaaagactatgatatgacrgtcatttctattacccatgatttggaagaagtcgccatgagtgatcgcgtattggtcatgaaaaaaggggaaattgaatcaactagtagtccaagggagcttttctctcgaaatgatttagatcaaattggattagacgatccttytgctaatcaattaaaaaaatctttgagccagaatggctatgatttacctgaaaattatttgacagaaagtgagctagaggataagctatgggaattgctctarctaat

SEQ ID NO: 951 - DNA, 2004 bp, Streptococcus pneumoniae
  misc_feature (1)..(2004): tiling:Spneumo1:WAN024CVG; Cluster includes WAN0242WP SP04 63||15900379|NP_344983.1|441231..443228|+|1998 bp|cell wal l surface anchor family protein|S.pneumoniae|TIGR4|NC_0030 28.1|ORF|010
atgaaatcaatcaacaaatttttaacaatgcttgctgccttattactgacagcgagtagcctgttttcagctgcaacagtttttgcggctgggacgacaacaacatctgttaccgttcataaactattggcaacagatggggatatggataaaattgcaaatgagttagaaacaggtaactatgctggtaataaagtgggtgttctacctgcaaatgcaaaagaaattgccggtgttatgttcgtttggacaaatactaataatgaaattattgatgaaaatggccaaactctaggagtgaatattgatccacaaacatttaaactctcaggggcaatgccggcaactgcaatgaaaaaattaacagaagctgaaggagctaaatttaacacggcaaatttaccagctgctaagtataaaatttatgaaattcacagtttatcaacttatgtcggtgaagatggagcaaccttaacaggttctaaagcagttccaattgaaattgaattaccattgaacgatgttgtggatgcgcatgtgtatccaaaaaatacagaagcaaagccaaaaattgataaagatttcaaaggtaaagcaaatccagatacaccacgtgtagataaagatacacctgtgaaccaccaagttggagatgttgtagagtacgaaattgttacaaaaattccagcacttgctaattatgcaacagcaaactggagcgatagaatgactgaaggtttggcattcaacaaaggtacagtgaaagtaactgttgatgatgttgcacttgaagcaggtgattatgctctaacagaagtagcaactggttttgatttgaaattaacagatgctggtttagctaaagtgaatgaccaaaacgctgaaaaaactgtgaaaatcacttattcggcaacattgaatgacaaagcaattgtagaagtaccagaatctaatgatgtaacatttaactatggtaataatccagatcacgggaatactccaaagccgaataagccaaatgaaaacggcgatttgacattgaccaagacatgggttgatgctacaggtgcaccaattccggctggagctgaagcaacgttcgatttggttaatgctcagactggtaaagttgtacaaactgtaactttgacaacagacaaaaatacagttactgttaacggattggataaaaatacagaatataaattcgttgaacgtagtataaaagggtattcagcagattatcaagaaatcactacagctggagaaattgctgtcaagaactggaaagacgaaaatccaaaaccacttgatccaacagagccaaaagttgttacatatggtaaaaagtttgtcaaagttaatgataaagataatcgtttagctggggcagaatttgtaattgcaaatgctgataatgctggtcaatatttagcacgtaaagcagataaagtgagtcaagaagagaagcagttggttgttacaacaaaggatgctttagatagagcagttgctgcttataacgctcttactgcacaacaacaaactcagcaagaaaaagagaaagttgacaaagctcaagctgcttataatgctgctgtgattgctgccaacaatgcatttgaatgggtggcagataaggacaatgaaaatgttgtgaaattagtttctgatgcacaaggtcgctttgaaattacaggccttcttgcaggtacatattacttagaagaaacaaaacagcctgctggttatgcattactaactagccgtcagaaatttgaagtcactgcaacttcttattcagcgactggacaaggcattgagtatactgctggttcaggtaaagatgacgctacaaaagtagtcaacaaaaaaatcactatcccacaaacgggtggtattggtacaattatctttgctgtagcgggggctgcgattatgggtattgcagtgtacgcatatgttaaaaacaacaaagatgaggatcaacttgctctaactaat

SEQ ID NO: 952 - DNA, 626 bp, Streptococcus pneumoniae
  misc_feature (1)..(626): tiling:Spneumo1:WAN024F46; Cluster includes WAN0243GI spr1 762||15903804|NP_359354.1|1729701..1730321|-|621 bp|Hypoth etical protein|S.pneumoniae|R6|NC_003098.1|ORF|211
atgaaatcaatgagaatcttatttttgttagctttaattcaaatcagtttgagtagctgtttcctatggaaggaatgcatcttgtcctttaaacaaagtacagcttttttcatcggaagcatggttttcgtttcaggaatctgtgctggagtaaattatctttatacycgtaagcaagaagtccatagtgtcctagccagtaagaagtcggtgaagcttttttacagtatgttactcttaattaatttgttaggagctgttcttgttttgtcagataacttgttcatcaaaaatacgctgcagcaagaattagttgactttttattgccatccttctttttcctatttgggctagatttgctgatttttttacccttgaaaaaatacgtgcgcgattttcttgctatgctrgacagaaaaaagacagtgttggtgactattttagcaacacttcttttcttaagaaatccaatgaccattgtctcacttctgatttataytggactgggcttgttttttgcagcctatcttgtcccaaattcggttaagaaggaagtttccttttatggtcatattttccgagatcttgtattggtcattgttacgctcattttcttttarctaat

SEQ ID NO: 953 - DNA, 108 bp, Streptococcus pneumoniae
  misc_feature (1)..(108): tiling:Spneumo1:WAN024B4C; Cluster includes WAN024264 SP14 88||15901336|NP_345940.1|1398807..1398947|-|141 bp|hypothe tical protein|S.pneumoniae|TIGR4|NC_003028.1|ORF|010
atgaaatcaattaaagaagaaatccaaaccatcaaaacacttttaaaagactctcgtacagctaaatatcataaacgccttcaaatcgttctatttcgtctgatgggc

SEQ ID NO: 954 - DNA, 341 bp, Streptococcus pneumoniae
  misc_feature (1)..(341): tiling:Spneumo1:WAN024C5P; Cluster includes WAN0244L3 spr0 299||15902343|NP_357893.1|300143..300406|-|264 bp|Hypothet ical protein, truncation|S.pneumoniae|R6|NC_003098.1|ORF|3 21
atgaaatcactagctagactactgawcattcatgtttttatcagtattttccttttcttygcccttayttcaggagctrtttctcatacagttttactactcctactcctctttcttcctgcgctcaataaaggacttgagaaaatacaatcaaaacggatacctgtcctcaacgcagccctcttctttctcctcatatcctttccacaacttttaaccaaccctgtccaatggaaattttcaatattcctagtcgtaaccatcatttcaagtttggcctacttctataacttttatcaagtagttaaagaagtagatcaaaaacagttgatttarctaat

SEQ ID NO: 955 - DNA, 1043 bp, Streptococcus pneumoniae
  misc_feature (1)..(1043): tiling:Spneumo1:WAN024FC7; Cluster includes WAN0243J2 spr1 670|adhB|15903712|NP_359262.1|1642986..1644023|-|1038 bp|A lcohol dehydrogenase|S.pneumoniae|R6|NC_003098.1|ORF|111
atgaaatcagcagtatatacaaaggcaggtcaggttggacttgytagcattgaacgtccgcaaataatagaagcggatgatgtgattattcgtgtggttcgtkcgtgcgtttgtggttcagatttatggaggtaccgtaatccagaaacgaaagctggacayaaaaatagtggacacgaagcgattgggattgttgaagaagctggggaagccattacgacggtgaaaccaggtgattttgtgattgtcccttttacacatggatgtggtgagtgtgatgcctgtcttgctggatttgacggttcttgcgacaatcatattggyaataatttggggggtgattttcaggcagaatatattcgcttccactatgcaaactgggcgctggttaaaatccctggtcaaccttctgaytatacagaagggatgctcaagtcccttttgactcttgcagatgtcatgccgacaggctatcatgcrgcgcgtgttgcaaatgttcaaaaaggggacaaggttgttgttatyggtgatggggctgttggtcaatgtgctgtcatcgcggctaagatgcgtggagcatcacaaattatccttatgagccgtcatgaagacygtcaaaagatggctatggagtcaggtgcgacagctgttgttgcagaacgtggtcaagaaggaattacmaaggtgcgtgaaatcctcggyggaggagcagaygcagcacttgaatgtgttggtacggaggctgctatagaacaggcgctaggtgttyttcataatggagggcgtatgggytttgtaggagtcccacactataataatcgtgctcttggttcgacatttatgcaaaatatctctgtagcaggtggggcagcttctgctacaacatacgataagcaatttttactaaaagccgtccttgatggtgatatcaatccaggtcgcgtctttacttcaagttataaactggaagatatcgaccaagcctayaaagatatggatgaacgtaagacmattaagtctatgattgtaatcgaataactaat

SEQ ID NO: 956 - DNA, 891 bp, Streptococcus pneumoniae
  misc_feature (1)..(891): tiling:Spneumo1:WAN024CJ9; Cluster includes WAN0242FD SP11 37||15901003|NP_345607.1|1068080..1068964|+|885 bp|GTP-bin ding protein, putative|S.pneumoniae|TIGR4|NC_003028.1|ORF| 010
atgaaatcattacaatctagtttaggaaatattgagacatttaaactagacgaattgtgtcctaagcatgaaatacagctaacacaaatcaaaggagaaagacatgtagtagtggggtggaatgagaacggagaggcaataaaagaagttcgctgtatcccaccctattgtgaacaatgccaagaagaacagaaaaagcaagatgaagaagatgcgattgctgataatttgaatgctaaactatatatgcaaacttataatgtgttgatgagcaataagagctatgtagcagatgagtttaaaactaaaacttttgatgattttaatgctgtaacatcagaagaaaagcgatttttagaatttgcaaaaggtcaggtacaaaaatatcttgatggcatgaggggaaatacgcttatcacaggaggtacagggattggaaaaacacttttatcagttgctattgccaaaggtataaatgaggggtataagacaaaaggagaacctaagagtgtgctttttgtaagcctaaccgaaatgatcaaacaaattaaagaggggtggaattatggtaaaggtgcaacacttacagagtttgaagctactgaactcatgaagtctgttgattacttaattattgatgatttaggagcaaaaaatgctgttattaagcctaagagtgactgggagcaggatttactctttgacgtgctaaacaatcgtgaaaataccatttttaataccaacctagatagtgatgagcttaagatagtttacaatgagcggaattatagccgtattctaaaaggacttgagggtaacacttttaaggcgtttggcatcaaatataagcggtactcactcaatcagttaaagagtaatatgykaactaat

SEQ ID NO: 957 - DNA, 2558 bp, Streptococcus pneumoniae
  misc_feature (1)..(2558): tiling:Spneumo1:WAN024DTT; Cluster includes WAN02438X spr2 036||15904077|NP_359627.1|2028093..2030645|+|2553 bp|Conse rved hypothetical protein|S.pneumoniae|R6|NC_003098.1|ORF| 221
atgaaatcatttttaaaaacatatcgaacctattttatttctytcatcattcctgtagtgattatgtctggagtatatctatctcaargtatctactggaatagcgacaactctcctctattaggagatggctttcatcaatacgttatttttgatrtagccttacgaaatatcctacatggaaatagtartctgttttacacctttacaagtggtctagggctaaacttctatgccctatctagttattacttgggtagttttctcgcgcctctrgtttactttttkgatctaacgaayatgccagatgctrtctatctgacmactctcttaaaatttggattgattggtctgtcaaccttttttagtttgaataaattgtttcaatctatccctcagaytttaaaactagccttatctacttcctatgctctgatgagtttcactgtcagtcaattagagataaaaacctggctagatgtttttatcttgattcctttaattataactggtttacatctactgataactgaaaagaaactcctattgtactttacaagtctgtcaatcttatttattcaaaattattattttggatatatgacagtattgtttcttattttctggtatctcwgtcaaatttcgtgggactttaagactcgaaaatcatctgttcttgatttcatagttatctcctttttagctggtatggctagtttgattatgactmttcccactctatttgatttacagacacatggggaaaaattgactgaagttacaaagtttcaaactgaaagtagctggtatcttgatctctttgctaagcaattcattggttcctttgacacaacaaagtatggggccatcccaatgatttttgttggactayttccctttattttgaccattttattttttacgctgaaatctattaagtttcacgtgaaactcatatatgtaatattctttgcatttctaattgcaagcttttacatagaagctcttgacttattttggcaaggcatgcatactccaaacatgtttttacatcgctatgcttggattttctctaccttgttaatttacacagcagcagaagtcttaaagcgtctgaaagaacttaaagtctggaattttttagtttcgctttttcttgtagtagcaggatttttagctaccatctatctaaaatcgcattattcttttttaacagatttgaatattctgcttactcttgaatttttggttgtctattctcttttactccttgcagttatcaaaaagtttatatytgtgaatctatttgccattctaatctctttatttatactggttgaaatgagtttaaatgcttcatctcaaatggacggaawtgctaaskaatggggatttgcttctcgaagtgcttatagtcgagatatccyagctatggaatctttctcaacatatattggaaatcaatttactcgtactgaaaaactacaaactcagacaggaaatgacagtatgaaattcaactacaatggaatctctcaattttcatctgttcgaaatcgttcatcaagctctactttagataaacttggttttaaatcctctgggactaatctcaatctccgatatgcaaataatagtattttggctgatagtttatttggtatccagtacaatatctcagacagtcctattgataagtatggctttaaagatatctatcaaaaagataatcttaccctatatgaaaatcaatactctcttccgattgcagttgckagtcaatctgtttacaatgatgtcaagttcaatgaacataccttggataatcaggcctcatttttaaatcaacttgctaacgtcaattttgattatttttctccaataccttatgaaaaaacagaaaaaatagaaaatactaatgatttgattagtgtcacaagttcttcaaatgaagatgcagcaatccagtatcaaattgaagttccagaaaacagccaagtttatctctctttcataaaccttcacttttctaacgataaacaaaagaaggttgacatmcttgtaaatggtgaaaaaaagacttttacaactgataatgtcttctccttctttaatctaggatatactaaagagaaaaaaactttcaatatcaatgttagtttccctggaaattcacaagtatcatttgaatctcctaccttctatcgtttagataccaaaactttcaccgaggcaattcaaaaaattaaagaacaacctgtcacagtatcaacttctaaaaacaaggtttttgctacatatgatgtccaacaagatacatctattttcttcaccattccttatgacaaaggttggtctgcctaccaagatggtaagaaaatagaaattaaacaagctcaaactggatttatgaaagttgacattcccaaggggaaaggaactattacactttccttcattcccaatggttttattactggagcaatctgttcctttacttctctcttactatttggaatctataatcacagacgaaagtcatctaaggcataactaat

SEQ ID NO: 958 - DNA, 941 bp, Streptococcus pneumoniae
  misc_feature (1)..(941): tiling:Spneumo1:WAN024D3O; Cluster includes WAN0243HT spr1 715|birA|15903757|NP_359307.1|1688996..1689931|+|936 bp|Bi otin--[acetyl-CoA-carboxylase] ligase.|S.pneumoniae|R6|NC_ 003098.1|ORF|111
atgaaatcctaccaagctgtctaccaaatcctatctaaagaaaccgactatatcagcggagaaaaaatcgcagaaaaactatccctaagccgaacakcaatttggaaagcyatcaagcgactagaacaagaaggcattgaaattratagtatcaaaaatagaggatataaactratgaatggtgaccttattcttccagagattctagaagaaaatcttccaattaaagtcagctttaaacccgaaacaaaatcaacacaactagatgcaaaagaagcaattgatttaggccatgaagcaaatacyctctatctagcttcctatcaaacagcaggccgaggmcgttttcaacgttccttctactcaccacaaggtggwatttatatgacactccatcttaaaccaaatctcccctatgacarattaccatcctacacactacttgtagctggagctgtctacaaagcyattaagaacctaactttaatagatgtcgayataaaatgggtcaatgatatctatctaaacaatcataaaattggaggaatccttactgaagcaatgacctctgtagaaactggcttagtcacagatatcattattggagtaggtatcaatttcactattaaagacttccctcaggaattaaaagmaaaagctgccagcttatttaaagctacagctcctataacaaggaatgaattgatcatagaaatctggcgtrctttcttcgaaacaccagcagaagagctattatacctatacaaaaaacagtcattcattctaggaaaagaagtcactttcacactasagcaaaaagactacaagggacttgctaaagacatctcagaaaatggaaaacttttarttcaatgtgataacggaaaagaaatctggctaaatagtggcgaaatttctctcaatagttggaagtaactaat

SEQ ID NO: 959 - DNA, 1233 bp, Streptococcus pneumoniae
  misc_feature (1)..(1233): tiling:Spneumo1:WAN024FII; Cluster includes WAN0243PE spr1 441|oxlT|15903484|NP_359034.1|1425561..1426787|-|1227 bp|M ajor facilitator:Oxalate:Formate Antiporter|S.pneumoniae|R 6|NC_003098.1|ORF|341
atgaaatcgaatcgttatattattgcctttgctggggtcattttacacttaatgctgggttcgacttatgcytggagtgtttatcgtaaccctattattgaaaaaacgggatgggatcaggcttctgttgccttygcctttagtctagcaatcttttgtttgggcttatcggctgcatttatggggcgtttggtagaaaaatttggtccgaragtcatgggragtctatctgcttttctatacgcaggtggaaatatcttaacaggatttgcaatagaccgtcaggarctgtggttgttgtatctmgcttatggcattttarstrrkcttggtttgggagcaggctatattacccctgtgtcracgattataaaatggtttcctgataaacgtggtctcgcaacaggtttagcgattatggggtttggttttgcttctttattgactagtcccatagcgcaacayctcatcgcaggggtagggmttgtagaaactttttatattttaggwgcaagttactttattatcatgctcctagcttcacaattcattaagcgtccaaatgagcaagagcttgcaattttatctkcttcagggaaagaaaaaacagmctctytgacgcaaggratgrctgcaaatcaggctctaaaaagcaatcggttttatatrctttggattattttctttatcaacatagcttgtggtttaggcttaatttcagcggcatcgccaatggcacaggagatggctggcttgtctacaagtcatgcagcagtaatggtgggygttttrgggattttcaatggatttggtcgcttgctctgggcgagyttrtctgactatatcggtcgccctctaacctttagtatattactgcttgtyaatcttttmttttctctctcactttggctctttacagattccgttttatttgtagtygctatgtctattttgatgacttgctatggagctggtttttcwttgatyccagcttatctcagtgatatttttggaaccaaggaattggccgctctgcatggwtatattttaacagcttgggcaatggctggtttagcgggacctattttattagcagagacttataaaatggctcattcgtacacacaaaccttgttcgtttttctcattttatacagtatcgccttggctttgtcttattatctaggtcgttcaatcaaaaaagaaagtcaaaaascgcttacaykaactaat

SEQ ID NO: 960 - DNA, 558 bp, Streptococcus pneumoniae
  misc_feature (1)..(558): tiling:Spneumo1:WAN024D8V; Cluster includes WAN0243U0 spr1 275||15903318|NP_358868.1|1270613..1271164|-|552 bp|Conser ved hypothetical protein|S.pneumoniae|R6|NC_003098.1|ORF|1 11
atgaaatctatyggtacgcaaatattacagacagaacgtttgattttaagaagatttgtggagagtgatgcagaagcyatgtttcaaaattgggcttcatccgctgagaatctgacctatgttacctggratccccatcctgatgtcgaaatcactcgaaactcgattygcaattgggttgcttcctatactaatctcaactattayaaatgggccatttgtctaaaagaaaacccagagcaagtrataggagatatcagcatygttaagatagacgaggctgatttaagctgtgaaatyggctatgtgytaggcaaggcttactggggamatggtatgatgacagagrcyttgaaagctrtcttggacttttgttttactcaagyaggttttcaaaaggtcagagcacgttatgccagtctcaacccagcttcaggycgtgtcatggaaaaggctggaatgtcctatctacaaaccattgttaatggtgtagagagaaaaggctatcttgcggatcttatttattatggtataagtagggaagaatgtykaactaat

SEQ ID NO: 961 - DNA, 2253 bp, Streptococcus pneumoniae
  misc_feature (1)..(2253): tiling:Spneumo1:WAN024C5L; Cluster includes WAN0240PN |pbp 2X||BAA75525.1|||1063 bp|penisillin binding protein 2X|S.p neumoniae||AB011202|ORF|000
atgaaatggacagaaaaaataacccgatttgcgataaaaaatcgtaaatctccagcaaaaaaccgtaggatagttggcaagtacctcagctttgtagctgttgcccttttcgccctctttttggccaattttgcgtatattatcgcaaaaggtaatatatttggtactgacttggtaaaagaggctaaaaaggttcaccaaacaactcgaacagtacctgccaaacgcgggactatctatgaccgaaatggagtgcctatcgctgaagatgcgacctcttataatgtctatgctgttattgataaaaaatacaagtcagcaacgggtaaaattctttatgtagaggattcgcagtttaataaggtagctgaagtcttccataagtatttggatatggatgaagcttatgtgaaagagcaactggctcaaccaaatctgacccaggtttcctttggtgccaaaggaaatgggattacctatgccaatatgatggccattaaaaatgacctaaaaactgctggcgttgaggggattgactttacaactagccctaaccgcagttatcccaatggacagtttgcttcttcctttatcggtttagcgcaactccatgaaaatgaggatggaaccaagcgtttgattgggtcatctggtttggagagttctttaaatagcattcttgcaggtacagatgggattatcacctatgagaaggatcgtctgggaaatattgttccgggtacggagcaggcttcccaacacacggtagacggaaaggatgtttacacaaccctttctagtcctttgcaatcctttatggaaacgcagatggatgccttccaggaaaaggtaaaaggcaagtatatgacggctaccttggtcagcgctaagacaggggaaatcctggctacgacccaacggccaacctttaacgcagataccaaggatggcatcacaaaagactttgtctggcgcgatatcctctatcaaagtaactatgaaccaggatcagccatgaaggttatgacgttagcttcggctattgacaacaataccttccctggtggcgaatactttaacagcagtgaattgaaaatagcagatgcgaccattcgagattgggatgttaatgatggtttgactactggtgggatgatgactttctcacaaggtttcgctcactccagtaatgttggaatgagtctacttgaacaaaaaatgggagatgctacttggttggattatctaaaccgctttaagtttggagtgccgacgcgttttggtctgactgatgagtacacaggtcaattgcctgcagataatattgtcaatattgccatgagtgcatttggtcaggggatttctgtaacgcagacccagatgctacgtgcttttacagccattgccaatgatggtgttatgttggagccgaaatttatcagtgccctctatgatccaaatgaccagtctgtccgtaagtctcaaaaggaaattgtcggaaatcctgtgtcaaaagcagcagcgtcctctactcgggagcacatggtcatggtcggaacagatcctgtctacggtaccatgtacaaccacagtacaggaaaaccaaatgtcaatgttccgggacagaatgttgccctcaaatcagggactgctcagattgctgatgagaagaatggggggtacctaacaggtgaaaccaactatatcttctctgttgtgtcgatgcatcctgcagaaaatcctgactttatcctctatgtgacggtgcaacagccagagcattattcaggtgttcagcttggggagtttgccaacccaatcttggagcgggcttcagctatgaaagaatctctcaatcttcaatctccagccaagaatttagataaagttacgacagagtcttcttatgcaatgcctagcatcaaggatatttcacctggtgagttggcggaagccttacgccgcaacattgtgcaaccaatcgttgtcggtactggaacaaagattaaagaatcatctgtagaagaggggaccaatcttgcaccaaaccaacaagttctccttttatcggataaggtagaagaaattccagacatgtatggctggaaaaaagagactgccgagacctttgctaaatggttggatattgaactggaatttgaaggttcaggttccgtcgttcagaagcaagatgttcggactaatacagctatcaaaaacattaaaaaaattaaattaactttaggagactaa

SEQ ID NO: 962 - DNA, 465 bp, Streptococcus pneumoniae
  misc_feature (1)..(465): tiling:Spneumo1:WAN024DL7; Cluster includes WAN02433I SP01 98||15900134|NP_344738.1|184616..185074|+|459 bp|hypotheti cal protein|S.pneumoniae|TIGR4|NC_003028.1|ORF|010
atgaaattaaaaagattcacactttctcttgcttctctagcaagttttagtctcttagtagcttgttcacaaagagctcaacaggttcaacagcctgttgctcagcagcaggtccaacarcctgctcaacagaataccaatactgcaaatgcaggaggtaaccaaaatcaagcggctccagtacaaaaccaacctgttgctcaaccgaccgatattgatgggacttatactggtcaggatgacggagaccgtatcactttagtggtaactggaacgactggtacatggactgagctcgaatctgacggggatcagaaagtcaaacaggttacattkgattcagcaaatcaacgcatgattattggcgatgatgtcaaaatttacactgtaaacggtaatcaaatcgtcgtagatgatatggatagagacccatcggaccaaatcgttttaactaaactaactaat

SEQ ID NO: 963 - DNA, 1689 bp, Streptococcus pneumoniae
  misc_feature (1)..(1689): tiling:Spneumo1:WAN024FKH; Cluster includes WAN0243R5 spr1 378|ABC-MSP-truncation|15903421|NP_358971.1|1361655..13618 07|-|153 bp|ABC transporter, truncation|S.pneumoniae|R6|NC _003098.1|ORF|731
atgaaattaaaattattaagagtagatactaaggtgattatggggagtttcttmcttgttctgtctagtctacttgctttgttgcttccccttatcttaaaggrtttaatagatgggagttctattgaaaatataggytccaaagtatttcaatcgtttttgatttttattggtcaagccttgttttcttctattggttactatctktttagtcaatcgggtgaaaaaaagatagcaaaaatcaggaaaaaagtgatagaggggttgatttatgyagagaaatccttctttgataagarcyaaagtggggagttgacttctgcyattgtcaatgacaygagtgtcattcgtgagtttttaattacgactttcccaaatattattctgagtttagttatggtacttggttccattgtagtcttatttagtcttgattggaatctttctctacttttattcatcactcttccttgtatgatgtttattatcttgcccctttccaatatcagtgaaaagtatagtcgtcgtttacaggaggaaatykraytwwtaacagggcaattgactgaaaagattcaagaacatgaattaattaagactaaccaagcagagaaaagtgtacaggatgttttggataattgtattgaaagggtacaaaacaattcactgaaatcagatagggttacttcttttgagaccycgtttgctctcttatttatctttgcgrctatagytgtgatgctaacctatgggggttatcgggtcagcgcaggatatatatctgtgggaaccttggtttcgtttttgatttacctctttcaattacttaatcctattagtaatatagctaattttgtaactrtttattctagkagcaagggatcttcagttgcactggakaacttgcttgcagttcctaaagaaaaatttgagkgaggaaaatcggtatcaggacragggttgaattttaaccatgtctattttggttatgatgaaaatcgacctgtcttaaaggatattacttgttcaattttcaaggggcaaaaaattgcttttgttggrccatctggatcaggaaaatcaacgattgtgcgtttgttagagcrgttttataaaccgctttcaggagatattctaatggagcaatcaagtatatatgattttaacttaaaagaatggagaagtaaaatcgcttgggtttcacaaaataatgcagtcttatctggcagtattcgtgacaatctttgtctcggtttgaatcgcttagtaactgatgatgaattgatgaaagtgctagacttagtatcactaggtgatgagattcgctccatgaaagagggactagatactgaagttggtgaacgcggacgaytcttgtcaggggggcraagcsaaagacttcaaatarctarwrcctacttaaaagatgctgaaattcttatatttgatgaagcyactgctaatcttgatgcggattctgagtatgcgattatcagtagcctctattctgtaytaaaggagaagacggttgtgattatagcgcatmgyttgtcaacggtaaaagatgtrgattgtattttcttcttagaggagrggaaaatmactggctcaggaactcataaggaactactggaaaatcatgagcgttatgctcgttttgtgcaggagcaaatgatagagykaactaat

SEQ ID NO: 964 - DNA, 669 bp, Streptococcus pneumoniae
  misc_feature (1)..(669): tiling:Spneumo1:WAN024GBF; Cluster includes WAN02448P spr0 745|deoC|15902789|NP_358339.1|741766..742428|+|663 bp|Deox yribose-phosphate aldolase|S.pneumoniae|R6|NC_003098.1|ORF |111
atgaaattaaataaatatatagatcatacgcttttaaaacaagatgcaaagaaaaaacaaattgatagtttgttgtctgaggctagagagtatgrctttgccagtgtttgcgttaatccgacctgggttgaacatgctaaaaaaggacttgaaggcacagatgttaaggtttgcacagtagtaggtttcccyttgggagcaacaacttcarcygtgaaagcwtttgaracaaaagaagctatccaaaatggkgcwgatgagattgayatggtvatcaatgttggrgctctcaartcaggtratttrgccttggttgagtcrgatattcgygcagtagtggaagcaagtggkgayaagttagtgaaagtyattattgaagcttgccttctgacagaccaagaaaaarttktkgyttgccaattrgcccaaaaagcwggrgctgactttgtyaaaacatctactggyttttcaactggtggtgctacgatagcagatgttasattaatgcgtgaaacagttggayctgatatgggwgtcaaggcygcyggtggagctcgttcttatgcagatgctcttrcctttgtcgaagcaggtgcgacccgtatcggaacgtcagctggggtagctattttaaaaggagaattggcagatggcgactacykaactaat

SEQ ID NO: 965 - DNA, 729 bp, Streptococcus pneumoniae
  misc_feature (1)..(729): tiling:Spneumo1:WAN024D8R; Cluster includes WAN0243TV spr1 280||15903323|NP_358873.1|1274880..1275608|-|729 bp|Hypoth etical protein|S.pneumoniae|R6|NC_003098.1|ORF|111
atgaaattaaataaattkaattttcttaaggaaaatataagaaatttatattcatcaggcgtaatatatctcagtttgcttatctcgtttataccgccgatattgcttacattctttattctaaagactcaagggacatcgcttggtattaagcatatttcaaacttttatgctatgctcggtatgttaatggctgttatacatgctaatcgagtyattagtagagatttttcccacaatacggtaagtwtgwwttataatmaacagaagaatcggatgatttacgtcttgtctaattttctatatgcyatctcagtttccattatttatgctttgaatggcattgtgttactagtcatagtaagtaaattgggtattccaggtgatttaggattarattttatagtagctattgtagtcaatacaattttgttagtcctgttttattttctattatcytacattttytatttatacaaattgaaaagtggcttggtatttggtattttagtagctttactactctttatcyctaatatattaaatacgatgatgatgaatactagtaatgatttgtttatcaaagcaattgaacttcttcctttttattctttacctstatttgtggcttcaaatacgatgtctattagtcagtatcttgtgstaatcactacaatcattttattgtactttttcactctcaagaaaagcaagaagtattcattttag

SEQ ID NO: 966 - DNA, 548 bp, Streptococcus pneumoniae
  misc_feature (1)..(548): tiling:Spneumo1:WAN024D9P; Cluster includes WAN0243X9 spr1 158||15903201|NP_358751.1|1161670..1162212|-|543 bp|Conser ved hypothetical protein|S.pneumoniae|R6|NC_003098.1|ORF|1 11
atgaaattaaatattcaagaaattcgtaagcagtctgaaggtttgaactttgaacaaacgttagatttagttgatgacctgcgtgcacgtaatcaagaaattttagatgtaraagatatccttgcagttgggaaagtacaatatgaagaccgtatgtatttcttagattatcaactatcttataccattgttcttgcktcgagtcgcagtatggagccagttgagttagttgaatcttatccagtcacggaagttttcatggaaggcgcaactaaccakctaratcaagaarttttagatgatgacttggtcttgcccatcgaaaatggggmgcttgaccttgctgagagtgtatcagacaatatcctgctaaacattcctatcaaggtcttgacggctgaagaagaagctggtcaaggatttrtctcaggaaatgactggcaaatcatgacagaggaagaataccaagctcaamaagcagtaaagaaagaagaaaacagtccttttgctggcttacaaggactatttgacggagatgaataactaat

SEQ ID NO: 967 - DNA, 207 bp, Streptococcus pneumoniae
  misc_feature (1)..(207): tiling:Spneumo1:WAN024ATX; Cluster includes WAN0240L5 |mur F||CAB64522.1|||207 bp|D-alanine--D-alanine adding enzyme| S.pneumoniae||AJ387999|ORF|000
atgaaattaacaatycatgaagtggcycaagttgtmggagctaaaaatgatgttagtctttttgcggacgcycagttagaaaaggctgagtttgacagtcgattgattgggactggagatttatttgtgccactyaaaggtgcgcgtgacggtcatgactttatygaaacagcctttgaaaatggygcwgcwgtaaccttgtctgat

SEQ ID NO: 968 - DNA, 207 bp, Streptococcus pneumoniae
  misc_feature (1)..(207): tiling:Spneumo1:WAN024ATZ; Cluster includes WAN0240LN |mur F||CAB64540.1|||207 bp|D-alanine--D-alanine adding enzyme| S.pneumoniae||AJ388008|ORF|000
atgaaattaacaatycatgaagtkgcccaagctgttggagctaaaaatgatgttagtctttttgcggasgcccagttagaaaaggctgagtttgacagtcgattgattgggactggagatttatttgtsccmctcaarggtgcgcgtgayggycatgactttatcgaaagagcttttgaaaatggtgcrgcagyaaccttgtctgag

SEQ ID NO: 969 - DNA, 1380 bp, Streptococcus pneumoniae
  misc_feature (1)..(1380): tiling:Spneumo1:WAN024CQJ; Cluster includes WAN0243ND spr1 514|murF|15903557|NP_359107.1|1490933..1492306|-|1374 bp|U DP-N-acetylmuramoylalanine-D-glutamyl-lysine-D- alanyl-D-a lanine ligase|S.pneumoniae|R6|NC_003098.1|ORF|221
atgaaattaacwatycahgarrtkgcycaagytgtwggagybaaaaatgatrtyagyatctttgaggacayycagttagaaaargctgagtttgatagtcgtttgattggractrgagatttatttgtgccmctbaarggtgcgcgtgayggycatgactttatygaaasagcytttgaaaatggtgcrgcagyaaccytgtctgakaaagaggtctcaaatcatccttacattytagtagatgatgttttgacagcctttcaatccytagcatcmtactatcttgaaaaaacgactgttgatgtctttgctgttacaggttcaaatggcaagacaacgactaaggatatgttggcgcatttactgtcaacrasmtacaagacctacaaaacacaaggcaaytacaataaygagattggccttccytacacagttcthcayatgcctgaaggaacagaaaagttggtyttggagatgggrcaggaycacttgggmgatattcatctcttgtctgaattggctcgtccaaaaacagccatcgtgaccttggttggagaagcycatttggcctttttcaaagaycgttcwgagattgctaarggaaaaatgcaaattgcagacggaatggcttcaggttccttgcttttagygccggctgaccctatcgtagaggactatttgccaaytgataaaaaggtggtycgttttggkcaaggrgcagagytggraatyachgacttggttgagcgyaargayagtctgaccttyaaggyyaatttcttrgarcaagyccttgatttgccagtractggyaagtayaatgckacmaatgctatgattgcatcctatgttgccytrcaagaaggagtttcagaggagcaaattcrtywggcmttccaasrtcttgaattgacgcgtaaycgtacygartggaagaaagcagccaatggagcagatatcctgtcwgaygtwtayaatgccaatccaactgctatgaarytgattttagagactttctctgccattccagccaatgaaggtggcaagaaaattgcrgtkttrgcggayatgaaggarctkggtraccagtcwrttcaactycataaycagatgattttgagcctytcyccagatgtgcttgataycgtkattttctatggagaarayattgctsarttrgcycaattggccagtcaaatgttyccaatyggccacgtttactacttcaagaaaacagaagaccargaycaatttgaagacctagtcaagcaggtyaaggaaagcctyrgwgcyhatgaycaaatcytgctmaarggytctaactctatgaayctagcyawrttggtagaaagtttagaaaatgaadvcaagykaactaat

SEQ ID NO: 970 - DNA, 833 bp, Streptococcus pneumoniae
  misc_feature (1)..(833): tiling:Spneumo1:WAN024BFH; Cluster includes WAN0243FN spr1 793|purR|15903835|NP_359385.1|1764829..1765656|-|828 bp|Ac tivator of purine biosynthetic genes|S.pneumoniae|R6|NC_00 3098.1|ORF|111
atgaaattaagaagaagtgatcggatggttgtcatttccaactatttgattaataatccttataaactaactagtctcaatacttttgctgaaaagtatgagtctgctaaatcatccatctcagaagatatcgtcattatcaaacgcgcctttgaggaaattgaaatcggtcatatccagacagtgactggggctggcggaggtgtcatcttcacaccgtctatttcgagtcaggatgctaaggaaatggttgaagacttgcgtaccaagttgtcagaaagtgaccgtatcttgccaggtggttatatctatctgtctgatttgcttagcacaccagccatcttgaaaaatattggtcgtattattgccaaaagctttatggaccaaaaaattgacgcggttatgaccgtagcaactaagggtgtgccacttgcaaatgcagttgccaatgtcctcaatgtctcttttgtcattgtgcgccgtgacctgaaaattaccgaaggttcaactgttagcgtcaactatgtttcaggttcaagtggtgaccgtatcgagaaaatgttcctttcaaaacgtagtcttaaggcaggyagccgtgtcttgawtgtggatgacttcttgaaargtggcggaacsgtcaayggtatgattagtctcttgcgcgagttcgactcagaactggcmrgtgtagcggtctttgcggacaatgcccaagaagaacgtgaaaagcagtttgactacaagtcactcttgaaggtaacyaatattgatgtcaagaaccaagccatcgatgttgaggttggcaatatctttgacgaagataaataactaat

SEQ ID NO: 971 - DNA, 252 bp, Streptococcus pneumoniae
  misc_feature (1)..(252): tiling:Spneumo1:WAN024BFD; Cluster includes WAN02448J spr0 751|IS861-truncation|15902795|NP_358345.1|747720..747932|+ |213 bp|Degenerate transposase (orf1)|S.pneumoniae|R6|NC_0 03098.1|ORF|110
atgaaattaasttatgatgataaagttcagatctatgaactwagaaarcaaggatatagcttagagaagctttcaaataaatttgggataaataattytaatmttagrtayatgattaaattgattgatcgttacggaatagagttcrtcaaaaaaggaaaaaatcgttactattytcctgatttaaaacaagaaatgattmataaagtctkacmtramggctgractaaagatagagtttctcttgaatac

SEQ ID NO: 972 - DNA, 684 bp, Streptococcus pneumoniae
  misc_feature (1)..(684): tiling:Spneumo1:WAN024D96; Cluster includes WAN0243V4 spr1 235|aroD|15903278|NP_358828.1|1232277..1232954|-|678 bp|3- dehydroquinate dehydratase|S.pneumoniae|R6|NC_003098.1|ORF |111
atgaaattaatcgtttcagtaatgccaagaagtttagaggaggctcaggctctgrrtgccacgaggtacctggatgccgacatcattgaatggcgtgccgactatctgcctaaagaagcgattttgcaggtagctccagccatttttgaaaaattcgcaggccgtgagttggttttcacgctacgaactcgctccgaaggtggagaaatcgacctttctccagaagagtatatccatctaatcaaggaagttgcgcaaytctatcaaccagactatattgattttgagtactatagctacaaggatgtttttgaggaaatgctgracttcccaaatcttgttttgagttaccataatttccaagaaacacctgagaacatgatggaaatcttgtcagagttgacgatcctaaatccaaaacttgttaaggttgcggtgatggctcacacggagcaggatgtcttagacttgatgaactatacacgaggctttaaaaccctcaatcctgaacaggaatatgtgaccatttctatgggtaaggtgggcaaggtctctcgtatcactgcggatgtgacyggttcgagttggtcttttgccagtctggatgaggttagtgcccctgggcagatttctctagctagcatgaaaaaaatcagggagattttggatgaagctykaactaat

SEQ ID NO: 973 - DNA, 1296 bp, Streptococcus pneumoniae
  misc_feature (1)..(1296): tiling:Spneumo1:WAN024DX4; Cluster includes WAN0243BU spr1 931|hisS|15903972|NP_359522.1|1911671..1912960|-|1290 bp|H istidyl-tRNA synthetase|S.pneumoniae|R6|NC_003098.1|ORF|22 1
atgaaattacaaaaaccaaaaggaacgcaggatattttacctgctgartctgcyaartggcagtacgttgagggctttgcccgtgarattttcaarcgctayaactaygcagaagtgcgcacgccyatttttgagcattacgaggttatcagycgctctgtcggagatacracsgatatcgtaaccaaggaaatgtacgatttytatgacaagggtgaccgycatattaccctccgtccagaaggaactgcrcccgttgtccgttcctatgtggaaaataaactyttcgccccagaagtgcaaaagccaagcaagttctactayatgggacctatgttccgttatgagcgtccacaggcagggcgcttgcgccaattccaccagattggtgttgagtgttttggctctagcaatccagctaccgatgtggamacaatcgytatggcagcccattttttgaaggaaatcggtattcaaggtgtcaaattgcacctcaacactcttggaaatcctgagagccgtgcagcctaccgccaagccttgattgactatttgacaccgctcaaggagaccttgtctaaggatagccaacgtcgcttggaggaaaatcctcttcgtgtcttggactctaaggaaaaagaagacaaggtggcwgtagagaatgcgccrtctatcttggayttycttgatgaagaaagycaarctcattttgatgctgtgcgtcagatgttggaaaatcttggagtagaytacatcatcgataccaatatggtgcgtggtctggactactacaaccacaccattttcgagtttatcacagagattgwgggcaatgacytgacmrtctgtgcgggtggtcgctaygatggtttggttgcttactttggaggccctgaaactgctggatttggttttggrcttggtgtagagcgyctgcttctcatccttgaaaarcaaggygtgrccctccctatcgaaaaygccctagatgtctatatcgcagtcttgggygawggrgcaaatrtcaargccytrgaaytrgtmcargyycttcgccaacaaggtttcaaagcagagcgtgattacctcaaccgtaarctmaaagctcagttcaagtcagcmgatgtctttgcgrctaagaccctcatcaccctrggagagagcgaagtcgaaagcggrcaagtgacggtcaagaacaaccaaacccgagaagaagtgcaagtgtcacttgagacaatcagccaaaacttytcagaaatctttgaaaaactaggattttatactcaaykaactaat

SEQ ID NO: 974 - DNA, 647 bp, Streptococcus pneumoniae
  misc_feature (1)..(647): tiling:Spneumo1:WAN024DXC; Cluster includes WAN0243BZ spr1 926||15903967|NP_359517.1|1909228..1909869|-|642 bp|Hypoth etical protein|S.pneumoniae|R6|NC_003098.1|ORF|211
atgaaattacttaaaaaccttggctggattcttctagcccttctatcctttttmtttatctatggctttattcaggggctcgcgactgcgtcgcttgctttaggcgcttcaccctatgctgttactctactctatgtggycttkgctggagtatatgtgtacggcatttacaaatggtatcagaargctcctgttyatattgagaagagcggctttaaycgatttatttggcttcctgycttggtttggttcttatctctggtcgttcaattcttcttgccagatgatccttcagtaaatcagcaaatagcgacagacttgaccttgtctcaaccacttttctcattctttgctgtggttatttttgctcctttgacggaagagattgtttttagagggatgttagcacgctatctctttcctaagcaggacaatagtaaacgaaccctgatttttcttctggtatctagtcttctatttgccttgattcattttccaggtgatgtgcaacaattttttgtctattttagccttggttttagtttgggtttggcttacrttagcagaaaaggyctggtctacagtatttctcttcacgctttgaataatttagtcggctttttgatgattctcatgctataactaat

SEQ ID NO: 975 - DNA, 2201 bp, Streptococcus pneumoniae
  misc_feature (1)..(2201): tiling:Spneumo1:WAN024CTZ; Cluster includes WAN0243ET spr1 823|pbp2a|15903865|NP_359415.1|1796729..1798924|-|2196 bp| Penicillin-binding protein 2a|S.pneumoniae|R6|NC_003098.1| ORF|221
atgaaattagataaattatttgagaaatttctttctctttttaaaaaagaaacaagtgaayyagaggaytytgrktctactakcttrcgtcgytctcgyagtgatcgaaaaaaattagcccaagtrggtccgattcgaaaattctggcgtcgytatcatctaacaaagattrtccttatactaggtttgagtgcaggmttgctagttggaayctatttgtttgctgtagccaagtcraccaatgtcaatgatttgcaaaatgccttgaaaactcgractmtyatttttgaycgtgaagaaaargaggctggtgccttgtctggtcaaaagggaacctaygttgadctgactgmyatcagtaaaaayttgcagaatgcygttrttgcgacagaagaccgytctttytataaaaatgacgggattaactatggycgtttyttcttggckattgtcactgctgghcgttcaggtggwgghtctacyattacccarcagctggctaaaaaygcctatttrtcrcargatcaaactgtygagagaaaagcraaagaatttttccttgccwtagaattaasmaaaaaatatagtaaggakcarattytaaccatgtaccttaacaacgcytattttggaaatggtgtgtggggtgtagaagatgcgagtaagaaataytttggagtttctgcrtcagmagtgastytggmtcaagctgcractctggcaggsatgctcaarggrccggaactgtataatccyttgaattcygtasaagattckactaatcgkcgygayactgtcttrmaraatatgsttgcagcrggwtayattgataaaaaycaagaaaccraagctgcwgaagttgatatgrctwcgcaattgcaygataagtatgaaggraaaatytcagattaycgytayccytcttaytttgatgckgtggttaaygaagctgtktcyaagtataatctaacagaggaagaratygtmaataatggctaccgcatttacacagadctggaccaaaaytaccaagcaaatatgcagrttgtytatgaaaayayakcgctatttccgagrgcagaggatggaacrtytgcwcaatcaggaagtgtmgcyctcgaaccgaaaacaggkggagttcgtggagttgtcggtcaagttgctgayaatgataaaactggattccggaatttcaactatgcaacycaatcaaarcgtagtcctggttctrcaattaagyctttagttgtttatacrccagcagttgaagcargctggrctttgaataagcwsttggataaccataccatgcagtayrmyagctataagsttgataactatgcaggratcaaaacragtcgagaagttcctatgtatcaakccttggcagartcgcttaatctrcctgctgttgcyactgttaatgatttgggystygayaaggcttttgaggcrggcgaaaaattcggmctcaacatggaaaargtygaycgtgttcttggtgtcgcmttgggaagcggtgttgaaaccaaycctctkcaaatggctcaagcataygcygcctttgcaaatgaaggtttaatgcckgaagctcattttattagtagaattgaaaatgctrgtggwcargtyattgcgarycataaaaattcacaaaaacgggtgattgataagtctgtagctgayaagatgacmagtatgatgttgggracwttyacmaacggwammggtattagttcatcgcctgcagactatrtyatggcaggraaaactggaacaactgaagcagttttyaatccrgaktayacaagtgaccagtgggtaattggttatacwccggatgtagtgattagycactggcttggyttycckacsactgatgaaaaycaytatctarcwggytcbacwtcaaayggtgcagchcatgtctttagaaayattgcmaatacyattttaccytatacrycaggaagyacytttacrgttgaaaatgcttataagcaaaatggaattgcaccagcyaayacaaaaagacaagtacaaascaatrataatarccagacagatgataatttgtctgatattcgaggrcgtgcgcaaagtytagtaratgaggctagccgggctatctcrgatgckaagattaaggaaaaggmtcaaacratatgggattcgrtagtyaatctatttcrytaactaat

SEQ ID NO: 976 - DNA, 854 bp, Streptococcus pneumoniae
  misc_feature (1)..(854): tiling:Spneumo1:WAN024D7C; Cluster includes WAN0243Q4 spr1 415||15903458|NP_359008.1|1402181..1403029|-|849 bp|Conser ved hypothetical protein|S.pneumoniae|R6|NC_003098.1|ORF|1 11
atgaaattagctgttttcacagattcctctgcttatctcagtgmagagaycttgcaaagagaagacttgtttgtcttggatattcctgtcaatattgatggtgaggaatatgtcgaaggcatcaatctgtctgctgaggaattttaccaaaaaatggctcaggcttctgaattgcctaagaccagtcaaccaagtattgccaagttagatgaratcttaacttcgctcaaagaacaaggctatacacatgccttggggcttttcctatcttctggaatttcaggtttttaccaaartatccagtatatggtcgatgactatgagggcttaaccattgctttcccagacactttgattacaagtgctcccctaggcatcatggttgaaagcgtctttaattggcgtgatcagggcgatgattttgccagcattcaggataagctagccattcaaatcagccgtacgtcagcctttatcatggtagatgacttrgatcatttggtaaaaggtggacgcctttcaaatggggctgccattttgggcaatttgcttagcattaagccaatcctttattttaacgatcaaggtgtgattgaagtttacgaaaaagttcgtactgaaaagaaggccaccaarcgcttaattgaaattatcaaggaaacaacggcttcaggtcaataccgggtcattgtcattcatgggaatgctcctgaaaaggctgaagaattgcgtcagcayttgcttgattttggcttgggttcggatgtttcacttgctacatttggtagtgtcattggaacgcacctaggagcaggaagtattgctctgggttatattccagtgatttarctaat

SEQ ID NO: 977 - DNA, 207 bp, Streptococcus pneumoniae
  misc_feature (1)..(207): tiling:Spneumo1:WAN024ATY; Cluster includes WAN0240L7 |mur F||CAB64524.1|||207 bp|D-alanine--D-alanine adding enzyme| S.pneumoniae||AJ388000|ORF|000
atgaaattamcaatccatgaagtggctcaagttgtcggagctaaaaatgatgtcagtatctttgaggacactcagttagaaaaggctgagtttgacagtcgtttgattacgacaggggacttatttgtgcctctaaaaggtgcgcgtgatggccatgactttatcgaaagagcctttgaaaatggtgcagcagtaaccytgtctgak

SEQ ID NO: 978 - DNA, 1353 bp, Streptococcus pneumoniae
  misc_feature (1)..(1353): tiling:Spneumo1:WAN024CZO; Cluster includes WAN0244QE spr0 108||15902152|NP_357702.1|116230..117582|+|1353 bp|Conserv ed hypothetical protein|S.pneumoniae|R6|NC_003098.1|ORF|10 0
atgaaattatataataaatcagaattacgttattctcgyattttctttgataagagaccaccagcttttgcgtttattctcattatttcaactgctattatcttaagcggtgcattggttggcgcagcttatatacccaaaaactatattgtaaaagcgaatggaaattcagtyataacaggtacagagttcctatcagcaattrgttcagggaaggtagttactttacataagtcagaaggagatatggtaaatgctggagatgtcattatttcgttatcaagtggacaagaaggtttacaagcgagctctttaaataaacaattggwgaagttacgtscaaaagaagctatctttcamaaatttgaacaatcattaaatgagaaatacaaycrtwtrtctaattctggtgaagaacaggaatattatgggaaagttgaatactacctatctcagttaaattcggaaaattataataatggtacccagtattcaaagattcaggatgaatatacgaagttgaataaaataacagctgaaagaaatcagttagatgccgacttgcaaactctacaaaatgaattgattcaacttcaacagcaaggagactccccttccttatcagatacgacatcagctgatgataaagctaagttagaaactaagatattagaaataacaacaaaaatcgaagcattaaaaacaaatattacttctaagaatagcgagattgatagtcaacaaagcaatattaaagatatgaaccgtacctataatgatccaacttctcaggcttataatatttatgctcaattagttagtgagttaggtactgctcgttcaaacaacaataaaagtattacagagcttgaggctaatcttggagtggcaacaggtcaagataaagctcatagtatattagcgycaaatgaaggtactctgcattatytggtacctttgaaacaaggaatgtctattcagcaggggcaaacgatagcagaagtttcagggaaagaaaaaggttactatgtagargcttttgtacttgcgagtgatatttctcgtgtytcaaaaggagcaaaagttgatgttgctattactggtgtraatagtcaaaaatatggaacactaaagggacaagtcagacagattgattcaggaacaatttcccaagaaacgaaagaggggaatattagcctctataaagtcatgatagaattagaaaccttaactctaaaacatggaagygagacrgtcrtmctccaaaaggatatgccagttgaagtgcggattgtctatgataaagaaacctatcttgattggattttrgaaatgttaagtttcaagcaataa

SEQ ID NO: 979 - DNA, 293 bp, Streptococcus pneumoniae
  misc_feature (1)..(293): tiling:Spneumo1:WAN024DHW; Cluster includes WAN0244GP spr0 457||15902501|NP_358051.1|466094..466381|-|288 bp|Hypothet ical protein|S.pneumoniae|R6|NC_003098.1|ORF|111
atgaaattatccaacctactgctatttgcaggagctgcagccggaagttatctggtyacaaaaaatcgccaaaccatcacagatgaagtcttgaataccactgaccgcgttcaagctatcaargacgatgtggatattatccaaaayagcctgcaaatcatyraccagcaaaaagaacttatcaaggaataccaagaagacttgacttacaagtttaaggtcttggaaaaggatatccagactagactagctgtgataaaagaaatgcagggaactgaagataagtaactaat

SEQ ID NO: 980 - DNA, 587 bp, Streptococcus pneumoniae
  misc_feature (1)..(587): tiling:Spneumo1:WAN024AU6; Cluster includes WAN0243JA spr1 662|xpt|15903704|NP_359254.1|1635320..1635901|+|582 bp|Xan thine phosphoribosyltransferase|S.pneumoniae|R6|NC_003098. 1|ORF|111
atgaaattattagaagagcgcatcctcaaggatgggcatatcttggrygayaacatcctcaaggtrgrttcctttttaacccaccaagttgactttagcttratgcragagattggtarggtttttkcggaaaaatttgctrctrcyggcattacyaaggtygtraccattraagcrtcrggyattgccccarccstttttacagctgaagycttaaaygttyccatgattttykccaaaaargctaaraacatcaccatgaaygaagryatcytaactgcycaagtctactcctttaccaarcargtgaccagcacygtttctatcgctgraaaattcctctcaccagargayaaggtyttgattatcgacgatttccttgctaatggccaagctgctaaaggcttgattmaaatcatcgaacaggccggtgcyacagtccaagctatcggtatcgtgattgaraartccttccaagatggycgtgatttgcttgaaaaagcaggctaycctgtcctawcacttgctcsyttggatygttttgaaaatggtcargtcgtatttaaggaggcagatctctaactaat

SEQ ID NO: 981 - DNA, 1623 bp, Streptococcus pneumoniae
  misc_feature (1)..(1623): tiling:Spneumo1:WAN024D4W; Cluster includes WAN0241Y3 SP17 96||15901625|NP_346229.1|1711696..1713312|-|1617 bp|ABC tr ansporter, substrate-binding protein|S.pneumoniae|TIGR4|NC _003028.1|ORF|011
atgaaattcaaaacattctcaaaatcagcagttttgttgacagctagtttagcagtacttgcagcctgtggctcaaaaaatacagcttcaagtccagattataagttggaaggtgtaacattcccgcttcaagaaaagaaaacattgaagtttatgacagccagttcaccgttatctcctaaagacccaaatgaaaagttaattttrcaacgtttggagaaggaaactggcgttcatattgactggaccaactaccaatccgactttgcagaaaaacgtaacttggatatttctagtggtgatttaccagatgctatccacaacgacggagcttcagatgtggacttgatgaactgggctaaaaaaggtgttattattccagttgaaratttgattgataaatacatgccaaatcttaagaaaattttggatgagaaaccagagtacaaggccttgatgacagcacctgatgggcacatttactcattyccatggattgaagagcttggagatggtaaagagtctattcacagygtcaacgatatggcttggattaacaaagattggcttaagaaacttggtcttgaaatgccaaaaactactgatgatttgattaaagtcctagaagctttcaaaaacggggatccaaatggaaatggagaggctgatgaaattccatttwcatttattagtggtaacggaaacgaagattttaaattcctatttgctgcatttggtataggggataacgatgatcatttagtagtaggaaatgatggcaaagttgayttcacagcagataacgataactataaagaaggtgtcaaatttatccgtcaattgcaagaaaaaggcytgattgataaagaagctttcgaacatgattggaatagttacattgctaaaggtcatgaycagaaatttggtgtttactttacatgggataagaataatgttactggaagtaacgaaagttatgatgttttaccagtacttgctggaccaagtggtcaaaaacacgtagctcgtacaaacggtatgggatttgcacgtgacaagatggttattaccagtgtaaacaaaaacctagaattgacagctaaatggattgatgcacaatacgctccactccaatctgtgcaaaataactggggaacttayggagatgacaaacaacaaaacatytttgaattggatcaagcgtcaaatagtctaaaacacttaccactaaacggaactgcaccagcagaacttcgtcaaaagactgaagtaggaggaccactagctatyctagattcatactatggtaaagtracaaccatgccwgatgatgccaaatggcgtttggatcttatcaaagaatattatgttccttacatgagcaatgwcaataactatccaagagtctttatgacacaggaagatttggacaagattgcccatatcgargcagatatgaatgactatatctaccgtaaacgtgctgaatggattgtaaatggcaatattgatactgagtgggatgattacaagaaagaacttgaaaaatacggactttctgattacctcgctattaaacaaaaatactacgaycaataccaagcaaacaaaaacctarctaat

SEQ ID NO: 982 - DNA, 600 bp, Streptococcus pneumoniae
  misc_feature (1)..(600): tiling:Spneumo1:WAN024FAG; Cluster includes WAN0244RB-5 sp r0075||15902119|NP_357669.1|80186..83671|+|3486 bp|Conserv ed hypothetical protein|S.pneumoniae|R6|NC_003098.1|ORF|11 0
atgaaattcaatccaaatcaaagatatactcgttggtctattcgccgtctcagtgtcggtgttgcctcagttgttgtggctagtggcttctttgtcctagttggtcarccaagttctgtacgtgccgatgkgstcaatccraccccaggtcaagtcttacctgaagagacatcgggaacgaaagagggtgacttatcagaaaaaccaggagacaccgttctcactcaagcgaaacctgagggcgttactggaaatacraattcacttccgacacctacagaaagaactgaagtgagcgaggaaacaarcycttctagtctggatacactttttgaaaaagatgaagaagctcaaaaaaatccagagctaacagatgtcttaaaagaaactgtagatacagctgatgtggatgggacacaagcaagtccagcagaaactactcctgaacaagtaaaaggtggagtgaaagaaaatacaaaagacagyatcgatgttccwgcwgcytayctwgaaaaagctsaagggwaaggtccwttcacwgcmggtgtmaaccawgtrattccwtaygaactmttcgcwggtgatggyatgttractcgt

SEQ ID NO: 983 - DNA, 233 bp, Streptococcus pneumoniae
  misc_feature (1)..(233): tiling:Spneumo1:WAN024FCO; Cluster includes WAN0241WR SP18 44||15901673|NP_346277.1|1752821..1753048|-|228 bp|hypothe tical protein|S.pneumoniae|TIGR4|NC_003028.1|ORF|111
atgaaattctactcttatgactatgtactcagccaaatcggtcagcaaaatggtatcatggttggctttgggattgttctattagctgtgacagttttttttgctttcaaggcatacyatrataaaaarggaascraatttcgtgagttggtcatgatttcagmtctggccttatttagctctgcttttggtcagcatcacgacttatcaaaacaatcaagtttctaactaat

SEQ ID NO: 984 - DNA, 1155 bp, Streptococcus pneumoniae
  misc_feature (1)..(1155): tiling:Spneumo1:WAN024CQL; Cluster includes WAN0244WA |||| ||864 bp|Incyte orf contig SPN2C0202 2-865|S.pneumoniae|23 F|WAN0244WA|ORF|001
atgaaattcttagacttatttgctggcattggaggttttaggatcggcatggaatcagccgggcatgaatgtataggattttgtgaaatagacaaattcgctagagctagttataaagctatacacgatacgaaaggagaaattgaattacatgacatcacaacagtatcagatgacactattcgaggaatcggacatgttgatgttatctgtggaggatttccgtgccaggctttcagcattgcaggaaacagacgaggatttgaagatacaagaggaactctcttctttgaaatcgcaaggttcgcatctattctcaaacccagatatctattccttgaaaacgtcaagggactcctcaaccacgacagaggaaatacctttgaggtcatcctctcagcgttggatgaactggggtatgatgtggaatggcaagtgcttaacagcaaaaattttggagtcccccaaaatcgggaacgtgtgttcattatcggacatcttasaggaggaagtggacgaaaggtatttcctctcagcggagatggtgcagcgattacttgtgaacaaccaaaaataaacaaggttggaaatactagaaaaaaagggaaatcgcaaagtggtgatgtcgtctcaattgactcattagctcccaccctgtgtagtactacgacacaaaaagatccgttaaaagttttaattgaaaatgaaataaagcagtttggtgttctgcaaccaaactacaatcaaagcggcgttgtttatgagattgatggtatttcaccaacaatcagagcgtatcaaggaggaaatcttgaacctaaaatcagagtaaaagaagcaaccaagcaaggctaccaagaggctgaaattggagatagtgtaaacctatcgcatccaaactctaaaacacgcagagggcgagtaggtaagcagatagcaaatactctcttaactggagagagtcaaggtgtggttgagcctgattttaggattaggaagctaacacctagagaatgctggaggttacaaggttttcctgattgggcttttgataaggcgcaggaggtcaactctaacagtcaattatacaagcaagcaggcaatagcgtaacagtaaacgttatttctgcaatagcacaggggttaggaggaaat

SEQ ID NO: 985 - DNA, 1413 bp, Streptococcus pneumoniae
  misc_feature (1)..(1413): tiling:Spneumo1:WAN024CCY; Cluster includes WAN024118 |cps 6aJ||AAL68425.1|||1413 bp|putative repeat unit transporter |S.pneumoniae||AF246898|ORF|000
atgaaattgaagtttcttataacaaatttrtttcatgtyyttttrtctaatctgattacaattstyacatcrgttatagttgtactaatyttaccaaaaattatgggagtaactgagtatagttattggcaactatatattttttacctaacatatattggtttttttcatctgggwtggattgatggaatttatcttaaatatggyggattagagtaccagaayttagataagaaacagttttattctcaaatacttcaattttycagttttttaattttaatttcttttctattatttggttttaacttattgaytgtgacagatcmaaatgcraaatatatttataacatgacyattattagtatgatagttacaaatttaagaatgttattygtttatattttgcagatgacaaatcgattaaaggatagytcyatmattctratmagtgatcgcgtyatatatrttwttcttttattyctgtttattatatttaaayggcatgaatacaaggtaatgatttgggcrgatgttttrggaaggacattttctctcctactttctttttggayttgtaaagatattgtttttcaatccttatccgagttyatattggatctgagagartcttttgacaatatccgtgttggaatcaayttaatgttatccaatattgcaagtagtatgattattggtattgttcgaatgggaattcaatggaattggaatatcgaaacattcgggaaagtatcactgaygctaarcatctctaatttattaatgacttttattaatgcgattggtttrgttgtytttcctttgttaaaacggacaaaaacggaaaatttatctaaaatttattccaacttaagaaatgttttgatgctkatcatgttygcratwttrctcwtttaytatcctttaaaaattrtwytagayctytggttgccagcytatcrrgatgcstygattttyatgrcycttattttycctatgtcartytatgaaggraaratggcmttggtsattaatacwtayttaaaggcrytaagratggaragagatattctcaaaataaatactttgattatgttgttcagtatgttagttaccctaataactactctattattaaatartttagagctrackgttrtatckatagttgttttgctagctttacgtagyrtaatagcagaactaattctatctaaaaaactkgatrtwtcrgttragmaagayattgtrttagaattwcttwtgacrattrtmttwattycttcaagttggtacttaccgatttggcycgcagtaatagtttatttgttagcgtatactttatacttgtatctaaagcgtaaagatayaaaaatgtatatagaatattttagaaagaaaatatttgaataa

SEQ ID NO: 986 - DNA, 1334 bp, Streptococcus pneumoniae
  misc_feature (1)..(1334): tiling:Spneumo1:WAN024FGE; Cluster includes WAN0243N0 spr1 527|ABC-SBP|15903570|NP_359120.1|1503232..1504560|-|1329 b p|ABC transporter substrate-binding protein - sugar transp ort|S.pneumoniae|R6|NC_003098.1|ORF|111
atgaaatttagaaaattagcttgtacagtacttgcgrgtgctgcggttcttggtcttgctgcttgtggcaattctggcggaagtaaagatgctgscaaatcaggtggtgacggtgccaaaacagaaatcacttggtgggcattcccagtatttacccaagaaaaaactggtgacggtgttggaacttatgaaaaatcaatcatcgaagcgtttgaaaaagcmaayccagatrtaaaagtgaaattrgaaaccatcgacttcaagtcaggtcctgaaaaaatcacaacagcyatcgaagcwggaacagctccagacgtactctttgatgcaccaggacgtatcatccaatacggtaaaaacggtaaattggctgagttgaaygacctcttcacagatgamtttgttaaagatgtcaacaatgaaaacatcgtacaagcaagtaaagctggagacaaggcttayatgtatccrattagttctgccccattctacatggcaatgaacaagaaaatgttagaagatgctggagtwgcaaaccttgtaaaagaaggttggacaactgatgattttgaaaaagtattgaaagcacttaaagacaagggttacacaccaggttcattgttcagttctggtcaagggggagaccaaggaacacgtgcctttatctctaacctttatagcggttctgtaacagatgaaaaagttagcaaatatacaactgatgatcctaaattcgtcaaaggtcttgaaaaagcaactrgctggattaaagacaatttgmtcaataatggttcacaatttgacggtggggcagatatccaaaactttgccaacggtcaaacatcttacacaatcctttgggcaccagctcaaaatggtatccaagctaaacttttagaagcaagtaaggtagaagtggtagaagtaccattcccatcagacgaaggtaarccagctcttgartaycttgtaaacggrtttgcagtattcaacaayaaagacgacaagaaagtygcwgcatctaagaaattcatccartttatcgcagatgacaargagtggggwccwaaagacgtagttcgtacaggtgcyttcccagtycgtacwtcatttggmaaactttatgawgacaaacgyatggaaacaatcagyrgctggactcaatactactcaccatactacaacactattgatggwtttgctgaaatgagaacrctttggttcccaatgttgcaatctgtatcaaatggtgacgaaaaaccagcrgaygctttgaaagccttcactgaaaaagcraacgaaacaatcaaaaaagctatgaaacaatarctaat

SEQ ID NO: 987 - DNA, 603 bp, Streptococcus pneumoniae
  misc_feature (1)..(603): tiling:Spneumo1:WAN024AVV; Cluster includes WAN023Z45 AL44 9925.1_207||||200304..200738|-|435 bp|Glimmer 2.02 orf pre diction|S.pneumoniae||AL449925.1|ORF|001
atgaaatttcttgaattaaataaaaaacgtcatgcgaccaagcatttcactgataagcctgttgatccaaaagatgtgcgtacggctatcgaaattgcaaccttggcgccaagcgcccacaacagccagccttggaaatttgtagttgttcgtgagaaaaatgctgaactggcaaagttggcttatggttcaaactttgagcaggtatcatcagcacctgtaaccattgccctatttacagatacagaccttgccaaacgcgctcgtaagattgcccgagttggtggtgctaacaatttctcagaagaacaacttcaatacttcatgaaaaatttgccagctgaatttgcacgctacaatgaacaacaagtcagcgactacctagcwctcaatgcaggtttggttgctawsaacttggttctcgctcttacagaccaaggaattggttccaatattatccttggttttgacaaatcaaaagttaatgaagttttggaaatcgaagaccgtttccgcccagaactcttgatcacagtgggttacacagacgacaaattggaaccaagctaccgcttgccagtagatgaaatcattgaaaaaaga

SEQ ID NO: 988 - DNA, 611 bp, Streptococcus pneumoniae
  misc_feature (1)..(611): tiling:Spneumo1:WAN024AVW; Cluster includes WAN0244E8 spr0 546|nrd|15902590|NP_358140.1|547411..548016|+|606 bp|Nitro reductase|S.pneumoniae|R6|NC_003098.1|ORF|110
atgaaatttcttgaattaaataaaaaacgtcatgcgactaagcattttactgataagcytgttgatcccaaagatgtgcgtacggctatcgaaattgcaaccttrgcgccaagcgcccacaacagccagccttggaaatttgtggtggtacgtgagaaaaatgctgaactggcaaagttagcttatggttccaattttgaacaggtatcatcagcgcctgtaaccattgccttgtttacagatacggacttagccaaacgtgctcgtaagattgcccgtgttggtggtgctaataacttttctgaagagcaacttcaatattttatgaaaaatctgccagctgagtttgcccgttacagtgagcaacaagtcagcgactacctagctctcaatgcaggtttggttgcyatgaacttggttctygcwytkacagaccaaggaattggttcyaayattatycttggttttgacaaatcaaaagttaatgaagttttggaaatcraagaccgtttccgcccagaactcttgatcacagtgggttayacagacgamaaattggaaccaagctaccgcttgccagtagatgaaatcatcgaraaaagatarctaat

SEQ ID NO: 989 - DNA, 1250 bp, Streptococcus pneumoniae
  misc_feature (1)..(1250): tiling:Spneumo1:WAN024FNS; Cluster includes WAN0243SL spr1 326||15903369|NP_358919.1|1312674..1313918|+|1245 bp|Hypot hetical protein|S.pneumoniae|R6|NC_003098.1|ORF|111
atgaaatttgttggacttgttggatcaaactacgatcaatcatataaccgyaarctcttggaatttatccgtcgcwayttcaaaytcaaatttgaattagaagtwcttgaaatygacgaagttccaatgtttaaccaagaygaaaaatgggaygaaagyttccaattrcgttwyttrtataacaarattacwcgtgcwgatggtgtyatyatygcyactcctgagcayaaccacactatctcagcttcactcaaatctgtacttgaatggctttcatacgaagttcatccatttgaaaacaagcctgttatgattgtgggtgcatcatactatgaccaaggaacatcacgtgctcaagttcaccttcgtaaaatccttgatgctccaggtgttaatgcctacacgcttccaggtaacgaattccttcttggtaaagctaaggaagcttttgataacaacggaaatatcaccaacgaaggcactgttaaattccttgaaacttgcttagataactttgttaaatacgtaggagtcgtttcgaaattgaaaaaaccaaaaccaatcgaatcagaagacttggattgtggaaaaccaatcgctacaaccatcacagaagttgaccctgacgatccagaatgggtagaaaaagttgcagcawtcactggtgctgtttctggtgatacctatgtcaaattggaccacggtatcctaacagttaaccaaattgatatgttcttgaaagctatgccatttgaattgacatacgctgacgayaacaaccaattcctctactacaacaacgctcaccaagatccagacactatgttcgctaaacgtgtaccacctcaatcaggtagccgtatgtcgactgttcatggttctcttccaccagcacgtatgaagaacgtagagtgggttatcggaacacttcgcaacggaaaccaagaatacgtccgtacgatcgttccaggttctcctgcaggtgttatcaacactcacaactaccaagcaatgtactatcctgatggatcatacgctggtatcaatgaaatygtctttaacttccaaccatggcttgactggtacctaaaagagactggtcaacgtttggtgggtggtagcggaccatttgctcctgctgccggagrtcatggagacgccgatgctacttctggcgcttctgattcaggggatgytggaggccacggtggtgacgcagacgctacagccggtgcaagttactaactaat

SEQ ID NO: 990 - DNA, 1161 bp, Streptococcus pneumoniae
  misc_feature (1)..(1161): tiling:Spneumo1:WAN024FV5; Cluster includes WAN0240UI |wci Y||AAK20719.1|||1242 bp|WciY|S.pneumoniae||AF316642|ORF|00 0
atgaaattttatataaaaaatttaytaaaaaaagtctttacattaccgttgcatttattgcctattcagtctaataagataatatttgataattttggtggtagaggttttggggacaatcctaagtatatacttgaagaacttgtctctcgagaaaagaatctaratcttgtgtgggtaacaaaagatagagaaatttctatccctgaaggcgttcgagtagtaaaatacggcagttaccgttctttttatgaatggttaacagctagagtttgggtagataatattcgtaattctgatcgaccttggaagcgaaamggacagatttatcttcaaacttggcatggttcagatggggtaaagttaattgaaaaaagtgttgcagggaayctaaaaaaaacatatmttagaatggcgaagtatgatggaaagattacagacggtatcgtatcaagtcggcaytttcaaactttgggtatgcaaaataatttttggctgrcagagaatgtggaatttctggaatttggattacctcgaaatgatgatttttttaaaagtgaaaaaatcaaaaccacaaatataaaatttagaacattatttgatatcgatttagacgaactggtagttttgtatatgccgacgttcagagatgatggatcgttgaatgcctataatttagattactcgaaactaatacatgtttttcaaaataaatttagaaaaaatgtaaraatattagttcgttttcatccaaatgttgattctarttttataaatttacaggatacagactgtataaatgtgtcgacctattcaaatcctcaggatctgatgatgagtgcrgatgtgatgattacggattattcatcggcttctattgattttatgttattaaatcgtccagtatttctgtatttaccagattatcaaagttatgtgaatgatagaccattggatgataactttgataaattgccatttccaagagcatatcataacaatgagttgacagaaattattagagactttgaaagaagtaaatatgatgaaaaagttcgtctgtatgaattagaggatgttcgttttgatagaggaaaagcatcagtacagtgtgctaattggattgaagaaaaaataaaaaacaataaagttattgattga

SEQ ID NO: 991 - DNA, 2361 bp, Streptococcus pneumoniae
  misc_feature (1)..(2361): tiling:Spneumo1:WAN024CPB; Cluster includes WAN024446 spr0 908|phtE|15902952|NP_358502.1|895140..898259|+|3120 bp|Pne umococcal histidine triad protein E precursor|S.pneumoniae |R6|NC_003098.1|ORF|111
atgaaattyagtaaaaaatatatagcagctgratcagctgttatygtatccttgagtctatgtgcctatgcactaaaccagcatcgttcgcaggaaaataaggacaataatcgtgtctcttatgtrgatggcagccagtcaagtcagaaaagtgaaaacttgacaccagaccaggttagccagaaagaaggaattcaggcygagcaaattgtaatcaaaattacagatcagggctatgtaacgtcacacggtgaccactatcattactataatgggaaagttccttatgatgccctctttagtgaagaactcttgatgaaggatccaaactatcaacttaaagacgctgatattgtcaatgaagtcaagggtggttatatcatcaaggtcgatggaaaatattatgtctacctgaaagatgcagctcatgctgataatgttcgaactaaagatgaaatcaatcgtcaaaaacaagaacatgtcaaagataatgagaaggttaactctaatgttgctgtagcaaggtctcagggacgatatacgacaaatgatggttatgtctttaatccagctgatattatcgaagatacgggtaatgcttatatcgttcctcatggaggtcactatcactacattcccaaaagcgatttatctgctagtgaattagcagcagctaaagcacatctggctggaaaaaatatgcaaccgagtcagttaagctattcttcaacagctagtgacaataacacgcaatctgtagcaaaaggatcaactagcaagccagcaaataaatctgaaaatctccagagtcttttgaaggaactctatgattcacctagcgcccaacgttacagtgaatcagatggcctggtctttgaccctgctaagattatcagtcgtacaccaaatggagttgcgattccgcatggcgaccattaccactttattccttacagcaagctttctgccttagaagaaaagattgccagaakggtgcctatcagtggaactggttctacagtttctacaaatgcaaaacctaatgaagtagtgtctagtctaggcagtctttcaagcaatccttcttctttaacgacaagtaaggarctctcttcagcatctgatggttatatttttaatccaaaagatatcgttgaagaaacggctacagcttatattgtaagacatggtgatcatttccattacattccaaaatcaaatcaaattgggcaaccgactcttccaaacaatagtctagcaacaccttctccatctcttccaatcaatccaggaayttcacatgagaaacatgaagaagatggatacggatttgatgctaatcgtattatcgctgaagatgaatcaggwtttrtcatgagtcacggwraycayaatcattayttcttcaagaaggacttgacagaagagcaaattaarsctgcgcaaaaacatttagaggaagttaaaactagtcataatggattagattctttgtcatctcatgaacaggattatccargtaatgccaaagaaatgaaagatttagataaaaaaatcgaagaaaaaattgctggcattatgaaacaatatggtgtcaaacgtgaaagtattgtcgtgaataaagaaaaaaatgcgattatttatccgcatggagatcaycatcatgcagatccgattgatgaacatmaaccggttggaattggtcattctcacagtaactatgaactgtttaaacccgaagaaggagttgctaaaaaagaagggaataaagtttatactggagaagaattaacgaatgttgttaatttgttaaaaaatagtacgtttaataatcaaaactttactctagccaatggtcaaaaacgcgtttcttttagttttccgcctgaattggagaaaaaattaggtatcaatatgctagtaaaattaataacaccagatggaaaagtattggagaaagtatctggtaaagtatttggagaaggagtagggaatattgcaaactttgaattagatcarccttatttaccaggacaaacatttaagtatactatcgcttcaaaagattatccagaagtaagttatgatggtacatttacagttccaacctctttagcttacaaaatggccagtcaaacgattttctatcctttccatgcaggggatacttatttaagagtgaaccctcaatttgcagtgcctaaaggaactgatgctttagtcagagtgtttgatgaatttcatggaaatgcttatttagaaaataactataaagttggtgaaatcaaattaccgattccgaaattaaaccaaggaacaaccagaacggccggaaataaaattcctgtaaccttcatggca

SEQ ID NO: 992 - DNA, 1037 bp, Streptococcus pneumoniae
  misc_feature (1)..(1037): tiling:Spneumo1:WAN024DVM; Cluster includes WAN02416V |cps 9vO||AAM62299.1|||1035 bp|putative O-acetyltransferase Cps 9vO|S.pneumoniae||AF402095|ORF|000
atgaaatyratckgaaagtamgaatyaattggrtagattttgggaaaggattygcaatattytyagttctagtaggrcatgtattkatkggkttrtmtgaatccaatawkttttcaattgcaaatgatgtgttattattmytratarctcaaatytatatatttcayataccagtgttttttgcsytrtcaggatactttttyagacctgtatcagatwtgaaggarttttggyattatgctaaaaagaaracvattattttaggyataccatatrttttttattcaattattcacttttgtcttcaaaagstygckggtgcytctgtsmgagtacccactaygataywtaayctattraatatmtataratwtcctytgggagtttcatggtatctatatacgytatggtcgatattgatagtttatggtttactatctrttgttttcaaaaatcgtaagtcyctyttkttagttagtgtttttgcctatattttyacaytatttattcaaaytgatatttttattgtrcaacggacgttggtttggggkrtttgyttctktctwggcagtgtattgagygmarttcactttrataaaattaatttraaaaaawttctktttttctttgtgytatttgattttatttatatgttcgcttggttyttgttttatgaagtagggtctaaraaggattatgtaagctatakyaacccaggkttgtggggrattgcttttattgtytgtgtattagytgcttttgcgatttttcctaaaatggagaaaaatttycctaaaactttcctatatttcactaaatacgggaaagatagtttaggkatctatattcttcatgcaccaatttgtagcatgattcggattctaatgttgaaagtrggaataaactcagtttttcttcacgttgttgttgggattgtsytaggctggtatttatccatactrgcaacttatatattgaaaaaaattccatttttgaatattgttttattaccacaraagtatattaaattaaaataa

SEQ ID NO: 993 - DNA, 1733 bp, Streptococcus pneumoniae
  misc_feature (1)..(1733): tiling:Spneumo1:WAN024G6M; Cluster includes WAN0243VN spr1 216|ABC-N/P|15903259|NP_358809.1|1211829..1213553|-|1725 b p|ABC transporter ATP-binding/membrane-spanning protein - unknown substrate|S.pneumoniae|R6|NC_003098.1|ORF|113
atgaaayacctattatcttacttcaaaccctacatcaaggaatcaattttagcccccttgttcaagctgttagaagctgtttttgagctcttggttcccatggtgattgctgggattgttgaccaatctttacctcagggagatcaaggtcatctctggatgcagattggyctgctccttatctttgcagtaattggcgttttagtggccttgatagctcaattttactcagcaaaggcagcagtaggytytgctaaggaattgacaaacgatctttatcgtcatattctttccttgcccaaggayagcagagaccgtctgacaacttctagtttggtcactcgcttgacttcggatacckaccagattcagactggtatcaatcaattcctgcgtctctttttrcgagcgcccattatcgtttttggtgccatttttatggcttatcgaatctcagctgagttgactttctggttcttagtcwtggttgccattttgaccattgtmattgtagggttatctcgattggtcaatcctytctacagtagtctcagaaagaaaacggaccaactggttcaggaaacgcgccagcaattgcaagggaygcgggttattcgtgcttttggtcaagaaaaacgagagttacagatttttcaaacccttaaccaagtttatgctagattacaagaaaagacaggtttctggtctagtttattaacacctctgacctatctgattgtcaatggaactcttctcgttattatctggcaaggctatatttcaattcaaggaggagtgctcagtcaaggtgctctcattgctcttatcaattacctcttacagattttggtggaattggtcaagctwgccatgytgatcamttccctcaaccagtcctayatctcagycaagmgaatcgaggargtctttgykgarkctccmgarrayatccattcagarttagaacaaaagcaagytaccagwgatmrggttttacaagtccaagaattgacytttacctatcctgatgcrgcccagccttctctgagakacatttcctttgatatgactcaaggacaaatyctwggtatcatygggggractggttctggtaaatcaagcttgrtkcaactcwtacttggactttatccagtaracaagggrarmattgacctttatcwaratggaykkagtcctcttaatttggagcartggmgrtcttggattgcctatgtrccwcaaaaggtcgaactctttaarggaacyattcgttccaacttgactytaggtttmaatcaagaagtrwctgaycargaactctggcargccttggarattgckcaagctaaggattttgtcagtgawaaggaaggactcttggatgctctagttgargcaggrggkcgaaatttctcaggtggacaaaaacaaagrytgtctatcgcmcgagcagtcttgcgccargctccgtttctcatcctagatgatgcracctcggcactggataccattacmgagtccaagctcttgaaagctatymgmgaaratytkccaaayaygagcttaatyttgatytctcaacgracytcracwytmcagatggcggaccagattctcctcttggaaaaaggtgagttgctagctgktggcaagcacgatgacttgatgmwawcyarycaagtctatygtgaaatcaatgcatcccaacatggaaargaggrctarctaatgaa

SEQ ID NO: 994 - DNA, 339 bp, Streptococcus pneumoniae
  misc_feature (1)..(339): tiling:Spneumo1:WAN024DHV; Cluster includes WAN0244GK spr0 462|blpS|15902506|NP_358056.1|469419..469757|+|339 bp|Regu latory protein|S.pneumoniae|R6|NC_003098.1|ORF|111
atgaaayatatgattattcagacrcagaaaacagtctataaagtaaacrtcgmcgatrtctactatatccaaacacatccaactaaagcccatacygtamagattgttacagaarargctagttttaatatgsttcaaaatttaagtaatcttgagaaccaatrtggggaaaccttgatgagatgtcatcgaaattgtttggtyaatcttgataaaktaaaatcgattgattttcaagaaagaatcctttttctyggagaagaaggtcaatacgctgtcaagtatgccagacgtcgctatagagaaattcgtcaaaaatggttgaaagarggagagtaa

SEQ ID NO: 995 - DNA, 1017 bp, Streptococcus pneumoniae
  misc_feature (1)..(1017): tiling:Spneumo1:WAN024CI6; Cluster includes WAN0241YT SP17 68||15901599|NP_346203.1|1672636..1673646|-|1011 bp|conser ved hypothetical protein|S.pneumoniae|TIGR4|NC_003028.1|OR F|011
atgaaaytacatttaacaaatttatacggcatggctggtgatagtacggttatcttagctcaaaatgctgttcaaaagatagctagtcaactgggatttagagaggttggtatttatttttacaacattgcttcagatagtccttctgaaatgaataagcgtctggatggtattatggccagtatctctattggggatattttagtctttcagtctccaacctggaatggytttgaatttgatcgtctcttgtttgayaagctaaaggatatgcaggtgaaaattatttgctttatccatgatgttgttcccctcatgtttgatagtaactattatctcatgaaagaytatmtgtayatgtataatctatcagatgttttgatagtgccrtcagagagaatgaaaacacgcctgatggaagaaggattgacgactaagaagattcttgttcaagggatgtgggatcatcctcatgatttatccttatacacccctgcttttaaaaaagaacttttttttgctggaagtttagagcgttttccagacttacaaaattggtctcaagatacgcctttgagagtattttcaaataaaggggaagctagttctagtgctagaartctcagcatcgaaggatggaaaaaagatgaggaattgttgctagaattatcaaagggtggatttggccttgtctggggaacccatcaaaatgagggagaaagtaaccaatactataccttgaatatatctcataaggtgagtacctatctracagcgggcatyccagtcattgtaccaagtagcttgtcaactgctraatttatagtagatcaaggcttrggctttrtggcgratagtctrgargargttcatgagatagttgataaaatgaatctacaagaatatcaagaaatgacgaatcgkatmaaracctttagytatttgytawmrgakrrmwayttcactaaaaagttattggtagatgcaatctatcacttgggaattgatctaactaat

SEQ ID NO: 996 - DNA, 624 bp, Streptococcus pneumoniae
  misc_feature (1)..(624): tiling:Spneumo1:WAN024DQN; Cluster includes WAN0242RH SP06 66||15900567|NP_345171.1|642282..642899|+|618 bp|conserved hypothetical protein|S.pneumoniae|TIGR4|NC_003028.1|ORF|0 10
atgaaaytratatttttgcatgggttagggcagtcagcagagtcttggaaagaagttcggaatctactgacagattatccttctgaggctatcgagttatttccttctggagttagtaactatcaacaagctaargagcgagtttatcagcacctagctcaagagacagaaccttttgttttgattggattgtccttaggtgctgccctgrcactagaactttccagttacgatttaccaaatcttcgagctttgattctgtcaggatgcccgcttaaattagcagggaatatcctattttatcttcaattgctgatttttaaactacttcccaaaagagtatttgaaaaacagggagcagacaagactcttatggtcggagtttctgaggarttgaagacacttgatttaacggatatagcaggracttrcycytatccaaccttactaatttgtggcagcaaagataaaccgaatcttagttctatgaaagctctccatagactgttaacagattcgcagtttcagatcattcctgatggccctcatgtcttgaataaggcaaaaccaaaggagtttgtagaaaagaccagaagtttccttgaattgctgaaactaactaat

SEQ ID NO: 997 - DNA, 1290 bp, Streptococcus pneumoniae
  misc_feature (1)..(1290): tiling:Spneumo1:WAN024C4J; Cluster includes WAN023Q1M cont ig_1216_4||||2914..4203|+|1290 bp|Glimmer 2.02 orf predict ion|S.pneumoniae|670|WAN01UEKW|ORF|000
atgaacaaaaaaagtcttttgaaatgcgctgttatcgggttagtagctacctttggtttagcagcttgtggaacatctaaggatgcaagcggtggaagttcttctggtaaagaagtattagaattttatcatgggtatcatcatagtgaagatgaatggcctgtagcgaagactatgcgagatttatatgataaatttgcagaagaacataaagatagtggtgtagaatttaaaccaacycctgtaaatggtgatttgaaggatataatgaataacaaggttgctagtggtgartttcctgatgtgattgacctagcaggtaatgcagtatcattagctgcgattgaacaaaaacttgttttagatttgaaaccatatatcgattcaaataagcttgaaaaaaatgttggtttgaactataagcaaaaccaaaaagatggaaaaatttatacagttcacgaacagttatttacaatgggtttgtggtacaacaaggacatatttgcaaaagcgggtgctaagacacctgatcagtggaatacttgggatgatttcactcaggcaatggcaagcattagaaaacaagatggagtgtatgcatttggtgctggagaaccatctattcgcttgtttaatacagtattaggaaccacagaaaatggacgtaaattattagayaarccattaacaaaagaaggaattgaatctaaagaatttgcagatgctttgaaaatggttatgaaagaaattcaagctaatggttctaagaatgctggtggcgatgccaatgcttattccaaagatttccaagaaggtaaatctgcagtmttctttaatggtgtgtgggcttctggtgagatgtctaagaacccaagtcttgcacctggaatctatcctgcaggtgtagcaattagttcttctggaggtggtatcactatctcaagtaagatgtctgaagctaaacaaaaactagctcttgagtttttgaaatatatgactagcgatgatgtacaaaaagtaatttttgaaaaagtaggagcaaatccttctaatgaaaatgtaaatgtaaaagaactttcagaaaagagttcagaagctactactaaaattttaggacaagcaatcactcaagttaagaatgcaaaagcagttgttccaactgtaagtgatgtttggggtggcgatgtacasacagctattatcaatgcattgacagaaagtgctgctgaaaatgtagatgttgatcaaaaagtaaaatctactcaagatgtgttgaaatcattgattggt

SEQ ID NO: 998 - DNA, 738 bp, Streptococcus pneumoniae
  misc_feature (1)..(738): tiling:Spneumo1:WAN024CF2; Cluster includes WAN02417Q |erm AM||BAA89222.1|||394 bp|adenine methylase|S.pneumoniae||AB 011258|ORF|000
atgaacaaaaatataaaatattctcaaaactttttaacgagtgaaaaagtactcaaccaaataataaaacaattgaatttaaaagaaaccgataccgtttacgaaattggaacaggtaaagggcatttaacgacgaaactggctaaaataagtaaacaggtaacgtctattgaattagacagtcatctattcaacttatcgtcagaaaaattaaaactgaayaytcgtgtcactttaattcaccaagatattctacagtttcaattccctaacaaacagaggtataaaattgttgggartattccttaccatttaagsacacaaattattaaaaaagtggtttttgaaagccrtgcgtctgacatctatctgattgttgaagaaggattctacaagcgtaccttggatattcaccgaacactagggttgctcttgcasactcaagtctcgattcagcaattgcttaagctgccagcggaatgctttcatcctaaaccaaaagtaaacagtgtcttaataaaacttacccgccataccacagatgttccagataaatattggaagctatatacgtactttgtttcaaaatgggtcaatcgagaatatcgtcaactgtttactaaaaatcagtttcatcaagcaatgaaacacgccaaagtaaacaatttaagtaccrttacttatgagcaagtattgtctatttttaatagttatctattatttaacgggaggaaataa

SEQ ID NO: 999 - DNA, 452 bp, Streptococcus pneumoniae
  misc_feature (1)..(452): tiling:Spneumo1:WAN024C6F; Cluster includes WAN0244LV spr0 271|rplM|15902315|NP_357865.1|272399..272845|+|447 bp|50S Ribosomal protein L13|S.pneumoniae|R6|NC_003098.1|ORF|111
atgaacaaaacaacatttatggctaaaccaggccaagttgaacgtaaatggtacgtagttgacgcaactgatgtaccacttggacgtctttctgcagtagttgctagcgtacttcgcggaaaaaacaaaccaacatttacaccacacactgatacaggtgacttcgtgattgttatcaatgctgaaaaagttaaattgactggtaaaaaagcaactgataaaatctactacactcactcaaaccacccaggtggattgaaacaaatctctgcaggtgaacttcgttctaaaaatgcagtacgtttgattgagaaatcagttaaaggtatgcttccacacaatacacttggacgcgctcaaggtatgaagttgaaagtatttgttggagctgagcacactcaygctgcacaacaaccagaagttcttgacatttcaggacttatctaactaat

SEQ ID NO: 1000 - DNA, 2160 bp, Streptococcus pneumoniae
  misc_feature (1)..(2160): tiling:Spneumo1:WAN024C4T; Cluster includes WAN024076 |pbp 1a||BAA32065.1|||1195 bp|penicillin binding protein 1A|S.p neumoniae||AB006869|ORF|000
  misc_feature (1821)..(1821): n is a, c, g, or t
atgaacaaacaaactatcctgcgaatagctaagtatgtgagtatctgcttcttaactttatttatcacagcagttatgctgggaggaggcatatttctctattacgtcagcaaagccccagccctatctgagagcaaattagtcgcaaccacgtctagtaagattttcgatagtaaaaacgaactsattgccgayytgggctctgaacgccgagtaaacgctcaggccaacgaaattcctactgatttggtcaaggctatcgtatcgatygaagaccatcgttttttcgatcatcgckgtgtcgataccatccgaattataggagcttttttacgtaacttacaaaacaactccctccagggaggatcwacccttacccaacaattaattaagttgacctatttctcaacttccacttctgatcagacyatttcacgtaaagcccaggaagcttggttggctrttcaattagarcaaaaagcmacmaarcaagaaatcctgacctactayrtsaayaaagtytacatgtctaacggwaactatggaatgcaracggctgcccaaaactattayggcaaagatttgcgagaactatcaytacctcaacttgccctactagcaggaatgccacagsswccgaatcaatacgatccctattctcatccagaagctgcccttgaccgtcgtaacttggtactttcagagatgaargrtcaaggctacatttctgccgaacagtatgagaaggctatyaatacycctattactgatggactccaaagtttgaaatcrgtcaatagctayccagcatatatggacaattatctcaaagaggttatcgaccaagtagaacaagaaactggctataaccttctaactactgggatggatgtttacacaaatgtagaycaagargctcaaaaacrtctgtgggatatctacaactccgatcaatacgtykcytayccwgacgatgawttgcaagtmgcwtctacsrtygtwgatgtttchaayggtaaagtcatygcmcarctwggwgcwcgycaycarkcaagtaaygtttcattyggtaccaaccargccgtwgaaaccaatcgtgactggggwtcwwcwatgaaaccaatcactgactatgctcccgctttagaatatggagtctatgactctactgcktctattgtacatgatgtyccttataactatcctggcactgatactccrctctacaactgggatcatgtctactttggaaacattacaatccagtatgctcttcaacaatcacgaaatgtcacagccgttgagactttgaataaggtcggtctagatagagctaaaaccttycttaatggtcttggtatcgactatccaagyatgcattaygcaaacgccatttcaagtaacacaactgaatccaacaaamartayggtgcaagtagtgaaaaaatggctgctgcytaygcygcytttgctaatggtggtatttaycacaaaccaatgtatatcaataaaatcgtcttyagtgatggtagygaaaaagaattttctgatgctggtacwcgrgctatgaaagaractactgcctatatgatgacygaaatgatgaaaactgttttrrctkacggaaymggacgkggwgcytacctaccatggcttccacaagcaggtaagacaggtacttctaactatactgaygamgaaattgaaaagtatatcaagaacactggytacgtagctccagatgaaatgtttgtrggktatacycgtaartatkcwatggctgtwtggacaggwtaywcraaycgtytvacwccwmtyrtnggvgatggyytymydgtygcwgsyaaagtytaycgytcwatgatracytacctktctgaagkrascaaycyrgargattggamwatrccagakggsytstayagaaatggagaattcgtatttaaaaatggtgctcgttctacgtggarctcacctgctccacaacaacccccatcaactgaaagttcaagctcatcatcagatagttcaacttcacagtctarctcaaccactccaagcacaaataatagtacgactaccratcctaacaataatacgcaacaatcaaatacaacccctgmtcaacamamtmasaatcctcaaccagcacaaccataa

SEQ ID NO: 1001 - DNA, 279 bp, Streptococcus pneumoniae
  misc_feature (1)..(279): tiling:Spneumo1:WAN024FSG; Cluster includes WAN0243UE spr1 261||15903304|NP_358854.1|1259148..1259426|-|279 bp|Conser ved hypothetical protein|S.pneumoniae|R6|NC_003098.1|ORF|1 10
atgaacaaacagtatagttacccactagatttgtcgtggagcactgaagaacttgcttcagtgctttctttttttaatgatgttgaagctgcctatgaaggcaaagtagaggctaaaaagttactggactcctataagggattcaaagcggtcgtgccaagcaagagcgaagagaaacgtttgggacgagaatttgaaacggttagtggctattcactttaccgagcagttcaggctgccaaagaaaaaggggaaggaaagatttctcttggaaagtaa

SEQ ID NO: 1002 - DNA, 2113 bp, Streptococcus pneumoniae
  misc_feature (1)..(2113): tiling:Spneumo1:WAN024C4S; Cluster includes WAN0241AV |pbp 1a||BAD00757.1|||2112 bp|penicillin-binding protein 1A|S.p neumoniae||AB119769|ORF|000
atgaacaaaccaacgattctgcgcctaatcaagtatctgaacattagcttcttaagcttggttatcgcagccattgtcttaggcggaggagtttttttctactacgttagcaaggctcctagcctatccgagagtaaactagttgcaacaacttctagtaaaatctacgacaataaaaatcaactcattgctgacttgggttctgaacgccgcgtcaatgcccaagctaatgatattcccacagatttggttaaggcaatcgtttctatcgaagaccatcgcttcttcgaccacagggggattgataccatccgtatcctgggagctttcttgcgcaatctgcaaagcaattccctccaaggtggatcaactctcactcaacagttgattaagttgacttacttttcaacttcgacttccgaccagactatttctcgtaaggctcaggaagcttggttagcgattcagttagaacaaaaagcaaccaagcaagaaatcttgacctactatataaataaggtctacatgtctaatgggaactatggaatgcagacagcagctcaaaactactatggtaaagacctcaataatttaagtttacctcagttagccttgctggctggaatgcctcaggcaccaaaccaatatgacccctattcacatccagaagcagcccaagaccgccgaaacttggtcttatctgaaatgaaaaatcaaggctacatctctgctgaacagtatgagaaagcagtcaatacaccaattactgatgggctacaaagtctcaaatcagcaagtaattaccctgcttacatggataattacctcaaggaagtcatcaatcaagttgaasaagaaacwggctataacctkctmacwactgggatggatgtytacacaaatgtagaccaagaagctcaaaaacatctgtgggatatytacaaywcmgaysaatacgtykcytayccwgaygatgahwtgcaagthgcwtckacbrtygtwgatgtwtcwaayggtaamgtyatygcmcaacttggwgctcgtcaycaagcaagtaaygtttcattyggyaccaaccargctgtggaraccaatcgtgactggggttctwstatgaaaycaatcactgactatgctcccgctttagaatatggagtctatgactctactgcwwctatwgtacatgatgttccttataactatcctggmactgatactccastctacaactgggatcatgkctactttggaaacattacaatccagtatgctcttcaacaatcacgaaatgtcacagccgttgagactttgaataaggtcggtctagatagagctaaaaccttyctyaatggwcttggtatcgaytatccaagcatgcwttatgcaaacgccatttcaagtaayacaacwgaatcyaacaaamartacggwgcaagyagtgaaaaratggcyrctgcytaygchgcytttkcyaayggtggwayttaccacaaaccmatgtatatcaataarrtcgtcttyagtgayggtagtgaaaaagaattttctgatgcyggtacwcgrgctatgaaagaractackgcctatatgatgaccgaaatgatgaaaacwgtyttakywtayggwaycggacgtggwgcytacctaccwtggcttccacaagcwggtaagacwggtacttctaactatactgaygamgaaatygaaaartatrtcaaraayrctggytacgtagctccagatgaawygtttgtwggttatacycgyaartatkcwatggctgtwtggacwgstwaytcraatcgtttaactccwrtcrthggagatgskttcmyagttgcwkctrmrgtytatcgytmamtratawcgtatctatcagaagatgactcawccwgragaytggacratgccagayggcttktmtagaaayggrgaattygtmttcmaraayaacgcaaagaacacatggaataattcagtaacacaacaaacacaaacagtagaaactccaagcacaaataatagtacgactaccaatcctaacaataatacgcaacaatcaaatacaacccctgatcaacaaaatcagaatcctcaaccagcacaaccataa

SEQ ID NO: 1003 - DNA, 2190 bp, Streptococcus pneumoniae
  misc_feature (1)..(2190): tiling:Spneumo1:WAN024C4Q; Cluster includes WAN0240VV |pbp 1a||AAF17257.1|||2160 bp|penicillin-binding protein 1A|S.p neumoniae||AF210747|ORF|110
atgaacaaaccaacgattctgcgcctaatcaagtatctgagcattagcttcttaagcttggttatcgcagccattgtcttaggcggaggagtttttttctactacgttagcaaggctcctagcctatccgagagtaaactagttgcaacaacttctagtaaaatctacgacaataaaaatcaactcattgctgacttgggttctgaacgccgcgtcaatgcccaagctaatgatattcccacagatttggttaargcaatcgtttctatcgaagaccatcgcttcttcgaccacagggggattgataccatccgtatcctgggagctttcttgcgcaatctgcaaagcaattccctccaaggtggatcaactctcactcaacagttgattaagttgacttacttttcaacttcgacttccgaccagactatttctcgtaaggctcaggaagcttggttagcgattcagttagaacaaaaagcaaccaagcaagaaatcttgacctactatataaataaggtctacatgtctaatgggaactatggaatgcagacrgcwgcycaaaactaytayggyaaarayytsagakaatytawswytacctcarytwgccytrctrgcwggaatgccwcaggcwccraaycaataygayccctattctcatccagaagctgcccttgaccgtcgtaacttggtactttcagagatgaaaggtcaaggctacatttctgccgaacagtatgagaaggctatcaatacycctattactgatggactccaaagtttgaaatcagtcaatagctayccagcmtatatggacaattatctcaaagaggttatcgaccaagtagaacragaaactggctataaccttctaactactgggatggatgtttacacaaatgtagaccaagargctcaaaaacrtctgtgggatatctacaactccgakcaatacgtctcttaccctgacgatgatttgcaagtcgcatcyacggtcgtagatgtttcmaatggtaaagtcatcgcccaacttggagctcgtcaccaagcaagtaacgtttcatttggkaccaaccaagctgtggaaaccaatcgtgactggggttcawcaatgaaaccaatcaccgattatgcacctgccatagaatacggtgtatatgattccactgcaactatggttaatgatattccttataactatccgggaacaagcacacctgtctacaactgggatcgagcatattttggtaatattactctgcaatatgcccttcaacaatctcgtaacgtacctgccgttgaracactaaacaaggttggtttagatagagccaaaaacttcctaaatggtttaggaattgactatccarryatkcaytaytcwaaygcyatwtcaagtaayacwacygaatcyaryaaacagtacggkgcaagtagtgaaaaaatggctrcygcytwtgccgcmttygcwaatggtggtatttaccacaaaccaatgtayatcaataaartygtctttagygatggtagygaaaaagaattytctgaysctggyacamgagcyatgaaagaaackacygcytayatgatgacmgaratgatgaaaacwgtcttgasttayggaactggwcgwrrtgcctayctkscttggctycctcargctggtaaracaggwacytctaactayacagaygakgaaattgaaaamcacatcaaramcwctsrmtwtgtagcwccwgatgaamtrtttgytggytatackcgtaartattcwatggctgtatggacaggytattckaaycgtytracwccwmtygtwggmratggycttmctrgtygcwgcyaaagtttaycgctcwatgatgacctacctgtctgaaggaagcaatccagaggattggaatataccagaggggctctacagaaatggagaattcgtatttaaaawtggtgctcgttctacgtggarctcacctgctccacaacaacccccatcaactgaaagttcaagctcatcatcagatagttcaacttcacagtctagctcaaccactccaagcacaaataatagtacgactaccaatcctaacaataatacgcaacaatcaaatacaacccctgatcaacaaaatcagaatcctcaaccagcacaaccataacatttatcayccagatttttctgggtga

SEQ ID NO: 1004 - DNA, 2158 bp, Streptococcus pneumoniae
  misc_feature (1)..(2158): tiling:Spneumo1:WAN024C4R; Cluster includes WAN0240VW |pbp 1a||AAF17258.1|||2154 bp|penicillin-binding protein 1A|S.p neumoniae||AF210748|ORF|000
  misc_feature (752)..(752): n is a, c, g, or t
atgaacaaaccaacgattctgcgcctaatcaagtatctgagcattagcttcttaagcttggttatcgcagccattgtcttaggcggaggagtttttttctactatgttagcaaggctcctagcctatccgagagtaaactagttgcaacaacttctagtaaaatctacgacaataaaaatcaactcattgctgacttgggttctgaacgccgcgtcaatgcccaagctaatgatattcccacagatttggttaaggcaatcgtttctatcgaagaccatcgcttcttcgaccacagggggattgataccatccgtatcctgggagctttcttgcgcaatctgcaaagcaattccctccaaggtggatcaactctcactcaacagttgattaagttgacttacttttcaacttcgacttccgaccagactatttctcgtaaggctcaggaagcttggttagcgattcagttagaacaaaaagcaaccaagcaagaaatcttgacctactatataaataaggtctacatgtctaatgggaactatggaatgcagacagcagctcaaaactactatggtaaagacctcaataatttaagtttacctcagttagccttgctggctggaatgcctcaggcaccaaaccaatatgacccctattcacatccagaagcagcccaagaccgccgaaacttggtcttatctgaaatgaaaaatcaaggctacatctctgctgaacagtatgagaaagcagncaatacaccaattactgatggactacaaagtctcaaatcagcaagyaattaccctgcttacatggataattacctcaaggaagtcatcaatcaagttgaagaagaaacaggctataacctgctcacaactgggatggatgtctacacaaatgtagaccaagaagctcaaaaacatctgtgggatatttacaatacagacgaatacgttgcctatccagacgatgaattgcaagtygcttctaccattgttgatgtttctaacgggaaagttattgctcagttaggttctmgtcaccaatcaagcaatgtttccttcggaatyaaccaagctgttgaaaccaaccgtgactggggttctgccatgaagccaatcacagactatgctcctgccttagagtatgacatctacgactcaactgcttcgattgtacatgatgttccttataactatccaggtactgatactcccctctacaactgggataaagtctactttggaaatattacaatccagtatgcacttcaacagtcacgtaatgtcacagccgttgagactttgaataaggtcggtctagatagagctaaaacctttcttaatggtcttggtatcgactatccaagcatgcattatgcaaacgccatttcaagtaatacgactgagtcaaacaaaaagtacggagcaagtagtgagaaaatggctgctgcttacgctgcttttgctaacggtggtatctaccataaaccaatgtatatcaacaaaatcgtctttagcgatggtagctcaaaagaatacgctgatcctggtactcgtgccatgaaagagacgaccgcctatatgatgacagaaatgatgaagactgtcttggcatacggaacgggtcgtggtgcttatctcccttggctacctcaagctggtaagactggtacatcaaactatacagatgatgaaattgaaaactacatcaaaaatactggttatgtagctccagmcgaaatgtttgttggttatactcgcaaatattcaatggcggtatggacaggttactcaaaccgcctgactcctatcgttggtgatggcttctatgttgcagctaaggtttaccgttcaatgatgacttatctgtctgaggataacaaccctggcgactggactatgccagaaggtctctatcgaagtggtgagttcgtctttaaaaaaggtgctcgttctgcatggactgctcctsstccgcaacaggccccaacaccagaaagttcgagctcgacatcagaaagttcaacttcacagtcaagctcaactactccaagcacgaataatagtgcaaacaataataccaataaccagcaaccaaatacaacgsctggtcaacaaaaccagaaccaaamtmasamtmctcaaccagcac

SEQ ID NO: 1005 - DNA, 2165 bp, Streptococcus pneumoniae
  misc_feature (1)..(2165): tiling:Spneumo1:WAN024C4U; Cluster includes WAN0240E5 |pbp 1a||AAD43066.1|||2160 bp|penicillin-binding protein 1a|S.p neumoniae||AF139883|ORF|001
  misc_feature (1698)..(1698): n is a, c, g, or t
  misc_feature (1920)..(1920): n is a, c, g, or t
atgaacaaaccaacgattctgcgcctaatcaagtatctgagcattagcttcttaagcttggttatcgcagccattgtcttaggcggaggagtttttttctactaygttagcaaggctcctagcctatccgagagtaaactagttgcaacaacytctagtaaaatctacgacaataaaaatcaactcattgctgacttgggttctgaacgccgcgtcaatgcccaagctaatgatattcccacagatttggttaaggcaatcgtttctatcgaagaccatcgcttcttcgaccacagggggattgatwccatccgtatcctgggagctttcttgcgcaatctgcaaagyaattccctccaaggtggatcaactctcacccaacagttgattaarttgacttacttttcaacytcsacttccgaccagactatttctcgtaaggctcaggaagcttggttagcgattcagttagaacaaaaagcmaccarrmargaaatcttgacctactatataaataaggtctacatgtctaatggmaactatggaatgcagacagcagctcaaaactactatggtaaagacctcaataatttaagtttacctcagttagccttgctggctggaatgcctcargcaccaaaccaatatgacccctattcacatccagaagcagcccaagaccgccgaaacttggtcttatctgaaatgaaaaatcaaggytacatctctgctgaacagtatgagaaagcagtcaatacaccaattactgatggactacaaagtctcaaatcagcaagtaattaccctgcttacatggataattacctcaaggargtcatcaatcaagtwgaasaagaaacwggmtataacctkctmacwactggratggatgtytacacaaatgtagaccaagaagctcaaaaacatctgtgggatatytacaaywcmgaysaatacgtykcytayccwgacgatgawttgcaagtcgcwtctacsrtygtwgatgtttchaayggtaaagtcatygcmcarctwggwgcwcgycaycarkcaagtaaygtttcmttyggwayyaaccargchgtrgaaacmaaycgygactggggwtcwdcwatgaaaccaatcacygaytatgchcchgcywtagaatayggwgthtatgaytcyactgcwwctatkgtwmatgatrtyccttataactatcckggmacwrryacwccwstctacaactgggatmrwgymtayttyggwaayattashmtscartatgcycttcaacaatcwcgwaaygtbmcwgcmgttgaracwytraayaaggtyggtytagrtmgagcyaaaacyttcctwaatggtcttggwatygaytayccaagyatdcaytaykcwaaygcyatttcaagtaayacwachgartcyadyaaamadtayggdgcaagyagtgaraaratggctgckgcytaygcygchttygchaayggygghayttayyayaaaccmatgtayatcmataarrtygtcttyagtgayggwagyraraaagarttytcwratgyhggwacwcgwgcyatgaargaracdrcwgcytayatgatgacygamatgatgaaaacwgtyttrrcwtayggaachggdcgtggwgcytaycthccwtggytwbcdcaasswggtaaracaggwacytctaactayacwgaygangaartygaaaavyayatcaagaryactggytaygtagctccagatgaaatgtttgtdggbtatacycgtaartatkcwatggctgtwtggacwggwtaytcraatcgtytaactccwatyrtyggagatggtttcctwgttgcdgsyaargtytatcgytmwmtratrwcbtayctdtcwgaagrwasymawccwgrrgaytggamdatrccwgabggvstnkwmmgaaryggrgaattygtattyaaaaatggwgctcgyycwayrtggarctmmccykctmcwcaacaayccycawcarctgaaagttcaagctcatcatcagatagttcaacttcacagtctarctyaaccactccaagcacaaataatagtacgactaccratcctaacaayaatacgcaacaatcaaatacmaccccyvaycamcwaawtcagaatcctcaaccagcacaaccataactaat

SEQ ID NO: 1006 - DNA, 2154 bp, Streptococcus pneumoniae
  misc_feature (1)..(2154): tiling:Spneumo1:WAN024C4L; Cluster includes WAN0241BD |pbp 1a||BAD00775.1|||2154 bp|penicillin-binding protein 1A|S.p neumoniae||AB119787|ORF|000
atgaacaaaccaacgattctgcgcctaatcaagtatctgagcattagcttcttaagcttggttatcgcagccattgtcttaggcggaggggtttttttctactacgttagcaaggctcctagcctatccgagagtaaactagttgcaacaacttctagtaaaatctacgacaataaaaatcaactcattgctgacttgggttctgaacgccgcgtcaatgcccaagctaatgatattcccacagatttggttaaggcaatcgtttctatcgaagaccatcgcttcttcgaccacagggggattgataccatccgtatcctgggagctttcttgcgcaatctgcaaagcaattccctccaaggtggatcaactctcacccaacagttgattaagttgacttacttttcaacctcgacttccgaccagactatttctcgtaaggctcaggaagcttggttagcgattcagttagaacaaaaagcaaccaagcaagaaatcttgacctactatataaataaggtctacatgtctaatggcaactatggaatgcagacagcagctcaaaactactatggtaaagacctcaataatttaagtttacctcagttagccttgctggctggaatgcctcaggcaccaaaccaatatgacccctattcacatccagaagcagcccaagaccgccgaaacttgctcttatctgaaatgaaaaatcaaggttacatctctgctgaacagtatgagaaagcagtcaatacaccaattactgatggactacaaagtctcaaatcagcaagtaattaccctgcttacatggataattacctcaaggaagtcatcaatcaagttgaasaagaaacwggmtataacctkctmacwactgggatggatgtytacacaaatgtagaccaagaagctcaaaaacatctgtgggatatytacaaywcmgaysaatacgtykcytayccwgacgatgawttgcaagtcgcwtctacsrtygtwgatgtttcwaayggtaaagtcatygcccaacttggagctcgtcaccaagcaagtaacgtttcatttggtaccaaccaagctgtggaaaccaatcgtgactggggttctgctatgaaaccaatcaccgattatgcacctgccatagaatacggtgtttatgattccactgcaactatggttaatgatattccttataactatccgggaacaagcacacctgtctacaactgggatagagcatatttcggtaatattactctgcaatatgctcttcaacaatcacgaaatgtcacagccgttgagactttgaataaggtcggtctagatagagctaaaaccttccttaatggtcttggtatcgactatccaagcatgcattatgcaaacgccatttcaagtaatacaacagaatctaataaacaatacggagcaagtagtgaaaaaatggctgctgcttatgctgcctttgcmaayggtggmayttacyayaaaccmatgtatatcmataargtcgtcttcagtgayggwagtraaaaagarttytcwratgtmggwacwcgwgcyatgaargaaacracwgcytayatgatgaccgamatgatgaaaacwgtcttgrcwtayggaactggkcgtggagcctatctyccwtggytwsckcaagctggtaaracaggwacytctaactayacagatgakgaarttgaaaamcacatcaagaacactggctatgtagctccagatgaaatgtttgttggttatactcgtaagtattctatggctgtatggacaggttattcgaatcgtttaactcctatcgttggagatggtttcctagttgcagctaaagtttatcgctcwatgatracstayctrtcwgaagrwasymatccagargaytggamkatrccagasggrctytwcagaaayggrgaattygtattyaaaaatggagctcgcccaatatggactgaaccctctactcaacaatcctcaacagctgaaagttcaactacacaggcaagtactacggttggtcaacaacccaataatgctccagcaactgatcctaatcaaggacaagctgttcaaccgacacaaccagtacaaccaacgccacaaaatccacaagttcaacagcaaccacaacagtaa

SEQ ID NO: 1007 - DNA, 1511 bp, Streptococcus pneumoniae
  misc_feature (1)..(1511): tiling:Spneumo1:WAN024G9X; Cluster includes WAN024479 spr0 797|pykF|15902841|NP_358391.1|800243..801748|+|1506 bp|Pyr uvate kinase I; fructose-stimulated|S.pneumoniae|R6|NC_003 098.1|ORF|221
atgaacaaacgtgtaaaaatcgttgcaactttgggtcctgcggtagaaatccgtggtggtaaaaaattcggtgaggacggatactggggtgaaaaacttgatgttgaagcttcagctaaaaacattgctaaattgattgaagctggtgctaacacattccgattcaacttctcacacggcgaccaccaagaacaaggtgagcgtatggcaactgttaaacttgcggaaaaaattgcaggtaaaaaagttggtttccttcttgayacaaaaggacctgaaatccgtacagaattgttcgaaggtgaagctaaagaatattcatacaaaactrgtgaaaaaattcgtgttgcaactaaacaaggaatcaaatcaactcgtgaagtgattgcgttgaacgttgctggtgctcttgatatctatgatgatgttgaagttggtcgtcaagttttggttgacgatggtaaacttggtcttcgtgtggttgctaaagatgatgmaactcgtgaatttgaagttgaagttgaaaacgatggtatcmtcgctaaacaaaaaggtgtgaacatccctaacactaaaattcctttcccagctcttgctgaacgcgataacgacgatatccgtttcggtcttgaacaaggtatcaacttcatcgcaatttcattcgtacgtactgcaaaagatgtgaacgaagttcgtgcaatctgtgaagaaactggaaacggacatgttcaattgttcgctmaaatcgaaaaccaacaaggtatcgataacttagaygaaatcatcgaagcagctgatggtattatgattgctcgtggtgatatgggtatcgaagtaccgttcgaaatggttccagyttatcaaaaaatgattatcaagaaagtcaatgctgcaggtaaagttgttatcactgcaacaaacatgcttgaaacaatgactgaaaaaccacgtgcaactcgttcagaagtatcagaygtattcaacgctgttatcgacggaactgacgctacaatgytgtcaggcgagtctgcaaacggtaaatacccactcgagtcagtaactacaatggctacaatcgacaagaacgctcaagctcttcttaatgaatacggacgtcttgattcagattcatttgagcgtaactctaagacagaagtaatggcttctgctgttaaagatgctactagctcaatggatatcaaattggttgtaactcttactaagacaggtcatactgcacgtttgatttctaaataccgtccaaatgctgacatcttagcattgacatttgacgaattgacagaacgtggcttgatgttgaactggggtgttatcccaatgttgacagatgctccatcttcaactgacgatatgttcgaaatcgctgaacgtaaagcggtagaagcaggtctcgttgagtcaggcgatgatatcgttatcgttgctggtgtgccagtaggagaagctgttcgcacaaacacaatgcgtatccgcacagtacgttaactaat

SEQ ID NO: 1008 - DNA, 2165 bp, Streptococcus pneumoniae
  misc_feature (1)..(2165): tiling:Spneumo1:WAN024C4V; Cluster includes WAN0244K9 spr0 329|pbpA|15902373|NP_357923.1|332863..335022|-|2160 bp|Pen icillin-binding protein 1A|S.pneumoniae|R6|NC_003098.1|ORF |110
  misc_feature (1619)..(1619): n is a, c, g, or t
  misc_feature (1620)..(1620): n is a, c, g, or t
  misc_feature (1647)..(1647): n is a, c, g, or t
  misc_feature (1800)..(1800): n is a, c, g, or t
  misc_feature (1809)..(1809): n is a, c, g, or t
  misc_feature (1821)..(1821): n is a, c, g, or t
atgaacaaacmaackatyctgcgmmtaryyaagtatstgagyatywgcttcttaasyttrkttatcrcagcmrttrtsytrggmggaggmrtwtttytctaytaygtyagyaargcycctagcctatcygagagyaaaytagtygcaacmacbtctagtaaaatctacgacaataaaaatcaactcattgctgacttgggttctgaacgccgcgtcaatgcccaagctaatgatattcccacagatttggttaargcaatcgtttctatcgaagaccatcgcttcttcgaccacagggggattgataccatccgtatcctgggagctttcttgcgcaatctgcaaagyaattccctccaaggtggatcarctctcacycaacagttrattaarttgacttacttttcaacytcgacttccgaccagactatttctcgtaaggctcaggaagcttggttagcgattcagttagaacaaaaagcaaccaarcargaaatcttgacctactatataaataaggtctacatgtctaatggbaactatggaatgcaracrgcwgcycaaaactaytayggyaaagayytcrakaayttawswytacctcarytwgccytrctrgcwggaatgccwcaggcwccraaycaataygayccctattcwcatccagaagcwgcccwwgaccgycgwaacttggtcttatcwgaratgaaarrtcaaggytacatytctgcygaacagtatgaraaagcagtcaayacaccaattactgatggrctacaaagtctcaaatcagcragtaattaccctrcttacatggataattayctcaaggargtcatcaatcaagttgaaraagaaacwggmtataacctdctcacaactggratggaygtytacacaaatgtagaycaagargctcaaaaacatctgtggratatytacaaywcmgaysartacgtbkcytayccwgaygatgawttgcaagthgcwtcyacbrtygtdgatgtwwcwaayggtaaagtcattgcycarytwggmgchcgycaycarkcaagtaaygtwtchttyggmayyaaccaagchgtdgaaacmaaycgygactggggwtcaaswatgaaaccvatcacagaytatgctcctgccttggartacggtrtctacgaktcaactgcyactatcgttcacgayrarccctataaytaycctggvacwratayyccwstytayaactgggatmrkgkctactttggmaayatyacmwtscartaygcyctkcaacaatcrcgwaaygtbmcagccgtdgaracdytraayaaggtcggdctmraymghgcyaaracyttyctwaayggtcthggwatcgactayccaagymtkcaytaykcaaaygccatttcaagtaacacaacygartcmraymaamartayggagcaagtagtgaaaagatggctgctgcttacgctgcctttgcaaatggtggmacttactataaaccaatgtatatccataaagtcgtcttyagtgatggragtsaaaaagarttytctratgyyggdactcgbgcyatsaargaarcdacwgcytayatgatgacmgamatgatgaaaacwgtcytrrnntayggaabhggwcgwrrwgcctayctnscwtggythscdcargcwggtaaracaggwacytctaactayacwgaygadgaaattgaaaavyayatcaaramcwctsrhtwygtarcwccwgaygaamyrtttgydggbtatacbcgyaartatkcwatggctgtwtggacwgghtaywcnaaycgtytnacwccwvtyrtnggvratggyytymhrgtygcwgcyaargtttaycgctmwmtratracstayctrtcwraagrwasymatccagargaytggamkatrccagabgrrctytwcagaaayggrgaattygtattyaaaaatggwgctcgttctacgtggarctcacctgctccacaacaacccccatcaactgaaagttcaagctcatcatcagatagttcaacttcacagtctarctcaaccactccaagcacaaataatagtacgactaccratcctaacaataatacgcaacaatcaaatacaacccctgatcamcaaamtmasaatcctcaaccagcacaaccataactaat

SEQ ID NO: 1009 - DNA, 231 bp, Streptococcus pneumoniae
  misc_feature (1)..(231): tiling:Spneumo1:WAN024GEI; Cluster includes WAN0244CK spr0 606||15902650|NP_358200.1|619165..619395|-|231 bp|Hypothet ical protein|S.pneumoniae|R6|NC_003098.1|ORF|110
atgaacaaacttcaacaaccagcaagagcaaggattgctaaaccaaatccgatacctgttgcaagtccagctgaaaaatcaytaactggtactgaaatttcttcaatttcctcaaataaaaagttatcttgcatgattatcactccctatctttttaacaacaggctactccaattaagagaactaccccagttccaagtaaaacttcccccaaaaattcaccatctgtag

SEQ ID NO: 1010 - DNA, 1233 bp, Streptococcus pneumoniae
  misc_feature (1)..(1233): tiling:Spneumo1:WAN024FSX; Cluster includes WAN02407S |cps 23fI||AAC69532.1|||1233 bp|Cps23fI|S.pneumoniae||AF057294| ORF|001
atgaacaaatatgaagaaagatatcaagaaaatttatctaagaatgatttttataaattaattaataagagttacttatcagataaagaacttcaagtacaacaagtwaaagctgggatagtcttaccaccaaaggcatttgaaacaaaattatcaaataaacttggcctacaaaaatctttgcatggaaagggtggagttgtagactcaaatggaaattacattgaactatctgcacaaaaagcagtcgggatgagaaatagagtctatggtccgtataaaattaattacgataatctgccaattagaaatgaaaaagtaatctatttgaactatttcatcaaacaatggggacattttttactggatgttgttggaaggttatggtatccattgctgcaggatartgatactaagttagtctatacctgctatgctggaacagaaacaaagattgagggaaactatttagagtttttgaagcttctcggcatagatcaatcacgtttaatcatgataaactgtcccactcagttctcagaagtcattattcctgaaagctccattttaccggggggatattatacaaaagagtataaacaactattcagttcggtagtagaaaatattaaattggacaagtatgatgtgaatgctaaaatgatttattgttcgaggtctaaattagggattgctaaaagtaaagaatttggcgaagacggtattgaggggatttttaaacaaaatggctayacatctgtttacatggaaacaatgtctttggaagagcaaataaaaaccttattatcggctaagacaatagtattaacgagtggttcgttagcacataatcttttatttgtaaataaagatattgatgtttttattttgaataaaacctatagagtaaatctccatcaatttttaataaacgagatctcagatgctacagtaagatttgtagatatctatcgatcacctttaccgattttatacggatatggaccatktttaatggatsttacaaaacctttggctaatttmttggacgataatgaatttgtatatgaaaaaggtactgttttaagtaaaaaagattattttaaatactatttgaaatggttgtggagttatagattctttttatttaggttaaatggtattaaagaaggaaatagtgaattcgagaagagttttaagataattaggagatactataaaacaggacgatag

SEQ ID NO: 1011 - DNA, 578 bp, Streptococcus pneumoniae
  misc_feature (1)..(578): tiling:Spneumo1:WAN024CYZ; Cluster includes WAN0243CA spr1 915||15903956|NP_359506.1|1894119..1894691|+|573 bp|Hypoth etical protein|S.pneumoniae|R6|NC_003098.1|ORF|111
atgaacaaattaatgaaatttatttcggtttttttgacgtcaattgtgttaattgtatcagcgattccaagtgtttcagctgtatacgcttctgaacaagtatcrcaaattgaaacaaatatggaacttcaacctgtcacttctctaacagaagaacaaatcaatacacttgcaaacgaaatccaatcttttcatccagacgtctcacaacaatggatcaaagaagtaattaaccgacaattacaaggcgattatacaatcccacctacataytctccatttagagcagyttggcaaggtattacagttaatcaaatgggtgctctattagatactgcaatagctttagcmttaggaggaactactgcaggccttgcaaatctaattaaagtaaaaggaaaacatgyagcaaaaagtgctattcgttcagcaatttctagatatctaggtagttggtttgtaaatgatgttgctttagaatycgctatgaatttattatcaccggggacttatttagcacaattatgggataaaaatgatgccattcctaacaacrgaaggattaacttttaactaat

SEQ ID NO: 1012 - DNA, 1850 bp, Streptococcus pneumoniae
  misc_feature (1)..(1850): tiling:Spneumo1:WAN024GGJ; Cluster includes WAN0244EB spr0 543|uvrC|15902587|NP_358137.1|543591..545435|+|1845 bp|Exo nuclease ABC - subunit C|S.pneumoniae|R6|NC_003098.1|ORF|2 21
atgaacaacttgattaaatcaaaactagagctcttgccgaccagccctggttgctacattcataaggataaaaatggcaccattatctatgtaggaaaggctaaaaatctgcgtaatcgagtacggtcctattttcgtggaagtcatrataccaagacagaggctctggtgtctgaaattgtggattttgaatttatygtyackgagtcyaatattgaggcrcttctsctrgaaatyaacctgatcaaggaaaayaagcccaagtacaatatcatgctcaaggatgayaagtcytatcctttyatcaaaatcaccaatgagcgctatccacgcttgatyatyactcgtcaggtcaaaaaggacggwrgtctttattttggmccytatccmgatgtgggggcagccaatgaaatcaagcgrytkctrgatmggatwttcccttttcgwaartgtaccaacccgccctctaaggtctgtttttattaccatatcggycartgyatggcccacaccatctgtaagaaggatgagryttatttcaagtctatggcycaggaggtktctgattttctgaaaggkcaggatracaaaatcatygatgakctmaagrgyaaaatggcagyrgcagcmcarastatggagtttgaacgtgcggcggaataccgtgacctgattcaggctattggaacgcttcgaaccaagcaacgggtcatggckaargatytscaaaatcgcgatgtctttggctactatgtggataagggctggatgtgtgtgcaggttttctttgtycgtcagggyaagctyatcgagcgcgatgtcaatctcttcccctacttcaatgatccagatgaggatttyttgacctatgtrggacaattctatcaagaaaaatcycayctagttcccaatgaggtactgattccgcargatattgacgaagargctgtcaaggcyttggtggattccaagattcttaagcctcaacgtggagagaaaaarcarctggtcaatytagcyataaaaaatgcycgtgttagyctagagcagaagttcaayctgctagaraaatctgtcgaraagacycaaggagctattgaaaatctaggrcgyttgctycaaatcccraccccagtwcgyatcgagtccttcgataactcyaayatcatgggaactagycctgtttcrgcyatggtggtctttgtcaacggyaarcckagtaagaaggattaccgtaagtayaaratmaaracsgtwgtyggrccagacgactatgccagyatgmgagaggtcattcgcagacgctatggtcgagtacagcgtgaggctttgactcctccagatttgattgtgattgatggggggcaaggtcaagtcaatatygctaagcargtyatccaagargaactgggcttggatattccaattgcwggkctrcaaaagaatgataagcaccaaacccatgaattgctctttggagatccgctkgargtggtggayttgtctcgcaattctcaggaatttttcctcctccaacgcatycaagatgaggtscaccgctttgcyatyacyttccaccgccaactgcgctccaaaaattctttctcatctcaattggatgggattgayggtctgggacctaaacgcaagcaraatctyatgargcayttcaagtctytgaccaaaatcaaggaagccagtgtggatgagattgtcgaagttggrgtaccwagagymgtwgcagaggctgtgcaaasmaagttgaacccgcaggsagaarycttgyytcaagtrgcrgaagaaagagtagattaccaaacggaaggaaaccacaatraaccataactaat

SEQ ID NO: 1013 - DNA, 543 bp, Streptococcus pneumoniae
  misc_feature (1)..(543): tiling:Spneumo1:WAN024GHI; Cluster includes WAN023LXJ 3142 52_987||||517226..517768|-|543 bp|EGAD orf prediction|S.pn eumoniae|R6|NC_003098.1|ORF|110
atgaacaagggcatctgtcttatcaaagaggttaacaaaggcaccaaatttctcgatacgaacgactttagcacggtaaacttcatccactttggcttcacgaaccaaaccagcaataatttctttggcacggttaatagcatcttggtcactagagtagatagacacatttccttcttcgtctatatcaatcttaacacctgtttcagcgataatcttgtcgatggtttctccacccttaccgatgacaatcttaatcttgtccacatcaatcttgatcgtatcaattttcggagcagttggagccaattctggacgaacttctggaatggttgcttcaatgacatcaaggatttcaaaacgcgctttcttggcttgagcaagagcctccgtcaagatttctgcagtaatcccttgaatcttgatatccatttgaagggctgtaatcccatcacgagtacctgcaaccttgaagtccatatctccaaagtgatcttccaaaccttggatatctgtcaatactgtgtagttatttccatctga

SEQ ID NO: 1014 - DNA, 792 bp, Streptococcus pneumoniae
  misc_feature (1)..(792): tiling:Spneumo1:WAN024FUU; Cluster includes WAN0243VE spr1 225|licD1|15903268|NP_358818.1|1222625..1223470|-|846 bp|L icD1 paralog|S.pneumoniae|R6|NC_003098.1|ORF|111
atgaacaatatgactgatttaaaagcaattcaggctcgtagtctggagatggctgaatattttgtggccttttgtaaagaacatgatttgctctgttatctctgtggcggaggcgctattggtrcccttcgaaacaagggatttattccttgggacgacgacctagacttttttatgcctcgtaaagattatgagaaattagcagaattatggcctcgttatgcagatgaacgttatttcttgtcaaagagtcacaaggattttgttgatcgtaatctttttattaccattcgtgacaagraaaccacctgtatcaagccttatcagcaggatttggatttgccacatggtctggccttggatgttttgcctttggattattatccgaaaaatccagctgagcggaaaaaacaggttcgttgggccttgatttattcactcttttgtgcgcaaactattccagaaaagcatggtgmtctcatgaaatggggaagtcgcattttactgggtttgactccaaaatctctcygttatcgcatctggaaaaaagctgagaaagaaatgactaagtatgatttggctgattgtgatggcattacagaattatgctcaggtcctggctacatgagaaacaagtacccaatcacatcttttgaagacaatcttttcttkccatttgaaggaacagagatgcctattccaatcggctatgatgtctatctcagaactgcttttggggattatatgacgcctccaccagcagacaagcaggtaccgcatcatgatgctgtc

SEQ ID NO: 1015 - DNA, 344 bp, Streptococcus pneumoniae
  misc_feature (1)..(344): tiling:Spneumo1:WAN024D6W; Cluster includes WAN0243P0 spr1 455|phnA|15903498|NP_359048.1|1437827..1438165|-|339 bp|Re quired for expression of the phosphonate utilization pheno type in E. coli|S.pneumoniae|R6|NC_003098.1|ORF|111
atgaacaatttaccaaattgtccaaaatgtaactcagagtatgtctacgaagacggtgccctactggtttgcccakagtgtgctcatgagtggaatcctgctgaagttgcagaagtagaagaaggtcttgtcgctatcgatgccaacggaaataaattgrctgatggtgatacagtaactctcatcaaggacttgaaagtaaaaggtgcgccaaaagatttgaaacaagggacgcgcgtgaaaaatatccgcatcgtagaaggcgaycacaatatcgactgtaagattgatggttttggtgccatgaaacttaaatcagagtttgtgaggaagatttaactaat

SEQ ID NO: 1016 - DNA, 201 bp, Streptococcus pneumoniae
  misc_feature (1)..(201): tiling:Spneumo1:WAN024CCI; Cluster includes WAN023RM0 cont ig_1575_13||||3424..3624|-|201 bp|Glimmer 2.02 orf predict ion|S.pneumoniae|670|WAN01UDHA|ORF|000
atgaacacagaacagcttaaccaagccttacaaatgacaattagtgaaatgtcaacaacttcaacarattcgatgattacaagtaatatcttgagtattcagttgaatgagcaaagggaagaraatcaaagacttcaagcacgagtggatgagctggaagctctgcttgatgaacaaactaaaccagcagacaaaggagaa

SEQ ID NO: 1017 - DNA, 2123 bp, Streptococcus pneumoniae
  misc_feature (1)..(2123): tiling:Spneumo1:WAN024FB5; Cluster includes WAN0243I9 spr1 699|treP|15903741|NP_359291.1|1668093..1670210|-|2118 bp|P hosphotransferase system, trehalose-specific IIBC componen t|S.pneumoniae|R6|NC_003098.1|ORF|211
atgaacacctgtatctattttaccatacaagtgctagaaaatttacaaaaaaacaccctttttataccaaacaagttgcagacaagtttggtatcgtttacaatatacttatcaaatcaaacttgctttgacragtataaggagaatcaaatgggaaaatttgaacaagaagccaaagatytgcttcaggcaatyggaggyaaagaraatgtgactgccgtmacycactgtgcgacacggatgcgstttgttttargagatgataagaaggctaatgttaaagctatcgagtcaattccagctgttaaaggaacytttacaaatgcaggtcaatttcaggtaatcattggaaatgacgtgcccatcttttataatgattttacagccgtttcaggtattgagggtgtttccaaagaagcagccaagtctgcagctaagagtaatcaaaacgtggtccaasgtgttatgaccactctggcggaratytttactccgattattccagccttgatwgtyggwggattgatcctcggtttccgtaatgtcttggaaggtgtccattggtcgatgttggatggcaagaccatcacagaatcctctcagttttgggcaggkgtyaatcacttcctctggttgcctggtgaagctatcttccagttcttaccagtagggattacttggtctgtttctcgtaagatgggaaccagccaaattttgggaattgttctcggaatctgtttggtatcgcctcagttgctcaatgcctatgcggttgcttcaacgccagcagctgatatcgcrgcaaactgggtttggaattttggytattttactgttaatcgtatyggttaccaagcccaagttatcccagccttrcttgcaggtttgagtctgtcttatcttgaaatyttytggcrcaarcatatcccagaagtcatttcyatgatttttgtacctttyttgtcattgattccagccttgattttggctcayactgtyttgggrccaatcggttggacaattggacaaggactttcatcagttgtmttggcaggtttaackggtccagttaaakggctcttcggtgcaatttttggygccctctacgctccatttgtcatcacaggtctgcaccayatgaccaatgccattgatacacaattgattgcggatgctggtggcactgccctmtggccwatgattgctctttctaatattgctcaaggmtcagccgtgtttgcctattatttcatgcatcgccatgatgagcgtgaggctcaggtttcacttcctgcaaccatttcagcctatctcggtgttacagaaccagctctttttggggttaacgtaaaatatatttatccatttgttgctgggatgactggttcagcccttgcaggcatgttatccgttayttttaatgtaactgcggcttctattggtatcggtggtttgccaggtattctctctattcaacctcaatacatgctgccatttgcaggaactatgctagttgcgattgttgttccaatgctcttgactttcttcttycgcaaggctggtctcttyacaaaaayagagggcgatacgaacttgcaggcagaattcgttgctcaagaagaagcagaatttgtgarccatgaacyagtagaacttacttcggtagaaattatcagcccactaactggccaagtgaaagaattgagtcaagcgacggatcctrtttttgcatcaggtgtcatggggcaaggtctrgtcattgaaccaagccaaggtgagttgacctctccagttaatggracagtgacggttcttttccctaccaagcatgccatcggcattgtctctgacgagggagttgaattgctcatccacatcggtatggatacagtaggtcttgatggcaaaggttttgaaagtcttgtagtccaaggagatcacgttayagttggycagcaactgattcgttttgatatggatgtcattaaggctgcaggtctggtgacagaaactcctgttatcatcaccaaccaagatgcttatacagcgactattmcyggaacttatccgacaacgatycaagctggagcatctctcatggtcgctacacgaatctaactaat

SEQ ID NO: 1018 - DNA, 653 bp, Streptococcus pneumoniae
  misc_feature (1)..(653): tiling:Spneumo1:WAN024FO4; Cluster includes WAN0243SR spr1 320||15903363|NP_358913.1|1307118..1307765|+|648 bp|Conser ved hypothetical protein|S.pneumoniae|R6|NC_003098.1|ORF|1 11
atgaacactagtcttaaactcagcaaacaactcagttttggagaggagattgctaatagcgtgacccatgctgtgggtgcagtcatcatgcttatcttgctgcctatttcatccatctatagttatgaagcacacggatttttatcctctatcggcgtttccattttcgtcatcagtctctttctcatgttcctatcatccaccatttatcactctatggcctatggttcgacccacaaatatgttttgcgaatcattgaccattctatgatttacgttgccattgccggctcatacacgcccgttgtcttgaccttgatgaataactggtttggctatctgattattgtcatccaatggggaacgaccatctttggtattctctataaaatctttgctaaaaaggtcaatgagaaatttagccttgctctttacctgattatgggctggttggttctggctatcattcctgccattatcartcaaacgacacccgttttytggagtctcatggtaactggcggactctgttatacagttggagctggattttatgccaagaaaaaaccttatttccacatgatttggcatctctttatcctasctgcgtccgyactycaatacatcgctattgtttattacatgtaactaat

SEQ ID NO: 1019 - DNA, 473 bp, Streptococcus pneumoniae
  misc_feature (1)..(473): tiling:Spneumo1:WAN024CAH; Cluster includes WAN0244OX spr0 161|ribE|15902205|NP_357755.1|170346..170813|-|468 bp|Ribo flavin synthase beta chain|S.pneumoniae|R6|NC_003098.1|ORF |111
atgaacacttatgaaggtaatttagtagcaaacaatattaaaataggtattgttgtagcgagatttaatgaatttataacttcaaaattattatctggagcactagataatctcaaaagagagaatgtaaacgagaaagatatmgaggtagcctgggttccaggagcttttgaaataccactgattgcatcaaaaatggcaaaaagtaaaaaatatgatgcaattatytgcttgggagctgtcattagaggraatacaagtcattatgattatgtatgtagcgaggtatytaarggaatcgcccaaatcagtttaaatagcgaaattcctgttatgtttggtgtgctaacgacagatacaattgaacaagccatagaacgagctggtacyaaagcaggaaataagggttctgagtgtgcacaaggagctattgaaatggtcaacctrattcgtacattagacgcatarctaat

SEQ ID NO: 1020 - DNA, 462 bp, Streptococcus pneumoniae
  misc_feature (1)..(462): tiling:Spneumo1:WAN024F2C; Cluster includes WAN0244BC spr0 650||15902694|NP_358244.1|656822..657277|-|456 bp|Conserve d hypothetical protein|S.pneumoniae|R6|NC_003098.1|ORF|111
atgaacagaagagaggcagtcgaatttgttaacatgtgtatgattaaaaacggagataagrtcctggtccaagaccgagttartcccgactggyctggcattacttttcctggtggtcatgttgaacgtggcgaatcctttgtcgatgctgtcattcgtgaagtgaaagaagaaactggtctgatcatttccaaaccccaactctgtggtatyaaaaactggtatgacgacaaggattatcgttatgtcgtccttttttacaagacagaacactttactggtgaactccagtcttcagacgaagggaaagtttggtgggaggactttgaaaatctttctcatctaaaacttgcaaccgatgatatgtctgatatgcttcgtgtgtttctagaagaagatctcagtgaattcttttactacaaaaacggtgacgactggctttatgatttgaagmtaactaat

SEQ ID NO: 1021 - DNA, 1047 bp, Streptococcus pneumoniae
  misc_feature (1)..(1047): tiling:Spneumo1:WAN024FRQ; Cluster includes WAN0243U2 spr1 273|queA|15903316|NP_358866.1|1267181..1268221|+|1041 bp|S -adenosylmethionine:tRNAribosyltransferase-isomerase|S.pne umoniae|R6|NC_003098.1|ORF|221
atgaacaratatatgaatacagctgattttgatttccacttgccagaggaattgattgcccaaacgccccttgaaaaacgtgatgcctccaaactcctcatcgtcaaccgtgagacaggagaaatgcaagataaacayttccactctattattgatatgctggaacctggtgatgcccttgtcatgaacgacacccgagttctccctgcccgcctctatggtcaaaaagtggagacaggargtcatgtggaacttctcctccttaagaacactagtggagacgartgggaagttctggctaaacctgccaaacgcctcaaggtcggtactcgtatcagctttggtgatggccgcctcagcgctgtcgttacagaagaattgacccacgggggacgcattgtccgctttgaataccaargaattttcctagaagtcttggaaagtctgggagaaatgcctctgccaccttatatccacgaaaaattagatgaccgtgaacgttatcaaaccgtctacgccaaggaaagyggctctgctgcagcaccgactgctggtcttcacttcaccaaagaactgctggcagaaatccaagctaagggtgtycatctagtctatctgactctccatgtcggactcggaacctttagacctgtttctgtggataatctggacgaacacgaaatgcactcagagttctatcaactttctgaggaagctgckgccacccttcgctctgtcaaaraaaatggtggtcgygtcatcgctgtcggaaccacttctatccgyaccttggaaactattggttccaagtttgatgggcaaatccaagcagattctggttggaccaatatctttatcaaacctgggtatgagtggaaggtcgtggatgccttctcaaccaacttccayctgccaaaatcaactctggtcatgttggtttctgcctttgcaggccgtgaattagtcttagatgcctaccaccatkccatccaagaacactaccgcttcttcagttttggtgacgccatgtttatttatykaactaat

SEQ ID NO: 1022 - DNA, 1085 bp, Streptococcus pneumoniae
  misc_feature (1)..(1085): tiling:Spneumo1:WAN024EZ9; Cluster includes WAN02443Q spr0 924|prfA|15902968|NP_358518.1|910286..911365|+|1080 bp|Pep tide chain release factor I|S.pneumoniae|R6|NC_003098.1|OR F|221
atgaacatctatgatcaactacaagytgtagaagaccgttatgaagaaytaggagaattgctgagtgaccctgatgtcgtttcagacaccaagcgttttatggagctttcaaaagaagaagcytccaatcgtgacaccgtaatagcctaccgtgagtataaacaagtccttcaaaatatcgtcgatgccgaagagatgattaaggaatcaggyggagatgcggacttggaagaawtggccaagcaagaactcaaagatgccaaggctgaaaaagaagaatatgaagaaaaactgaaaattttgctccttccaaaggatccaaacgatgacaagaatatcatccttgaaatccgtggagcagctggtggagacgaagcggcacttttcgctggagatttgctaactatgtaccaaaagtatgckgaagcccaaggytggcgctttgaagtcatggargcytctatgaatggtgtcggtggtttyaaagaagtggttgctatggtttcaggtcagtctgtatactctaagcttaagtatgaatcaggtgcccaccgtgtgcaacgtgttcctgtgacagaaagccaaggccgtgttcatacttcgacagcgacagttcttgttatgccagaagttgaagaggttgaataygacattgatccaaaagaccttcgtgtcgacatctatcacgcctctggtgctggtggacagaacgtcaataaggttgcgactgccgtkcgtatcgttcacttgccaaccaatatcaaggttgagatgcaggaagaacgtacccagcagaagaaccgygagaaggcyatgaaratyatccgtgcmcgygtygctgaccactttgctcagattgctcargatgarcargacgctgagcgtaagtcgacaatcggtactggtgaccgttcagaacggatccgaacttataacttcccacaaaaccgtgtcacagaccaccgtatcggcttgacyctccaaaaactagatacgattttgtctggtaaattggacgaagttgtggatgccttggtgctttatgaccaaacacaaaaactagaagaattaaacaaataactaat

SEQ ID NO: 1023 - DNA, 331 bp, Streptococcus pneumoniae
  misc_feature (1)..(331): tiling:Spneumo1:WAN024C6M; Cluster includes WAN023M6A 3143 76_521||||266746..266970|-|225 bp|EGAD orf prediction|S.pn eumoniae|R6|NC_003098.1|ORF|220
atgaacatctttaacttgacctttaacaagcttagtcaaagtgtaagtcaagaaaccaactgcaatcccttgagtgatagagtagctgaatcccataaagatagatgtgaagaaggcaggaactgcttcagacatatcatcccaatggatatttttcaagctaccaagcatcataatcccaacgataatcaagattggagctgtagccgctgttggtacgatcgctagaagtgggctaaagaagcttgaaatcgcaaaacagatagctacaaccaaggctgtcaaaccagtacgtccacctgcaccgataccagcagcagactcaacataa

SEQ ID NO: 1024 - DNA, 915 bp, Streptococcus pneumoniae
  misc_feature (1)..(915): tiling:Spneumo1:WAN024DDE; Cluster includes WAN02446E spr0 828|cpsY|15902872|NP_358422.1|828735..829643|+|909 bp|Regu latory function on capsule expression in group B streptoco cci|S.pneumoniae|R6|NC_003098.1|ORF|111
atgaacattcaacaattacgctatgttgtkgcyattgccaatagtggtactttycgtgaagctgctgaaaagatgtatgttagtcagccgagtctgtctatttctgttcgtgatttggaaaaagagttgggytttaagattttccgtcggaccagctcagggactttcttgacccgtcgtgggatggaattytatgaaaaakcgcaagaattggttaaaggatttgatatttttcaaaatcagtatgccaatcctgaagaagaaaaagatgaattttcygttgctagccagcactatgacttcttrccaccaactattacggccttttcagagcgctatcctgactataagaacttccgtatttttgaatcaactactgttcaaatattagatgaagtggcgcaagggcatagtgagattgggattatctacctcaacaatcaaaataaaaaggggattatgcaacgggttgaaaarttaggtctggaggtcatcgaattgattcctttccatacccatatttatctcygtgagggtcatcctttagcycrgaaagaggaattagtcatggaggatttagcggatttaccaacggttcgtttcactcaagagaaagacgagtacctttattattcagagaactttgtcgataccagcgctagctcacagatgtttaatgtgacagaccgtgccaccttgaatggtattttggagcggacggacgcctatgcgacaggttctggatttttagatagtgacagtgttaatggyattacagttattcgtctcaaggataacctagataaccgcatggtctatgttaaacgtgaagaagtggagcttagtcaagctgggactctcttcgtagaagtcatgcaagaatattttgatcaaaagaggaaatcaykaactaat

SEQ ID NO: 1025 - DNA, 660 bp, Streptococcus pneumoniae
  misc_feature (1)..(660): tiling:Spneumo1:WAN024CXY; Cluster includes WAN02439Z spr1 998|rr06|15904039|NP_359589.1|1991666..1992319|-|654 bp|Re sponse regulator|S.pneumoniae|R6|NC_003098.1|ORF|111
atgaacattttagttgcagatgacgaggaaatgattagagaaggaattgcagcatttctgacagaagagggttatcatgtcattatggctaaggatggacaagaggtcttggaaaaatttcaagatctccctatccatctcatggtaytggatttaatgatgcctaggaagagtggttttgaagtgttaaaagaaatyaatcaaaagcacgatattcctgtcatcgtcttgagtgctctgggagatgaaactactcagtcacaggtatttgatctctatgctgatgatcatgtgacaaaacctttttctttggtactrcttgtcaagcgtattaaggcgcttatcagacgttactacgtcatagaggatmtttggcgatatcaggatgtaacagtggattttacctcttacaaagcacattataaaaatgaagaaattgatctcaaaccaaaggaattactggtactaaagtgtttgattcagcataaaaatcaagttttaagtagagagcagatattggaagaaatttcaaaagatgtagctgatttaccttgtgatagggtcgttgatgtctatattcgtactcttcgcaaaaaattagctttagattgtatcgtgactgtgaaaaatgttgggtataagattagyttaykaactaat

SEQ ID NO: 1026 - DNA, 246 bp, Streptococcus pneumoniae
  misc_feature (1)..(246): tiling:Spneumo1:WAN024C8K; Cluster includes WAN023M8R 3143 91_402a||||207391..207636|-|246 bp|EGAD orf prediction|S.p neumoniae|R6|NC_003098.1|ORF|110
atgaaccaaacctttggcacggtagtgagcaatgattggttctccttgagcaatattaacatccaaacgacgttttactgtctcaggcttatcatcttcacgttggtagtaatcttcttctttatagtcaactggtgggttaaagaccttgtggaaagtttctccagttacgcggtggatgatacgsccactcaaacgttccaaraggctgtcagggttcacttcaatattgataayaccttctag

SEQ ID NO: 1027 - DNA, 1581 bp, Streptococcus pneumoniae
  misc_feature (1)..(1581): tiling:Spneumo1:WAN024CEP; Cluster includes WAN023RVS cont ig_1609_52||||37128..38708|-|1581 bp|Glimmer 2.02 orf pred iction|S.pneumoniae|670|WAN01UDCD|ORF|000
atgaaccagattatgaaacaatataaattwctatatttcttgattattttattaagyttgacaagtgctcttttaatgacattcttctctctkcaattaggaagaatacttgatagtatawctaattcaaatagtggattactctttcatatcactatttstgtargttyrattttactgtggttcttkatytcttsttcytattcctatcttaaaaaysaatatgtaaaaaaagttattwtagatctaaaaargsgtctcttattacattatttatcgcgtgaatttaaccaaaytgacaaccgtaaccattcagatttcttaaataatatcaccaaaaayagtgaccttattcaagaaaatttattratycctaraatctctctaattgcaaatttagggasccttatcatgagtgtggttgcyattatytatatagaatggcgattagcattagtcttycttttattgtcgagtataacgrttttyctatcwcaaattcctggaaagttaatgactaaakcaacwaataattattcyctacaaaatartcactatttgtcaaaaatgacaaactttattaatggttttgaacaaattaagttattaaatattcaaagctggacccaagaaaaaattcagggaatcagtttagaatttgaagagtccagaaaracatatcaattcttaaaagacttagcttcaactactggrattttactaagttttggctctcaactatcctgtatggtcgctggtatcttttttgtaagaaataacttactgactattggaytactagtagcaagtattcaattattaaacggtgtttttgctccaytacaatctattctttacaataaaaatttaatcagcagtagcaagtccattattgataatatccargaaaatctatatgagacaaatcawggaacttyccataaaacaagtacaattgattgtgataacatttcgacyatttctattagccaattayattatgaaattgaaaataraatattatttgatcatttttcctatgaatttaaaaaaggcaagcgctatgcrattatmggtgcttcaggarctgggaaaacaactttagtaaaattaatactaaattattatccaaaaaatctttatgatggagaaataaaaatcaacggaaaacagaatattgatattycctcagaggagttatataaagatattgcgtttgtgcaaaaaaatgactttctrattgaaggcaatattctagagaatatcaaattggctagaaaccttcatttaactgaaaaattaagaaaatccttaggttttaatgaagacttccttcgtaaaaacctagctcaatcaaaccaaatcatttcagaaggagaaaagcaacgaattgatttagctaggtttttagtcaaaacatattcagtttatatatttgacgaacctacaagtaaccttgatccaataaaagcaaaagaaataatggaytacattctatccattaaagatgcaattgttattgtcattactcatgatcaaaatccagaaatattggaagagtttgatcasrttattryytta

SEQ ID NO: 1028 - DNA, 839 bp, Streptococcus pneumoniae
  misc_feature (1)..(839): tiling:Spneumo1:WAN024DGT; Cluster includes WAN0244EA spr0 544||15902588|NP_358138.1|545425..546258|+|834 bp|Conserve d hypothetical protein|S.pneumoniae|R6|NC_003098.1|ORF|112
atgaaccataaaatcgcaattttatcagatgttcatggcaatgcgacggcgctagaagcagtgattgcagatgctaaaamtcaaggrgccagtgaatattggctymtgggagayattttyctycctggtccaggygcaaatgacttrgtcgcyctgytaaaggamcttcctatcacrgcaagtgttcgaggcaattgggatgatygtgtccttgaggyyttrgatggssaatatggyttrgaakayccrmargaartycagctcwtgcgyatgacmcagtwtttgatggagcgaatggatcctgcaacgattgtctggctacgaagcttgcctttgctggaaaagaaagaaattgacggattgcgcttttctatctctcataatttacctgacaaaaactatggtggtgacttgctagttgagaatgatacagagaaatttgaccaactgctagatgcggaaacggacgtggcagtttatggtcatgttcacaagcagttgcttcgttatggwagtcaagggcaacaaatcatcaatccagggtcgattggcatgccctattttaattgggaggcgttaaaaaatcaccgtkcccagtatgccgtgatagargttgaagatggggaattrstmaatatccwatttcgtaaagtygcttatgattacgargctgagttagaattkgccaartccaagggkyttccctttatcgaaatgtatgaagaactrcgtcgtgamgataactatcagrggcacaatctggaaytattagcmagcttaatagaaaagcatrggtatgtagaggatgtgaagaatttttttgattttttgtaactaat

SEQ ID NO: 1029 - DNA, 297 bp, Streptococcus pneumoniae
  misc_feature (1)..(297): tiling:Spneumo1:WAN024GFV; Cluster includes WAN023LVN 3145 21_1083||||570942..571238|-|297 bp|EGAD orf prediction|S.p neumoniae|R6|NC_003098.1|ORF|110
atgaaccatgaaccgataagtgagaagagttccaaagatacaccggcagtcaaaccaagagacaaccatcctttgataacaagacgccatttatctgcatctgcaacacctgcaattggatgtggagttcccataataccgataacgataccaaggatgaaaccgatgaagaatttagatccccagaaaccgattttcttgttcaatttagcagcatcaaagtcatatttatcaaggcctgggaagaatttttcaaaaatcttatccaaaaccatgataactgggttcatcatgtag

SEQ ID NO: 1030 - DNA, 240 bp, Streptococcus pneumoniae
  misc_feature (1)..(240): tiling:Spneumo1:WAN024FK7; Cluster includes WAN023L14 3138 34_2576||||1371939..1372178|+|240 bp|EGAD orf prediction|S .pneumoniae|R6|NC_003098.1|ORF|110
atgaaccatggccaaacgcccattagacttgagaatactctgggcactaygacagatttcttccaaattagtcgtgatttcgtgtcgagccaagagataatgttcactctcgttcagattagaataaggatycaccttgaaatagggtggattacacaaaatcatatccaccttactcccctgaatgtgagcaggcatatttttcaaatcatcgcagatgacctgcatttgctcctctaa

SEQ ID NO: 1031 - DNA, 240 bp, Streptococcus pneumoniae
  misc_feature (1)..(240): tiling:Spneumo1:WAN024C5Y; Cluster includes WAN023Q9V cont ig_1258_9||||2621..2854|+|234 bp|Glimmer 2.02 orf predicti on|S.pneumoniae|670|WAN01UEG8|ORF|001
atgaacccagaaataattgacaatataaataaaccaagccactaccagggtgcaaacggtcttgaggctatcgatgttgtgcataacttcgttgggaryctttycggagcgtctgctttcttttggggcaacgcaatcaagtatatgttacggtttcaaaagaaaaayggycttgaagacctgaagaaagckmgmaagaaycttgaytggctgattgaggagatggawmawgarggaaga

SEQ ID NO: 1032 - DNA, 426 bp, Streptococcus pneumoniae
  misc_feature (1)..(426): tiling:Spneumo1:WAN024FVK; Cluster includes WAN023L8K 3151 42_2259||||1214800..1215225|+|426 bp|EGAD orf prediction|S .pneumoniae|R6|NC_003098.1|ORF|110
atgaacccctctggtcaagagtttccccatcctatmttctattctttattttgcttctacacggacaccttgggtatcaactctcaagtcatgcagttttcctttgaaaggttgcttttccaattctgccttaattgttggcatcttgtcatgagaagccagaaccataactgtcggcccagcaccagaaaggtaggttgcataggccccattttctttggtcacttgcttaatcatcgcaaattctcttaccaagtcctgacgatagcgctcatggaagaggtctccctcgattgcttgcccagcggtcaccatgtctcctgccaacaaggcagcaaccgctacattggcgatagaacttgcagcaacagcttccttataagacaattttttaggcaagacactacggctgtcgcgagtacgtaa

SEQ ID NO: 1033 - DNA, 824 bp, Streptococcus pneumoniae
  misc_feature (1)..(824): tiling:Spneumo1:WAN024DU9; Cluster includes WAN02439A spr2 023|mreC|15904064|NP_359614.1|2014609..2015427|-|819 bp|Ce ll shape determining protein MreC|S.pneumoniae|R6|NC_00309 8.1|ORF|111
atgaaccgttttaaaaaatcaaaatatgtcattattgtttttgtcactgttctgcttgtgtcagctctcttagcgacgacttattcaagtacaattgtgacaaaattaggagatggaatctcattggttgatagagttgtacaaaaaccttttcagtggtttgattctgtcaaatcagatttggctcatttgacacgaacatataatgaaaatgaaagtttgaagaaacagctttaccaattagaagttaaatcaaatgaggtggaaagtttaaagacagaaaatgaacaactgcgccaattgcttgatatgaagtctaaattgcaagccacaaagactttagcagcagatgttattatgcgttctccggtatcttggaagcaggagttgaccttagatgcaggtagatcaaaaggtgcttctgagaacatgttagctattgcaaatggtggcttgattgggagtgtttcaaaagtagaggagaactctactatagtcaaccttctgacaaatacggaaaatgctgataagatttctgttaaaattcaacatggctctactacaatttatggaattattattggctatgacaaggaaaatgacgttcttaaaattagccaattaaatagtaatagcgatattagtgcgggagataaggtgactactggtggattaggaaactttaacgttgctgatattcctgttggtgaagtggttgccacaacgcatagtacagactatttgacacgagaagtaactgttaaattgagtgcagatactcataatgtagatgtgatagaattagtggggaattcataactaat

SEQ ID NO: 1034 - DNA, 351 bp, Streptococcus pneumoniae
  misc_feature (1)..(351): tiling:Spneumo1:WAN024F5Y; Cluster includes WAN023M7M 3133 00_463||||238232..238582|-|351 bp|EGAD orf prediction|S.pn eumoniae|R6|NC_003098.1|ORF|110
atgaacctcaatggtgtcaccagttgccttgatcttaacttctacaatgccatcggccgcttttttaccaacagtgatacggattggaagaccaatcaagtcactatcgctaaatttaacaccgacacgttcgttacggtcatctgtcaagacttcataaccagctcccatcaagcttgcttcaagtttttctgtcaaggcttgcgcttcttcatccttgacattgacagtaatcaaatgcacatcaaatggtgccaattctttagggaaattgattccccaagcgtaacggtattcaccttttggcgttttgttaacaaagaggcgagcgtgttgctccatcactgctga

SEQ ID NO: 1035 - DNA, 105 bp, Streptococcus pneumoniae
  misc_feature (1)..(105): tiling:Spneumo1:WAN024CNW; Cluster includes WAN0246SO 5613 45-58-2||||||105 bp|DNA Streptococcus pneumoniae phage Dp- 1 open reading frame 254|S.pneumoniae||WAN0246SO|ORF|000
atgaacctttcgcttaggttcaatctttttcgaacattttcatatttaacaaaactttcagctaaaaatcgacaaagttcaatgttcgactcaatgtttaaataa

SEQ ID NO: 1036 - DNA, 359 bp, Streptococcus pneumoniae
  misc_feature (1)..(359): tiling:Spneumo1:WAN024CWH; Cluster includes WAN0243LB spr1 589||15903631|NP_359181.1|1569156..1569509|-|354 bp|Conser ved hypothetical protein|S.pneumoniae|R6|NC_003098.1|ORF|1 11
atgaacgaaaaagaattactagaactagtcgtgaaagcggctgatgagaaacgtgcggaggatatcctcgcacttgatgtacaagatttgactagtgtgacggactacttkgtcatcactagctcaatgaatagccgtcagttggacgctatcgcagctaatatccgtgaaaaagtagctcaagcrggctttaaaggtagccatgtcgaaggcgatgcagctggaggctgggtcttactggacctyggtgctgtkgtcgwgcatatcttttcagaagaaatgcgtgcccattataayctagagaagctatggcatgaggcgaattcagtagatatttcagaagctcttgcttarctaat

SEQ ID NO: 1037 - DNA, 1281 bp, Streptococcus pneumoniae
  misc_feature (1)..(1281): tiling:Spneumo1:WAN024G2Q; Cluster includes WAN0243Z1 spr1 094||15903137|NP_358687.1|1090902..1092176|-|1275 bp|Conse rved hypothetical protein|S.pneumoniae|R6|NC_003098.1|ORF| 211
atgaacgaaatcaaatgtcccaactgtggggaagtctttacagtaaatgaragycagtatgcygaactyttgtcccaagtgagaacgrcagagtttgataaggaactacacgataggatgargcaggaactggccttggctgagcaaaaggcyatgaatgagcaacagactaaactggctcagaaggatcaagaaattgcgcaattrcagagtcaratccaaaactttgatacagaaaaagaattggccaagaaagargttgaacagacaagccatsaggcyytmttggctaaggacaaggaagtacagsycttrgaaaaycagttggckaccttgcgtttggagcatgaaaatcaaytrcaaaagaccctttctgacctagaaaaagaacgsratcaggtyaaaaaycarctmctwytgcargaaaaggaaaatgarttrtctttggcttctgttaagcaaaactacgaagcccagctcaargcagcyagtgaacaagtcgagttttataagaattttaaggctcaacaatctacaaaagcgattggggaaagcctagaacagtatgcagagagtgagtttaacaaggttcgtagtttcgcctttccaaatgcttactttgagaaggataacaaggtctcttcgcgtgggtctaaaggggactttatcttccgtgagtgtgatgaaaatggagttgaaatcatttctatcatgtttgagatgaaaaacgaagcggacggaacagagaagaagcacaagaatgcagatttttacaaggaattggacaaggaccgtcgggagaagaactgtgagtatgccgttttggtgaccatgcttgaggctgataatgactactttaacacagggattgttgacgtcagtcacgagtatgaaaaaatgtatgttgttcgtcctcaattctttatccaattgattggtctcttacgtaatgcggcgctaaattccctaaaatacaagcaggagttggccttggttcgcgagcaaaatattgacattaygcattttgaggaagayttggatgcctttaagctagcttttgctaagaactataattcagcttcgactaactttggaaaagctattgatgaaatcgacaaggccatcaaacgcatggaagaggttaagaaattcctgacyacatctgaaaaccaactccgtytagctaacaacaaattggaagatgtctctgttaaaaaattgacccggaaaaatccaacaatgaaagcgaagttcgaagcaytgaagggggagykarctaat

SEQ ID NO: 1038 - DNA, 1208 bp, Streptococcus pneumoniae
  misc_feature (1)..(1208): tiling:Spneumo1:WAN024CUL; Cluster includes WAN024486 spr0 764|rpsA|15902808|NP_358358.1|759737..760939|+|1203 bp|30S Ribosomal protein S1|S.pneumoniae|R6|NC_003098.1|ORF|111
atgaacgaatttgaagatttgctaaatagcgttagtcaagttgagactggtgatgttgttagtgctgaagtattgacagttgatgcgactcaagctaacgttgcawtctctggaactggtgttgaaggtgtcttgactcttcgcgaattgacaawcgatcgtgatgcagatatcaatgactttgttaaagtaggagaagtattggatgttcttgtacttcgtcaagtagttggtaaagatactgatacagttacataccttgtatctaaaaaacgccttgaagctcgcaaagcatgggacaaacttgttggtcgcgaagaagaagttgttactgttaaaggaacgcgtgccgttaaaggtggactttcagtagaatttgaaggtgttcgtggatttatcccagcttcratgttggatactcgtttcgtacgtaacgctgagcgttttgtaggtcaagaatttgatactaaaatcaaagaagttaacgctaaagaaaaccgcttcatcctttcacgtcgtgaagttgttgaagcagctactgcagcagctcgcgctgaagtattcggtaaattggctgttggtgatgttgtaactggtaaagttgctcgtatcacaagcttcggcgctttcrtcgaccttggtggtgttgayggattggttcacttgactgaattgtcacatgaacgtaaygtatcaccaaaatcagttgtaactgttggtgaagaaattgaagtgaaaatccttgatcttaacgaagaagaaggacgtgtatcactttcwmttaaagcaacagtaccaggaccatgggatggcgttgagcaaaaattggctaaaggtgatgtagtagaaggaacagttaaacgtttgactgacttcggtgcatttgttgaagtattgccaggtatcgatggacttgttcacgtatcacaaatttcacacaaacggattgaaaatccaaaagaagctcttaaagttggtcaagaagttcaagttaaagttcttgaagttaacgcagatgcagaacgcgtrtcactttctattaaagctcttgaagaacgtccagcccaagaagaaggacaaaaagaagaaaaacgtgytgctcgtccacgtcgtccaagacgtcaagaaaagcgtgatttcgaacttccagaaacacaaacaggattttcaatggctgatttgtttggtgayatcgaactttaactaat

SEQ ID NO: 1039 - DNA, 108 bp, Streptococcus pneumoniae
  misc_feature (1)..(108): tiling:Spneumo1:WAN024CN3; Cluster includes WAN02436T SP00 70||15900015|NP_344619.1|73353..73454|+|102 bp|hypothetica l protein|S.pneumoniae|TIGR4|NC_003028.1|ORF|020
atgaacgataagaaagaggttgatggcgaacattggcctcttttgatttataaagattggattcttgtcgcctcaatttcagacttttctattgtaagcctaactaat

SEQ ID NO: 1040 - DNA, 2297 bp, Streptococcus pneumoniae
  misc_feature (1)..(2297): tiling:Spneumo1:WAN024G6B; Cluster includes WAN02441R spr0 995|pcrA|15903039|NP_358589.1|979142..981433|+|2292 bp|ATP -dependent DNA helicase|S.pneumoniae|R6|NC_003098.1|ORF|22 1
atgaacgcattattaaatggaatgaatgaccgtcaggctgaggcggtgcaaacgacagaaggtcccttgctaatcatggcaggggctggttctggaaagactcgtgttttracccaccgtatcgcttatttgattgatgaaaagctggtcaatccttggaatatcttggccattacctttaccaacaaggctgcgcgtgagatgaaagagcgtgcttatagcctcaatccagckactcaggactgtctgattgcgaccttccactccatgtgtgtgcgtattttgcgtcgcgatgcggaccatattggctacaatcgtaattttacaattgtggatcctggtgaacagcgaacgctcatgaaacgtattctcaaacagttgaacttggaycctaaaaaatggaatgaacgaactattttggggaccatttccaatgctaagaatratttgattgatgatgttgcttatgctgcccaagctggcgatatgtatacgcaaattgtggcccagtgttatacarcctatcaaaaagaacttcgtcagtctgaatccgttgactttgatgatttgattatgctgaccttgcgtctctttgatcaaaatcctgatgttttgacctactaccagcaaaaattccaatacatccacgttgatgagtaccaagataccaaccacgctcagtaccaattrgtcaaactcttggcttcccgttttaaaaatatctgtgtggttggggatgcggaccagtctatctacggttggcgtggtgctgatatgcagaatatcttggactttgaaaaggattaycccaaagcyaaggttgttttgytggaggaaaattaccgctcaaccaaaaccattctycaagcggccaacgaggttattaaaaataataaaaatcgccgtcctaaaaatctctggactcaaaacgctgatggggagcaaatcgtttactatcgtgccgatgatgagctggatgaggctgtatttgtagccagaaccatcgatgaacttagtcgcagtcaaaacttccttcataaggattttgcagttctctatcggactaatgcccagtcccgtacaattgaggaagccctgctcaagtctaacattccttataccatggttggcggaaccaaattctacagccgtaaggaaattcgcgatattattgcttatctcaaccttattgctaatttgagtgacaatattagttttgagcgtattatcaacgagcctaaacgtggaattggtcyaggtacagttragaaaatccgtgattttgcaaatttgcaaaatatgtctatgctggatgcttctgctaatattatgttgtctggtatcaagggtaaggcagcccaatctatctgggattttgccaatatgatgcttgatttgcgggagcagctagaccacttaagcattacagagttggttgagtccgtcctagaaaaaacaggttatgtcgatattcttaacdcccaagcgactctagaaagcaaggcamgggttgaaaatatcgaagagtttctttctgttacgaagaactttgatgacaccackgatgtgacagaagaggaaactggtctggacaaactgagtcgtttcttaaatgacttggctttgattgccgacacagattcaggtagtcaggagacatcagaagtgaccttgatgaccctgcatgctgccaaaggtctcgaatttccagttgtctttttgattgggatggaagaaaatgtctttccacttagtcgtgcgactgaagatycagatgaattagaagaagagcgccgtctagcctatgtaggtatcacgcgtgcagagaaaattctctatctgaccaatgccaactcacgcttgctttttggtcgtaccaattataaccgtccgactcgttttattaacgaaatcagttcagayttgcttgagtatcaaggtctggctcgtcctgcaaatacaagctttaaggcatcatatagcagtggtagtatttcctttrstcaaggtatgagtttggctcaggctmttcaagaccgtaaacgcggtgctgccccaaaatcaatccagtcaagcggtcttccatttggtcaatttacagctggcgcaaaaccagcatctagcgaggcaaattggtccattggtgayattgctctccacaagaaatggggagagggaacygttctggaagtttcaggtagcggtgctaggcaggaattgaaaatcaatttcccagaagtaggtttgaaaaaacttttagccagtgtggctccaattgagaaaaaaatctaactaat

SEQ ID NO: 1041 - DNA, 1340 bp, Streptococcus pneumoniae
  misc_feature (1)..(1340): tiling:Spneumo1:WAN024B6A; Cluster includes WAN0244M8 spr0 258|pepC|15902302|NP_357852.1|259029..260363|+|1335 bp|Ami nopeptidase C|S.pneumoniae|R6|NC_003098.1|ORF|211
atgaacgcgattcaagaatcatttactgataaactatttgccaactatgaagcaaatgtaaaataccaagcgattgaaaatgctgccagccacaacggaatttttgcagctctggaaygtcgccaaagccatgtagacaacacacctgttttctcattggatttaaccaaggacaaggtcactaaccagaaagcgtctggtcgttgctggatgtttgcggctctcaacaccttccgccacaaactcatctcgcaatacaaattggagaactttgagttgtcacaagcccacactttcttctgggataagtatgagaaatcaaactggttcttggagcaagtcattgcgacttcagaccaagaattgactagccgcaaggttagcttcttactccaaacacctcaacaagatggyggtcaatgggatatggtcgtttccctctttgaaaaatacggtgtcgtgcctaagtcagtttatcctgagtctgtttcatctagcagcagtcgtgagctaaatgcgatccttaataaattgcttcgtcaagatgctcaaatcttgcgtgayttgcttgtttctggtgcagatcaagygactgttcaagctaagaaagaagacctcttgcaagaaatctttaactttcttgctatgtcattrggacttccaccacgcaagtttgactttgcttatcgcgataaagataacaactayaaaagtgaaaaaggaatcacaccacaagagttytacaagaaatatgtcaatcttcctttagaagactacgtttctgttatcaatgctccaactgctgataaaccttacggraaatcttacacagttgagatgttggggaatgtggttggtagccgtgcagttcgytacatcaacgttccaatggagcgcttgaaagaattggcgattgcccaaatgcaagcaggtgagactgtttggtttggttctgatgtcggccagctcagyaaccgtaaggctggmatccttgcgacagatgtttatgactttgaatcaagcatggacattaaacttactcaagacaaggctggacgtttggactatagygaaagcttgatgacccacgccatggtcttgacaggtgttgacttggacgaaaatggtaaatcaaccaagtggaaggttgaaaactcatggggagacaaggtcggtacagatggttactttgtkscctcagacgcttggatggacgaatacacataccaaatcgttgttcgtaaggaattgctgacagcagaagaacaagctgcctatggagcagaaccaatygtacttgcaccatgggatccaatgggagccttggctraataactaat

SEQ ID NO: 1042 - DNA, 884 bp, Streptococcus pneumoniae
  misc_feature (1)..(884): tiling:Spneumo1:WAN024G2T; Cluster includes WAN0243Z3 spr1 092|truB|15903135|NP_358685.1|1086726..1087604|-|879 bp|tR NA pseudouridine 5S synthase|S.pneumoniae|R6|NC_003098.1|O RF|221
atgaacggtattatyaacttaaaaaargaagcaggaatgacctcgcatgatgcggtttttaaactgcgtaagattttgggaaccaagaaaattggtcatggtggraccttggatccggatgtggtgggtgttttgccgattgcggttggcaaggcgacacgcatggtcgagtttatgcaggacgagggtaagatctatgagggggaaatyaytctgggytattccacgamgactgaggatgctagtggggaagtgrtcgcaraaacccctgttttgtctcycttggatgaaaagcttgttgatgaagcgattgctagcttgactgggcctattacycagattccccctatgtattcggcagttaaggttaatggtcgcaagctctatgagtatgcgcgtgctggtcaggaagtggagcgtccagaacgtcaggtgaycatttatcaatttgagcgaacaagtccgatttcttatgatggccaacttgcycgattcacttttcgtgtaaaatgcagtaaagggacktacatccgtactttgtcagttgatttgggtgaaaagcttggttatgcggctcatatgtcccatttgactcgtactagtgctgctggcttacaattagaagaygctcttrccttggaggaaattgctgaaaaagtagaggctgggcaattagattttctccatcctttagagattgggacaggtgaccttgtcaaagttttcctaastccagaagakgctacagaagttcgmtttggtcgttttattgagctagaccaaacggacaaagaactggctgcctttgaagatgataaattgttagccattctagaaaaacggggcaatctctataagccaaggaaggtttttagctarctaat

SEQ ID NO: 1043 - DNA, 351 bp, Streptococcus pneumoniae
  misc_feature (1)..(351): tiling:Spneumo1:WAN024FZW; Cluster includes WAN023LD5 3153 07_2071||||1117403..1117630|+|228 bp|EGAD orf prediction|S .pneumoniae|R6|NC_003098.1|ORF|110
atgaacgtgactctcaaactcctcccgacggagaggacgattgtccaaagcagacggcaaacggaaaccataattaaccagcatttctttacgcgaacggtctccattgtacatgcccttgatttgyccyatrgtcatatgactctcgtcaatcataatcaaraaatcatctgggaaraagtcgagaagcgtataaggaggctcwccttcrctmcgtccatccatgtggcgagaataattttcaaccccattkgtatagcccatctcrcgcarcatttcgatatcatactctgtccgctgtttcaaacgctgggcttcaagcagtttaccttccttttcaaagacagctaa

SEQ ID NO: 1044 - DNA, 117 bp, Streptococcus pneumoniae
  misc_feature (1)..(117): tiling:Spneumo1:WAN024DNH; Cluster includes WAN0241W4 SP18 68||15901696|NP_346300.1|1774100..1774210|+|111 bp|conserv ed domain protein|S.pneumoniae|TIGR4|NC_003028.1|ORF|121
atgaactacctatttcaagaagacagttcttctcaaatctttaacttaggaactaaaaaaggctatactatcaaagaaatctttaaaactgctgaagaattactaaatctaactaat

SEQ ID NO: 1045 - DNA, 525 bp, Streptococcus pneumoniae
  misc_feature (1)..(525): tiling:Spneumo1:WAN024ETR; Cluster includes WAN0244AC spr0 686|rimM|15902730|NP_358280.1|688409..688927|+|519 bp|16S rRNA processing protein RimM|S.pneumoniae|R6|NC_003098.1|O RF|111
atgaactactttaatgttgggaaaatcgttaatacgcagggattacagggkgagatgcgagtcttgtctgtgacggattttgcagaagaacggtttaaaaaaggagctgagctggytttgtttgatgaaaaagatcagtttgtccaaacagtgaccatcgctagccaccgtaaacagaagaactttgacattattaaattcaaagatatgtaccatatcaatactatcgaaaagtacaagggatacagtctcaaggtcgctgaggaagatttgaatgacctagacgatggtgaattttactatcacgagattatcggtttggaagtctatgagggtgatagcttggttggaaccatcaaggaaatcctgcaaccaggtgctaatgatgtctgggtggtcaaacgaaaaggcaaacgtgatttgcttttaccttatatcccaccagtggttctcaatgttgatattccaartaaacgggtcgatgtggaaatcttagaagggttagacgatgaagatykaactaat

SEQ ID NO: 1046 - DNA, 864 bp, Streptococcus pneumoniae
  misc_feature (1)..(864): tiling:Spneumo1:WAN024CZF; Cluster includes WAN0243DJ spr1 870||15903911|NP_359461.1|1841803..1842660|+|858 bp|Hypoth etical protein|S.pneumoniae|R6|NC_003098.1|ORF|111
atgaactatccaaaaattgatttaaaaacaattcgtcaggagtcaaaacattttcaggctgacaccccccgtctctttctcctctatatccttcccagtatgctggtcatcttatctrgttttcttaatcccttatctcggatccacgggactgttttagaacagccatttttcagcatacttggccaaatacttcaarcctacctctttcctctactagtctcctttatcgggactattcttttgaccagttccgtctatgcaacactgacactcatgaaagattctaaaacggagccatctgtaaaaaacagcctagctctctttgatgaggagcgcttttctcaaacctttttgaccctacttctcaaacgtttctatctctttttatggagtatccctaatttacttgggattyacctcctcttttatagtagctttttagccaaaaaattcgtcaccctacatcctgagtttccaartctagatctctcatcagttgaaaccgagcgtttcctcatggtctttggactctactttcttgcaagtctcatcttgatcattgtaggaaatatcctctatattccacagtattatgcctattcacaggtggaatttcttctctgttatagtctagacctaggacaggtcccaccaagacgaatcctaaaaactagccgttcctttatgaagggctacaagttccagcrctttgtcctagatttacagcttcttccttggtacttcctcaattggattacctttggcattgctagtttttcactcctaccttatatccaatgcactaaaattatgttttaccgagcagtattggcycgaaaacgtccaaaagctykaactaat

SEQ ID NO: 1047 - DNA, 2438 bp, Streptococcus pneumoniae
  misc_feature (1)..(2438): tiling:Spneumo1:WAN024EVT; Cluster includes WAN02439Y spr1 999|clpC-truncation|15904040|NP_359590.1|1992961..1993104| -|144 bp|Class III stress response-related ATPase, truncat ion|S.pneumoniae|R6|NC_003098.1|ORF|211
atgaactattcaaaagcattgaatgaatgtatcgaaagtgcctacatggttgctggacattttggagctcgttatctagagtcktggcacttgttgattgccatgtctaatcacagttatagtgtagcaggggcaactttaaatgattatccgtatgagatggaccgtttagaagaggtggctttggaactgactgaaacggactatagccaggatgaaacytttacggaattgccgttctcccgtcgtttgcagrttctttttgaygaagcagagtatgtagcgtcagtggtccatgctaaggtrctaggkacagagcacgtcytctatgcgattttgcatgatrgcaatgccttggcractcgtatcttggagagggctggtttttcttatgaagacaagaaagatcaggtcaagattgctgctcttcgtcgaaatttagaagaacgggcaggctggactcgtgaagatctcaaggctttacgccaacgccatcgtacagtagctgacaagcaaaattctatggccaatatgatgggcatgccgcagactcctagtggtggtctcgaggaytatacgcatgatttgacagagcaagcgcgttctggcaagttagaaccagtcatcggtcgggacaaggaaatctcacgtatgattcaaatcttragccggaagactaagaacaaccctgtcttggttggggatgctggtgtcgggaaaacagctctggcgcttggtcttgcycagcgtattgcyagtggtgacgtgcctgcggaaatggctaagatgcgcgtgttagaacttgatttgatgaatgtcgttgcagggacacgcttccgtggtgactttgaagaacgcatgaataatatcatcaaggatattgaagaagatggccaagtcatcctctttatcgatgaactccacaccatcatgggttctggtagcggrattgattcgactctggatgcggccaatatcttgaaaccagccttggcgcgtggaactttgagaacggttggtgccacyactcaggaagaatatcaaaaacatatcgaaaaagatgcggcwctttctcgtcgtttcgctaaagtgacgattgaagaaccaagtgtggcagatagtatgactattttacaaggtttgaaggcgacttatgagaaacatcaccgtgtacaaatcacagatgaagcggttgaaacagcggttaagatggctcatcgttatttaaccagtcgtcacttgccagactctgctatcgayctcttggaygargcrgcagcaacagtgcaaaataaggcaaagcatgtaaaagcagacgattcagatttgagtccagctgacaaggccctgatggatggcaagtggaaacaggcagcccagctaatcgcaaaagaagaggaagtacctgtctacaaagacttggtgacagagtctgatattttgaccaccttgagtcgcttgtcaggaatcccagttcaaaaactgactcarackgaygctaagaartatytaaatcttgaagcagaactccataaacgkgtyatcggtcaagatcaagctgtttcaagyattagycgtgcsattcgccgyaaycagtcaggrattcgcagtcayaagcgtccgatyggttcctttatgttcctaggrccyacaggtgtcggkaaracygarttrgccaaggctytggcagaagttctytttgaygacgaatcagcccttatccgctttgatatgagtgagtatatggagaaattygcagcyagycgtctmaayggagctcctccaggctatgtrggwtaygaagaaggtggggagytgacagagaaggttcgcaataaaccctattccgttctcctctttgatgaggtagagaaggcccacccagatatctttaatgttctcttgcaggttctggatgacggtgtcttgacagatagcaagggacgcaaggtcgatttttcaaataccattatcattatgacatcgaatctaggtgcgactgcccttcgtgatgataagactgttggttttggggctaaggatattcgttttgaccaggaaaatatggaaaaacgcatgtttgaagaactgaaaaaagcttatagaccggaattcatcaaccgtattgatgagaaggtggtcttccatagcctatctagtgaycatatgcaggaagtggtgaagattatggtcaagcctttagtggcaagtttgrctgaaaaaggcattgacttgaaattacaagcttcagctctgaaattgttagcaaatcaaggatatgacccakagatgggagctcgcccacttcgcagaaccctgcaaacagaagtggaggacaagttggcagaacttcttctyaagggagatttagtggcaggcagcayacttaagattggtgtcaaagcaggccagttaaaatttgatattgcataactaat

SEQ ID NO: 1048 - DNA, 1349 bp, Streptococcus pneumoniae
  misc_feature (1)..(1349): tiling:Spneumo1:WAN024FIE; Cluster includes WAN0243PC spr1 443||15903486|NP_359036.1|1428392..1429735|+|1344 bp|Conse rved hypothetical protein|S.pneumoniae|R6|NC_003098.1|ORF| 111
atgaacttaaaaactactttgggccttcttgctggrcgttcttcccacttcgttttaagccgtcttggmcgtggaagtacgctcccaggkaaagtcgcccttcaatttgataaagatattttacaaarcctagctaagaactacgagattgtcgtkgtcactggaacmaayggaaaaaccytgacaactgccctcactgtcggyattttaaaagargtytatggtcaagttctraccaayccaagcggtgccaacatgattacaggrattgcracaaccttcytaacagccaaatcttcwaaaactgggaaaaatattgccgtcctmgaaatygacgaagccagtctatctcgtatctgtgactatatccagcctagtctttttgtcattactaatatcttccgtgaccagatggaccgtttcggtgaaatctatactacctataacatgatattggatgccattcgraaagttccaactgctactgttctccttaacggagacagtccacttttctacaagccaactattccaaaccctatagagtattttggttttgacttggaaaarggaccagcccaactkgctcactacaataccgaagggattctctgtcctgactgccaaggcatcctcaaatatgagcataatacctatgcaaacttgggtgcctatatctgtgarggttgtggatgtaaacgtcctgatctcgactatcgtttgacaaaactggttgagttgaccaacaatcgctctcgctttgtcatagacggccaagaatacggtatccaaatcggcgggctctataatatctataacgccctagctgctgtggccatcgcccgtttcctmggygymgattcscaactcatcaaacagggatttgacaagagccgtgctgtctttggacgccaagaaacctttcatatcggtgacaagraatgtacccttgtcttgattaaaaatccagtcggtgcaacccaagctatcgaaatgatcaaactagcaccttatccatttagcctatctgtcctccttaatgccaactatgcagatggaattgacactagctggatctgggatgcagactttgarcaaatcactgacatggacattcctgaaatcaacgctggcggtgttcgtcattctgaaatcgctcgtcgcctccgagtgactggctatccagctgagaaaatcactgaaacgagtaatctggagcaagttctcaagaccattgagaatcaagactgcaagcatgcctatattctggcaacttatactgccatgctggaatttcgtgaactgctggctagtcktcagattgttagaaaggagatgaactaactaat

SEQ ID NO: 1049 - DNA, 225 bp, Streptococcus pneumoniae
  misc_feature (1)..(225): tiling:Spneumo1:WAN024G4R; Cluster includes WAN023LGR 3144 87_1918||||1039114..1039338|-|225 bp|EGAD orf prediction|S .pneumoniae|R6|NC_003098.1|ORF|110
atgaacttgtttcccagcaattttatcagaaactggtatttcgataagtgtaacttctccttcgctagatacttcttctggaagcattttttccagcatggcttcatagactggcgtacctttgagcaaatccatgataatataagaaacaagagtgacaagaccaagtggcataaggttgcgaatatctcctaccatctcagttacgaggatcatagcggttaa

SEQ ID NO: 1050 - DNA, 648 bp, Streptococcus pneumoniae
  misc_feature (1)..(648): tiling:Spneumo1:WAN024CFM; Cluster includes WAN023RWV cont ig_1609_8||||5067..5714|-|648 bp|Glimmer 2.02 orf predicti on|S.pneumoniae|670|WAN01UDCD|ORF|001
atgaactttaataaaattgatttagacaattggaagagaaaagagatatttaatcattatttgaaccaacaaacgacttttagtataaccacagaaattgatattagtgttttataccgaaacataaaacaagaaggatataaattttaccctgcatttattttcttagtgacaagggtgataaactcaaatacagcttttagaactggttacaatagcgacggagagttaggttattgggataagttagagccactttatacaatttttgatggtgtatctaaaacattctctggtatttggactcctgtaaagaatgacttcaaagagttttatgatttatacctttctgatgtagagaaatataatggttcggggaaattgtttcccaaaacacctatacctgaaaatgctttttctctttctattattccatggacttcatttactgggtttaacttaaatatcaataataatagtaattaccttctacccattattacagcaggaaaattcattaataaaggtaattcaatatatttaccgctatctttacaggtacatcattctgtttgtgatggttatcatgcaggattgtttatgaactctattcaggaattgtcagataggcctaatgactggctttta

SEQ ID NO: 1051 - DNA, 1100 bp, Streptococcus pneumoniae
  misc_feature (1)..(1100): tiling:Spneumo1:WAN024D5F; Cluster includes WAN0243XV spr1 136|leuA-truncation|15903179|NP_358729.1|1138704..1139138| -|435 bp|2-isopropylmalate synthase, truncation|S.pneumoni ae|R6|NC_003098.1|ORF|422
atgaactttcaattagctaaatattctttactgaagarattttyagaaaatataggatttaccacacyagaggaatrtggtgccatcttcaaatacctgattgagaatgtcaagacggatcgtcagatcatctrttcgcctcactgtcatgatgacctcggaatggcagtggcaaatagccttgctgctgtcaagaatggtgcaggacgtgttgaagrgactatcaatggtattagggagcgagctgraaatgctgctttggaagarattgcaktggctctcaatattcgccaagattactaccaagtagaaaccagtattgtcctaaatgagaccatcaatacgtcagaaatggtttctcgcttctctggtattccagttcctaaaaacaaagccgtcgttggtggcaataccttctcccacgaatctggtattcaccaagatggagtccttaaaaatcctctcacttatgagatcatcacacctgaattggttggtgttaagattcygcttggaraattatctggtcgccatgcttttgttgagaaactgagagaattggccctagattttacagaagaggatatcaaaccactctttgctaagttcaaggcactggycgataagaagyaagaaatcacagatgcagatmytcgagctttggtagctggaaccatggttgaaaatccagaaggcttccactttgatgatttacaacttcaaactcatgcagataatgacattgaagcgctcgttagcctagccaatatggatggtgagaaagtcgaatttaatgcgacagggcaaggttccgttsaagcaatctttaaygytatcgataagttctttaaccaatctgttcgtttggtgtcctacacyatcratgcggtaacagatggaatcgatrcccaggatcgggttttggtcactgttgaaaacagagatacagaaaccatctttaatgcagcagggcttgattttgatgtgttgaaggcttctgctattgyctatataaacgctaatacctttgttcaaaaagagaatgcaggtgagatgggacgcagtgtttcttaccacgatatgcctagtgtgtaactaat

SEQ ID NO: 1052 - DNA, 1448 bp, Streptococcus pneumoniae
  misc_feature (1)..(1448): tiling:Spneumo1:WAN024CPW; Cluster includes WAN0244IH spr0 393|gatB|15902437|NP_357987.1|388939..390381|-|1443 bp|Glu tamyl tRNA-Gln amidotransferase subunit B|S.pneumoniae|R6| NC_003098.1|ORF|221
atgaactttgaaacagtcatyggacttgaagtccacgtagagctcaacaccaattcaaaaatcttctcacctacttctgcccacttyggaaatgaycaaaatgccaacactaacgtgattgactggtctttcccaggagttctrccagttctcaataaaggggttgtygatgccggwatcaaggctgctcttgccctcaacatggacatccacaaaaaratgcactttgaccgcaagaactacttctaycctgataaycccaaagcctaccaaatttctcartttgatgarccaatcggwtataayggctggattgaagtcrarctagaagacggtacraccaagaaaatyggtatcgaacgygcccacytagaggaagacgctggtaaaaacacccatggtacagayggctactcttatgttgacctcaaccgccaaggggttcccttgattgagattgtatctgaggcagatatgcgttckccwgargargcctatgcttatctgacagccctcaaggaagttatccagtacgctggcatttctgacgttaagatggargaaggttckatgcgtgtggatgccaacatctcccttcgyccttatggtcaagaraaattcggtaccaagactgaattgaagaacctcaactccttctcaaacgttcgyaarggkcttgaatacgaagtccaacgycargctgaaatwcttcgctcaggtggtcaaatccgccaagaaacacgccgttacgatgaagckaayaaarcaaccatyctcatgcgtgtcaaggaaggggctgcwgactaccgctacttcccagaaccagacytacccctctttgaaatttytgacgagtggattgaggaaatgcggactgarttgccagagtttccaaaagaacgtcgtgcgcgttatgtatctgaccttggtttatcagactacgatgctagtcagttgactgctaataaagtcacttctrayttctttgaaaaagctgttgcyctagrtggtgatgccaaacaagtctctaactggctccaaggggaagtcgctcagttcttgaatgctgaaggtaaaacactggaacaaatcgaattgacaccagaaaacttggktgaaatgattrccatcatcgaagacggtactatttcatctaagattgccaagaaagtctttgtccatctagctaaaaatggcggtggcgcgcgtgaatacgtggaaaaagcaggtatggttcaaatttcagatccagctatcttgatcccaatcatccaccaagtctttgccgataacgaagctgctgttgycgacttcaagtcaggcaaacgtaaygcmgacaargccttyacaggattccttatgarggcaaccaaaggccaagccaacccacaagttgcccttaaactacttgcacaggaattggcgaagttgaaagaaaactarctaat

SEQ ID NO: 1053 - DNA, 171 bp, Streptococcus pneumoniae
  misc_feature (1)..(171): tiling:Spneumo1:WAN024ASZ; Cluster includes WAN0242US SP05 35||15900448|NP_345052.1|513369..513533|+|165 bp|hypotheti cal protein|S.pneumoniae|TIGR4|NC_003028.1|ORF|020
atgaagaaaaaaatactgattattttcgttctgtatctaatcatgtccatctttctatatccgcttagggagagtgcttggtatcagctattttataccatagcctatgtgattgcagttatgatctattttgctatcaataaaaagaaaggagaaaagaaaykaactaat

SEQ ID NO: 1054 - DNA, 162 bp, Streptococcus pneumoniae
  misc_feature (1)..(162): tiling:Spneumo1:WAN024ASY; Cluster includes WAN023RND cont ig_1578_2||||155..316|+|162 bp|Glimmer 2.02 orf prediction |S.pneumoniae|670|WAN01UDGZ|ORF|000
atgaagaaaaaaatacttatcattttcatcttgtatctaatcatgtccatctttctttatccgcttagggaaagtatttggtatcagctattttataccatagcctatgtgattgcagttatgatctattttgctttaactaaaaagaaaggagcaaagaaa

SEQ ID NO: 1055 - DNA, 1261 bp, Streptococcus pneumoniae
  misc_feature (1)..(1261): tiling:Spneumo1:WAN024DUA; Cluster includes WAN02439C spr2 021|gsp-781|15904062|NP_359612.1|2012843..2014021|-|1179 b p|General stress protein GSP-781|S.pneumoniae|R6|NC_003098 .1|ORF|221
atgaagaaaaaaatcttagcgtcacttttattaagtacagtaatggtttctcaagtagctgttttaacaactgcgcatgcagaaacgactgatgacaaaattgctgctcaagataataaaattagtaacttaacagcacaacaacaagaagcccaaaaacaagttgaccaaattcaggagcaagtatcagctattcaagctgagcagtctaacttgcaagctgaaaatgatagattacaagcagaatctaagaaactcgagggtgagattacagaactttctaaaaacattgtttctcgtaaccaatcgttggaaaaacaagctcgtagtgctcaaacaaatggagccgtaactagctatatcaataccattgtaaactcaaaatcaattacagaagctatttcacgtgttgctgcaatgagtgaaatcgtatctgcaaacaacaaaatgttagaacaacaaaaggcagataaaaaagctatttctgaaaaacaagtagcaaataatgatgctatcaatactgtaattgctaatcaacaaaaattggctgatgatgctcaagcattgactacgaaacaggcagaactaaaagctgctgaattaagtcttgctgctgagaaagcgacagctgaaggggaaaaagcaagtctattagagcaaaaagcagyagctgaggcagaggctcgtgcagctgcggtagcagaagcagcttataaagaaaaacgagctagccaacaacaatcagtacttgcttcagcaaacactaacttaacagctcaagtgcaagcagtatctgaatctgcagcagcacctgtccgtgcaaaagttcgtccaacatacagtacaaacgcttcaagttatccaattggagaatgtacatggggagtaaaaacattggcaccttgggctggagactactggggtaatggagcacagtgggctacaagtgcagcagcagcaggtttccgtacaggttcaacacctcaagttggagcaattgcatgttggaatgatggtggmtatggtcacgtagcggttgttacagctgttgaatcaacaacacgtatccaagtatcagaatcaaattatgcaggtaatcgtacaattggaaatcaccgtggatggttcaatccaacaacaacttctgaaggttttgttacatatatttatgcagattaaytwayagagggactcgaatagagccctcttttcaggttttaccgtgacaatccctattaaaaattatatcaaaatagcttga

SEQ ID NO: 1056 - DNA, 948 bp, Streptococcus pneumoniae
  misc_feature (1)..(948): tiling:Spneumo1:WAN024DCS; Cluster includes WAN02444U spr0 884|ppmA|15902928|NP_358478.1|875223..876164|+|942 bp|Prot einase maturation protein|S.pneumoniae|R6|NC_003098.1|ORF| 111
atgaagaaaaaattattggcaggtgccatcacactattatcagtagcaactttagcagcttgttcgaaagggtcagaaggdgcagaccttatcagcatgaaaggggatgtcatyacagaacatcaattttatgagcaagtgaaaarcaacccttcagcccaacaagtcttgttaaatatgaccatccaaaaagtttttgaaaaacaatatggctcagagcttgatgataaagaggttgatgatactattgccgaagaaaaaaaacaatatggcgaaaactaccaacgtgtcttgtcacaagcaggtatgactcttgaaacacgtaaagctcaaattcgtacaagtaaattagttgagttggcagttaagaaggtagcagaagctgaattgacagatgaagcctataagaaagcctttgatgagtacactccagatgtaacggctcaaatcatccgtcttaataatgaagataaggccaaagaagttctcgaaaaagccaaggcagaaggtgctgattttgctcaattagccaaagataattcaactgatgaaaaaacaaaagaaaatggtggagaaattacctttgattctgcttcaacagaagtacctgagcaagtcaaaaaagccgctttcgctttagatgtggatggtgtttctgatgtgattacagcaactggyacacaagcytacagtarcyaatattacattgtaaaactcactaagaaaacagaaaaatcatctaatattgatgactacaaagaaaaattaaaaactgttatcttgactcaaaaacaaaatgattcaacatttgttcaaagcattatcggaaaagaattgcaagcagccaatatcaaggttaaggaccaagccttccaaaatatctttacccaatatatcggtggtggagattcaagctcaagcagtagtacatcaaacgaactarctaat

SEQ ID NO: 1057 - DNA, 2171 bp, Streptococcus pneumoniae
  misc_feature (1)..(2171): tiling:Spneumo1:WAN024FZU; Cluster includes WAN0243YB spr1 120|glnP|15903163|NP_358713.1|1119658..1121823|+|2166 bp|A BC transporter membrane spanning permease - glutamine tran sport|S.pneumoniae|R6|NC_003098.1|ORF|111
atgaagaaaaaatttctagcatttttgctaattttattcccaattttctcattaggtattgccaaagcagaaacgattaagattgtttctgataccgcctatgcaccttttgagtttaaagattcagatcaaacttataaaggaattgatgktgacattattaacaaagtcgctgagattaaaggctggaacattcagatgtcctatcctggatttgacgcagcagtcaatgcggttcaagctgggcaagccgacgctatcatggcagggatgacaaagactaaagaacgtgaaaaagtcttcaccatgtctgatacttactatgatacaaaagttgtcattgctactacaaagtcacacaaaattagcaagtacgaccaattaactggcaaaaccgttggtgttaaaaacggaactgccgctcaacgtttccttgaaacaatcaaagataaatayggctttactattaaaacatttgacactggkgatttaatgaacaacagcttgagtgctggtgccatcgatgccatgatggatgacaaacctgttatcgaatatgccattaaccaaggtcaagacctccatattgaaatggatggtgaagctgtaggaagttttgctttcggtgtgaaaaaaggaagtaaatacgagcacctggttactgaatttaaccaagccttgkctgaaatgaaaaaagatggtagtcttgataaaattatcaagaaatggactgcttcatcatcttcagcagtgccaactacaactactctcgcaggattaaaagctattcctgtkaaggctaaatatatcattgccagcgattcttcttttgcmccttttgttttccaaaattcaagcaaccaatacactggtattgatatggaattgattaaggcaatcgctaaagaccaaggktttgaaattgaaatcaccaaccctggttttgatgctgctatcagtgctgtccaagctggtcaagccgatggtatcatygctggtatgtctgtcacagatgctcgtaaggcaacttttgacttctcagaatcatactacactgctaataccattcttggwgtcaaagaatcaagyaatattgcttcttatgaagatctaaaaggaaagacagtcggtgttaaaaacggaactgcttctcaaaccttcctaacagaaaatcaaagcaaatacggytacaaaatcaaaacctttgctgatggttcttcaatgkatgacagtttaaacactggtgccattgatgccgttatggatgatgaacctgttctcaaatattctatcagccaaggtcaaaaattgaaaactccaatctctggaactccaatcggtgaaacagcctttgccgttaaaaaaggagcaaatccagaactgattgaaatgttcaacaacggacttgcaaaccttaaagcaaacggtgaattccaaaagattcttgacaaatacctagctagcgaatcttcaactgcttcaacaagtactgttgacgaaacaacgctctggggcttgcttcaaaacaactacaaacaactccttagcggtcttggtatcactcttgctctagctcttatctcatttgctattgccattgtcatcggaattatcttcggtatgtttagcgttagcccatacaaatctcttcgcgtcatctctgagattttcgttgacgttattcgtggtattccattgatgattcttgcagccttcatcttctggggaattccaaacttcatcgagtctatcacaggccaacaaagcccaattaacgactttgtagctggaacmattgccctctcactcaatgcggctgcttatatcgctgaaatcgttcgtggtggtattcaggccgttccagttggccaaatggaagccagccgaagcttgggtatctcttatggaaaaaccatgcgtaagattatcttgccacaagyaactaaattgatgttgccaaactttgtcaaccaattcgttatcgctcttaaagatacaactatcgtatctgctatcggtttggttgaactcttccaaactggtaagattatcattgctcgtaactaccaaagtttcaagatgtatgcaatccttgctatcttctatcttgtaattatcacacttttgactagactagcgaaacgcttagaaaagaggattcgttaactaat

SEQ ID NO: 1058 - DNA, 1167 bp, Streptococcus pneumoniae
  misc_feature (1)..(1167): tiling:Spneumo1:WAN024GDE; Cluster includes WAN0244B3 spr0 659|livJ|15902703|NP_358253.1|662455..663615|+|1161 bp|ABC transporter substrate-binding protein - branched chain am ino acid transport|S.pneumoniae|R6|NC_003098.1|ORF|111
atgaagaaaaaatttgccctatcgtttgtggcgcttgcaagtgtagcacttcttgcagcctgtggagaagtgaagtctggagcagtcaacactgctggtaactcagtagaggaaaagacaattaaaatcgggtttaactttgaagaatcaggttctttagctgcatacggaacagctgaacaaaaaggtgcccaattggctgttgatgaaatcaatgccgcaggtggtatcgatggaaaacaaatcgaagtagtcgataaagataataagtctgaaacagctgaggctgcttcagttacaactaaccttgtaacccaatctaaagtatcagcagtcgtaggacctgcgacatctggtgcgactgcagctgcggtagcgaacgctacaaaagcaggtgttccattgmtctcaccaagtgcgactcaagatggattgactaaaggtcaagattacctctttattggaactttccaagatagcttccaaggaaaaattatctcaaactatgtttctgaaaaattaaatgctaagaaagttgttctttacactgacaatgccagtgactatgctaaagggattgcmaaatctttccgcgagtcatacaagggtgaaatcgttgcagatgaaactttcgtagcaggtgacacagacttycaagcagcccttacaaaaatgaaagggaaagactttgatgctatcgttgttcctggttactataatgaggctggtaarattgtaaaccaagcgcgtggyatgggaattgacaaaccaatcgttggtggtgatggattcaacggtgaggagtttgtacaacaagcaactgctgaaaaagcatcaaacatctactttatctcaggcttctcaactactgtagaagtttcagctaaagctaaagccttccttgacgcttaccgtgctaagtacaatgaagagccttcaacatttgcagccttggcttatgattcagttcaccttgtagcaaacgcagcaaaaggtgctaaaaattcaggtgaaatcaagrataaccttgctaaaacaaaagattttgaaggtgtaactggtcaaacaagcttcgatgcagaccacaacacagtcaaaactgcttacatgatgaccatgaacaatggtaaagttgaagcagcagaagttgtaaaaccactaactaat

SEQ ID NO: 1059 - DNA, 1205 bp, Streptococcus pneumoniae
  misc_feature (1)..(1205): tiling:Spneumo1:WAN024BGU; Cluster includes WAN0244A5 spr0 693||15902737|NP_358287.1|693198..694397|+|1200 bp|Conserv ed hypothetical protein|S.pneumoniae|R6|NC_003098.1|ORF|11 1
atgaagaaaaagaatggtaaagctaaaaagtggcaactgtatgcagcaatcggtgctgcgagtgtagttgtattgggtgcyggggggattttactctttagacaaccttctcagactgctctaaaagatgagcctactcatcttgttgttgccaakgaaggaagcgtggcmtcctctgttttattgtcagggacagtaacagcaaaaaatgaacaatatgtttattttgatgctagtaagggtgatttagatgaaatccttgtttctgtgggcgataaggtcagcgaagggcaggctttagtcaagtacagtagttcagaagcgcaggcggcctatgattcagctagtcgagcagtagctarggcagatcgtcatatcaatgaactcaatcaagcacgaaatgaagccgcttcagctcmggctccacagttaccagcgccagtaggaggagaagatgcaacggtgcaaagcccaactccagtggctggaaattctgttgcttctattgaygctcaattgggtgatgcccgtgatgcgcgtgcagatgctgcrgcgcaattaagcaaggctcaaagtcaattggatgcaacaactgttctcagtaccctagagggaactgtrgtcgaagtcaatagcaatgtttctaaatctccaacaggggcgagycaagttatggttcatattgtcagcaatgaaaatttacaagtcaagggagaattgtctgagtacaatctagccaacctttctgtaggtcaagaagtaagctttacttctaaagtgtatcctgataaaaaatggactgggaaattaagctatatttctgactatcctaaaaacaatggtgaagcagctagtccagcagccgggaataatacaggttctaaatacccttatactattgatgtgacaggcgaggttggtgatttgaaacarggtttttctgtcaacattgaggttaaaagcaaaactaaggctattcttgttcctgttagcagtctagtaatggatgatagtaaaaattatgtctggattgtggatgaacaacaaaaggctaaaaaagttgaggtttcattgggaaatgctgacgcagaaaatcaagaaatcacttctggtttaacgaayggtgctaaggtcatcagtaatccaacatcttccttggaagaaggaaaagaggtgaagrctgatgaagcaactaattarctaat

SEQ ID NO: 1060 - DNA, 623 bp, Streptococcus pneumoniae
  misc_feature (1)..(623): tiling:Spneumo1:WAN024DKV; Cluster includes WAN0244O8 spr0 186||15902230|NP_357780.1|194667..195284|+|618 bp|Hypothet ical protein|S.pneumoniae|R6|NC_003098.1|ORF|121
atgaagaaaaargacttagtagaccaactagtctcagagatcgagacggggaaagtcaggacactgggaatatacggtcatggagcttcaggtaaatcaacctttgcacaggaattgtaccaagctttagattctactacagtaaatttgctagaracagatccytatatcacctcmggacgcyatytggtagtacccaaggacgcgccgaatcaaaaggtgacagccagtctgccagtggcgcatgaactggagagtttgcagagagatatccttgccttgcaggcgrgtatggatgtcttracaattgaagaaccttggaaggytagtgaggtcttgtctggagccaaaccaattttgattgtcgrmgsgatgtctgtkggctwtctaccsawggmrytctttgaaaaaaccatctgtttctacacggatgaggagaccgaattaaagcgacgccttgctagagatacgactgtgagaaatcgcgatgcatcctttatattggctagccatcagatgagacgggagcagtatctgcgatactataaagaaactgagtctaaggcggatatcttagtggaccaatcagaagataaatttgatgtcaagaggacttaactaat

SEQ ID NO: 1061 - DNA, 78 bp, Streptococcus pneumoniae
  misc_feature (1)..(78): tiling:Spneumo1:WAN024CLL; Cluster includes WAN023S8Y NC_0 03028.1_2217||||1676003..1676080|-|78 bp|Glimmer 2.02 orf prediction|S.pneumoniae|TIGR4|NC_003028.1|ORF|011
atgaagaaaaatcatttagtaggagatgctctgattttgacggttagtgatcagattgaagagttggattatttttta

SEQ ID NO: 1062 - DNA, 1013 bp, Streptococcus pneumoniae
  misc_feature (1)..(1013): tiling:Spneumo1:WAN024DUJ; Cluster includes WAN02439U spr2 003||15904044|NP_359594.1|1996700..1997707|-|1008 bp|Conse rved hypothetical protein|S.pneumoniae|R6|NC_003098.1|ORF| 112
atgaagaaaacatggaaagtgtttttaacgcttgtaacagctcttgtagctgttgtgcttgtggcctgtggtcaaggaactgcttctaaagacaacaaagaggcagaacttaagaaggttgactttatcctagaytggacaccaaataccaaccacacagggctttatgttgccaaggaaaaagrwtatttcaaagaagctggagtggatgttgatttgaavyygccrmsagaagaaagttcttctractwrkttatcaacggaaaggcaccatttgcagtgtatttccaagactacatggctaagaaattggaaaaaggagcaggaatcactgccgttgcagctattgttgaacacaatacatcaggaatcatctctcgtaaatctgataatgtaagcagtccaaaagacttggttggtaagaaatatgggacatggaatgacccaactgaacttgctatgttgaaaaccttggtagaatctcaaggtggagactttgagaaggttgaaaaagtaccaaataacgactcaaactcaatcacaccgattgccaatggcgtctttgatactgcttggatttactacggttgggatggtatccttgctaaatctcaaggtgtagatgctaacttcatgtacttgaaagactatgtcaaggagtttgactactattcaccagttatcatcgcaaacaacgactatctgaaagataacaaagaagaagctcgcaaagtcatccaagccatcaaaaaaggctaccaatatgccatggaacatccagaagaagctgcagatattctcatcaagaatgcacctgaactcaaggaaaaacgtgactttgtcatcgaatctcaaaaatacttgtcaaaagaatacgcaagcgacaaggaaaaatggggtcaatttgacgcagctcgctggaatgctttctayaaatgggataaagaaaatggtatccttmaagaagacttgacagacaaaggcttcaccaacgaatttgtgaaataactaat

SEQ ID NO: 1063 - DNA, 198 bp, Streptococcus pneumoniae
  misc_feature (1)..(198): tiling:Spneumo1:WAN024DJ5; Cluster includes WAN0244JQ spr0 348||15902392|NP_357942.1|350229..350423|+|195 bp|Hypothet ical protein|S.pneumoniae|R6|NC_003098.1|ORF|111
atgaagaaaactgtttataaaaaaytgggtatttcaattattgcgagtactttattggctagccagttatcgacagtatctgctttgagtgttatttctagtamrggtgaagaatatgaggtaagtgagacactagaaaaaggtccagrrtctaatgattcttcattatctgagatttcaccaacrtatggttmatac

SEQ ID NO: 1064 - DNA, 1158 bp, Streptococcus pneumoniae
  misc_feature (1)..(1158): tiling:Spneumo1:WAN024DZL; Cluster includes WAN0243DE spr1 875||15903916|NP_359466.1|1844525..1845667|-|1143 bp|Conse rved hypothetical protein|S.pneumoniae|R6|NC_003098.1|ORF| 100
  misc_feature (437)..(437): n is a, c, g, or t
  misc_feature (438)..(438): n is a, c, g, or t
  misc_feature (439)..(439): n is a, c, g, or t
  misc_feature (440)..(440): n is a, c, g, or t
  misc_feature (441)..(441): n is a, c, g, or t
  misc_feature (442)..(442): n is a, c, g, or t
  misc_feature (443)..(443): n is a, c, g, or t
  misc_feature (444)..(444): n is a, c, g, or t
  misc_feature (445)..(445): n is a, c, g, or t
  misc_feature (446)..(446): n is a, c, g, or t
  misc_feature (447)..(447): n is a, c, g, or t
  misc_feature (448)..(448): n is a, c, g, or t
  misc_feature (449)..(449): n is a, c, g, or t
  misc_feature (450)..(450): n is a, c, g, or t
  misc_feature (451)..(451): n is a, c, g, or t
atgaagaaaagaatgttattagcgtcaacagtagccttgtcatttgccccagtattggcaactcaagcagaagaagttctttggactgcacgtagtgttgagcaaatccaaaacgatttgactaaaacggacaacaaaacaagttataccgtacagtatggtgatactttgagcaccattgcagaagccttgggtgtagatgtcacagtgcttgcgaatctgaacaaaatcactaatatggacttgattttcccagaaactgttttgacaacgactgtcaatgaagcagaagaagtaacagaagttgaaatccaaacacctcaagcagactctagtgaagaagtgacaactgcgacagcagatttgaccactaatcaagtgaccgttgatgatcaaactgttcaggttgcagacctttctcaaccaattgcagaagnnnnnnnnnnnnnnnctccaaaagaagtagcatcaagttcagaagttacaaagacagtgattgcttctgaagaagtggcaccatctacgggcacttctgtcccagaggagcaaacggccgaaacaagcagtgcagttgcagaagaagctcctcaggaaacgactccagctgagaagcaggaaacacaaacaagccctcaagctgcatcagcagtggaagcaactacaacaagttcagaagcaaaagaagtagcatcatcaaatggagctacagcagcagtttctacttatcaaccagaagaaacgaaaataatttcaacaacttacgaggcaccagctgcgcccgattatgctggacttgcagtagcaaaatctgaaaatgcaggtcttcaaccacaaacagctgcctttaaagaagaaattgctaacttgtttggcattacatcctttagtggttatcgtccaggagacagtggagatcacggaaaaggtttggctatcgaytttatggtaccagaacgttcagaattaggggataagattgcggaatatgctattcaaaatatggccagccgtggcattagttacatcatctggaaacaacgtttctatgctccattcgatagcaaatatgggccagctaacacttggaacccaatgccagaccgtggtagtgtgacagaaaatcactatgatcacgttcacgtttcaatgaatggataa

SEQ ID NO: 1065 - DNA, 1119 bp, Streptococcus pneumoniae
  misc_feature (1)..(1119): tiling:Spneumo1:WAN024DZN; Cluster includes WAN023ICJ 8661 4_3265||||1857303..1858415|-|1113 bp|EGAD orf prediction|S .pneumoniae|TIGR4|WAN01UC25|ORF|011
atgaagaaaagaatgttattagcgtcaacagtagccttgtcatttgccccagtattggcaactcaagcagaagaagttctttggactgcacgtagtgttgagcaaatccaaaacgatttgactaaaacggacaacaaaacaagttataccgtacagtatggtgatactttgagcaccattgcagaagccttgggtgtagatgtmacagtgcttgcgaatctgaacaaaatcactaatatggacttgattttcccagaaactgttttgacaacgactgtcaatgaagcagaagaagtaacagaagttgaaatccaaacacctcaagcagactctagtgaagaagtgacaactgcgacagcagatttgaccactaatcaagtgaccgttgatgatcaaactgttcaggttgcagacctttctcaaccaattgcagaagttacaaagacagtgattgcttctgaagaagtggcaccatctacgggcacttctgtcccagaggagcaaacgaccgaaacaactcgcccagttgmagaagmarctcctcaggaaacgactccagctgagaagcaggaaacacaarcaagccctcaagctgcatcagcagtggaagyaactacaacaagttcagaagcaaaagaagtagcatcatcaaatggagctacagcagcagtttctacttatcaaccagaagaracgaaartaatttcaacaacttacgaggctccagctgcgcccgattatgctggacttgcagtagcaaaatctgaaaatgcaggtcttcaaccacaaacagctgcctttaaagaagaaattgctaacttgtttggcattacatcctttagtggttatcgtccaggagacagtggagatcacggaaaaggtttggctatcgactttatggtaccagaacgttcagaattaggggataagattgcggaatatgctattcaaaayatggccagccgtggcattagttacatcatctggaaacaacgtttctatgctccattcgatagcaaatatgggccagctaacacttggaayccaatgccagaccgtggtagtgtgacagaaaatcactatgaycacgttcacgtttcaatgaatggactaactaat

SEQ ID NO: 1066 - DNA, 657 bp, Streptococcus pneumoniae
  misc_feature (1)..(657): tiling:Spneumo1:WAN024DTM; Cluster includes WAN0244SN-3 sp r0027||15902071|NP_357621.1|27706..28365|+|660 bp|Hypothet ical protein|S.pneumoniae|R6|NC_003098.1|ORF|111
  misc_feature (14)..(14): n is a, c, g, or t
  misc_feature (36)..(36): n is a, c, g, or t
  misc_feature (62)..(62): n is a, c, g, or t
atgaagaaaagcantattttattgctatgtattggnttacagtatgaaaccatctactatanggacggttcgaggtcagstgcggaatatggactmatgggagtttcyatctttctagctctcttttacatgattccggctctttattttctcttccatattgggaaaaaatgggaattgccaaagaaggttttgattctgtctttattgggagggatgttccttkcaggctggttgtctagttttgctaatacttatatmcatgatttactgggggttcttttcccagatagtccatttttaaatgcctttgaaagtgctattgyggctcctttggtagaagaacccttgaaattattgycacttgtttttgttttggctttgattcctgtgcgaaaattaaaatytttgtttttacttggaattgcytccggtttgggattccaaatgattraggatattggttatattcgtacggatttgccagagggctttgactttactatttcgcgaattttagagcgtatcatctcaggaattgcctctcactggactttttcaggtctagctgtagtaggtgtttacttgctttacagagcctataaaggacagaaggttggcaagaaacagggycttattkttywaggtttagccttg

SEQ ID NO: 1067 - DNA, 683 bp, Streptococcus pneumoniae
  misc_feature (1)..(683): tiling:Spneumo1:WAN024DLF; Cluster includes WAN0244PG spr0 142||15902186|NP_357736.1|150908..151585|+|678 bp|Hypothet ical protein|S.pneumoniae|R6|NC_003098.1|ORF|110
atgaagaaaatgaaagaagtgaaatttcacctagcaactggcttgttgattttgacttattacctcatttttaatgtcacatcagacttagattttatggttgctttgtctgataatatgtactatgtgttccaagttttattggtacttattctgggaactatagctacaattgcttttgtcaaaagtgaacattggaaagagtgtggtcgtttccagtttcgttggtyttacctgggtgttttccttctttcttttttcttattgttcgtgtgggcaaatctaacaacctatatctttcctcgtacccagaatggaagtacagtcgtagaagtagccaccartttaacaggaattagctattttgttacgcgaatactttatactagtattatcgcacctgtatcagaagaggttgtttgtcgtggtcttttgatgacaagtttatctaaagttaakagatactatcttgatgttcttgtttccgctgccatatttggcgctatgcatgttttgcagtatggttggataacgacagatttcataaagtattttggaatgggcttgatattttgtatgatgtttcgctacacccgatccatctattgggctatagctctgcatgcttcatggaatagyttcttactcattgttactttattggtatttggatattarctaat

SEQ ID NO: 1068 - DNA, 916 bp, Streptococcus pneumoniae
  misc_feature (1)..(916): tiling:Spneumo1:WAN024DF4; Cluster includes WAN0244A0 spr0 698||15902742|NP_358292.1|699119..699994|+|876 bp|Conserve d hypothetical protein|S.pneumoniae|R6|NC_003098.1|ORF|112
atgaagaaaatgaagtattacgaagaaacaagcgctttgctacatgagttttctgaggagaatcaaaagtattttgaggagttgtgggaaagttttaatcttgctggatttctctatgatgaagactatctcagagagcagatctatttgatgatgctagatttctcagaagcagaacgagatggcatgagtgcagaggattatctaggtaagaatcctaaaaaaataatgaaagagattctcaagggagcacctcgcagttctatcaaagagtcccttttgacgccaattcttgtcctggcggtattacrttattatcaactactargtgatttttctaaaggtcctctmttaacagtcaatttgctcacatttttagggcaacttcttatttttctgattggatttggacttgtggccacaattttacgaagaagtttagtccaagattctcctaaaatgaaaattggcacttacattgttgttgggactatagttcttctagttgttttaggatatgtaggaatggcaagcttcatacaagaaggagycttttatattccggctccctgggatagtttgtctrtctttacgatttcgctagttatcggtatttggaattggaaagaagcggtctttcgtccatttgtcagtatgattattgcccatcttgtggtgggttctctgctccgttattatgagtggatgggaatttcaaatgttttccttacaaaagttattcctttagctgtcctctttattggmatytttstcttgttccgtgggtttaagaagataaaatggagtgaagtaywrwcwaawagccgttgcaaagcggttttttgttataatgaagggaagaatgttagaaattaaaggagaaaaatttgatgagatacataactcttggtcaaga

SEQ ID NO: 1069 - DNA, 1278 bp, Streptococcus pneumoniae
  misc_feature (1)..(1278): tiling:Spneumo1:WAN024FSV; Cluster includes WAN0243UP spr1 250||15903293|NP_358843.1|1249324..1250595|+|1272 bp|Conse rved hypothetical protein|S.pneumoniae|R6|NC_003098.1|ORF| 111
atgaagaaacaaagcaagtacaaagaggtcgtttcctatctgaaaaatggtatcgagtctgracgatttccgacgggtagtcgcctgccttctatccgtcaactgagccttgactttcactgcagcaaggacaccattcaacgagccctgctggaattacggcacgaacaatacctctatgccaagcctcagagtggctactatgtattagaacaagggcaacatcaagacctagaaatcgaggttaccgacgaacatgccagtgcctatgacgatttccgactctgtgtcaatgaaaccttgattggmcgagaaaactacctcttcaactactatgacaatcaagaaggattagaagacctaagacagtccattcacaaactcctmtttgagcaagctctctactgcaaggctaaccaactagtactgacttctggaacccaacaagccttgtttatcctctctcaaatatcctttcctagmcaagccaaggaaatcttggtggaacagccaacctaccatcggatgaatcgcctcttgattgcacargggctggactatcaaacgattgaacgaggcattgatgggattgacttggaggagctggaaggccacttcaaaacaggaaaaattaartttttctacaccattccymgatttcactatccyytgggacattcctattctgagcargacaaacgatctattcttaacttagctgccaagtatgatgtctatatcgtagaggacgattatctgggtgatttggactccaagaagggccaaaccttccactatcttgatacagaggagcrtgtcatttatatcaagtccttctcgaccagcctttttcctgcccttcgtattacagcactcattcttccaaatgctatcaaagaagcatttgtggcctacaaaaatatcctagactacgacagcaacctcattatgcaaaaggccctgtcactctatattgacagtcaattgtttgaaaaaaatcgtttggctcgcttgaccaatcatgaatcttaccaaaarcaaatcgaggaaaggataactaaaacaccttgtccccttcctcattatyccctacacgatggyttattgctagacctgagacagtatcctaaaatcgccagtctcaaacacagtcaactgggcttggacttctttgaagaggcctatttaagcacctgyccttatcaatttgccaaggtgtccctagacaatctggaaaatgttttaaactatttaaaagcagaattggaaykaactaat

SEQ ID NO: 1070 - DNA, 2027 bp, Streptococcus pneumoniae
  misc_feature (1)..(2027): tiling:Spneumo1:WAN024GEN; Cluster includes WAN0244CP spr0 601||15902645|NP_358195.1|612603..614624|+|2022 bp|Conserv ed hypothetical protein|S.pneumoniae|R6|NC_003098.1|ORF|11 2
atgaagaaactattcatattaytatcaactttttttctcagcttcttcyttgcttggattattgtcttacgtgcgccacaatatttatatgcaagctatgattccgttwctttacttcgtgtcaaaaaagakrctcaggaaccgackcgtgaggtatttgaacaggaattggagaaktttgyaaactcagaacagagtttaatagctagragaattgtagarccgagtaaggatgggacgactcactttacttatgcaacttatggtcagggaacwttaccaaaasaattccaagaagctagccaagaaagtcgtgaacgtagtgatccgctaaatagttatctccttttrtcaggctccttgacraaagaaaagctwgcygataaattaggagatttrggttataaagcaaktgctgaccgaaagayaccgccctattttcttgcttttcgaatattactaaatccccttattttaattagtttagcaatatttggcttatctttctttgctttagtgattatcactcggattaaggaaatgagagcagcaggtataaaactcttttctggtcagactctcttatccatyatggggcattctttatctactgatatyaartrgctccttctatcagccctcctttccttcctaggtgggggwgtcgttctttttagtcaaggtttgttttatcctatcttgttagccacctatggttttgggattagtttctatctgttgtttttattggcgatttcaattttactaatgctyctttayctaatgagtttgarttacaaagcattagttcccgttattaagggragattaccccttaaacgcytgatgrytttaaccctattgtgtcagttrgtwgctgtytttacagtrggmtacgctgttaagacaggtttgaygtcttaccaacgattgaaagaacttgaaatttcaaaacaagcatggcakgayagagyagactattaycaratttcytttggcttaggtgayagagkaaawgatacagaaaatcagaryaagtggtatgmmtttkccaargaagcartygaarargaacargctctwtwtgtaaargakaatctsmtycattttgcmaatccwcaaggaaaaaatgaamasggrgaracactggatacctatagtycagatgctaatrykctctatgtkagtccmagttatttrgacaaggaaaakgtsgykgtaratgmtgagacyaracagaarytagcycatctycaaaaaggkgartttrkmctcttrytmccagaaymtytkcgytcwcrrgaagcagaacttaagaaagtttttgaagaamgwttgarytattayggaaaatcwrgygaggakrcaagygctcctttrgaktatgaratgaragcgmwygttagytatcttycaayrggasaaaarcgstttgtttataataacggtgarartccmgtatctaytcagtayttracygatccgattttagtkgtattyackccracwtctacaggtgatagtttyatwtcmwwatmtrkttggtctatcaatgctggaaaacaactctttatcaaaggmtatgagagtgggctagaactcttraagaaagctggaatttatgagcaagtatcctatcttaaagaaggaagaagtgtttatctaactcgttataatgaagttcaaactgaaacagcaactttaatcttaggagctattgtkggratagcyagttccttrttactmttttattctgtcaatcttctatatttcgagcaattccgccgagatatcttgattaaacgaatttcaggtttacgattttttgaaacacatgctcagtatatggttagycaatttgcyagttttgtatttggtgctagtytctttattttaagcagtcgagacttggtgattggcttgctcactttattvgtctttctagctagtgcagttytgacgctttaccgycaagcrcagaaagaatctcgtgtttctatgacaattatgaaaggaaaatarctaat

SEQ ID NO: 1071 - DNA, 176 bp, Streptococcus pneumoniae
  misc_feature (1)..(176): tiling:Spneumo1:WAN024AV8; Cluster includes WAN0243WL spr1 182||15903225|NP_358775.1|1181314..1181484|-|171 bp|Hypoth etical protein|S.pneumoniae|R6|NC_003098.1|ORF|112
atgaagaaagwaaatgaatatgtaatttyaacaryagcctcactaggggtgatgattggaatagtrtttgcaatttttttagattttccagttgaatatgstatttctttagghttgttgaatggaatagtattgggttcgctgattktttacaaaaacaataagaattaactaat

SEQ ID NO: 1072 - DNA, 716 bp, Streptococcus pneumoniae
  misc_feature (1)..(716): tiling:Spneumo1:WAN024D3Q; Cluster includes WAN0243I8 spr1 700|treR|15903742|NP_359292.1|1670245..1670955|+|711 bp|Tr ehalose operon transcriptional repressor|S.pneumoniae|R6|N C_003098.1|ORF|111
atgaagaaataccaacaattatttaagcaaatccaagaaaccattcaaaacgagacttacgctgtcggagatttycttcctagcgagcacgaccttatggagcaatatcaagtgagtcgtgataccgtccgaaaggccctgtctctcctccaagaggaaggattgatcaaaaagataagagrgcaaggttctcaagtcgtcaaagaagaaaccgtcaatttccctgtatccaacctaaccagctaccaagaactagttaaagaacttggactgcgctctaaaaccaacgtggtcagtctggacaagattattattgataaaaaatcctcrctgataaccggtttcccagagtttcggatggtttggaaggtggtccgccagcgtgtggtggatgatctggtatccgttctggatacrgactatctggatatggaactmatyccaaatctcactcgccaaatygctgagcagtctatctattcttatatagaaaatggcctcaaactccttattgattatgctcagaaggaaatcaccattgaccactcaagcgaccgagacaagattctcatggacattggcaaagacccttatgtcgtttcgattaaatcaaaagtctatctccaagacggacgccaatttcagtttaccgaaagtcgccataagttagaraaatttagatttgtagattttgcaaaacgcaagaaataactaat

SEQ ID NO: 1073 - DNA, 878 bp, Streptococcus pneumoniae
  misc_feature (1)..(878): tiling:Spneumo1:WAN024DDT; Cluster includes WAN024477 spr0 799||15902843|NP_358393.1|803555..804427|+|873 bp|Hypothet ical protein|S.pneumoniae|R6|NC_003098.1|ORF|111
atgaagaaatcaagaaaattakccacattaggaatctgttcagcyttgtttttaggcttggctgcttgtcaacaacaacatgctacttctgaggggacraatcaaaggcaaagcagttcagcgaaagttccatggaaagcttcatacaccaacctaaacaaccaggtaagtacagaagaggtcaaatctctcttatcagctcacttggatccaaatagtgttgatgcattttttaatctcgttaatgactataatacyattgtcggctcaactggcttatcaggagatttcacttcctttactcacaccgaatacgatgttgagaaaatcagtcatctctggaatcaaaagaagggcgatttygttgggaccaactgccgtatcaatagttattgtcttttgaaaaattcagtcaccattccaaagcttgaaaagaatgaccarttgcttttcctagataatgatgcgattgataaaggaaaggtctttgattcacaagataaggaagagtttgatattctattttcgagagttccaactgagkcaactacagatgtcaaggttcacgctgaaaagatggaarcattcttctcacaatttcaattcaatgaaaaagctcgaatgctgtctgtagtcttgcacgacaatytggatggcgagtatctgtttgtaggycacgttggggtcttagtacctrctgatgacggtttcttatttgtagagaaattgactttcgaagarccctaccaagcgattaaatttgctagtaaggaagattgctacaagtatttrggcaccaagtatgcggattatacaggcgagggactggctaagccttttatcatggataatgataagtgggttaaactttaactaat

SEQ ID NO: 1074 - DNA, 960 bp, Streptococcus pneumoniae
  misc_feature (1)..(960): tiling:Spneumo1:WAN024FZV; Cluster includes WAN0243YC spr1 119||15903162|NP_358712.1|1118532..1119485|-|954 bp|Conser ved hypothetical protein|S.pneumoniae|R6|NC_003098.1|ORF|2 13
atgaagaacaaaagaatatttaaagacttccaagcttcaaaaatgagtttaaacattyacacaagccycttgytagccttygtttttgtcttcataggagagtttgtggcttwyactttrtatggtattrgyttgttagctctcatcggacttgctagaaattttggagaggctggtcaaamtcttgcaasctacytgcagaccttgcatcagagcttgacggataaaacaagygactttcgtttaattttaggattactggcctttggttttattcttaacactgtgttcagayggacaagaaaagttgagaaaagacctattcgaaccttgggattttatagagagaatttcctcagcaatcttctgaaaggatttagtctaggcytggcactttttcttctgaccttgttaggtttagtggtcttaggtcaatatcgtttggaatccattcacttgaatccttattctcttgcctttgtcgtctttactatcccattttggattttacaggggacagcagaagaagtggtggcccgtgcttggctacttcctcaattggcctcaagaaccaatctaaaactagctattcttatatctagcctgttctttaccctgcttcatatgggcaattctggyctcacccctctatctctagtaaatctctttttattcggagttgccatggctctttaycttctcaaaactgatacagtttggggtgttgcaggtattcatggtgcttggaattttgctcagggtaatctctttgggattttagttagtggtcaaccgtcaggaacgtctctratrayctttttaccacaaggcaatcaagattggctatcaggtggttcttttggcatagaaggttccattatgacaagtctggtattactactgctgattgtctatcttgctaataaattaaagaaagaaaatgaaaggatgykaactaat

SEQ ID NO: 1075 - DNA, 839 bp, Streptococcus pneumoniae
  misc_feature (1)..(839): tiling:Spneumo1:WAN024FGC; Cluster includes WAN0243MV spr1 532|ABC-MSP|15903575|NP_359125.1|1510325..1511158|-|834 bp |ABC transporter membrane-spanning permease - sugar transp ort|S.pneumoniae|R6|NC_003098.1|ORF|211
atgaagaagaaatccrgtatttatttagatattctctcacatgtacttttagttggtgcgaccatcgttgcarttttcccattggtatggattatcatatcttctgtcaaagggaaaggggaattaactcagtatccaacacgattttggcctgaacagtttacattagattatttcactcatgttatcaacgatttgcacttcattgataayattcgaaacagtttaatcattgccttggctacaaccctyattgcgattattatttctgctatggcagcctatggtattgttcgattctttcctaaattgggagcaatcatgtcgagactactcgtcattacctacattttcccaccaattttgttagcaattccctattcaattgccattgctaaagttgggttaacaaatagtttatttggcttgatgatggtttatctatcttttagtgttccatatgcagtttggctcttagttggatttttccaaacagttccaattggaattgaagaagcggctagaattgatggtgcaaataaatttgttacgttttataaagttgtgctaccgattgtagcaccaggtattgtagcaacagctatttatacatttatcaatgcttggaatgaattyctgtatgccttgattttrattaacaatacaggaaagatgacagtagcagtagcccttcgttcacttaatggttcagaaatactagactggggagatatgatggcagcgtctgttattgtagttcttccatcaattattttcttctctatcatccaaaataagattgcaagtggattatcagaaggatctgtgaagtarctaat

SEQ ID NO: 1076 - DNA, 1185 bp, Streptococcus pneumoniae
  misc_feature (1)..(1185): tiling:Spneumo1:WAN024DYC; Cluster includes WAN0240EG |cps 2T||AAD10187.1|||1185 bp|Cps2T|S.pneumoniae||AF026471|ORF| 000
atgaagaagtcagtttatatcattggttcaaaggggattcctgccaagtatggaggatttgaaacctttgttgagaaattaacagaatatcaaaaagatgggaacatccaatactatgttgcctgcatacgcgaaaattctgcaaaatcaggatttacagcagatacatttgagtacaatggtgctatttgttacaacattgatgtgcctaatattggtcctgctagagccattgcttacgatattgcagcggtcaataaggctattgaattggctaagggaaacaaggacgaggctcccattttttacattctagcttgtcgtatcggaccttttatttctggacttaagaaaaaaattcgttcgatcggaggccgtttgctggtaaatccagatggtcatgagtggcttcgggctaaatggagcctgccagttcggaagtattggaaattttcggaacagttgatggtcaaacatgcagatttattagtctgtgatagcaaaaatatcgaaaaatatgtccgagaggactataaacagtatcagcccaagacgacctatatcgcttatggtacagatactaccccttcaagtctgaaatcagaagatgccaaagttcgaaactggtatcgtgaaaagggagtaagcgaaaatggctattatctagtggtgggacgatttgttcccgaaaacaactatgagaccatgattcgtgaatttatgaagtctaattctaaaaaagactttgttctcattacaaatgtggaacagaataagttttacgatcagttgctcaaagatacaggcttcgacaaagacccgagagtcaaatttgttgggactgtctatgaccaagaattgctcaaatacatccgagagaatgcttttgcctattttcacggtcatgaagtgggagggaccaatccatccttgcttgaagcattggcatccactaggcttaatctattactagatgtaggttttaaccgtgaagtcggagagaatggtgccatctattggagaaaagatgagctagcgcgcgttattgaagcagtggagcaatttgatgagaacgccatttctgaactagataaaaaatctagccaacgaattgcagaagcttttacgtgggaagagatagtggtggattatgaggaagagtttgaagggggaaaaagtgagtaa

SEQ ID NO: 1077 - DNA, 780 bp, Streptococcus pneumoniae
  misc_feature (1)..(780): tiling:Spneumo1:WAN024ESR; Cluster includes WAN0243P5 spr1 450|pdxK|15903493|NP_359043.1|1433979..1434752|-|774 bp|Py ridoxine kinase|S.pneumoniae|R6|NC_003098.1|ORF|111
atgaagaataatcgtattttagcactttctggaaatgatatttttagtggtggtggactgtcagctgatttggctacctataccttgaacggcttgcatgggtttgtagcagtgacttgtttgacagccttgacagaaaaaggatttgaagtctttccaactgatgataccatttttcaacatgaattagatagcttrcgtgatgtggaatttgggggaattaagattggtcttctccctactgtcagygtggctgagaaggccttggactttatcaaacaacgcccaggagtacctgtggtgttggatcctgtcttggtctgcaaggaaacgcatgatgtagctgtcagtgagctctgccaagagttgattcgcttyttcccttatgtcagtgtgattacgcctaatctcccagaagcagaattattatccggtcaggaaattaaaaccttggaagacatgaaaactgcagcgcagaaattgcatgatttaggagcgccagcagtcattatcaagggaggcaatcgtcttagtcaggacaaggctgtggatgtcttttatgatggacagacctttactatcctagaaaatccagttatccaaggccaaaatgctggtgcaggttgtacctttgcctctagcattgccagtcacytgrttaaaggtgataaayttttgccagcagtagaaagctctaaggctttcgtttatcgtgctattgcacaagcagatcagtatggagtaagacaatatgaagcaaacaaaaacaasctaactaat

SEQ ID NO: 1078 - DNA, 790 bp, Streptococcus pneumoniae
  misc_feature (1)..(790): tiling:Spneumo1:WAN024FTY; Cluster includes WAN023ONQ pne8 1_11||||5475..6263|+|789 bp|Type 39(1) capsule operon, Gli mmer 2.02 orf prediction|S.pneumoniae||WAN01UCEV|ORF|000
atgaagaatataaaaatattagtagcgacacataaaaaatataaaatgcccagtgatacaaatatgtatctaccaattcatgtaggatgtgaaggaaagraaaaattaggatttcaaggtgataattctggygaaaatatttctkttttaaatccttactaytgtgaacttactggyctctattgggcatggaaaaatttagagtgcgactatttaggtttggtacactatcgtcgttattttactaaaatgactaaagggtacaatgaatcaataaatattgatgatgtaattttaaataggtttgaagtggagaaattgttagagaactcagaagtcatcgttcctaaaaaaagaaagtactatatagaaaccctctattctcactatgctcataccttggatgctagccacttagacctagctagaaaaatgattgaacagaaaaatyctgaatatctagcaagttttgataaggtaatgaagcaragaagyggmtayatgttyaayatgttyattatgaaaaaagaactrgcmgaygattatttywcttggctatttccwattttrgatagyatgtatgaawgtatggatttatcagrsttaactsmttttgaagcymgwytwtttggaagagtwagtgarytrytatttaatgtrtggttrkmkaaraayaayytramtmytamggaagywcmttttatgtayatggaaaagaktramtctrtttaaraaaggkwwrtcattyytamwrgcgaartttttsrraaagaaatatrrasaragtttc

SEQ ID NO: 1079 - DNA, 2493 bp, Streptococcus pneumoniae
  misc_feature (1)..(2493): tiling:Spneumo1:WAN024GLC-5; Cluster includes WAN0244H6 sp r0440||15902484|NP_358034.1|441113..446092|+|4980 bp|Hypot hetical protein|S.pneumoniae|R6|NC_003098.1|ORF|221
atgaagaatccattttttgaaagacgttgtcgttacagtattcgtaagttatcagtaggagcctgctcgctgatgattggtgctgktttatttgctggtccagccttggctgaagaaactgcagttcctgaaaatagcggagctaatacagagcttgtttcaggagagagtgagcattcgaccaatgaagctgataagcagaatgaaggggaacatgctagagaaaacaagctagaaaaggcagaaggagtagcgayagcatctgaaactgcttcgccagcaagcaatgaagctgcaactactgaaactgcagaagcagctagcgcagctaaaccagaggaaaaagcaagtgaggtggttgcagaaacaccatctgcagaagcaaaacctaagtctgacaaggaaacagaagcaaagcccgaagcaactaaccaaggggatgagtctaarccagcagcmgaagctaataagactgaaaaagaagtccagccagatgtccctaaaaatacagaaaaaacattaaaaccaaaggaaatcaaatttaattcttgggaagaattgttaaaatgggaaccaggtgctcgtgaagatgatgctattaaccgyggatctgttgtcctcgcttcacgtcggacaggtcatttagtcaatgaaaaagctagcaaggaagcaaaagttcaagccttatcaaacaccaattctaaagcmaaagaccatgcttctgttggtggagaagagttcaaggcctatgcttttgactattggcaatatctagattcaatggtcttctgggaaggtctcgtaccaactcctgacgttattgatgcaggtcaccgtaacggggttcctgtatacggtacactcttcttcaactggtctaatagtattgcagatcaagaaagatttgctgaagctttgaagcaagacgcagatggtagcttcccaattgcccgtaaattggtagacatggccaagtattatggctatgatggctatttcatcaaccaagaaacaactggagatttggttaaacctcttggagaaaaratgcgccagtttatgctctatagcaaggaatatgctgctaaggtaaaccatccaatcaagtattcttggtaygatgccatgacctataactatggacgttaycatcaagatggtttgggagaatacaactaccaattcatgcaaccagaaggagataaggttccggcagataacttctttgctaactttaactgggataaggctaaaaatgattacactattgcaactgccaactggattggtcgtaatccttatgatgtatttgcaggtttggaattgcaacagggtggttcctacaagacaaaggttaagtggaatgacattttagacgaaaatgggaaattgcgcctttctcttggtttatttgccccagataccattacaagtttaggaaaaactggtgaagattatcataaaaatgaagatatcttctttacaggttatcaaggagacccyactggccaaaaaccaggtgacaaagattggtatggtattgctaacctagttgcggaccgtacgccagcggtaggtaatacttttactacttcttttaatacaggtcatggtaaaaaatggttcgtagatggtaaggtttctaaggattctgagtggaattatcgttcagtatcaggtgttcttccaacatggcgctggtggcagacttcaacaggggaaaaacttcgtgcagaatatgattttacagatgcctataatggcggaaattcccttaaattctctggtgatgtagccggtaagacagwtcaggatgtgagactttattctactaagttagaagtaactgagaagaccaaacttcgtgttgcccacaagggaggaaaaggttctaaagtttatatggcattctctacaactycagactacaaattcgatgatgcagatgcatggaaagagctaaccctttctgacaactggacaaatgaagaatttgatctyagctcactagcrggtaaaaccatctatgcagtyaaactatttttcgagcatgaaggtgctgtaaaagattatcagttyaacctmggacaattaactatctcggacaatcaccaagagccacaatcgccgacaagcttttctgtagtgaaacaatctcttaaaaatgcccaagaagcggaagcagttgtgcaatttaaaggcaacaaggatgcagatttctatgaagtttatgaaaaagatggagacagctggaaattactaactggctcatcttctacaactatttatctaccaaaagttagccgctcagcaagtgctcagggtacaactcaagaactgaaggttgtagcagtcggtaaaaatggagttcgttcagaagctgcaaccacaacctttgattggggtatgactgtaaaagataccagcctaccaaaaccactagctgaaaatatcgttccaggtgcaacagttattgatagtactttccctaag

SEQ ID NO: 1080 - DNA, 2349 bp, Streptococcus pneumoniae
  misc_feature (1)..(2349): tiling:Spneumo1:WAN024GL9-5; Cluster includes WAN023M13 31 3746_828||||441399..441635|+|237 bp|EGAD orf prediction|S. pneumoniae|R6|NC_003098.1|ORF|111
atgaagaatccattttttgaaagacgttgtcgttacagtattcgtaagttatcagtaggagcctgctcgctgatgattggtgctgttttatttgctggtccagccttggctgaagaaactgcagttcctgaaaatagcggagctaatacagagcttgtttcaggagagagtgagcattcgaccaatgaagctgataagcagaatgaaggggaacatgmtagmkrmaacwagctagaaamkgcagaagcagctagcgcagctaaaccagaggaaaaagcargtgaggtggttgcagaaacaccatctgcagaagcaaaacctaagtctgacaaggaaacagaagcaaagcccgaagcaactaaccaaggggatgagtctaarccagcagcmgaagctaataagactgaaaaagaagtccagccagatgtccctaaaaatacagaaaaaacattaaaaccaaaggaaatcaaatttaattcttgggaagaattgttaaaatgggaaccaggtgctcgtgaagatgatgctattaaccgcggatctgttgtcctcgcttcacgtcggacaggtcatttagtcaatgaaaaagctagcaaggaagcaaaagttcaagccttatcaaacaccaattctaaagcaaaagaccatgcttctgttggtggagaagagttcaaggcctatgcttttgactattggcaatatctagattcaatggtcttctgggaaggtctcgtaccaactcctgacgttattgatgcaggtcaccgtaacggggttcctgtatacggtacactcttcttcaactggtctaatagtattgcagatcaagaaagatttgctgaagctttgaagcaagacgcagatggtagcttcccaattgcccgtaaattggtagacatggccaagtattatggctatgatggctatttcatcaaccaagaaacaactggagatttggttaaacctcttggagaaaagatgcgccagtttatgctctatagcaaggaatatgctgctaaggtaaaccatccaatcaagtattcttggtatgatgccatgacctataactatggacgttaccatcaagatggtttgggagaatacaactaccaattcatgcaaccagaaggagataaggttccggcagataacttctttgctaactttaactgggataaggctaaaaatgattacactattgcaactgccaactggattggtcgtaatccttatgatgtatttgcaggtttggaattgcaacagggtggttcctacaagacaaaggttaagtggaatgacattttagacgaaaatgggaaattgcgcctttctcttggtttatttgccccagataccattacaagtttaggaaaaactggtgaagattatcataaaaatgaagatatcttctttacaggttatcaaggagaccctactggtcaaaaaccaggtgacaaagattggtatggtattgctaacctagttgcggaccgtacgccagcggtaggtaatacttttactacttcttttaatacaggtcatggtaaaaaatggttcgtagatggtaaggtttctaaggattctgagtggaattatcgttcagtatcaggtgttcttccaacatggcgctggtggcagacttcaacaggggaaaaacttcgtgcagaatatgattttacagatgcctataatggcggaaattcccttaaattctctggtgatgtagccggtaagacagatcaggatgtgagactttattctactaagttagaagtaactgagaagaccaaacttcgtgttgcccacaagggaggaaaaggttctaaagtttatatggcattctctacaactccagactacaaattcgatgatgcagatgcatggaaagagctaaccctttctgacaactggacaaatgaagaatttgatctcagctcactagcaggtaaaaccatctatgcagtcaaactatttttcgagcatgaaggtgctgtaaaagattatcagttcaacctaggacaattaactatctcggacaatcaccaagagccacaatcgccgacaagcttttctgtagtgaaacaatctcttaaaaatgcccaagaagcggaagcagttgtgcaatttaaaggcaacaaggatgcagatttctatgaagtttatgaaaaagatggagacagctggaaattactaactggctcatcttctacaactatttatctaccaaaagttagccgctcagcaagtgctcagggtacaactcaagaactgaaggttgtagcagtcggtaaaaatggagttcgttcagaagctgcaaccacaacctttgagtgggggatgactgtccaa

SEQ ID NO: 1081 - DNA, 2472 bp, Streptococcus pneumoniae
  misc_feature (1)..(2472): tiling:Spneumo1:WAN024GLB-5; Cluster includes WAN0240WR |E ndo D||BAB62042.1|||4941 bp|Endo-beta-N-acetylglucosaminid ase D|S.pneumoniae||AB055806|ORF|110
atgaagaatccattttttgaaagacgttgtcgttacagtattcgtaagttatcagtaggagcctgctcgctgatgattggtgctgttttatttgttggtccagccttggctgaagaaactgcagttcctgaaaatagcggagctaatacagagcttgtttcaggagagagtgagcattcgaccaatgaagctgataagcagaatgaaggggaacatactagagaaaacaagctagaaaaggcagaaggagtagcgacagcatctgaaactgcagaagcagctagcgcagctaaaccagaggaaaaagcaggtgaggtggttgcagaaacaccatctgcagaagcaaaacctaagtctgacaaggaaacagaagcaaagcccgaagcaactaaccaaggggatgagtctaaaccagcagcagaagctaataagactgaaaaagaagtccagccagatgtccctaaaaatacagaaaaaacattaaaaccaaaggaaatcaaatttaattcttgggaagaattgttaaaatgggaaccaggtgctcgtgaagatgatgctattaaccgcggatctgttgtcctcgcttcacgtcggacaggtcatttagtcaatgaaaaagctagcaaggaagcaaaagttcaagccttatcaaacaccaattctaaagcaaaagaccatgcttctgttggtggagaagagttcaaggcctatgcttttgactattggcaatatctagattcaatggtcttctgggaaggtctcgtaccaactcctgacgttattgatgcaggtcaccgtaacggggttcctgtatacggtacactcttcttcaactggtctaatagtattgcagatcaagaaagatttgctgaagctttgaagcaagacgcagatggtagcttcccaattgcccgtaaattggtagacatggccaagtattatggctatgatggctatttcatcaaccaagaaacaactggagatttggttaaacctcttggagaaaagatgcgccagtttatgctctatagcaaggaatatgctgctaaggtaaaccatccaatcaagtattcttggtatgatgccatgacctataactatggacgttaccatcaagatggtttgggagaatacaactaccaattcatgcaaccagaaggagataaggttccggcagataacttctttgctaactttaactgggataaggctaaaaatgattacactattgcaactgccaactggattggtcgtaatccctatgatgtatttgcaggtttggaattgcaacagggtggttcctacaagacaaaggttaagtggaatgacattttagacgaaaatgggaaattgcgcctttctcttggtttatttgccccagataccattacaagtttaggaaaaactggtgaagattatcataaaaatgaagatatcttctttacaggttatcaaggagaccccactggccaaaaaccaggtgacaaagattggtatggtattgctaacctagttgcggaccgtacgccagcggtaggtaatacttttactacttcttttaatacaggtcatggtaaaaaatggttcgtagatggtaaggtttctaaggattctgagtggaattatcgttcagtatcaggtgttcttccaacatggcgctggtggcagacttcaacaggggaaaaacttcgtgcagaatatgattttacagatgcctataatggcggaaattcccttaaattctctggtgatgtagccggtaagacagatcaggatgtgagactttattctactaagttagaagtaactgagaagaccaaacttcgtgttgcccacaagggaggaaaaggttctaaagtttatatggcattctctacaactccagactacaaattcgatgatgcagatgcatggaaagagctaaccctttctgacaactggacaaatgaagaatttgatctcagctcactagcaggtaaaaccatctatgcagtcaaactattttttgagcatgaaggtgctgtaaaagattatcagttcaacctcggacaattaactatctcggacaatcaccaagagccacaatcgccgacaagcttttctgtagtgaaacaatctcttaaaaatgcccaagaagcggaagcagttgtgcaatttaaaggcaacaaggatgcagatttctatgaagtttatgaaaaagatggagacagctggaaattactaactggctcatcttctacaactatttatctaccaaaagttagccgctcagcaagtgctcagggtacaactcaagaactgaaggttgtagcagtcggtaaaaatggagttcgttcagaagctgcaaccacaacctttgattggggtatgactgtaaaagataccagcctaccaaaaccactagctgaaaatatcgttccaggtgcaacagttattgatagtactttccctaagactgaaggtggagaaggt

SEQ ID NO: 1082 - DNA, 272 bp, Streptococcus pneumoniae
  misc_feature (1)..(272): tiling:Spneumo1:WAN024DF2; Cluster includes WAN02449Y spr0 700||15902744|NP_358294.1|701014..701271|+|258 bp|Hypothet ical protein|S.pneumoniae|R6|NC_003098.1|ORF|111
atgaagaatgtwgaattaaaggagaaaaacatgacatttgaagaratyctrcctggsttaaaggctaagaraaaatatgtacgaactggttggggaggtgckgaaaactatgtccaactctttgataccatcgagcaaaatgggcttgcacttgaartgacaccttatttcctaatcaacgtktctggmgaaggagaaggtttttccatgtggagcccgacagyttgtgatgttttggcaacggattgggtagaagtgcatgactaactaat

SEQ ID NO: 1083 - DNA, 618 bp, Streptococcus pneumoniae
  misc_feature (1)..(618): tiling:Spneumo1:WAN024AUC; Cluster includes WAN02421G SP16 69||15901504|NP_346108.1|1569110..1569721|-|612 bp|MutT/nu dix family protein|S.pneumoniae|TIGR4|NC_003028.1|ORF|010
atgaagacaagtgattttgtcaagtatttgcaaagaatgattgccattacagatactggcttaacctttacaaaagatccgtttgaccgtgagcgctacgaagacttgcgaagtctgttatctgaaatgttgaatcargyatcagacctkgatkcmgaagaagtrgcagaagtcttgaarccaacttcwgcttatgcgactccsttaatggacgtccgtgcttggattgttgaggatgagaagatttgtctggttaggggacaaggagaggatagttgggctttgccaggtggctttggtgaagtcggctattctccaacwgaaaatattctcaaggaaattgaagaagaaaccggttttaaagccaaagttgaaagactgctagctgtttttgataccaatcgtttccaactacagagyaaacartatrcaaagtttgtttttgratgtaagyttctygatggacaattccaagaaaatcaagaaattgcwgaccttcaattttttgccattgaccaactgccgaacttatctgaaaaacgcattaccaaggagcaaatagagcttctttggcaggtttatcaaggtcatagggggcaatatcttgacctaactaat

SEQ ID NO: 1084 - DNA, 922 bp, Streptococcus pneumoniae
  misc_feature (1)..(922): tiling:Spneumo1:WAN024FV6; Cluster includes WAN0240UJ |wci X||AAK20718.1|||1002 bp|WciX|S.pneumoniae||AF316642|ORF|00 0
atgaagacagatgctaggactaaaaagagagagaatgaaacgttatatattctaaaagtttgggcaacatttagtgtgattgctatacattttggttttttgggccaaattggagtgttttacaaagtattagctcgatttgctgtacctttatttttcatgatttcaggattttattcgtttagtatttcagaagaaaaactgaagaaaagaattaaaaatctgagtttattgataatttccagtacaagtttttattttttactggatgtttttcttcaattaacacaaggaaatctaagagttgtatttgaaagatttacttttaataatatttttaattttttggtattcaatcaaatttctgctctaattggctcgttagcaacaccactatggttcttatatgcattactgtatgtttatatttatctatttttttcaaataaaaaatggatatttaatactatyttgactgtgatcatactctgttgttcatttataatcgagttaaaagcaaatagtgctttattttatagaaacttcttatttatgggagttcccttcttttcttttgggatgtattttgctcaaattcagagaaaaattataaattataagcacttcaaagaactttttataattggaattatgatttcaggatttctaactctgattgaatatacctttttaggagcaaattttgaactttatrtaagttcggtgataatatcttgtatgcttatggtcttttcgattaaatatcctcaactctggacgytagattttgctgtcaatattgctaaaaaaaatgcgacgtttatttatattagtcatcaatttgtgattttattatttaaaacatacgttagrgatggaattgcttataaaattggaactttcttgatatttttagcatgtg

SEQ ID NO: 1085 - DNA, 506 bp, Streptococcus pneumoniae
  misc_feature (1)..(506): tiling:Spneumo1:WAN024D5B; Cluster includes WAN0243LA spr1 590||15903632|NP_359182.1|1569522..1570022|-|501 bp|Conser ved hypothetical protein|S.pneumoniae|R6|NC_003098.1|ORF|1 11
atgaagacggcttttataatcattgatgttcagaatgttttagtagaaactgggttccagacaaaaagtctattggraaaaatttcttatttacaaaaccaggctagaagcaagaatattgaaattatctatgttcaacatattgagaaytctgaagctcaaacatcagaagattggcagttatctgcgcttttaaatcgaaaacctgytgaaaaggtctttcagaagaartataacagtattttcaaagaaactggcttaaaagaatacttggataarcaggggattgaaaaattagttttatgtggtatgcagacagaatattgtgtggatacctctgtcaaggttgcctttgaatatggctatcagcttattgttccagaaggtgctgtcacaacctttgatggggatgacattccagcagaaacgattaatgaattttatgaggacatttgggaggagcrctttgcagatgtyctagattacaaacatattttctaactaat

SEQ ID NO: 1086 - DNA, 1245 bp, Streptococcus pneumoniae
  misc_feature (1)..(1245): tiling:Spneumo1:WAN024FSP; Cluster includes WAN02402O |cps 19bI||AAB66521.1|||1245 bp|putative polysaccharide polymer ase|S.pneumoniae||AF004325|ORF|000
atgaagagacagaagtttgaatttatagagattctatactattttacagtgatgttatcagtgggaatgtttcttatgtttaccctcarcttatattggcacagaaacttattaactattttatctattgctctctcatttttaatgcttcctatactgattgttaatgctaaaagaatttctaaatctgcttttatctatggtacttttttatctatatgtattatatatgagatattaagagctaaaacactgtataattacagtgtgagtaatatttttttggcctctagacaatatatatggatttttctattttttgtattgatttacctttttaaaaacaaacaagaaaatatgagaaaaattttagataatacactcaatatttttatgttttctctyggaattagagcatttacttggtttttatatacgttatttcaagttgaattatttccatctattttaagagaattcggagatttgtggtatcgaaatgaattttcagtacgaatagatggaacaccattaattataataggtttgttaatttccacttttttctattttaaatttggaaataggaaatacttttattatttgttcttgatattaatgtatataacatttgtaaatcagacaagagtgctactggtttctgttttgatttcaatttttcttatgtttgtattttctagaagaacttctagattgctcacctctttaagttttgtaactataattatagcattcgtttatggaggtggattggattatattaaagcatatttaaatatagatgctggaacatttgatctgggattaggatttagatactgggagttgaaatactatctgggtttattrgctawtgatktmtgkammcttggkgttggaattctaacatcaagtaatataaatagtaattttattttggctgggccaagtgctgttaagatgtatctagatgatttaggttttttagagttattcgttcaatttggtgtagccgcaatttttatgtatggttatatattttataaattaatcaatttaattctaagaatgtcaaatgataaatatagagttgaccgcgccttttttattgcactcttaactaatttaataattacttcaatttctttaaatatctttggagcgcagagaagtttctcattggcaattgttcttgcattaatattctactatgactataggctgaaaaatgacrtagaaaattag

SEQ ID NO: 1087 - DNA, 201 bp, Streptococcus pneumoniae
  misc_feature (1)..(201): tiling:Spneumo1:WAN024BHO; Cluster includes WAN0241SH SP20 04||15901827|NP_346431.1|1907051..1907245|-|195 bp|hypothe tical protein|S.pneumoniae|TIGR4|NC_003028.1|ORF|011
atgaagagagggatcatctatttctttatcggcctgtcactcttggtatggttagtggaaatgtttacaggttggtttgaccaaaccttgcttcgccaattcattcgtggtgctttggggtttggatttatgattttcgtcgttttccttatgagaatggagtggttgaaaggagaatatcatgaatatgatctaactaat

SEQ ID NO: 1088 - DNA, 192 bp, Streptococcus pneumoniae
  misc_feature (1)..(192): tiling:Spneumo1:WAN024BHN; Cluster includes WAN023S06 cont ig_1621_14||||8157..8348|-|192 bp|Glimmer 2.02 orf predict ion|S.pneumoniae|670|WAN01UDAQ|ORF|000
atgaagagagggatcatctatttctttatcggcctgtcactcttggtatggttagtggaaatgtttactgattggtttgatcaagccttgcttygccaattcattcgtggtgctttggrgtttggatttatgattttcgtcgttttccytatggraatggagtggttgaaaggagagtctcatgacggtggt

SEQ ID NO: 1089 - DNA, 381 bp, Streptococcus pneumoniae
  misc_feature (1)..(381): tiling:Spneumo1:WAN024F26; Cluster includes WAN023LQU 3140 49_1350a||||716729..717109|-|381 bp|EGAD orf prediction|S. pneumoniae|R6|NC_003098.1|ORF|110
atgaagagttctgtttcagcagggttattagaagaacagtctgctagtttccctggaaggttggaaatttccaaaccagattttttacgtgtgacttcacgcgcacgcttggcagccacacgagccttggcagccaaaattcctttttctacgatacgtttggcaatctgtggattttccatgaggaaatcggagaargcttcactgaagaggcgattggtaatcttgaccacttcgctatttcccaatttggtcttsgtttgtccttcaaactgtggatttgggtgtttaactgagataactgcagttaagccttcgcgaacatcttcccctgttarattrtcttcattgtctttcagtaacttattyttacgagcataa

SEQ ID NO: 1090 - DNA, 75 bp, Streptococcus pneumoniae
  misc_feature (1)..(75): tiling:Spneumo1:WAN024CMW; Cluster includes WAN023SG9 NC_0 03028.1_185||||140695..140769|-|75 bp|Glimmer 2.02 orf pre diction|S.pneumoniae|TIGR4|NC_003028.1|ORF|011
atgaagamacaaattttmacattattgaaaatcgttgctgagattattattattttgccatttctaactaatcka

SEQ ID NO: 1091 - DNA, 1280 bp, Streptococcus pneumoniae
  misc_feature (1)..(1280): tiling:Spneumo1:WAN024EXE; Cluster includes WAN0243LU spr1 570|mvaA|15903612|NP_359162.1|1551199..1552473|-|1275 bp|3 -hydroxy-3-methylglutaryl-coenzyme a reductase|S.pneumonia e|R6|NC_003098.1|ORF|111
atgaagataagttggaatggattttctaaaaaatcataccaagagcgcctcgagctgytaaaagctcaggcgctccttagtcctgagagacaagctagtctggagaaggatgaacagatgagygtgactgtggcagaccagctgagtgagaatgtrgtgggaactttttctctgccttattcrctggttccggaggtacttgtcaacggtcaggratacaccgttccctatgtgacagaagaaccytctgtggttgcggcggccagctatgccagcaaaatcatcaagcgtgcaggtggttttactgcacaagtccatcagcgmcagatgattgggcaggtagccctttatcaarttgctaatcctaaactagcgcaagagaagattgccagcaagaaagcggagctcttggagcttgccaatcaagcctatccttctatcgttaaacgtggrggtggggcgcgtgatctgcatgtcgagcagataaaaggcgaaccagactttctcgttgtttatattcatgtcgatacccaggaagccatgggtgccaatatgctcaacaccatgctggaagccttgaaaccagtcttagaagaactcagtcagggacagagtctcatgggaatcctgtccaactacgcgacygattctctggtgactgcaagctgtcgcatcgcctttcgctacttgagccgccaaaaggatcaaggacgagagattgcggagaaaattgcgttggctagtcagtttgcgcaggctgatccttaccgagctgctactcataataaaggaatttttaatggtattgatgcgattttgattgccactggwaatgactggcgtgccatcgaagctggggcccatgcctttgccagtcgagatggacgctatcaaggtcttagctgctggacgctggaccttgaaagagaagaattggtcggtgagatgaccctgcccatgcctgtagcgactaagggtggctctatcggcctcaacccacgtgtagytctcagtcatgatctactaggaaatccttctgccagagaattagcccagattatcgtgtcyatcggkcttgctcaaaattttgcagccctcaaagccttggtaagtacgggcatccagcaaggccacatgaaactacaggccaaatccctagctctcctagctggggctagtgaatctgaagttgctcccctagtagagcgcctcatctcagataaaacctttaacctagagacagcccagcgctatctcgaaaatttaagatcayractaat

SEQ ID NO: 1092 - DNA, 1086 bp, Streptococcus pneumoniae
  misc_feature (1)..(1086): tiling:Spneumo1:WAN024AY8; Cluster includes WAN02402K |cps 19bK||AAB66525.1|||1086 bp|UDP-N-acetylglucosamine-2-epime rase|S.pneumoniae||AF004325|ORF|000
atgaagataatgctagtttttggtacacgtccagaagcgataaaaatgtgtccattagtgaatgagttgaaaaaacaggcagatatggaaacagttgtttgtgtaactggtcaacacaaggagatggttagccctgttttggaattgtttggagttcaaccagaytatgatttagaaatwatgaaagctaatcaaaccttgttytctataacaacaagtattttagaaaaaattaaacctgttttagaagaagaacaaccagatattgttctagttcayggtgacactactacracatatgcagcagctttggcagcattttatctwggaattaaggttggycatgttgaagctgggttacgaacttacaacctgcaaagtcccttcccagaagaatttaatagacaatcgacttctattattgcaaattatcattttgcyccwacwgaattrgctaaagaaaatctmwyaaaagagggtagarasaatgtttatgtracwggwaatacrgtwattgatgcacttamaactacagtacaaaaggattatacacaccctgatttagatttaaacgytrayamtcgtctyattctaytgactgctcatagacgtgaaaatctcggagaacctatgaaacacatgtttagagctgttaaacgartyttaaatgaatatgacgatgttaaggtaatttatccaattcataagaatccyttggtkcgtgaaacagctrcrgaaatttttggagacayagaacgwattcagattattgaacctttrgatgttctkgattttcataayttyatgaatmatagttacatgattttaactgaytcaggaggagttcaggaagargckccttckttaggaaarcctgtattggtcatgcgagatacgacagaaagacctgaaggagtagctgcyggaacgttgaaattggttggractgatgaggagactatttatcaaaaytttaagatgcttttagacgattccgaagaatataaaaaaatgagtcaagctagtaatccttatggaaawggtgatgctagtaaacagattgttcrwattttamgyggaatttga

SEQ ID NO: 1093 - DNA, 1253 bp, Streptococcus pneumoniae
  misc_feature (1)..(1253): tiling:Spneumo1:WAN024ETB; Cluster includes WAN02442D spr0 973|ftsW|15903017|NP_358567.1|956376..957605|+|1230 bp|Cel l division protein FtsW|S.pneumoniae|R6|NC_003098.1|ORF|11 1
atgaagattagtaagaggcacttattaaattattccatcttgattccctacttrcttttatctattttgggcttgattgtggtctattcgaccaccagtgctattttaattgaagaaggcaagagygccttgcagttggttcgaaaccaaggaatcttttggattgktagtttgatactgattgccttaatttataaattgagactagattttttgagaaatgagcgactaatcattttagttatattaatagaaatgcttttattgttcttggctcgttttattggtatttcmgtaaacggggcatacggttggatttcggttgcaggartaactattcagccagctgagtacttaaaaatcattattatttggtatttagctcaccgattctccaaacagcaagaagaaatagctacttatgattttcaagttttgactcaaaatcaatggcttccccgtgcttttaatgattggcgattcgttctcctagttctgattggaagtttgggaattttccctgatttaggaaatgcgactattttagtcttggtttccttgattatgtatacagttagtggaatcgcttatcgctggttttcaaccattctggcgctcgtatctgccrcttctgtctttgtcttgaccactatcagcctaatcggtgttgagaccttttcaaaaattccagtattyggctatgtagccmarcgctttagtgccttttttaatccttttgccgatcgtgctgatgcaggtcaccagttagctaattcttattttgccatggtcaatggyggttggtttggtctaggtcttggaaactcgattgaaaaacgaggttatttgccagaagctcatacagactttgtcttttctatcgtgattgaagaatttggctttgytggtgccagtcttattttagctctcttrtttttcatgattttgcggattatcttggtcggtatycgagcggagaatcctttcaatgccatggttgcactcggtgtcggagggatgatgttggttcaggtatttgtcaatatcggagggatttcgggcttgattccatctacaggagtracyttcccyttcttatcccagggtggaaatagtcttctagtcttatcagtggcagtagcctttgtcttaaatattgatgccagtgaaaaacgcgctaarttgtaccgagaattggaaaatcaaccaatgaaccttctgttgaagtarmtaawgaaaggatagtttatgtc

SEQ ID NO: 1094 - DNA, 947 bp, Streptococcus pneumoniae
  misc_feature (1)..(947): tiling:Spneumo1:WAN024GO5; Cluster includes WAN0243FM spr1 794|cbf1|15903836|NP_359386.1|1765923..1766927|-|1005 bp|C mp-binding-factor 1|S.pneumoniae|R6|NC_003098.1|ORF|341
atgaagattagtcacatgaaaaaagatgagytatttgaaggcttttacctaatcaaatcagctgacctgaggcaaactcgagctgggaaaaactacctagcctttaccttccaagatgatagtggcgagattgatgggaagctctgggatgcccaacctcataacattgaggcctttaccgcaggtaaggttgtccacatgaaaggacgccgagaagtttataacaatacccctcaagtcaatcaaattactctccgcctgcctcaagctggtgaacccaatgacccagcygatttcaaggtcaagtcaccagttgatgtcaaggaaattcgtgactacatgtcgcaaatgattttcaaaattgaaaatcctgtctggcaacggattgtccgaaatctctacaccaagtatgataaggaattctactcctatccagcygccaagaccaaccaccatgcctttgaaacgggsttggcytatcatacggcgaccatggtrcgtttggcagacgctattagcgaagtttatcctcagctcaataagagcytrctctatgcggggattatgytgcaygacttrgctaaggtyatcgagttgacgggrccagaccagacmgagtacacrgtsmgaggyaatcttcttggacatatcgctctsattgatagcgaaattaccaagacagttatggaactcggcatcgatgataccaaggaagaagtcgttttgcttcgtcatgtcatcctcagtcaccacggcttgcttgartatggaakyccagtccgtccacgyattatggargcagagattatccatatgattgacaatctggatgcaagcatgatgatgatgtcaacagctctkgctttggtggataaaggagagatgwccaataaaatyttcgctatggataatcgttccttctataaaccagattwagattaactaat

SEQ ID NO: 1095 - DNA, 897 bp, Streptococcus pneumoniae
  misc_feature (1)..(897): tiling:Spneumo1:WAN024CIW; Cluster includes WAN0242AI SP13 24||15901178|NP_345782.1|1247208..1248098|-|891 bp|ROK fam ily protein|S.pneumoniae|TIGR4|NC_003028.1|ORF|011
atgaagattataggkatcgatattggcggaacaacaattaaggcagatttatacgatgaktttggaacgagtttraatcakttcaaagagatagaaacaattattgactatgatttgggaacgaaycagatattaaatcaggtctgtgatttaattggtgagtatrytttaaatyattcaattgatggtgttgggatttccactgctggagttgttaatgctaatacwggagaaatcatctatgcaggctatacaataccagggtatatcggagtaaactttactkccgaaatagaaaaacgttttgggttgtmtacttttgttgaaaatgatgttaattgtgctgcattaggtgaattgtggragggacaagccaaagataagaaaaatgtagtaatggttactattggaacaggtataggaggcagtattattgtcaayggacaaattgttaacggatttaactatactgctggtgaagtaggytatattcctgtaggtaattcggattggcaaagyaaagcctcaacaaccgcattgattcatttatatcaaaaraagagcttgaaaactaatcaaactggacgtactttcttyactgatttaagwtctggagataaagtygctraagaaacttttgaaatttttgtagaaaatctaacaaaaggtttattaackatttcttatctacttaatccagaaattctcatattaggaggtgggattctggmtarwaaggatattttgttacctgaaattcaaagttctttagctaaaaatgcaatggataataggtttttrcctaaaaatsttgtggcagctacattaggaaatgaagctggtcgtataggagctgtaaaaaatttcttagatagaatttctaataaactarctaat

SEQ ID NO: 1096 - DNA, 521 bp, Streptococcus pneumoniae
  misc_feature (1)..(521): tiling:Spneumo1:WAN024DMJ; Cluster includes WAN0244SQ spr0 024||15902068|NP_357618.1|25158..25736|+|579 bp|Conserved hypothetical protein|S.pneumoniae|R6|NC_003098.1|ORF|111
atgaagattatctttgtacgtcatggggagccagattaccgtgagttagaggagcgttcttatataggatttgggatagatttggcacccttgtctgagatgggacggcagcaagtccagaaattgagcaaaaatcctttactctcgtcagctgaaataatcgtatcttctgcagtcacaagagctttagaaacggcttcgtatgtggtctgtgctacgggtyttcctttaagagtagagcctttattacatgaatggcaggtctataaaacaggaatagaaaactttgaaacagctagaagactgtttttagaaaacaagggggagttgcttcctaatagtcctattcaatatgagacagctacggaaatgaagtctcggtttctagaatgtatgtctaagtatcgagaacatcagactgtggtagttgttgctcatcgaatgctcatgcgccagtttgtgccaaatgagaagattgatttttgccaagtgattgagtgtgagttagagatatarctaat

SEQ ID NO: 1097 - DNA, 1740 bp, Streptococcus pneumoniae
  misc_feature (1)..(1740): tiling:Spneumo1:WAN024D2M; Cluster includes WAN0243G9 spr1 771|nisP|15903813|NP_359363.1|1739650..1741389|+|1740 bp|S ubtilisin-like serine protease|S.pneumoniae|R6|NC_003098.1 |ORF|121
atgaagattatgaaaaaaaaatattggactttagcgatattattcttttgtttgttcaataattctgttactgctcaagaaatacctaaaaatcttgatggcaatataactcacactcagactagcgaaagtttttctgaatctgatgaaaaacaggttgactattctaataaaaatcaagaagaagtagaccaaaataaatttcgtattcaaatcgataagacagaattatttgtaacaacagataaacatttagaaaaaaactgttgtaaattggaacttgaaccacaaataaataacgatattgttaactctgaaagtaataatttactaggcgaagataatttagataataaaattaaggaaaatgtttctcatctagataatagaggaggaaatatagagcatgacaaagataacttagaatcgtcgattgtaagaaaatatgaatgggatatagataaagttactggtggaggcgaaagttataaattatattctaaaagtaattctaaagtttcaattgctattttagattcaggagtcgatttacaaaatactggattactgaaaaatctttcaaatcactcaaaaaactatgtccccaataaaggatatttaggaaaagaggagggagaggaaggaataatatcagatattcaagatagattaggtcatggtacggctgttgtagctcaaattgtaggggatgacaatattaatggagtaaatcctcacgttaatattaacgtctatagaatatttggtaagtcgtcagctagtccagattggattgtaaaagcaatttttgatgctgtagatgatggcaatgatattatcaatcttagtactggacaatatttaatgattgatggagaatatgaggacggaacaaatgattttgaaacatttttgaagtataaaaaggctattgattacgcgaatcaaaaaggagtaattatagtagctgcattagggaatgactccctaaatgtatcaaatcagtcagatttattgaaacttattagttcacgcaaaaaagtaagaaaaccaggattagtagttgatgttccaagttatttctcatctacaatttcggtcggaggcatagatcgcttaggtaatttatcagattttagcaataaaggggattctgatgcaatatatgcgcctgcaggctcaacattatctctttcagaattaggacttaataactttattaatgcagaaaaatataaagaagattggattttttcggcaacactaggaggatatacgtatctttatggaaactcatttgctgctcctaaagtttctggtgcgattgcaatgattattgataaatacaaattaaaagatcagccctataattatatgtttgtaaaaaaaattctggaagaaacattaccagtaamwaatggtataaaagtgttaaatataccaaacgtattgagatatgatttgaatatgttacaattagaatataaaaatgaacaaagttgggatagtttcatagataatgttaatttaattgagttggaagagagaattcaaactactattggaattaaacaaataaacacacacaatattattactattgcccgagaagggtactctcaaaattatttacctaacacttcagaaaatacatataattcattacaagtcagtttagttggagtattactactttttataagtatggtaaatattttatgggctaaaaaaagtaaatga

SEQ ID NO: 1098 - DNA, 875 bp, Streptococcus pneumoniae
  misc_feature (1)..(875): tiling:Spneumo1:WAN024FVM; Cluster includes WAN0243VL spr1 218|thrB|15903261|NP_358811.1|1214845..1215714|-|870 bp|Ho moserine kinase|S.pneumoniae|R6|NC_003098.1|ORF|211
atgaagattattgtacctgcaaccagtgccaatatcgggccaggttttgactcggtcggtgtagctgtaaccaagtatcttcaaattgaggtctscgaagaacgagatgagtggctgattgaacaccagattggcaaatggattccacatgaygagcgtaatctcttgctcamaatcgctttrcaaattgtaccagacttgcaaccaagacgcttgaaaatgaccagtgatgtccctttggcgcgcggtttgggttcttccagctcggttatygttgctgggattgaactagccaaccaactgggtcaactcaacttatcagaccatgaaaaattgcagttagcgaccaagattgaagggcatcctgacaatgtggctccagccatttatggtaatctcgttattgcaagttctgttgaagggcaagtctctgctatcgtagcagactttccagagtgtgattttctagcttacattccaaactatgaattacgtactcgcgacagccgtagtgtcttgcctaaaaaattrtcttataaggaagctgttgctgcaagttctatcgccaatgtagcggttgctgccttgttggcaggagacatggtgaccgctgggcaagcaatcgagggagacctcttccatgagcgytatcgtcaggacttggtaagagaatttgcgatgattaagcaagtgaccaaagaaaatggggcctatgcaacctacctttctggtgctgggccgacagttatggttctggcttctcatgacaagatgccaacaattaaggcagaattggaaaagcaacctttcaaaggaaaactgcatgacttgagagttgatacccaaggtgtccgtgtagaagcaaaataactaat

SEQ ID NO: 1099 - DNA, 1146 bp, Streptococcus pneumoniae
  misc_feature (1)..(1146): tiling:Spneumo1:WAN024G5K; Cluster includes WAN02440R spr1 031|glgD|15903075|NP_358625.1|1013318..1014457|+|1140 bp|R equired for glycogen biosynthesis|S.pneumoniae|R6|NC_00309 8.1|ORF|111
atgaagattgataaatattctgccattttaggaaatacagttggttttcacratatgtcgacattgacggaccaccgtccagtagcaagtttgccatttggtgggaaatatcgtttgattgacttcccactttcaagccttgctaatgcaggtgttcgtagtgtctttggtattttccagcaggataatatcagctcagtmtttgaccatattcgttcaggrcgcgagtggggcttatcaacccttcttagycattactatctaggaatttacaatacccgtgtagaaagtagtacagttggaaaagaatactaccaacagcttcttacttatttgaaacgttctggctcaaaccaaacggttgccctcaactgcgatgttcttattaacattgatttgaaccaagttttccacctacatagtacaacaaaagagcctatcactgtagtttataaaaaactagctaagaaagatatttcagaagtaaatgcaatcttggatgtagatgaaacagaccatgttctttctcataaactctttgatagcaagtcaacagctgaaaygttcaatatgtctacagatatctttgtcgttgatacaccttggttgattgaacacttggaagaagaagctaaaaaagaacatccaragaaattgcgctatgttttacgggatttggctgtaaaagagggagctttygcctacgagtacacgggctatctagccaatattcactctgttaaatcttattatcaagcgaatatcgatatgcttgaatcacaaaaattctattctcttttctcaccaaaccaaaagatttatacaaaggtcaaaaacgaagagccaacttactatgctaatacatctaaggtaagcacttctcagtttgcctctggtagtattattgaaggtcaagtagctaattctgttctatcacgtaatattcatgtccataaggatagcttggttaaagatagcctgctcttccctcgtgttgttattggaraaggggctcaggtcgaatatgctatcttggacaaaggggttgaagttgagchtggtgttgtgattcgaggaactgcagaacatccagttgtggttaagaaaggtgctaaagtaacagaggatattcattcaykaactaat

SEQ ID NO: 1100 - DNA, 726 bp, Streptococcus pneumoniae
  misc_feature (1)..(726): tiling:Spneumo1:WAN024F29; Cluster includes WAN0244AB spr0 687|trmD|15902731|NP_358281.1|688917..689636|+|720 bp|tRNA (guanine-N1)-methyltransferase|S.pneumoniae|R6|NC_003098. 1|ORF|111
atgaagattgatattttaaccctctttccagagatgttttctccactggagcactcaatcgttggaaaggctcgagaaaaagggctcttggatatccagtatcataattttcgagaaaatgctgaaaaggcccgtcatgtagatgatgagccctacggaggcggtcagggcatgttgctcagagyacaacctattttcgattcctttgatgctattgaaaagaaaaatccgcgcgttattctcctygatcctgctggaaagcagtttgatcaggcttatgctgaagatttggctcaagaggaagagctaatctttatctgtgggcactatgagggttatgatgagcgcattaagaccttggtaacagatgagatttccctrggygactatgtyctcactggtggagaattggcagctatgaccatgattgatgctacagttcgcctgattccagaagtgattggcaaggagtctagccaccaagatgatagtttttcttcaggtcttttagaatatcmtcagtacacacgtccctatgattatcgaggcatggtcgtgccagatgtattgatgagtggycaycatgaaaagattcgtcagtggcgattgtacgagagtttaaagaaaacctacgagcgcagrccggatttacttgaacattatcaactgacagtagaagaagaaaaaatgctggcagaaatcaaagaaaacaaagaasyractaat

SEQ ID NO: 1101 - DNA, 268 bp, Streptococcus pneumoniae
  misc_feature (1)..(268): tiling:Spneumo1:WAN024DDA-5; Cluster includes WAN024468 sp r0834|proC|15902878|NP_358428.1|835350..836147|+|798 bp|Py rroline-5-carboxylate reductase|S.pneumoniae|R6|NC_003098. 1|ORF|111
atgaagattggatttatcggtttggggaatatgggtgctagyttrgcmaartctgtcttgcagrctagrmcgtcagatgagattctccttgccaatcgtagtcaagyyaaggtrgatgctttcatygcwracttyggtggtcagrcttcyarcaatgaagaaatrttygmagaagcagatgtgatttttctaggwgttaagcctgctcagttttctgaactgctttctcaataycagaccatccttgaaaaaagagaaagtcttcttt

SEQ ID NO: 1102 - DNA, 1413 bp, Streptococcus pneumoniae
  misc_feature (1)..(1413): tiling:Spneumo1:WAN024FYH; Cluster includes WAN023PIP pne3 3_20||||13214..14626|+|1413 bp|Type 16A capsule operon, Gl immer 2.02 orf prediction|S.pneumoniae||WAN01UCI4|ORF|000
atgaagattttaaagaattatgtttataatttgttataccagatactagtagttgttctcccaataataactactccctatattactagaatctttagttctcaagagttaggtgattatggatattatagttctatagtaacttactttatattgctcgctactttaggtgtcgccaactatgggactaaggtaatttctggacatcgtaatgagattaataaaaatttttggggtatctactctttacaattaggtgctacaatcctttcaatctccttatattgtattttttgcgttaaccttcctccaatgcaaaacccagtagcctatattttgggattgagtttagtttctaaaggtttagatatttcctggctttttcaaggattagaggatttccgtaaaattactgttcgaaatattacggtaaaactaattggggtaatctctattttcctgtttgtcaaatctactaacgacctttacctttatgtgttcttattaacaatatttgagctattgggacaattaagtatgtggttgccggcccgagggtttattggtaagccccatgttgatttagaatacgctaggtaccatttgaaaccaattattttattatttcttcctcagatagcaatctctttatacgttactttagatcgtacgatgcttggtgctttatcctctacaaaagatgtaggaatttatgatcaggctcttaaattggtaaatattttattaacattggtaacatcgcttggaagtgttatgttgcctcgagtagctaacttattagcaacaggagatcatagagcagtcaataagatgcatgagatggctttcttgatttataatttagttatttttcctattatatccggaatgttaattgtcaatgatgattttgttcaatttttccttggtcaagattttcaggatgcacgttatgcaatcgccattatgattttccgtatgttctttataggttggaccaatattatgggaattcaaattttgattccacacaataaaaataaggaatttatggtttcaacaacagctcccgcaattatcagtgtaggtttgaacctgctattccttcctaaacttggttatatcggagcagctattgtctctgttttaacagaagcgctagtatgggcaattcaattgtactttacccgcaaatacctaaaggaagtttcaattattggatctatgacaaaaattattctagcatcagctatcatgtatggtattttgcttggttcaaaaacatttatacagttttcaccaaccataaatgttctagcatttgctgtgtttggtggactcatttatctttttgcaattctatctctgaaagtggtagatgtaaaagaattaaaacaaatgattaggaaaaaa

SEQ ID NO: 1103 - DNA, 255 bp, Streptococcus pneumoniae
  misc_feature (1)..(255): tiling:Spneumo1:WAN024E26; Cluster includes WAN023S4B cont ig_375_2||||496..750|-|255 bp|Glimmer 2.02 orf prediction| S.pneumoniae|670|WAN01UD85|ORF|000
atgaagattttaaatattgaactagcaaatgtagagcagacagacttaggttttgagcattgggtagatgtgacttatcaggttccgattttgaagaatgaatacacggtcaagctattattacttatggaatgcaggatagaggaccaagaggttattgagtatctggtcagcacttggaagtatcgtgatctcgtgttgcattcggtaaggatgtatgagatagaaaagagtgagagttttactatccttgat

SEQ ID NO: 1104 - DNA, 1158 bp, Streptococcus pneumoniae
  misc_feature (1)..(1158): tiling:Spneumo1:WAN024FON; Cluster includes WAN023P5F pne5 5_16||||11761..12918|+|1158 bp|Type 27 capsule operon, Gli mmer 2.02 orf prediction|S.pneumoniae||WAN01UCGU|ORF|000
atgaagatttttaaaaaaattaaatttatattaatgctgctttatacctcaacttttccaagatgtgagaaaatactgatttttggatcatggttaggtgaaaaatatgcagacaatccaagatatttgtttgagtatgtgattaagaatcgtcccgatttaaaagctatatggattacaagtaatcaagatgtttttaaagaattacagaagaaacaatatcccgtgatgatggcagatgagagtgaagctcataaaattatgaagaaagctaaatatatttttacaactacaggtatttttgatatcggagtagaaaatagtaggttgattggcggtgcttttttaattaacctttggcatggcattcctttgaaaaaaatcatgtatgatgataaacattcagcgcttcacaaacgtagtaaactagtgacttgggtagaaaaaattcctcttcgaaactattttgttatttctactagtacggcaataactcaaatttatcagtctgcttttcgcgtaaagaaatctaatatattagaacttggacagcctagaaatgactatttttatgatgagtcttatccagtaagttcgctaatacaagaattaaaaagtaaaaatattatcttatatatgccgacacatcgcaatgaaggaaagaaacaaattcctctagataatttaatggatttaaatcgattaaataaatggtgtgaagaaacaaattcaatttttgtaattaaaaaacacttctatcattcaaaagaaaaaacacttgagaaagaatattcatcaataattgatgtgacaaatgagaaggtcgatgctcaagaattactcaaatattcaaagatcttaataactgactactcgagctgctatattgactacttattgttggatcgaccaattatattttttaattatgactatgatgattatttgaggattgatcgttcgctatattttccatatgagaaggttactccaggggagaaatgtcaaaactttgatgaattattagtgactctgcaaaatctatatctaggaaaagatgattataggaaaaagcgtgaaaatattaaaactttcttttattctagtgaaactcagaagtcagtttctgaaaaaatcattaatcacgtactaaatcta

SEQ ID NO: 1105 - DNA, 467 bp, Streptococcus pneumoniae
  misc_feature (1)..(467): tiling:Spneumo1:WAN024ESQ; Cluster includes WAN0243P6 spr1 449||15903492|NP_359042.1|1433540..1434001|-|462 bp|Conser ved hypothetical protein|S.pneumoniae|R6|NC_003098.1|ORF|1 11
atgaagcaaacaaaaacarctaaaatcgcccttgtatccctattaaccgccctttctgtggttctaggttatttcttaaaaatcccaacacctacaggaattctaactcttttagatgctggtgtcttctttgcggccttttactttggtagtcgtgaaggagcggtagtcggaggactagcaagtttcttgattgacctcttatcaggctaccctcagtggatgttctttagcttggtcaaccatggcttgcagggatttttcgcaggatttaaaggaaaaagtcagtggttaggccttattttagcaactattgccatggtaggaggctacgccttgggttctrctttgatgaatgrctgggcagcagccctcccagaaattctaccraatttyatgcaaaatatggtagggatgattgtaggatttattcttagtcaaagtatcaagaagattaagtaactaat

SEQ ID NO: 1106 - DNA, 1190 bp, Streptococcus pneumoniae
  misc_feature (1)..(1190): tiling:Spneumo1:WAN024D7E; Cluster includes WAN0243Q8 spr1 411||15903454|NP_359004.1|1396746..1397930|+|1185 bp|Conse rved hypothetical protein|S.pneumoniae|R6|NC_003098.1|ORF| 111
atgaagcaatctatctcaaatctcaagttagcygagcgtggagccattatcagtatttcgacctatttgatcttgtctgcagccaaattagcarctggtcatctccttcattcatccagtttggtggccgatggttttaataacgtatcggacatcattggaaatgtrgccctcttaatcgggattcggatggcgcgccagcctgcagaccgtgaccaccrttttggtcattggaagattgaagatttggcaagcttgatcacttctatcatcatgttctatgtcggtttcgatgttctaagagataccattcaaaagattctcagtcgggaagaawcggtcattgatcctcttggtgcaactctaggaatcatttctgcagcgattatgtttgtggtctatctctacaatactcgcctcagtaagaaatccaactccaadgcgctgaagrcagctgctaaggacaatctttctgacgctgttacctcacttggaaccgccattgccatcctagctagtagtttyaattatccgattgtggataaactggttgctatyatcatcactttctttatcttgaagactgcctatgatatcttcatcgagtcttcctttagtctttcagatggctttgacgaccgcctgctcgaggactaccaaaaggctatcatggaaattcccaaaatcagcaaggtcaaatcgcaaagaggtcgcacctacggtagcaacatctacctggatattacactagagatgaatcctgacttgtctgtttttgaaagccatgaaatcgcggatcaggtcgagtctatgctggagrakcgttttggcgtctttgataccgatgtccatatcgaaccagcacctatccctgaggatgaaattttagacaatgtctataaaaaattgcttatgcgtgaacaattgatygaccaaggaaaccaactagaagaactcttgactgatgattttgtctatattcgccaagatggagagcagatggataaagaggcttataagaccaaaaaagagttaaattctgctatcaaggacattcaaattacttccatcagtcaaaaaaccaaactyatctgctatgagttagatggtatcatccataccagtatctggcgtcgccacgaaacctggcaaaatatctttcatcaagaaaccaaaaaagaatarctaat

SEQ ID NO: 1107 - DNA, 204 bp, Streptococcus pneumoniae
  misc_feature (1)..(204): tiling:Spneumo1:WAN024CFF; Cluster includes WAN02413I |xis -Tn||CAA43359.1|||204 bp|excisionase of Tn1545|S.pneumonia e||X61025|ORF|001
atgaagcagactgacattcctatttgggaacgttataccctaaccattgaagaagcgtcaaaatattttcgtattggcgaaaacaagctacgacgcttggcagaggaaaataaaaatgcaaattggctgattatgaatggcaatcgtattcagattaaacgaaaacaatttgaaaaaattatagatacattggacgcaatctag

SEQ ID NO: 1108 - DNA, 1176 bp, Streptococcus pneumoniae
  misc_feature (1)..(1176): tiling:Spneumo1:WAN024FFE; Cluster includes WAN02420A SP17 12||15901546|NP_346150.1|1615677..1616846|-|1170 bp|hypoth etical protein|S.pneumoniae|TIGR4|NC_003028.1|ORF|111
atgaagccaattgaccgtttttcttatctaaagaataatcgggtgtcgcaagatacctcatctctggtacagtgctacctcccgattatcggtcaggaggcactgagcctttatctttatacaatcagtttttgggataatggtagaaaggaatatcttttttcaagyatyctcaaycatctcaactttgggatggatagactgataaaatcattgaaaatcttatctgcttttaatctcttgaccctctatcaaaagggkgatgtttatcagctagccctccatgctcctctatctagtcaagacttcttggrgcatcctgtttatcgcagactcttagagaaaaagattggcgatstagctgtggaggatttgaaagttgaaagtgctgatggtgaagaaatacctgtctcactcaatcaagtctttccagaattggcagaactaggcagtcaagaagaccttggtctcaagaagaaagtggccaatgattttgacttggaacattttcgccrgctgatggctcgagatggacttcgttttgcggatgagcagtccgatgtcttaaacctctttgctattgccgaggagaagaaatggacttggtttgaaacctatcaattggccaagtcaacagctgtttcycaggttatttcaaccaaacgcatgcgtgaaaaaattgctcaaaaaccagtttcctctgactttagtcttaaggaarcraccattatcaaagaagcyaaaagtaaaactgccctgcagttcttrgcagaaatcaagcaaacacgcaagggaaccattacccaaacagaaagagaactcttgcaacagatggctggcttgggcttrctggacgaagtcatcaatatyattctyttattgacctttaataaggtsgattcggcaaatatcaatgagaaatatgccatgaaggtagccaatgactatgcctatcaaaagattcattcggcagaaraggcmgtyttrcgmatycgtgakcgaggrcagaaagcaaaaacacaaaaacagaatcagactgccccagwaaaaaccaatgttcctaaatggagtaatcctgaatataagaatgaaaccagcgaggaaactcgtctggaactagaacgtaagaagcaagaactattagctcgattagaaaaaggaggagatctarctaat

SEQ ID NO: 1109 - DNA, 1170 bp, Streptococcus pneumoniae
  misc_feature (1)..(1170): tiling:Spneumo1:WAN024FFD; Cluster includes WAN0243M7 spr1 556|dnaB|15903599|NP_359149.1|1537088..1538257|-|1170 bp|C hromosome replication initiation protein/membrane attachme nt protein, Putative|S.pneumoniae|R6|NC_003098.1|ORF|100
atgaagccaattgaccgtttttcttatctaaagaataatcgggtgtcgcaagatacctcatctctggtacagtgctacctcccgattatcggtcaggaggcactgagcctttatctttatacratyagtttttgggataatggtagaaaggaatatcttttttcaagtatcctcaatcatctyaactttggratggatagactgataaaatcattgaaaatcttatctgcttttaatctcttgacyctctatcaaaagggggatgtttatcagctagccctccatgctcctctatctagtcaagacttcttggrgcatcctgtttatcgcagactcttagagaaaaagattggsgactctgctgtggaggatttgaaagttgaaagtgctgatggtgaagaaatacctgtctcactcaatcaagtctttccagaattggcagaactaggcagtcaagaagaccttggtctcaagaagaaagtggccaaygattttgacttggamcattttcgycagctkatggctcgagatggacttcgytttgcggatgagcagtccgatgtcttaaacctctttgcyattgccgaggagaagaaatggacttggtttgaaacctatcaattggccaagtcaacagctgtttctcaggttatttcaaccaaacgcatgcgtgaaaaaattgctcaaaaaccagtttcctctgactttagtcttaaggaarcraycattatcaaagaagccaaaagtaaaactgccctgcagttcttggcagaaatcaagcaaacacgcaagggaaccattacccaaacagaaagagaactcttgcaacagatggctggcttgggyttgctggacgaagtcatcaatatcattcttttattgacctttaataaggtcgattcggcaaatatcaatgagaaatatgccatgaaggtagccaatgactatgcctatcaaaagattcattcggcagaaraggcagtcttgcgcatccgtgagcgagracagaaagcaaaaacacaaaaacagaatcagactgccccagcaaaaaccaatattcctaaatggagtaatcctgaatataaaaatacgtcatccgctgaggaattagaagagatggaacgccaaaccctagaattattagcaaaattagataacggaggtgattag

SEQ ID NO: 1110 - DNA, 330 bp, Streptococcus pneumoniae
  misc_feature (1)..(330): tiling:Spneumo1:WAN024C8Y; Cluster includes WAN023M8Y 3153 65_385||||200853..201182|-|330 bp|EGAD orf prediction|S.pn eumoniae|R6|NC_003098.1|ORF|110
atgaagccaccttcacgcaattcacgtgcaactgggccaaagatacgtgttccgcgaggagttttgtcttcacggatgataactgctgcgttttcgtcaaatttgatgtatgaaccatcagcacgacgagcacctgatttagtacgaacgataactgctttaacaacgtcaccttttttaaccgcaccaccaggagtagcttgttttacagatgccacgataacatcaccgatgtttgcaaatttacgtcctgaaccaccaagaactttgatagtcaagatttcgcgagcaccgctgttgtctgcgactttcaaacgagtttctgtttga

SEQ ID NO: 1111 - DNA, 228 bp, Streptococcus pneumoniae
  misc_feature (1)..(228): tiling:Spneumo1:WAN024BDB; Cluster includes WAN023MFF 3131 02_65||||35144..35371|+|228 bp|EGAD orf prediction|S.pneum oniae|R6|NC_003098.1|ORF|110
atgaagccaggtgccgagggttggaaagatgagcgcagccaagacattgaagaaaaagataacggaaatggcttgggctacttccttttccttagcatsrataacrggcgctgtcgctgcaatggcagaacccccacagatagaagaacctactccaaccaaggtagccagttttgtatccagkgcaaagaaacgctggaagaggtaggcaataatcagagctattga

SEQ ID NO: 1112 - DNA, 501 bp, Streptococcus pneumoniae
  misc_feature (1)..(501): tiling:Spneumo1:WAN024C7C; Cluster includes WAN023QM1 cont ig_1315_17||||13238..13330|-|93 bp|Glimmer 2.02 orf predic tion|S.pneumoniae|670|WAN01UE9N|ORF|000
atgaagcggttagcaatagaaacaatcactaaaccaatgaagctgagaggaatatctaagggtatagccgagttggacggtcaaggtttagagattgatttggataatttagagattgattttggtggagagtcatttgatttagcaagaataccaggaactaagggtggttatcgttatttctttctttgccctgattgtggtagacggtgcaggttgctttataaacggtatttgtattttagttgcggtacctgtctagatatccacaagagcaccctgaaccgcagtaaaacggattgccaatattactgggagcttgcactaaaagaagctagaaaggtagaaccagggtggagtcctagacgtggtggatatatgtttgatggtttccctgaaagaccaaagtatatgaagcgtgacaggtatcataagcactataagaagtttttgaagtatattgaaaaaggggatagattttggctgaatggtttgagattg

SEQ ID NO: 1113 - DNA, 1697 bp, Streptococcus pneumoniae
  misc_feature (1)..(1697): tiling:Spneumo1:WAN024GFJ; Cluster includes WAN0244DB spr0 579|hk09|15902623|NP_358173.1|589055..590746|+|1692 bp|His tidine kinase|S.pneumoniae|R6|NC_003098.1|ORF|111
atgaagcgttcttctcttttagttagaatggttatttccatctttctggtctttctcattctcctagctctggttggaactttctactatcaatcaagttcttcagccattgaggccaccattgagggcaacagccaaacgaccatcagccagactagccactttattcagtcttatatcaaaaaactagaaaccacytcgacyggtttgacccarcagacggatgttctggcctatgctgagaatcccagtcaagacaaggtcgagggaatccgagatttgtttttgaccatcttgaagtcagataaggacttgaaaactgttgtgctggtgaccaaatctggtcaggtcatttctacagatgacagtgtgcagatgaaaacttcctctgatatgatggctgaggattggtaccaaaaggcyattcatcagggagctatgcctgttttgactccagctcgtaaatcagatagtcagtgggtcatttctgtcactcaagaacttgttgatgcaaagggagccaatcttggtgtgcttcgtttggatatttcttatgaaactctggaagcctatctcaatcaactccagttggggcagcagggctttgccttcattatcaatgaaaaccatgaatttgtctaccatcctcaacacacagtttatagttcgtctagcaaaatggaggctatgaaaccctacatcgakacaggtcagggttatactcctggtcacaaatcctacgtcagtcaagagaagattgcaggaactgattggacggtrcttggcgtgtcatcattggaaaagttagaccaggttcggagtcagctcttgtggaccttgcttggggccagtgtcacatctcttcttgtctgtctctgcttagtgtggttcagtcttaaacgctggattgctcctttgaaggatttgagagaaaccatgttggaaattgcttctggtgctcaaaatcttcgtgccaaggaagttggtgcctatgaactgagagaagtaactcgccaatttaatgcyatgttggatcagattgatcagttgatggtagctattcgtagccaggaagaaacgacccgtcagtaccaacttcaagccctttcgagccagattaatccacatttcctctataacactttggacaccatcatctggatggctgaatttcatgatagtcagcgagtggtgcaggtgaccaagtccttggcaacctatttccgcttggcgctmaatyaaggcaaggacttgatttgtctctctgacgaaatcawtcatgtccsymastatctcttwatccagaaacaacgctatggagataagctggaataygaaattaatgaaaatgttgcctttgataatttagtcttacccaagctggtcctacaaccccttgtagaaaatgctctttaccatggcattaaggaaaaggaaggtcagggccatattaaactttctgtccagaaacaggattcgggattggtcatccgtattgaggatgatggcgttggcttccaagatgctggtgatagtagtcaaagtcaactcaaacgtgggggagttggtcttcaaaatgtmgatcaacggctcaaacttcattttggagccaattaccakatgaagattgattctagaccccaaaaaggracgaaagttgaaatatatataaatagaatagaaactagctaactaat

SEQ ID NO: 1114 - DNA, 153 bp, Streptococcus pneumoniae
  misc_feature (1)..(153): tiling:Spneumo1:WAN024BEM; Cluster includes WAN023YEI AL44 9930.1_145||||118369..118512|-|144 bp|Glimmer 2.02 orf pre diction|S.pneumoniae||AL449930.1|ORF|000
atgaagctgacgtggtttgaagagattttcgaagagtatgaccagcttgcaagctggtctttgtgctcttttcacagtctcatcaaccagttaatcgattgttctactttttgtctccaaaaccttggaaaaggctttcttttgctaactaat

SEQ ID NO: 1115 - DNA, 305 bp, Streptococcus pneumoniae
  misc_feature (1)..(305): tiling:Spneumo1:WAN024DPZ; Cluster includes WAN02449E spr0 720||15902764|NP_358314.1|721895..722194|-|300 bp|Hypothet ical protein|S.pneumoniae|R6|NC_003098.1|ORF|111
atgaagcttatcaatacgacaaactcacactcgcaactkgtaaaaagtcarctagaaagtaccgatgcaacccttgttgaggtttattctgcagggaatacagatgttatttttacccaagctccgcttcactatgaaatcctcatctcaaacaaacaccgtgctattcgtgagcctgaaatcgaaaccattcaagaatttttcttgaaacgtaaaattgataagrcctctgttgatgaagccaatatcaagacactctactcagagaaattaattggaatttcaatcccaatcaagtaactaat

SEQ ID NO: 1116 - DNA, 1827 bp, Streptococcus pneumoniae
  misc_feature (1)..(1827): tiling:Spneumo1:WAN024G4Y-5; Cluster includes WAN02440I sp r1040|rexA|15903084|NP_358634.1|1024754..1028404|+|3651 bp |First subunit of major exonuclease|S.pneumoniae|R6|NC_003 098.1|ORF|551
atgaagcttattccctttttaagtgaggaggagattcaaaaactgcaagaagcagaagcaaattcgagcaaggaacaraagaaaactgccgarcaaatcgaagctatctacacttctgsycagaatatcctggtctcagcatcggctggttctggaaagacctttgtcatggyagagcgcattctgraccaattggcgcgtggtgtcgaaatttctcaactctttatctcaacctttaccgtcaaggctgcaactgaacttaaagaacgtttagagaaaaaaatcagcaagaaaatycaagaaacagatgatgtcgayctcaaacaacacttgggwcgccagttggcagacctaccmaacgctgccatyggaaccatggaytctttcacacaaaaattccttggcaaacatggttatctgcttgatattgcacctaatttccgtattttacaaaaccaaagcgagcaacttmttctcgaaaacgaagtctttcatgaggtctttgaagcgcattaccaaggtaaacagaaagagasctttagtcatttgctgaaaaactttgctgggcgtggcaaggacgaacggggtctgcgscagcargtctataaaatctatgacttcctccaatccaccagtaatcctcaaaagtggytgagtgaatctttcctcaaaggmtttgagaaagctgattttaccagtgaaaaagaaaaactgacygagcaaatcaaacaagccctytgggatttggaaagctttttccgttaccatctggataacgatgccaaggagtttgcaaaggctgcctatttagaaaatgttcagttaattctggatgaaattggctccctaaatcaggagtycgatagtcaggcttatcaggcagtrcttgcgcgtgttgtcgccatctctaaggagaaaaacggtcgagctctgactaatgccagycgtaaggctgatttgaagcccctggctgatgcctacaacgaagagagaaagacccagtttrctaaactaggacaattatcagaccagatarcsattctcgactatcaagaacgttatcatsragacacwtggraactagctaaaaccttccaawcyttyatgagysattttgtrgaggcttatcgtcagmgmaaacgmcaggaaaatgccttygaattcgctgatatcagccattacaccattgagattttagaraatttcccacaagttcgtgagtcttatcaggagcgcttccatgaagtcatggtcgatgagtatcaggataycaaccatattcaagaacggatgctggaattgttgtctaatggccacaatcgctttatggtgggagatatcaagcaatccatctatcgtttccgtcaggcagacccgcagattttcaatgagaaattccaacgctatgcgcaaaatccycaagaaggcargctcattmtcctcaaggmaaatttccgtagtagttcagaagtgctgtcagcaaccaatgatgtctttgaacgtctcatggaccaagaggtcggcgaaatcaactatgataacawgcaccagcttgtttttgccaataccaaactgactcccaatccagacaacaaggcmgmatttctcctctacgacaaggacgatacaggtgaggaagaagagagtcaaacagaaacgaaactaacaggcgaaatgcgcttagttatcaaggagatyctkaaacttcatcargaaaaaggtgttgcctttaaggaaattgcccttctgacctcyagycgyartcgtaatgaccarattctmctygccctgtctgagtacggrattcctgtcaaaactgacggagag

SEQ ID NO: 1117 - DNA, 539 bp, Streptococcus pneumoniae
  misc_feature (1)..(539): tiling:Spneumo1:WAN024FA9; Cluster includes WAN0243HP spr1 719||15903761|NP_359311.1|1699822..1700355|+|534 bp|Conser ved hypothetical protein|S.pneumoniae|R6|NC_003098.1|ORF|1 11
atgaagcttccaaaagaaggcgactttattacaattcaaagttataagcatgatgggagtctccaccgaacttggcgggacaccatggtactaaaaacaacagaaaacgccattattggtgtcaacgatcatacacttgttaccgaaagtgatggtcgtcgttgggtcactcgagaaccggctattgtttactttcacaagaaatattggtttaatatcattgccatgattcgtgataatggaacttcttactattgcaatrtggctagcccctactatytggatgaasaagcactgaagtatattgattacgatttggatgttaaaatttttacagatggggaaaaacgtytyttggacgttgaagartacgagcgtcacaaacgcaaaatgaattattctgatgacttggactatattttaaaagaacatgtcaaaattcttgttgaytggattaacaatggacgtggtcctttctcagaagcctatgtaaacatttggtacaagcgctatgtagaactaaagaatcggtaactaat

SEQ ID NO: 1118 - DNA, 860 bp, Streptococcus pneumoniae
  misc_feature (1)..(860): tiling:Spneumo1:WAN024D97; Cluster includes WAN0243V5 spr1 234|aroE|15903277|NP_358827.1|1231433..1232287|-|855 bp|Sh ikimate dehydrogenase|S.pneumoniae|R6|NC_003098.1|ORF|111
atgaagcttgatggctatacacgtttagctgcagttgttgccaatcctattaagcattctatttctcccttcatccacaatagagcctttgaggcgacagctaccaacgstgcttaygtggcttgggagattgaagcgrstgayytgghagwmacagtdgccaatattcgtcgytaccagatgtttgghatcaayctgtccatgccytataaggagcaggtgattycttatttrgatrarytragyraygaakygyrcttgatyggtgcggtyaatacggtygtcaatgagaatggcaatttaattggatataatacagatggcaagggattttttaagwgcttgccttcttttacaattwcaggtaaraagatgaycctgctgggtgcaggtggtgcggcyaartchatyttggchcargctattttggayggygtcagtcagatttcdstytttgttcgttcmgtttctatggraaaaacaagaccttacctagacaagttacaggakcaracaggytttaaagtggayttgtrygctttagarwatgtttctgaactgcaagcaaggattgycgagtcggatttrctrgtyaatgccaccagtgtgggcatggatggycaatcmtcyccwgttcctgaaarcatartcttrccagaaactmtyttrgtkgcagatatyatwtaycaaccctttgaaacrccrtttttraaatgggcyagaagtcagggcaawccagcrgtyaatggtctgggaatgttrctctatcaagctgcagaagcttttcaactgtggacaggcaaggaaatgccracagaagagatttggcagtctttaacagaaaaataccaataactaat

SEQ ID NO: 1119 - DNA, 618 bp, Streptococcus pneumoniae
  misc_feature (1)..(618): tiling:Spneumo1:WAN024CR7; Cluster includes WAN0244JN spr0 351|pcpC|15902395|NP_357945.1|351393..352277|+|885 bp|Chol ine-binding protein|S.pneumoniae|R6|NC_003098.1|ORF|111
atgaagcttttbaaaaaaatgatgcaartcgyactagccacatttttcttcggtttgytagsgachartacagtatktgcagatgattctgaaggatggcagtttgtccaagaaaatggtagaacctactacaaaaagggggmtctaaaagaaacctactggagagtgatagatgggaartactattattttgatcctttatccggagagatggttgtcggctggcaatatatacctgctccacacaagggggttacgatyggtccytctccaagamwagagattkctyttagaccagattggttttaytttggtcaagatggkgtmytacaagaatttgttggcaagcaagtkttagaagcaaaaactgctacraataccaacaaacatcatggggaagaatatgatagccmagcagagaaacgagtctattattttgaagatcagcgtagttatcatactttaaaaactggttggrtttatgawgakggkbaytggtattatttrcagaaggatggtggctttgattckcgcatcaacagattgacggttggagagctagcacgtggttgggttaaggattaccctcttacstatgatgaagagaagctaaaagca

SEQ ID NO: 1120 - DNA, 368 bp, Streptococcus pneumoniae
  misc_feature (1)..(368): tiling:Spneumo1:WAN024GKT; Cluster includes WAN0244H3 spr0 443|glnR|15902487|NP_358037.1|448118..448474|+|357 bp|Tran scriptional repressor of the glutamine synthetase gene|S.p neumoniae|R6|NC_003098.1|ORF|111
atgaaggaaaaagaatttcgccgaaatatggctgtttttcctatyggcagtgttatgaagttgaccgatctatcggcgcgtcagattcgttattatgaaratcaagagttgatcaagcccgatcgaaacgaaggaaatcgtcgcatgtattccttgaatgacatggatcgtctgcttgaaatcaaagattatatctctgaaggttataatatcgctgccattaagaaaaaatatgctgaacgtgaagcgaaatccaagaaagcggttagtcagactgaagtacgtcgtgcacttcacaatgaactcctccaacaggggcgttttgcttcagtacagtcaccttttggtcgcggttarsyaaycgcaag

SEQ ID NO: 1121 - DNA, 962 bp, Streptococcus pneumoniae
  misc_feature (1)..(962): tiling:Spneumo1:WAN024CWX; Cluster includes WAN0244B1 spr0 661|livM|15902705|NP_358255.1|664756..665712|+|957 bp|ABC transporter membrane-spanning permease - branched chain am ino acid transport|S.pneumoniae|R6|NC_003098.1|ORF|111
atgaaggaaaatttaaaagttaatattctatggttactccttttgttagctggctatagcttgattagtgtactggtttcagtcggagtacttaatctattctatgtacagattttacaacaaattggaattaatattattttggctgttggtctcaacttaatcgttggtttttcaggacaattttcacttggtcatgctggtttcatggcrattggtgcctatgcmgcagctattattggttctamatcaccaacctacggtgccttctttggagctatgcttgtaggggctttgctttcaggakyagttgccttacttgtcggcattccaaccttgskcttgaagggggactatcttgcggtagcaactctrggtgtttmtgaaattatccgtatctttatcatcaatggtggaagycttacaaatggtgcggcaggtatcttarggattcctaactttacaacttggcaaatggtttacttctttgtcgtgattacaaccattgcaaccttgaacttcttgcgtagcccaattgghcgttcaaccctctctgttcgtgaagatgaaatcgctgctgagtcagttggggttaatacgactaaaattaaaatcatcgcttttgtctttggtgccattactgcaagtattgctgggtcacttcagscaggattwatcgggtctgttgtaccgaaagattacaccttcatcaactcaatcaacgttttgattattgttgtatttggtggactcggttccattacaggtgcgattgtttcggctattgttcwksgaattttgaatatgcttctccaagatgttgctagtgtgcgtatgattatttacgctttggccttggtattggtaatgattttcagaccaggtggactccttggaacrtgggaactgagcctatcacgtttctttaaaaaatctaagaaggaggaacaaaactaactaat

SEQ ID NO: 1122 - DNA, 1341 bp, Streptococcus pneumoniae
  misc_feature (1)..(1341): tiling:Spneumo1:WAN024GLI; Cluster includes WAN0244E3 spr0 551|brnQ|15902595|NP_358145.1|550668..552008|+|1341 bp|Bra nched-chain amino acid transport system carrier protein|S. pneumoniae|R6|NC_003098.1|ORF|111
atgaaggagatttttatggctaaaaaaggtaccctaacaggtttgctcctgtttggaatattttttggtgcggggaacttgatttttccgccttctctaggtgctctatctggagaacattttcttcctgccatcgcaggttttgtcttttcaggcgttggtatcgccgtcttgacccttattattggaacgctaaatcctaaaggatatatctacgagatttcaacgaagatagcgccttggtttgcgactctttacctctcagttctttacttgtcaatcggtccattctttgctaccccacgtactgctacaacagcttacgaagtagggattagcccccttttgtcggatgcaaataaaggacttggcttgattgtatttacggttctgtattttgcggcagcctatttgatttcgcttaatccatcaaaaatcttagaccgcattggacgtrttttaacgccagtctttgcaattttgattgttatcttggtcgttctgggagctatcaaatatggtggaacaagtcctcaagctgcttcagctgcttatcaagcttctgcctttggtacaggtttcctagaaggttayaatacyttggacgcccttgcytcagtggcctttagcgtaatcgcagttcaaaccttgaaacaacttggattttcaagtaagaaagaatacatttcaactatttgggttgttggtatcgttgttgcccttgccttcagcgctctttacatcggtttaggttttcttggaaatcatttcccagtaccagctgaagcgatgaagggtggaacaccaggtgtttacatcttgtcacaagccactcaagaaatctttggctcaacagctcaactcttccttgcagctatggttaccgtaacctgcttcacaacgactgttggtttgattgtgtcaacagctgarttctttaatgagcgcttcccacaaatcagctacaaggtttatgcgacagcctttaccttgattggatttgctattgccaatttgggtcttgatgcgattatcaagtactcaattccagtaytggttatcttgtacccaatcacgattgctatcgttatgattgtcattgtcaacaaatttgttgccctttcaaaaccaggtatgcagttgacaattgctgtggttacagttattgccattgcaarcgtactaggaagctcgtttaaggttgagtttcttgcaaatcttgttagcgttcttccttttgccaaggcatctctcccatggttggtgccagccatygttggaatcttgctctcattggttctaccaaacaagcaagaaagygatgtttttgaaatggaataa

SEQ ID NO: 1123 - DNA, 881 bp, Streptococcus pneumoniae
  misc_feature (1)..(881): tiling:Spneumo1:WAN024DGM; Cluster includes WAN0244DG spr0 574||15902618|NP_358168.1|584548..585423|+|876 bp|Conserve d hypothetical protein|S.pneumoniae|R6|NC_003098.1|ORF|111
atgaaggagtatgacatgaaaaagtggtggaaagagctgatagacaarcctttattaaaagcttttttgcattattatcaagcatcagatagtgagttgaccagtgtcgcagtagcctactattggttgatttcgattttccccctgcttttggtggtggtcaatatcctcccctattttcagattcctgtgggagaatttytgkgctttatgaaagacgtyctgcccccaagcctctatgaaggtgtggaaaaaatagccagagaagtyttgacgcaaccytcmmcaggtytattgagtttttctgttttatcggcgttatggagtttttcaaaatctatraatttcttgcaaaaagcttttamcaaggcttatggcgtcgaaaagagtcgtggacttatttcccatcagatgctaagtctcctagtcagttttggcttgcaghtcctctttgcgtttgccttgtttttgatcttatttggtcagatgattttggctttacttgctcattattggacaaaagatggcattatctatcaggctttacaagggttggcaggtcctctgatttacgccctcctctttgctatcttggtcatgctttattattttcttcccaatmtatctaacaggaaaattagctataccctaccaggcagtgcctttgttctcttrgtgattttaggtktactaactctgttctctagttatctcaattactatgtccatcatttggtggatgtccgaattttaggttccgttcttcttgttgttatgatgttttggtttatcttgattgctaaaattgttatcctaggcgcggtkatcaatgccagtatgcagagtttgaragatcmggtctttaaaaaagactaactaat

SEQ ID NO: 1124 - DNA, 674 bp, Streptococcus pneumoniae
  misc_feature (1)..(674): tiling:Spneumo1:WAN024DAO; Cluster includes WAN024403 spr1 055|ung|15903099|NP_358649.1|1050815..1051483|-|669 bp|DNA -uracil glycosylase|S.pneumoniae|R6|NC_003098.1|ORF|121
atgaaggagtcggctatggaacactcgtcttggcatgctttgattaaggcgcaattacctgagggttatttcgggaaaatcaatcagtttatggagcaggtctattctcaggggattatttatccacccaaggaaaaggtttttcaggctctcttgacaacactgcttgaagaagttaaggtggtaattctagggcaagacccctatcacggaccaggycaagcgcagggcttgagtttttcygtacctgactctatcccagctccaccatccttgcaaaatatcttgaaagaattgtcagatgatatcggagttaagaaatctcatgatttgacagcttgggctgagcaaggagtcttgcttcttaatgcttgtttgactgttcctgctggacaggccaatggtcatgctggtcaaatctgggagccttttactgatgctgtgattcaggtggtcaatcatctagatagaccagtcgtttttgtactctggggagcttatgcacgtaagaagaaggcmttagttaccaatcctcatcacttgattatygaatcagcccatccaagtcctttrtcggtttatagaggattttggggttccaagccyttttccaaggccaatrcattcttaaaagagacaggacaagagccaatcgattggcttagataactaat

SEQ ID NO: 1125 - DNA, 2830 bp, Streptococcus pneumoniae
  misc_feature (1)..(2830): tiling:Spneumo1:WAN024CEI; Cluster includes WAN0240ST |||A AG38043.1|||1560 bp|Orf27|S.pneumoniae||AF295925|ORF|001
atgaaggataaragaraaatcatacgtgcccgaaaggcatttagaagaagyctaaaagatgagaaraaattcttraaamaaggaaagaaggaggtrarraaacagaaaaaagattccgctgkactggatgaaaaagcatggaaaaawgagataaarvaaaagctrgagrakatgagagaagcttcaaaggmkagagtaaaacaagcaaatgaagactacaatcatattcttcaaaatagtcctccatcwcttttraatcgsaaagaattaagagayagacgrttrcctcatgctaggaaacgattgaaaatagcmaagaarcaatwtarrgaagchaaggtwgaagcaaaagaagaaagaaaagagagtcgtaaagaaagaaaaaccaatcaaaaatttytytayggtcaggaawcgaaashwaaatcyaattttttcyttcaagggaagartytagaagaattaaaagytaagaaagaagtcaarrccgcmaaagaraatytaaaatctactaarcaagyctataartycaaaaarrtyagtaggaaagccaaaacytttctttatgtccttggacgtgaaggtggagagttagcttcagaaaatgaagatttagawrgytatcrcacacttcawgagacmattagaaaaggraaacgctacagtcgsctttcttataaycttggaaaagctagtgtcaaaacaggacaagcaacakgtcgttttaccaagaaaagactgaccaacacaaaagagcgataccatcattttaaggatggaaaaggatggaaactarckaaagataabccaagttcytttaaaaatcggtwtcgaaaattaaagaaacaaggtcttwyaagtgtccgaaatatctatcaaaaaytaaaagsagccttttccttctttacatttgyggctggaaatcytgtaayctggatagttggaggaatagtctttcttcttttacttatratgagcttctttttaggattttcatctgctagtttgattcaacaagatgaatttgaattaacaaaagcttatacccacctaacttgggaagaygcagaacatactcgyacaaatgacaaaggaattacytattacacaaaagttgatgatgtgatgggstatatgaactttaaattccatgactatgagttacasaaaccagttcayttrtttagttcagaawcttacaaggattatctrtctrctttgtggcatgatttaaacgatggggawgatttgaaatccatgcaagacctytatgaaastcctaagtataaactmtcgaaagacgatcaagaggaaatdaaggaactaaaagaagarggtrtstatgcttccatgcaggrattggacaatccatttgargggaaaagyrwssmagatagtytraccatgacttatcgttayggataytatgatytagacggaaaacctacycttcaggagtayattctaytagaagcraaggytcaccaaacrattgtcgcaccaatggatggwgttgtatctctagayggagayratgttattctcactaacggaaaaggwgagaatgagagtcgwttraccttrtattcyattcataatggycgtgcgattgagggracaagrgtcytaacrggtgatrttattggtgaaacaccagaygatacaggtttgaaagtttcctatcaaaagtataagaacaagaaagaaaaattggtrtatgtcaatccgcaattttattttccaaaagtcattcaacttcagacmactatcttaccwgccattggtcagtttggtggrgatgagtttgaacgagcaaaacatatttatgaktttttgaaatctcaaggggcaagtccccaagccattgcggcwattttaggaaattggtcggtagagtcttctatyaatcctaaacgagctgarggrgattatttawctcctccwgttggcgctaccgattcctcatgggatratgaaasctggttagcgatwggaggdccagccatttatagtggtgcttatcctaatatycttcatagaggtytrggkttaggkcaatggacrgatacygcagatggktcaacacgkcatacagcyttrttraattatgcacryascmaaaataagaartggtatgatttagacctmcaacttgattttatgcttcatggggatagtccttactatcaaagttggttaaargatttytttrraaatacrggcagtgcagccaatctsgcccaactcttyctsacctattgggarggaaattctggtgayaaactactggaaagacaaaccagagcaacggaatggtattaycaaattgaaaaaggcttyagycaaacaaatggaggacaggcaaaragtgayccrcaatcccttgaaggkgttcgtggrgacttgtatgawcattctgttcctggtggtggagatggtatggcctatgcytatggacaatgtacatggggtgttgcggctcgtatgaaycarttaggvttaaarytaaaaggwagmaayggagaraagatttcaatcattaataccatgggaaatggtcargactgggttgcgacagcttcaagtcttggtggrgaaackggytcyacaccaarascaggtgcyattgtytcttttgtrggargtacacatggyacaccagcyakmtayggtcatgtggcttttgtmgagaargtmtatgatgatggttctttccttgtgtctgarachaactatggkggyaaycctaactatacctttagaaaaatctckcawgcagatagygccatyagttttgcytatackacsaaatagaagagtttacacttga

SEQ ID NO: 1126 - DNA, 1040 bp, Streptococcus pneumoniae
  misc_feature (1)..(1040): tiling:Spneumo1:WAN024B8C; Cluster includes WAN0244PR spr0 131|gcp|15902175|NP_357725.1|138992..140002|+|1011 bp|Secr eted metalloendopeptidase Gcp|S.pneumoniae|R6|NC_003098.1| ORF|111
atgaaggatagatatattttagcatttgagacatcctgtgatgagaccagtgtcgccgtcttgaaaaacgacgatgagctcttgtccaatgtcattgctagtcaaattgagagtcacaaacgttttggtggcgtagtgcccgaagtagccagtcgtcaccatgtcgaggtcattacagcctgtatcgaggaggcattggcagaagcagggattaccgaagaggacgtgacagctgttgcggytacctacggaccaggcttggtcggagccttgctagttggtttgtcagcygccaaggcctttgcttgggctcacggacttccactgattcctgttaatcacatggctgggcacctcatggcagctcagagtgtggagcctttggagtttcccttgctagccctyttrktyagbggbggrcacacagagttggtytatgtttckgaggcwggmgattayaagattgttggrgaracmcgwgaygaygcrgttggbgaggcytatgayaaggtcggycgtgtcatgggcttgacctatcctgcaggtcgtgagattgacgagctggctcatcaggggcaggatatttatgatttcccycgtgcyatgattaaggaagataatctggagttytcmttctcwggtttgaartcwgcctttatcaatcttcaycacaatgccgagcaaaagggagaaagyctgtctacagargatttgtgtgcttccttccaagcagcwgtwmtggayattctcatggcaaaaaccaagaaggctttggagraatatcctgttaaaaycctrkttgtggcaggtggtgtggcagccaataaaggtctcagagaacgcytagcarcygarrtyacagatgtcaakgtyatcatyccmcctctgcghctctgcggagacaatgcaggtatgattgcytatgccagygtcagcgagtggaacaaagaaaacttygcarrctkggacctcaatgccaaaccaagyctygcytttgataccatggaactaamkartggctctttgtcaagtgtagtggg

SEQ ID NO: 1127 - DNA, 807 bp, Streptococcus pneumoniae
  misc_feature (1)..(807): tiling:Spneumo1:WAN024CJE; Cluster includes WAN0242HB SP10 63||15900933|NP_345537.1|998461..999261|+|801 bp|ABC-2 tra nsporter, permease protein, putative|S.pneumoniae|TIGR4|NC _003028.1|ORF|010
atgaaggctgatcaattaaggcacaaatcggacttaggtttaagaggtctagcgattattgctaaaaatgagattattgctttttttagaagtaaaggtttaattatttctcagtttctacaaccaatcttatatgttgtttttataataataggattaaattcttcgataaagaacattcagtttaatgatataaaaacctcttatgcagaatatacaatcattggtgttatagctttattgataatcgggcagatgactcaagttatttatagggtgacaatagataaaaaatatgggctacttgctcttaagttatgcagtggagttcgtcctttatattatattttagggatgagtatctattctatattagggttgatagttcaagaaattattatatatataattacgttagcgtttgagataaatatcgcaatggatagatttttttatacagttttgttatctattgttgttttattattttgggactcccttgcaattttacttacaatgtttatcaatgattacagaagacgtgatattgtaatacgttttgtactaacaccgcttggttttacagctcctgttttctacttaatagattctgctcctagtattgtgagatggattggtcagttaaatcccttaacttatcaattaactattttgagaaacttttattttaaaaattcaacaactttggaattagttttcttattgttaacatcattacttgtccttatatctgtatcttttattataccaaagataaaattgatactgatagaaagactaactaat

SEQ ID NO: 1128 - DNA, 201 bp, Streptococcus pneumoniae
  misc_feature (1)..(201): tiling:Spneumo1:WAN024CZV; Cluster includes WAN0243EL spr1 831||15903873|NP_359423.1|1805909..1806103|-|195 bp|Hypoth etical protein|S.pneumoniae|R6|NC_003098.1|ORF|111
atgaaggggaaagagtatgaaaacagaactgtttcttttgctattagttcaaaaggagaaaaaatgaaagtagaaaatatttcgtatagggtggatcatcgtawattgtttgataatatttcttttgatacttcgagttcagrcgtgacattaattactggtaaaaatggtacaggaaagtcaactttactactarctaat

SEQ ID NO: 1129 - DNA, 578 bp, Streptococcus pneumoniae
  misc_feature (1)..(578): tiling:Spneumo1:WAN024DEW; Cluster includes WAN02449K spr0 714|gph|15902758|NP_358308.1|715231..715803|+|573 bp|Phosp hoglycolate phosphatase|S.pneumoniae|R6|NC_003098.1|ORF|11 1
atgaagggtatgaaatatcacgattacatctgggatttaggtggaactttactggataattatgaaacttcaacagctgcatttgttgaaacattggcactgtatggtatcacacaagaccatgacagtgtctatcaagctttaaaggtttctactccttttgcgattgagacattcgctcccaatttagagaattttttagaaaagtacaaggaaaatgaagccagagagcttgaacacccgattttatttgaaggagtttctgacctattggaagwcatttyaaatcaaggtggccgtcattttttggtctctcatmgaaatgatcaggttttggaaattttagaaaaaacctctatagcagcttattttacagaagtggtgacttctagctcaggctttaagagaaagccaaatcccgaatccatgctttatttaagagaaaagtatcagattagctctggtcttgtcattggtgatcggccgattgatatcgaagcaggtcaagctgcaggacttgatacccacttgtttaccagtatcgtgaatttaagacaagtattagacatataactaat

SEQ ID NO: 1130 - DNA, 297 bp, Streptococcus pneumoniae
  misc_feature (1)..(297): tiling:Spneumo1:WAN024CV2; Cluster includes WAN0243W4 spr1 199||15903242|NP_358792.1|1195086..1195307|-|222 bp|Hypoth etical protein|S.pneumoniae|R6|NC_003098.1|ORF|101
atgaaggtagtaaacttgtatgatttgaaacaaatgggaaataaaggtggttgtaccatccaattgattcatcactttccttttggtatgggcttaggrcatctcaaaarrgactacattgaatttaaacgtgttggtatckttgatgggaaagcagtagaagttactcttcgagaaccttattcgagagatmtactkcaggttgtcaagtcratwaagyaacgtcagaaattgatagcttatcgttataaagaaggaaagctgctatttgtkaagraggaggcatcrgatgtcctc

SEQ ID NO: 1131 - DNA, 1413 bp, Streptococcus pneumoniae
  misc_feature (1)..(1413): tiling:Spneumo1:WAN024FYI; Cluster includes WAN023ORW pne7 5_22||||14328..15740|+|1413 bp|Type 35A2 capsule operon, G limmer 2.02 orf prediction|S.pneumoniae||WAN01UCEX|ORF|000
atgaaggtattaaaaaactacttatataatctctcttatcaactattagttattattcttcctatcattacgactccttatgtgacgcgcatattttcttcagatgatttagggacatacggttacttcaaytccattgttacctacttcattttacttgctactctgggtattgctaactatggaacgaaggagatatctgggaataggaagagtattcagaaaaatttctggggaatatatactttacagtttggagcgactactttttccatttttctctatatactagcctgtcttttcatcccagggatgaaaaacctagttgcatatatcttgggattgggtttagtctctaaaggactagatatttcatggttgtttcaagggttagaagattttcgtaaaattacggtcagaaatatcacagtgaagcttgttggtgtaagtgccattttcttgtttgtaaaatcagcgagtgatctatacttgtatgtttttcttctaacagcatttgaattgttgggtcagttaagtatgtggtttccagcccgtgaatatattggaaaaccacattttgatatagaatatgctaggcatcatctgaagccagttatcttgctattcttaccacaaattgctatctcgctttatgtgactttagatcgtacaatgttaggggcgctagcttctacaaaagatgtcggcatttatgatcaggctttgaagctggttaatattttactgaccttggtaacttccttgggaagtgttatgctgccacgcgttgcgcatttgttagcgacaggtgatcataaggtagtcaataagatgcatgaggtatccttcttaatttataatttggttatttttccgattatggcagggatgttgattgtgaatgatgattttgttcaatttttccttgggcaagactttcaagatgcacgctatgcaatttccattatgatcttccgtatgttctttatcggttggactaatataatgggaattcagatactgatacctcataatcaaaataaagaattcatgatttcaacaacaactcccgcaattatcagtgtaggtttgaacttactattccttcctaaactgggatatatcggggcagccattgtctctgttttaacagaggcacttgtatgggcaatccaattattctatactcgcagatatttaaaagaagttcctataatcggatcaatgtcaaaaattatactagcatctgccattatgtatggccttttactaagttcaaaaacagttatacatttttcaccgaccttaaatgtkctagcatttgtagcgcttggtggaatcatttatctttttgcaattctatctctgaaagtggtagatgtgaaagaattaaaacaaattattaggaaaaac

SEQ ID NO: 1132 - DNA, 395 bp, Streptococcus pneumoniae
  misc_feature (1)..(395): tiling:Spneumo1:WAN024D6R; Cluster includes WAN0243OL spr1 470||15903513|NP_359063.1|1451432..1451638|+|207 bp|Hypoth etical protein|S.pneumoniae|R6|NC_003098.1|ORF|211
atgaaggtggaaccacgttgcgacgtcctttcgaggatgtcgcatttttttattaggatactaattatggagttgcaagaattagtggagcgcagttgggcaatccgacaagcttatcacgaactggaagttaagcatcatgattycaagtggacggtagaagaagaccycttggctttatctaatgatattggaaatttccaaygactggtgatgacaaarcaaggacgctactatgatgaaacaccctacacactggaacaaaaactttcagaaaatatctggtggctattagaactttctcaacgtttggatatagacattctgacggaaatggaaaacttcctctctgataaagaaaarcaattgaacgttaggactyggaagtarctaat

SEQ ID NO: 1133 - DNA, 978 bp, Streptococcus pneumoniae
  misc_feature (1)..(978): tiling:Spneumo1:WAN024FP8; Cluster includes WAN023P64 pne5 4_12||||8593..9570|+|978 bp|Type 25A capsule operon, Glimm er 2.02 orf prediction|S.pneumoniae||WAN01UCGY|ORF|000
atgaaggttagtgtaataatacctatctataatgtagaaaagtatttaagaaggtgtctagaatccattgttaatcagacatataaggacattgaaataattttagtaaatgatggttctccagataattcaaaagaaatatgtgaagaatatgtagttaaatattccaatattcaattaataaatcaaaataatgcaggtttaggtgcggctagaaataaaggtttgcagtatgtaacaggtgatgcgattactttcgtagattccgatgattggcttgaattagacgcaattgaatattacgtggaatctatgaaaaagagtgatgcagatattgtagttactaaaatgattaggaaaaaagagtatactcctagtgaagaaattaagaagtcgccggtaacagaggaagttctaactcagaaacagtttgcgaaaaaatattttaaaatagatggaaataatatagaatattatgcttgtgccaaactttataagaaagaaattgcttgtgaggttaaatatccagttggtttatttgctgaagatgtacccgcagctttcagctatattatacgttcacaaaatatattctatagcacaaaagtaacttataattatttttttaacgataatagtttaacagcgaattttacaaataaagattttgatttagagaagatttgggatttagtaactgaagaagctgaggattttggaaacgaggattatattttatattctaagataaataggtatagaatagactttaatcttttgtgtaggatagcactatcagaagataaaacagatattgaaacatatgttaaaaaaatagaggaactacttggtaaagttaaaagaaataagaaaatcttattagagtatttaccgttttctagaaaagtgatattgagattatttttggttaattacaaactaggaagaaatgttttgagaatgtttaaaaatattatg

SEQ ID NO: 1134 - DNA, 1167 bp, Streptococcus pneumoniae
  misc_feature (1)..(1167): tiling:Spneumo1:WAN024FPK; Cluster includes WAN023POQ pne2 4_10||||6940..8106|+|1167 bp|Type 12B capsule operon, Glim mer 2.02 orf prediction|S.pneumoniae||WAN01UCJ2|ORF|000
atgaaggttttaatgattaattccgtttgtggtattaggagcactgggagaatttgtrcrgatctcgcaactgctttgacagaagaaggatatgaggttaaaatcgcctatggtcgtgagtatgttccgaaacaatttcaacagtatgcagtgaaaattggtacaaagtctgatattcgttttcatgcgattcgttctcgattatttgacgaatctggctttggaagtagacaggcaactgttaattttattaaatggatraaagagtttgaycctgatrttattcatctycataaycttcatggrtattatatcaatrttgaactgttatttgattatctccgwatatgcggtaaaaagattatatggactttgcatgattgttgggcatttacaggacactcggctyaytttgattgtttggaatgtgagtcaaagggrgtttgtgaccatccatctcagaaaaatgattatccyaagtcgttcgtgaatttttcaargcgaaattatcaaagraagaaaaaatgttttacwcatattcctaatctcactattgttactccktckcaatggctagctaayttrgtargacagtcatttttaaaagaatatccagtgaaagtaattcataatggyattgatactactgtctttcaaccgaggctaatagccgctcaaaarttgaraaaaagayaccatcttgaaggaaagcaggtaytgcttggtgtggctgctatctggrmtrataraaagggattttctgatatgttagysctygcgartsatctarctgataatcagagaatagttttgatagggttaaaagataggcaactcaaaraaytacccaaaggkatyattgggytaacagaractaatagyccagaagagttggyagcatggtatacactagcggatgtattyytaaatcctacttatcaagatarttacccgacaactaatttagaagctatttcttgtgggacaccagttatcagctatccgacaggtggtagtgtagaaagtgctaaactttatggtctcgtttgtcaggatagaaacgtagcttctattttatcttcgttagaaaaagtctctcagctatctaaaacagaaaaattrgatttttcaattgcaagttttattaaacaaatgaaatatttatay

SEQ ID NO: 1135 - DNA, 1068 bp, Streptococcus pneumoniae
  misc_feature (1)..(1068): tiling:Spneumo1:WAN024FL4; Cluster includes WAN023ORY pne7 5_20||||12154..13221|+|1068 bp|Type 35A2 capsule operon, G limmer 2.02 orf prediction|S.pneumoniae||WAN01UCEX|ORF|000
atgaagtattttgttgaagaaacgttacttgatgaacaggataaaaaaaatgcgggtggaaaggctagacaagacgtcactgatattttrgartccataggttatcagaagttaatagctgagtccgraatgaatgaacgtcaggaattaaatgctgttcaaagattggttcatcattataaagttaagaaaatgtggaagaaaactctttcagttgttggtaagggtgatgaagttattattcaatttcctttactaaatcatagtttattctttaatcaggttattaagcaacttagtaagaatggagttaaagtttattttttgattcatgatttagaatcgttgcgatggtcgcagtcaaaatcgatatcattaaaaagtaggattcgattaaacattgaagaacrtagtgttttaaggttatcagaaggcattattgctcataataaaaaaatgaaatcttatattaagacctactctgttgaaagttctaaaattattcctcttgaaayttttgattatattattccatcttatcatgaaagaaaaaatctggataactttcagttaaatgctccaattgttattgctggaaatttaaagcaacataaagctggatatgtctatcatttaccaagcaatgtggagtttaatctttatggaattggatatgaacagacagatgacaaaagtgtgcactactgtggttcttttatgccagaagaattaccattcgttttaaaaggaagttttggattggtatgggatggtccgtcatcagagtcttgtatagaaacttatggagagtatcttcgtgtaaacaaccctcacaagacttcactatatttagcttcaggcataccagtagttgtatggtcagaggcagcaatagctagtttcattaaggagaataattgtggtattcttgtatccaatctgagtgaactacctgagttactttctatgattaccgttgatgaatatgaattgatgaaaaagaatactgagattattggagaaaggcttcgacaaggtttttatactaaacaagcagttaaaggtttc

SEQ ID NO: 1136 - DNA, 84 bp, Streptococcus pneumoniae
  misc_feature (1)..(84): tiling:Spneumo1:WAN024DQD; Cluster includes WAN023SLJ NC_0 03098.1_851||||677599..677682|-|84 bp|Glimmer 2.02 orf pre diction|S.pneumoniae|R6|NC_003098.1|ORF|110
atgaagtccaagcaacaaggagaaatctcaaccatgagtccattccatgactctgttgctctagaaaaccttgcaatagtcaag

SEQ ID NO: 1137 - DNA, 531 bp, Streptococcus pneumoniae
  misc_feature (1)..(531): tiling:Spneumo1:WAN024CXP; Cluster includes WAN023M8I 3127 89_418a||||211643..212083|-|441 bp|EGAD orf prediction|S.p neumoniae|R6|NC_003098.1|ORF|110
atgaagtcgacagacgaagccccattaaccttcataacgggtgcagttcctaatagaccaccaaactcaatcatatcgccttcttttcctttgggaatgatacgaacagctgttgttttcatgttgataacaccgattgctgcttcatccgcaatcatagccgcaatrgtttcagcaggcgtatcttctgggatggcaatcatatccaatccaacagaacagatagccgtcatagcttctagtttttctaaattaagagagccattttgcactgcagcaatcattccttcatcctcagaaacagggataaaggcaccagataaaccaccgacttggttgcaggccatcactccaccctttttaacttggtcgttcaagagggccaaggcagccgtcgttccatgcgtgccaactgtttctagccccatttcctcaaggacacgtgcyacagagtctccaaccgcaggggttggtgccaaactcaagtccacaataccaaactccacacccagtctctcactggccatttga

SEQ ID NO: 1138 - DNA, 2244 bp, Streptococcus pneumoniae
  misc_feature (1)..(2244): tiling:Spneumo1:WAN024GD7; Cluster includes WAN0244AU spr0 668|ptsG|15902712|NP_358262.1|671374..673554|+|2181 bp|PTS glucose-specific enzyme IIABC component|S.pneumoniae|R6|N C_003098.1|ORF|112
atgaagtgcaaacgttttcgtagaaacgtttgcctaaataaaaataaaggagatttgaatgatgaaagatacattcaaaaatgkcttgtctttcgaaktttggcaaaaattcggkaaggcttkgatggtagtkatcgcggktatgccggctgctggtttgatgatttcratcggtaagtctatcgtgatgattaacccaacctttrcaccacttgtcatcacaggtggaattcttgagcaaatcggttggggggttatcggtaaccttcacattttgtttgccstagccattggaggaagctgggctaaagaacgtgctggtggtgctttcgccgctggtcttgccttyatcttgattaaccgtatcactggtacaatctttggtgtrtcaggcgatatgttgaaaaatccagatgctatggtaactactttctttggtggttcaatcaaagttgctgattactttatcagtgttcttgaagctccagccttgaacatgggggtattcgtagggattatctcaggttttgtaggggcaactgcttacaacaaatactacaacttccgtaaacttcctgatgcactttcattcttcaacgggaaacgtttcgtaccatttgtagttattcttcgttcagcaatcgctgcaattctacttgctgctttctggccagtagttcaaacaggtatcaataayttcggtatctggattgccaactcacaagaaactgctccaattcttgcaccattcttgtatggtactttggaacgtttgctcttgccatttggtcttcaccacatgttgactatcccaatgaactacacagctcttggtggtacttatgacattttaactggtgcagctaaaggtactcaagtattcggtcaagacccactatggcttgcatgggtaacagaccttgtaaaccttaaaggtactgatgctagtcaataycaacacttgttagatacagtacatccagctcgtttcaaagttggacaaatgatcggttcattcggtatcttgatgggtgtgattgttgctatctaccgtaatgttgatgctgacaagaaacataaatacaaaggtatgatgattgcaacagctcttgcaacattcttgacaggggttactgaaccaatcgaatacatgttcatgttcatcgcaacacctatgtatcttgtttactcacttgttcaaggtgctgccttcgctatggctgacgtcgtaaacctacgtatgcactcattcggttcaatcgagttcttgactcgtacacctattgcaatcagtgctggtattggtatggatatcgttaacttcgtttgggtaactgttctctttgctgtaatcatgtactttatcgcraacttcatgattcaaaaattcaactacgcaactccagggcgcaacggaaactacgaaactgctgaaggttcagaaraaaccagcagcgaastrawarttgcagcaggctctcaagctgtaaacattatcaaccttcttggtggacgtgtaaacatcgttgatgttgatgcatgtatgactcgtcttcgtgtaactgttaaagatgcagataaagtaggaaatgcagagcaatggaaagcagaaggagctatgggtcttgtsatgaaaggacaaggggttcaagctatctacggtccaaaagctgacattttgaaatctgatatccaagatatccttgattcaggtgaaatcattcctgaaactcttccaagccaaatgactgaagyacaacaaaacactgttcacttcaaagatcttactgaggaagtttactcagtagcagacggtcaagttgttgctttggaacaagtaaaggatccagtatttgctcaaaaaatgatgggtgatggatttgcagtagaacctgcaaatggaaacattgtatctccagtttcaggtactgtrtcaagcatcttcccaacaaaacatgcttttggtattgtgacggaagcaggtcttgaagtattggttcacattggtttggacacagtaagtcttgaaggtaaaccatttacagttcatgttgctgaaggacaaaaagttgcagcaggagatctccttgtcacagctgacttgratgctatccgtgcagcaggacgtgaaacttcaacagtagttgtcttcacaaatggtgatgcaattaaatcagttaarttagaaaaaacaggttctcttgcagctaaaacagcagttgctaaagtagaattgtaactaat

SEQ ID NO: 1139 - DNA, 669 bp, Streptococcus pneumoniae
  misc_feature (1)..(669): tiling:Spneumo1:WAN024CXN; Cluster includes WAN02439L spr2 012|comFC|15904053|NP_359603.1|2005297..2005959|-|663 bp|I nvolved in transformation (competence for DNA uptake)|S.pn eumoniae|R6|NC_003098.1|ORF|111
atgaagtgcttgttatgtgggcagactatgaagactgttttaacttttagtagtctcttacttctgaggaatratgactcttgtctttgttcagactgtgattctacttttgaaagaattggggaagagaactgtccaaattgtatgaaaacagagttgtcaacaaagtgtcaagattgtcaactttggtgtaaagarggagttgragtcagtcatagagcgatttttacttacaatcaagctatgaaggattttttcagtcggtataagtttgatggagacttcctgttaagaaaagttttcgcttcatttttaagtgaggagttgaaaaagtacaaagagtatcaatttgttgtaattcccctaagtcctgatagatatgctaayagaggatttaatcaggttgagggcttggtagaggcagcaggctttgagtatctrgatttattagagaaaagagaagagagagccagttcttctaaaaatcgttcagagcgcttggggacagaacttcctttctttattaaaagtggagtcactattcctaaaaaaatcytacttatagatgatatctatactacaggagcaactataaatcgtgttaagaaactgttggaagaagcyggtgctaaggatgtaaaaacattttcccttgtaagaykaactaat

SEQ ID NO: 1140 - DNA, 2253 bp, Streptococcus pneumoniae
  misc_feature (1)..(2253): tiling:Spneumo1:WAN024ATL; Cluster includes WAN0240YH |||A AL77081.1|||2253 bp|penicillin-binding protein 2X|S.pneumo niae||AF468152|ORF|000
atgaagtggacaaaaagaataacccgatttgcgattagaaaccgtaaatctccagcagaaaaccgtaaaatagtagggaagtacatcagcttgttagctgtcgtacttttcgctgtctttttggtcaattttgctgttataatcgggagtggtagtaaatttggaacggatctagtcaaagaggctaagaaagttcaccaaataacccgtacagtccctgccaaacgtgggactatttatgatcgaaatggagtcccgattgctgaggacgcaacttcctataatgtctatgctgttattgataaaaaatacaaatcagcaacgggtaaaattctttatgtagaagatgcccagtttaataaggtagcagaggttttccataagtatttggatatggatgaggcttatgtgaaagagcaattagctcaaccaaatctgacccaggtttcctttggagcaaaaggaaatggaattacctatgccaatatgatggctattaaaaaggatctaaaagacgctagtgttgaaggaattgacttcacaactagccctaatagaagctatccaaatggacaattcgcttccagttttattggtttagctcaactccatgaaaatgaagatggaagcaagagcttgctgggaacttctgggatggagagttccttgaatagtattcttgcagggaaagacggtatcattacctatgaaaaggatcgtctgggtaatattgtccccggaacagaacaagtttcccaacaaacagtagatggcaaggatgtttatacgactatttccagcaccctgcagtccttcatggagacacagatgaatgcctttcaagaaaaagtaaaaggcaagtatatgacggctaccttggttagtgctaaaacgggggagattcttgcaacgacgcagagaccaacctttgatgccgatactaaggaaggacttaccaaggactttgtttggcgtgatatcctctatcaaagtaactatgagccggggtcaaccatgaaggttatgacgctcgctgctgctattgataataatacctttccaggaggagaagtcttcaatagtagtgagttaaaaattgcagatgtcacgattcgagattgggacgtcaatgaaggattgactggtggcagaatgatgactttttctcaaggttttgcactctcaagtaacgttgggatgaccctccttgagcaaaagatgggagatgctacctggcttgattatcttaatcgttttaaatttggtgttccgacccgtttcggtttgacggatgagtatgctggtcagcttcctgcggataatattgtcaacattgcgcaaagctcatttgggcaagggatttcagtgacacaaacacaaatgcttcgtgcctttacagctattgctaatgatggagttatgctggagccaaaatttataagtgctatttatgatactaacaatcagtctgtacgaaagtctcaaaaagagattgtaggaaaacctgtatctgaagatgcagcaagcttgactcgtactaacatgatattagttgggacggaccctctatatggaactatgtataatcaccaaacaggaaagccaattataacagttcctggacaaaatgtagcagttaaatccggtacggctcaaatcgctgatgagaaaaatggaggctacttggttggttctaccaattatattttctcagttgtgactatgaatcctgctgaaaatcctgattttatcttgtatgtaacggtacagcaacctgaacattattcaggtatccagttgggagaatttgccaaccctatcttggaaagagcggtggctatgaaagattcccttaacctgcaatctaccgctaaaacgttagatcaggtaaccaatcaaagcgcctatgccatgcctagcatcaaggacatttcacctggcgatttggcggaagccttacgtcgcaatattgtgcaaccaatcgttgtaggaacaggaacaaarattaaagaatcatctgtagaagaaggaaccaatcttgctcctaaccagcaagttctcctcttatctgataaagcagaggaagttccagatatgtatggttggacaaaagcaaccgcagaagctttttctaagtggttaaatatagaamttgtatttgaaggttcaggytctactgtgcagaagcaagatgttcgtgctaayacagctatcaaggacattaaaaaaattaaattaactttaggagactga

SEQ ID NO: 1141 - DNA, 2255 bp, Streptococcus pneumoniae
  misc_feature (1)..(2255): tiling:Spneumo1:WAN024C5I; Cluster includes WAN0241FU |PBP 2X||BAD00937.1|||2253 bp|penicillin-binding protein 2X|S.p neumoniae||AB119949|ORF|000
atgaagtggacaaaaagagtaatccgttatgcgaccaaaaatcggaaatcaccggctgaaaacagacgcagagttggaaaaagtctgagtttattatctgtctttgtttttgccgtttttttggtcaattttgcggttattattgggacgggaactcgctttggaacagatttagctaaggaagctaagaaggttcatcaaatcacccgtacagtccctgccaaacgtgggactatttacgaccgaaatggagtscckattgctgargatgcgacwtcytataaygtctatgctgttattgataaaaaatacaartcagcaackggwaaaattctttatgtagargatkcscagtttaataaggtagcwgargtyttccataagtatttrgayatggatgargcttatgtgaaagagcaaytrgctcaaccaaatctgacccargtttcctttggtgcaaaaggaaatgggattacmtatgccaatatgatggctattaaaaaagatttgaaagatgctagtgtggaagggattgactttacaactagccctaacagaagctatccaaatggacaatttgcktctagctttattggcttagcccaactycatgaaaatgaggatggyagtaagagtttgttagggacttytggtttggagagttckttaaataccattcttgctgggacagacggtattattacctatgaaaaagacsgtgtaggaaatatcgtaccaggtacagaactggtatcgcaacaaactgtggatggcaaggatgtttatacaacattgtctagtccgctacaatctttcatggaaactcagatggatgcctttctasaaaaagtaaaaggtaagtatatgaccgcgacmttggtcagtgcaaagaccggtgaaatmctcgctaccacccaacgacctacctttaatgcagatactaaagaaggaatcactgaggactttgtttggcgtgatattctttatcaargtaactatgaaccaggatcagccatgaaggtyatgacgttagcttcttctattgataayaataccttcccargtggagaatacttcaatagcagygaatymaaaatagcggatgygacgactcgagattgggaygttaatgaaggtttgacyrsyggtggkatgatgacwttytywcaaggkttygctcactcmagtaatgttggratgakwctrcttgarsaraaaatgggwgatrctacktggttggattatctaaamcgctttaaatttggrgttccaactcgytttggyttgacagatgaataygcwggycaacttccagctgayaatattgttagtattgctcaragytcatttggrcaaggratttcagtracwcaracrcaaatgcttcgtgcctttacagcyattgctaatgatggagttatgctggagccaaaatttataagtgctatttatgatactaacaatcagtctgtacgwaagtcwcaaaaagaratwgtaggaaawcctgtwtcyraagakgcagcaagcwyractcgwamtmacatgatmttagttgggacggaccctctatatggaactatgtataatcacyamacaggaaagccaattataacagttcctggacaaaatgtagcagttaaatccggtacggctcaaatcgctgatgagaaaaatggaggmtacytggttggttctaccaattatattttctcagytgtgactatgaatcctgctgaaaatcctgattttatcttgtatgtaacggttcaacagcctgarcattwttcaggtatccarttgggagaatttgycamcccaatcttggagcgggcttcagctatgaaagaatctctcaatcttcaatctccwgcyaaaaatttagatmaagtwaskaswsarwcttcttatgcwatgcctagtatcaagracatatctcctggagatttagcagaagaactacgtcgcaatattgtgcaaccaatygttrtkggwrcaggwacraagattaaaraatgcmtctrtwgargaagggarraatctykcwccraaccarcaagtyctkmtyttatckgataargyagargaarttccagatatgtatggttggacaaaarmracygcwgarrcytttkctaagtggytmaatatagaacttgaatttgaaggttcrggctctactgtgcagaagcargatgttcgtgctaayacagctatcaaggacattaaaaaaatttacattaactttaggagactaa

SEQ ID NO: 1142 - DNA, 2253 bp, Streptococcus pneumoniae
  misc_feature (1)..(2253): tiling:Spneumo1:WAN024C5N; Cluster includes WAN0240W2 |pbp 2x||AAF17264.1|||2253 bp|penicillin-binding protein 2X|S.p neumoniae||AF210754|ORF|000
atgaagtggacaaaaaragtaatccgttatgcgacsaaaaatcggaaatcgccggctgaaaacagacgcagagttggaaaaagtctgagtttattatctgtctttgtttttgccgtttttttagtcaattttgcggtcattattgggacgggcactcgctttggaacrgatttagcgaaggaagctaagaaggttcatcaaaccacccgtayagttcctgccaaacgtgggactatttatgaccgaaatggagtcccrattgctgaggatgmracmtcytataatgtctatgcggtyattgatgagaactataagtcagcaacgggtaagattctttacgtagaaaaaacacaatttaacaaggttgcagaggtctttcataagtatctggacatggaagaatcytatgtaagagagcaactctcgcaacctaatctcaagcaagtttcctttggwkcraagggcaatgggattacctatgccaatatgatgkctatcaaaaaagagttggaaactgcagaggtcaaggggattgattttacaaccagtcccaatcgtagttacccaaacggacaatttgcttctagttttatcggmytagctcagctccatgaaaatgaagatggvagcaagagyttgctgggaacytctggratggagagttccttgaacagtattcttgcagggamagacggyattattacytatgaaaargatcgtctgggwaatattgtmccyggaacrgaacaagtttcccarcaaackgtagatggcaaggatgtktatacractatttccagcacccttcagtccttcatggaracmcagatgaatgcctttcaagaraaagtaaaaggcaagtatatgacrgcwrccttggtyagtgcyaaaacrggrgarattctygcaacracgcarmgrccraccttygatgcygatactaaggarggrhtbacyaaggactttgtttggcgtgatatyctytatcaaagtaactatgarccrggrtcavccatgaaggtyatgacdytmgctkctkctattgayaayaayacyttyccaggwggagaakwyttcaayagyagygarttaaaartwgcrgatgybackayycgagattgggaygtyaatgawggwttracygdcggwggwatgatgacyttytywcaaggkttygckcwctcmagtaaygttggratgaskctwctkgarcaaaaratgggagatgctacytggytkgattatctmaaycgctttaaatttggkrtyccractcgytttggyttgacrgatgaataygcwggtcaacttccagctgayaatatygtmaatatygctcaragytcatttggrcaagggatytcwgtmacycaracvcaratgmttcgtgccttyacrgcyattgccaaygatggvgtyatgytrgarcckaaatttatyaskgccwtdtatgayccaaatraycaawcygytcgkaaatctcaaaaagaaatygtrggraatccygtttckaargatgcrgcwagycwaactcgkactmayatggtyttrgtaggracrgatcckrkwtatggaacyatgyataaycaymrhacaggmaarscaaytrtmamwgttccwggwcaaaatgtagcmstyaartcyggtacrgcysaratygcygaygagaaaaatggrggytacttggttggtwckaccrayhayattttytcrgytgtrdckatgaaycctgcygaaaatcctgattttatcytstatgtracggtycaacarcctgarcattattcagstrtccagttgggrgartttkccaatccwatcttggarmgrgcwkyrgcsatgaaagawtcyctkaacctycaatctmcmgctaaramkttagatcargtracsamwsaawsykcktatgcmatgcctagcatcaaggayatttcaccyggygatttggcggaagccttacgtcgmaatattgtgcaaccaatcgttgtwggwacwggaacaaagattaaagarwcwtctgtagaagaaggravmaatcttgcwccwaaccarcaagttmtyctyttatckgataargyagargaarttccagayatgtatggytggamaaaagmracygcwgargcytttkctaartggttrratatmgarmtkgwatttgaaggttcrggytcyryygtkcagaagcargatgttcgkrctaayacagcwatcaarracattaaaaaaattamattaactttaggagactaa

SEQ ID NO: 1143 - DNA, 941 bp, Streptococcus pneumoniae
  misc_feature (1)..(941): tiling:Spneumo1:WAN024FPW; Cluster includes WAN0243T8 spr1 303||15903346|NP_358896.1|1295956..1296894|-|939 bp|Hypoth etical protein|S.pneumoniae|R6|NC_003098.1|ORF|111
atgaagtggaccaagattattaaaaaaatagaagaacaaatcgaggcaggratttatcccggagcctcttttgcgtattttaaggacaatcaatggacagagttctatttaggccagagtgmcccagagcatggcttgcagactgaggcaggactagtttatgacctagctagtgtcagcaaggttgttggggttggcacagtttgtaccttcttgtgggaaataggtcaattagatattgatagactggtaatagattttttacctgagagtgattatccagacatcactattcgccagctcttgactcatgcaacagaccttgatccttttattcctaatcgtgatcttttaacagcccctgaattaaaggaagcgatgtttcatctcaacagacgaagtcagccagcctttctttattcggatgtccattttttgytgttgggctttattttggaaagaatttttaatcaagatttggatgtgattttaaaggatcaagtctggaaaccttggggaatgacggaaacyaagkttgggccagttgagcttgctgttccaacagttagaggtgtagaggcaggcatagtgcatgatcccaaggctcgtctcctgggtagacatgctgggagtgctggtttattttcgactataaaggatttacaaatctttttagaacactatttagcagatgattttgcaagagacttaaatcaaaatttttctcctttggatgacaaggaacgttctttagcatggaatttggaaggagattggctagaccatacgggctatacaggtacctttatcatgtggaatcgtcagaagcaagaagccactattttcctatcgaatcgtacctatgaaaaggacgagagagctcaatggatattagaccgcaatcaagtgatgaacttgattcgyaaagaagagtaactaat

SEQ ID NO: 1144 - DNA, 2067 bp, Streptococcus pneumoniae
  misc_feature (1)..(2067): tiling:Spneumo1:WAN024CC7; Cluster includes WAN023RIJ cont ig_1565_2||||1117..3183|+|2067 bp|Glimmer 2.02 orf predict ion|S.pneumoniae|670|WAN01UDIJ|ORF|000
atgaagttaacaaaagtaattattaataattttagatcattcggtgaaagtcaaattattgaattaaacaatcaaactgtactgattgggaataatagttcgggaaaaacaactgtattacaagcattgagtaagctgttttcggacaaacaaaatgatagaataataaaaaaaagtgattttcaccttccaaaaggttcaaggcccggagaaaatactagaaacctctttatagaaactatttttgagtttgatgaacttgatggaactccctatagtcaagcaattccatcgtttttcgaacactttacagtttctaaagatggtgccaaaccatttctacgaatcaggttagaatcttcttgggaagatgatggaacagttgaaggaagtattgatactcaattctattatatttcatctgatgaagatactattagagatgaagacaaacatcgtgctcctagaaaggatttggataaaattagggtactttatgtacctgcttcaagaacgcctgagaaggagttgggtaatgcttcaggtagtatgttaagtaggttggtaaatagtataaattggaccgaagatgagataaatgaaattacagataaaattgatgagttgaataacacctttttatctgaaaatggagcattgactcagatcaacaatgagattcagaagtcatgggaattatatcatgaagataaccgtttttctcaagcagagttgattattaattcttctgagatggcggcagcacttagacagattgccttaaaattttcaccaacaaccactgaagaagcatttacagtttcagatctaggagatggactgagatctattttttatttttcacttgttgattcgatacttgatattgagttagaaattaccaaagaccgtgaagaaaatcctgataatccaagatttaagttgattccaccagtactaactatcctagcaatagaagaaccagaaaatcatattgctccacatcacattggaaaactgataaaaaggtttaagcaattaggcaataatgacaactcycaagtaattttaacgtcacattctccagctattgtaaaaagaattgacccagaagatttgaagtatttaagaatagaaaataatgacagagttcttcaaaccattgtttctgatatacagctacctccagctatagatgaatcttataaatatattaaaggagcaattcaagcttatcctgaactatattttgcgaagttagtagttctaggtgaaggcgacagtgaggaactgctattaccaaagttttttgatttacttgggaaagaggtagatagctctcagatttcaattgtccctttagggggcagacatgtcaactatttttggaaattattgaatgctctcagaattcctcatattaccttgttggattttgataatgagagatacggaggtggttggggaagaataaaatacatttctcaacatctgtatgagctgaacacagagtttcaagaatggttccatactcagagacttgattttaatgaaattgggtcacgaggttgtgaatcgataggagctcaacgtctgattaattggtttaataaactcgaagaatttaatgtctacttttcatcgcctttagatattgatttcttgatgctacaacattataaagacaattatctgaatactttatccccaatagaaggaccagttgtttcatataatgattcggatggaagtagtaaaaaagtgaaattgagtgatttagactgtcttgatagattgcagttagaaggtttcaacaaacgtaaagaggaagcaataagagctactttaaaagataagagtggacatggcgatagtttcaatgaagaagaaaaagaattaatgatttggtatcaatatttctttttaggtagaggaaaaccaacaactcatatgcaatttttatcatctattagtgatgatgaattaacaagaaatctaccccctgtatttgaaaaaatagttaacagtgctgaagaattacttggagatattcaacatggtaaagag

SEQ ID NO: 1145 - DNA, 1134 bp, Streptococcus pneumoniae
  misc_feature (1)..(1134): tiling:Spneumo1:WAN024DDI; Cluster includes WAN02446L spr0 821|nspC|15902865|NP_358415.1|823191..824318|+|1128 bp|Car boxynorspermidine decarboxylase|S.pneumoniae|R6|NC_003098. 1|ORF|111
atgaagttagaacaagtaccaacaccagcctatgttattgacttggccaagttagaagctaattgccgcattctacaatatgtacaagaagaggycggttgcaaggtcttgcttgcccagaaggcatattccctctacaaaacttatcccttgattagccagtatctatcaggtacgacagctagtggactctatgaggccaaattggcaagggaagaatttcctggtgaagtccatgtwtttgcrccwgctttcaaggatgmrgacwtggaggaattgctwgrgataayrgaccatatmgtctttaactcagagagacagttgcgtaarcayggkbckcgttgtcgagaggctggtgtcagtgttggtttgcgcctcaaccctcagtgttcaactcaaggagmtcacgcgctctatgacccttgtgcaccwggttctcgctttggagttactatagacaagattccgagtgatttgctagatttggttgacggacttcattttcataccctttgcgagcagggagcagatgatttacaaacaactttgaaagmagtagaagaacagtttggtccctacttacatgaggtaaaatggctcaatatgggtggtggtcatcatattacaagagaaggttacgatgtggatttgctgatttcagaaatcaagcgtatccgaaaaacttacaatcttgaaatctatatcgagcctggtgaagccattgcgcttaatgcgggttatttagcaactgaggtattagatattgtagaaaacggtatggaaatcttggttttagacgcctctgcgacctgccatatgcctgatgtacttgagatgccctatcgtccacctttgagaaatggctttgagkcacaggaaaaagcccatacctacagactttcttctaatacctgtctgackggcgatgtgattggtgattatagttttgaaaatccagtccaaatcggagacagactttattttcaagacatggccatttattcttttgtcaaaaataatacctttaatggtattggattgccaagtctctatctcatggacgaacagggagactgtagcttactcaaagcttttggctatcaagactttaaagggagattatcaykaactaat

SEQ ID NO: 1146 - DNA, 275 bp, Streptococcus pneumoniae
  misc_feature (1)..(275): tiling:Spneumo1:WAN024FDP; Cluster includes WAN0243XX spr1 134||15903177|NP_358727.1|1137389..1137658|-|270 bp|Conser ved hypothetical protein|S.pneumoniae|R6|NC_003098.1|ORF|1 11
atgaagttagacgaaaaaattactctagtccttttgatttggaatgtcatcattttcttgatttatggyattgacaaatyyaaggcaagragaagaryttggcgcatmcmwgagaaaatcttactyattttagccyttacttktggtggttttggkgcctggytarcwggaatcayytttcaccacaagactcgaaaatggtactttaaaayagtttggtttcttgggatggtgaccacactagtagccttatattttatttggaggtaactaat

SEQ ID NO: 1147 - DNA, 1074 bp, Streptococcus pneumoniae
  misc_feature (1)..(1074): tiling:Spneumo1:WAN024FPI; Cluster includes WAN023POO pne2 4_12||||9333..10406|+|1074 bp|Type 12B capsule operon, Gli mmer 2.02 orf prediction|S.pneumoniae||WAN01UCJ2|ORF|000
atgaagttagcaattttattatctgatatttcaaaaataggaggagtgcagcgtgtcacgacagctcttgttaatgaactttgtcaaaatatagacgttacaattatcagcatcttttcggaaaatgagctaccagcttttggactttcagatagagttcaggtgagctatcttttgaaagaacatgttaatttgaagaagaatttttttaaagttagtggagctttgcgaaaagtgttgaaaaaacagcagtttgatgttgttytatcgtcaggaactggtctagtatcctttctttggtttgctagtttgggaattcctaccagacttttggcatgggaacatcagtgtttttactttgggagatcgtttggtytagagtggttggggcgaaagctagcctgtcgttttgctgagagtattgttgtcttgactaaaaaagatgaaggattttacaaagagaatcgtcctaaggctcatattgaacaaatctataatatcctagacatggattcacaaacagctaagtgtcagctctcttctaaaaaaattatcagtgttggmtctttagkacgacaaaaaggttttgatctggctcttgaggtagctagtcaaatacaattaagytatccagattggcagtgggacatttatggtgatggccccgatagagaaaaattagaggagaaagtcagggaataccaattagaaggctttataaatttgaaagggcttgttcagaatgttcgggagctctatcctgactactctatctacgccwtgacatcacgayatgaaggattaycaaykgyattattagaagctaaaaactgccagatgcctgytatttcatttgattgtaactgtggaccctctgatattatttcagatggaagaaatggttttttgattgattgttttgatgtaaatatctatgcaaaaactttatctaaattaatgactagtttagagttgcgagaacaagttgcaaaatcgagtgttattccagcagaagaattgtcaacaacytatatcctagataagtggaacaatctattaaagatagaaagaaga

SEQ ID NO: 1148 - DNA, 545 bp, Streptococcus pneumoniae
  misc_feature (1)..(545): tiling:Spneumo1:WAN024FAJ; Cluster includes WAN0244RE spr0 072||15902116|NP_357666.1|79054..79593|+|540 bp|Conserved hypothetical protein|S.pneumoniae|R6|NC_003098.1|ORF|111
atgaagttattgtctatcgcmattycyagctataatgcagcagcctatcttcattactgtgtggagtcgctagtgattggtggtgagcaagttgggattttgattatcaatgacgggtctcaggatcagactcaggaaatcgctgagtgtttagctagcaagtatcctaatatcgttagagccatctatcaggaaaataaakgccatggcggtgcggtcaatcgtggcttggyagaggcttctgggcgctattttaaagtagttgacagtgatgactgggtggatcctcgtgcctacttgaaaattcttgaaaccttgcaggaayttgagagyaarggtcaagaggtggatgtctttgtracyaattttgtctatgaaaaggaaggkcagtctygtaagaagagtatgagttacgattcagtcttgcctgttcggcagatttttggctgggaccaggtcggaaatttctccaaaggccagtataycatgatgcactcgctgatttatcggacagatttgttgcgtgctagccagttctaactaat

SEQ ID NO: 1149 - DNA, 999 bp, Streptococcus pneumoniae
  misc_feature (1)..(999): tiling:Spneumo1:WAN024CFB; Cluster includes WAN023RW9 cont ig_1609_32||||21601..22599|-|999 bp|Glimmer 2.02 orf predi ction|S.pneumoniae|670|WAN01UDCD|ORF|001
atgaagttgaaaactttagtgattggtggttctggattattcttgatggtcttctcactgcttctgtttgttgccattttattttcagatgaacaggacagcggaatttccaatattcattatggaggtgtgaatgtttccgcagaagtgctggctcataagcctatggtagaaaaatatgccaaagaatatggcgttgaagaatatgtcaacatacttcttgcgattatacaggtggaatcgggcggtactgcggaagatgttatgcagtcctcggaatccctcggtcttccacctaattcattgagtacagaagaatccattaagcaaggtgtgaagtatttcagtgaattattagccagyagcgaaaggctcagtgtagatttagaatcggttatccagtcctacaattatggtggtggtttcttagggtatgtggctaatcgtggaaataaatatacctttgaactggctcaaagtttctcaaaagagtattcaggtggcgaaaaagtgtcttaccccaatcccatagccatacctatcaatgggggctggcgatacaactatggcaatatgttttatgtgcaactggtaacgcagtatcttgtcacaacagagtttgatgatgatacggtacaagccatcatggacgaagcactgaaatatgagggctggcgatacgtttacggtggagcttccccgactacttcttttgattgtagcggactgacacaatggacgtatggaaaagctggaattaacttaccacgaaccgcacaacagcaatatgatgtgacccagcatatcccactatcggaagcacaagctggcgatttggttttctttcattctacctataacgctggctcttatattactcatgttgggatataccttggcaataaccgtatgtttcatgcaggcgacccaatcggttatgccgacttaacaagcccctactggywacagcatttagtgggagcaggacgaatcaaacaa

SEQ ID NO: 1150 - DNA, 612 bp, Streptococcus pneumoniae
  misc_feature (1)..(612): tiling:Spneumo1:WAN024AUA; Cluster includes WAN0243NE spr1 513|mutT|15903556|NP_359106.1|1490335..1490946|-|612 bp|Mu tator protein|S.pneumoniae|R6|NC_003098.1|ORF|101
atgaakrcaagtgattttgyyaagtatytkcaaagaatgattgcymttacagatactggmytaacctttacaaaggatccgtttgaccgtgagcgctacgaagacttgcgaagtctgttatctgaaatgttgaatcaggtatcagaccttgatgcagacgaagtggcagaactcttgaaaccgacctccgcttatgcgactcctttaatggacgtccgtgcttggatagttgaggatgaaaaaatttgtctggttaggggacaaggagagaatgattgggctttgccaggtggctttggcgaggtcggttattcaccaactgaaaatattctcaaggaaattgaagaagaaaccggttttaaagccaaagttgaacgactactagctgtttttgataccaatcgtttccaactacagagcaaacaatatgcaaagtttgtttttgaatgtaagcttctcgatggacaatttcaagaaaatcaagaaatcgctgaccttcaattttttgcaattgaccaactgccgaatttatctgaaaaacgcattaccaaggagcaaatagagcttctttggcaggtttatcaaggtcatagggggcaatatcttgactaa

SEQ ID NO: 1151 - DNA, 2167 bp, Streptococcus pneumoniae
  misc_feature (1)..(2167): tiling:Spneumo1:WAN024C4P; Cluster includes WAN0241B7 |pbp 1a||BAD00769.1|||2157 bp|penicillin-binding protein 1A|S.p neumoniae||AB119781|ORF|110
atgaamaaaccaacgattctgcgcctamtcaagtatctkagcattagcttcttaagcttggttatcgcagccattgtcttaggcggaggagtttttttctactacgttagcaaggctcctagcctatccgagagtaaactagttgcaacaacytctagtaaaatctacgacaataaaaatcaactcattgctgacttgggttctgaacgccgcgtcaatgcccaagctaatgatattcccacagatttggttaaggcaatcgtttctatcgaagaccatcgcttcttcgaccacagggggattgataccatccgtatcctgggagctttcttgcgcaatctgcaaagcaattccctccaaggtggatcarctctcacycaacagttgattaarttgacttacttttcaacctcgacttccgaccagactatttctcgtaaggctcaggaagcttggttagcgattcagttagaacaaaaagcaaccaarcargaaatcttgacctactatataaataaggtctacatgtctaatggcaactatggaatgcagacagcagctcaaaactactatggtaaagacctcaataatttaagtttacctcagttagccttgctggctggaatgcctcaggcaccaaaccaatatgacccctattcacatccagaagcagcccaagaccgccgaaacttggtcttatctgaaatgaaaaatcaaggytacatytctgcygaacagtatgagaargcwrtyaatacmccwattactgatggactmcaaagtytsaaatcrgtcaagtarytayccwgcwtayatggayaattatctcaaagaggttatcgaccaagtagaacaagaaactggctataaccttctaactactgggatggatgtttacacaaatgtagaccaagaagctcaaaaacatctgtgggatatctacaactccgatcaatacgtctcttaccctgacgatgatttgcaagtcgcatctacggtcgtagatgtttcaaatggtaaagtcatcgcacaacttggtgctcgtcatcaagcaagtaatgtttcattcggtaccaaccaggccgtagaaaccaatcgtgactggggatcatcaatgaaaccaatcactgactatgctcccgctttagaatatggagtctatgactctactgcttctattgtacatgatgtcccttataactatcctggcactgatactccactctacaactgggatcatgtctactttggaaacattacaatccagtatgctcttcaacaatcacgaaatgtcacagccgttgagactttgaataaggtcggtctagatagagctaaaaccttccttaatggtcttggtatcgactatccaagcatgcattatgcaaacgccatttcaagtaacacaactgaatccaacaaaaaatatggtgcaagtagtgaaaaratggctgctgcytacgctgcytttgcwaatggtggwayttayyayaaaccaatgtatatcmataaartcgtcttyagtgatggwagygaaaaagarttytctratgytggkacwcgwgcyatgaargarackacwgcctatatgatgacygamatgatgaaaacwgtyttracttayggaacaggacgtggagcctacctaccatggcttccacaagcaggtaagacaggtacttctaactatactgacgaagaaattgaaaagtatatcaagaacactggctacgtagctccagatgaaatgtttgtgggttatactcgtaagtattctatggctgtatggactggatactcaaatcgtttaactccaatcattggagatggtttcctagttgctgccaaagtttatcgctcaatgatatcgtatctatcagaagatgaccatcctggagattggacaatgcctgaaggattatatagaaacgggcagttcgtattccaaaatggagcmagaccgacttggactgaaacracatcccaatcatcttcaaccgaaarctcmtcaacaagtrcagaargctctrctagccaagcaccagcaacaagtcctgatgctagtmctaatggtcaaaaccaagcaccaaatgcacccggagccaatcaaaayccrgctccacaractcctcagacccctcaagttcaacmacaaccacaacagtaa

SEQ ID NO: 1152 - DNA, 722 bp, Streptococcus pneumoniae
  misc_feature (1)..(722): tiling:Spneumo1:WAN024F35; Cluster includes WAN0244E0 spr0 554||15902598|NP_358148.1|553724..554440|+|717 bp|Conserve d hypothetical protein|S.pneumoniae|R6|NC_003098.1|ORF|110
atgaaraaaagatacmtmgtyttrwcwgstttgctrgcmktrasyctagcagcttgttcacaagaaaaarcaaaaaatgaagatggmrmarctaagacagaacagacagccaaagctgatggracagtcggyagtaagtctcaaggrgctgcccagaaraaagcagaagtggtcaataaaggtgattactacagcatycaaggraaatacgaygaaatcatcgtagccaayaaacaytatccwttgtckaaagactataatccmggggaaaatccaacagccaaggcwgagttggtcaaactcatcaaagcsatgcaagaggcaggtttcccyattagygatcattacagtggttttagaagttatgaaactcagaccaarctctatcaagattatgtyaaycaagatggraargmagcwgcygaccgttaytctgcycgwcctggytatagcgaacaccagacaggcttggcctttgatgtgattgggactgatggtgatttggtracagaagaaaaagcagcccaatggctyttggaycatgcagctgattatggctttgttgtccgttatctcaaaggyaaggaaaargaaacaggctatatggctgargaatggcacctgcgttatgtmggaaaagaagcwaaagaaattgctgmragtggtctcagtttggaagaatactatggctttgaaggcggagactacgtcgattaactaat

SEQ ID NO: 1153 - DNA, 261 bp, Streptococcus pneumoniae
  misc_feature (1)..(261): tiling:Spneumo1:WAN024D9B; Cluster includes WAN0243VU spr1 209||15903252|NP_358802.1|1206709..1206963|-|255 bp|Hypoth etical protein|S.pneumoniae|R6|NC_003098.1|ORF|111
atgaarcgwattaccgctaatcaatatcagacatcagagcgttattataagctccccaaacttttatttgagagtgaacggtataagaatatgaaactggaggttaaggtggtttactcagttttaaaagatcggttggagttgtctttgagcaaaggttggattgatgaggatggggctatttatttgatttattccaattcaaatttgatggcacttttaggctgttcaaagtcaaaattactctccatgykaactaat

SEQ ID NO: 1154 - DNA, 1029 bp, Streptococcus pneumoniae
  misc_feature (1)..(1029): tiling:Spneumo1:WAN024CR6; Cluster includes WAN0244K1 spr0 337|cbpF|15902381|NP_357931.1|341956..342972|+|1017 bp|Cho line-binding protein F|S.pneumoniae|R6|NC_003098.1|ORF|210
atgaarcttttgaaaaaaatgatgcaagtysyaytagcagtctttttctttggtttgctagctacaaatacggtatttgcgaataccacaggtggccgatttgttgataaggataatagaaaatattatgtaaaagatgatcataaagcaatctattggcataaaatagacggtaaaacttactattttggtgatattggagagatggttgtcggttggcaatacttagaaattcctggaacaggttatcgtgatratttattygataaycrwccagtywwygaaattggccttcaggagaagtggtactattttggacaagatggtgctttgctagaacaaacagataaacaagtactagaggcaaaaacgtctgaaaatacaggaaaagtatacggtgaacaatatcctctatctgctgaaaagagaacttattattttgataataattatgctgtaaagacaggctggatttatgaagasggymattggtattatttaaataagctaggaaattttggygatgattcttacaatccactaccaattggtgaagttgctaagggttggactcaagattttcatgttactattgacattgatagaagcaaacctgctccatggtactacctagatgcttcaggtaagatgcttacagattggcaaaaagtaaacggaaaatggtattattttggctcctctggttctatggcaacaggttggaaatatgtacgaggcaaatggtattacttagataataaaaatggtgatatgaaaacaggatggcaataccttggtaacaagtggtactacctccgttcatcaggagctatggtaactggctggtatcaagatggttcaacttggtactatttagatccttctaatggagatatgmwwayagrttggmmaaaagtaaatggaaamtggtattatctcaattcaaatrgagcaatggttacaggtagccaaactatcgatggtaaagtttataayttcgcytcatctggtgagtggattykaactaat

SEQ ID NO: 1155 - DNA, 600 bp, Streptococcus pneumoniae
  misc_feature (1)..(600): tiling:Spneumo1:WAN024CR5; Cluster includes WAN0242YV SP03 78|cbpJ|15900301|NP_344905.1|356986..357984|+|999 bp|choli ne binding protein J|S.pneumoniae|TIGR4|NC_003028.1|ORF|01 1
atgaarmttttgaaaaaaaykatgcmaryygsaytrrcagtmwttttctttggtttgctagskacsartacagtatttgcagatraytctgaaggatggcagtttgtccaagaaaacggwagaacctaytacaaaaagggggacctcaaagaaacctactggcgagtgattgatggtaagtactattattttgattctctatctggagagatggttgtcggctggcaatatatcccgtttccatctaaaggtagtacaattggtccttacccaaatggtatcagattagaaggttttccaaagtcagagtggtactacttcgataaaaatggagtgctacaagagtttgttggttggaaaacattagagattaaaactaaagacagtgttggaagaaagtacggggaaaaacgtgaagattcagaagataaagaagagaarcgttattatacgaactattactttaatcaaaatcattctttagagacaggttggctttatgatcagtctaactggtattatctagctaagacggaaattaatggagaaaactaccttggtggtgaaagacgtgcrggktggataaaygatgmttcrrct

SEQ ID NO: 1156 - DNA, 1376 bp, Streptococcus pneumoniae
  misc_feature (1)..(1376): tiling:Spneumo1:WAN024F8E; Cluster includes WAN0243GO spr1 756|dinF|15903798|NP_359348.1|1723401..1724771|-|1371 bp|D NA-damage-inducible protein|S.pneumoniae|R6|NC_003098.1|OR F|211
atgaataaaaaacgaacagtggacctgatacatggtycgaktcttccctcgctcttaagcttcacctttccaatyttgctatcaaatatttttcaacagctctataacactgctgatgtcttgattgttggacgatttcttggtcaagaatccttggctgcagtaggagcgacgacagcgatttttgacctgattgtaggytttacacttggtgttggcaatggcatggggattgtcattgctcgttattatggggctcggaatttcactaaaatcaaggaagcagtagcagccacctggattttaggtgctcttttgagcattctagttatgttgctgggctttcttggcttgtatcctctcttgcaatacttagatactcctgcagaaattcttcctcaatcttatcaatatatttctatgattgtgacctgtgtaggtgtcagctttgcttataatctttttgcaggcttgttgcggtctattggtgacagtctagcagccctgggatttctgattttctctgccttggttaatgtggttctggatctctattttattacgcaattgcatctgggagttcaatccgcaggacttgctaccattatttcgcaaggtttatcagcggttctctgcttttattatattcgtaaaagtgtgccagaactcttgccacagtttaaacatttcaaatgggacaaaagcttgtacgcggatctcttggagcarggtttggctatgggcttgatgagttcaattgtatctatcggcagtgtgattttacagtyttctgttaatacatttggtgcagtgattattagtgcycagacggcagctcgacgcattatgacctttgcccttcttcctatgaccgctatttctgcatcaatgacgacctttgcttctcagartctaggagctaagcgacctgaccgyattgytcaaggtcttcgaatcggcagtcgtttaagtatatcctgggcagtttttgtttgtattttcctcttttttgccagtccagcyttggtttccttcttggctagttcgacagatggttacttgatagaaaatggaagtctctatctgcaaatcagttcarccttttatcccattttgagcctcttgttgatttatcgcaattgcttgcagggcttggggcaraagatccttcctctagtttctagctttattgaactaatcggaaaaatcgtttttgtggttttgattattccttgggcaggatataagggtgttatcctttgtgaacctctwatctgggttgccatgacagttcaactgtacttctcaytattccrtcatcccttgataaaagmwrrmaaggcaatyttggcaaccaaagtgcaatcctarctaat

SEQ ID NO: 1157 - DNA, 1856 bp, Streptococcus pneumoniae
  misc_feature (1)..(1856): tiling:Spneumo1:WAN024CDA; Cluster includes WAN0244QU spr0 092|capD|15902136|NP_357686.1|99217..101067|+|1851 bp|CapD protein, required for the biosynthesis of type 1 capsular polysaccharide|S.pneumoniae|R6|NC_003098.1|ORF|111
atgaataaaaaactaacagattatgtgattgatctggtggaaattttaaataaacaacaaaagcaggttttctggggaatatttgatattttcagtatggtggtttccatmattgtatcttatatyttattytayggsytgattaatccagcacctgttgactacattatctatacgagtttggccttcytgttctatcaattgatgattggtttttgggggttgaacgckagyattagtcgttacagcaagattacggatttcatgaaaatcttttttggtgtgactgcyagcagtgtcttgtcatatagtatctgttatgccttcttgccactcttctccatccgtttcatcattctctttatcttgttgagtaccttcttgattttattgccacggattacttggcagttaatctactccagacgcaaaaaaggtagtggtgatggagaacaccgtcggaccttcttgattggtgccggtgatggtggggctctytttatggatagttaccaacatccaaccagtgaattagaactggtcggtattttggataaggattctaagaaaaagggtcaaaaacttggtggtattcctgttttgggctcttatgacaatctgcctgaattagccaaacgccatcaaatcgagcgtgtcatcgttgcgattccgtcgctggatccgtcagaatatgagcgtatcttgcagatgtgtaataagctgggtgtcaaatgttacaagatgcctaaggttgaaactgttgttcagggccttcaccaagcaggtactggcttccaaaaaattgatattacggaccttttgggtcgtcaggaaatccgtcttgacgaatcgcgtctgggtgcmgaactgacaggtaagaccatcttagtcacaggagctggaggttcaatcggttctgaaatctgtcgtcaagttagtcgcttcaatcctgaacgyattgtcttgctcggtcatggggaaaactcaatctaccttgtttatcatgaattgattcgtaagttccaagggattgattatgtacctgtgattgcggacattcaagactatgatcgtttgttgcaagtctttgagcagtacaaacctgctattgtttatcatgcggcwgcccacaagcatgttcctatgatggagcgcaatccaaaagaagccttcaaaaacaatatccgtggaacttacaatgttgctarrgcygttgatgaagcyaargtgyctaagatggttatgatttcgacagataaggcagtyaatccaccaaatgttatgggagcaaccaagcgcgtggcggagttgattgtcactggctttaaccaacgtagccaatcaacctactgtgcagttcgttttgggaatgttcttggtagccgtggtagtgtcattccagtctttgaacgtcagattgctgaaggtgggcctgtaacggtgacagacttccgyatgacccgttactttatgaccattccagaagctagycgtctggttatccatgctggtgcttatgccaaagatggggaagtctttatccttgatatgggcaaaccagtcaagatttatgacttggccaagaagatggtgcttctaagtggccacactgaaagtgaaattccaatcgttgaagttggaatccgcccaggtgaaaaactctacgaagaactcttggtatcaaccgaactcgttgayaatcaagttatggataagattttcgttggtaaggttaatgtcatgcctttagaatccatcaatcaaaagattrgagagttccgcactctcagtggagatgagttgaagcaagctattatcgcctttgctaatcaaacaacccacattgaataactaat

SEQ ID NO: 1158 - DNA, 437 bp, Streptococcus pneumoniae
  misc_feature (1)..(437): tiling:Spneumo1:WAN024DAD; Cluster includes WAN0243ZA spr1 085|ahrC|15903128|NP_358678.1|1081675..1082106|-|432 bp|Tr anscriptional regulator of arginine metabolism expression| S.pneumoniae|R6|NC_003098.1|ORF|111
atgaataaaaaagagagacttgaaaaaattagaagattggtgacagattatcaaatcggcacgcaagaagaaattgtagaacatttgaaagaagcaggtatcactgccactcaggcgacggtatcccgagatatcaaagagttaggtattgtcaaaattcctttgagagacaacacctatgtctacgaattrccaaaatcaatcgtaaaaagtctrcaactggctgaagacaatatcgaatcggctgaattgatggataagatgatcaatctccaagttattccaggaaatacggcttttgtaaaagctcagttaatcgakacttttgcagacaagatttttagytgtttgactgatgatrgctcgattttagtcattgccagaagtggaagtctagcagaggaaatctttgaacaagtaaaaaattggtarctaat

SEQ ID NO: 1159 - DNA, 477 bp, Streptococcus pneumoniae
  misc_feature (1)..(477): tiling:Spneumo1:WAN024FX5; Cluster includes WAN02417C |orf 2||CAA06628.1|||477 bp|hypothetical protein|S.pneumoniae|| AJ005619|ORF|000
atgaataaaaaatttttgaaatgtggtactttatttttgatttcttgttctattttaggaagtactattcctgcagttacagtattttctgatgaagtaacaattacttataattcagagaataattcagaaaaaaatgaattatataatcaactttctgctgaaaaaaaaggacagtttgatgagttggtaagtaatttgaatttgagygaacaagaacaattagacttgttgcagcagtataaagaggaacatcctcggcgagctaaaagggggataaaatcagctataataaaaaaagtcgctcgtttccttgctgctaaagtaggacaaaaaagtgtagtggagataactgactatttatttgaatggcaagacaatttagaagctggagcggagaattatcttgtacaatatggttgggatagaaatattgctcactggacaataaagacagttagctttattttcttataa

SEQ ID NO: 1160 - DNA, 1964 bp, Streptococcus pneumoniae
  misc_feature (1)..(1964): tiling:Spneumo1:WAN024DAU; Cluster includes WAN02440Y spr1 024|ligA|15903068|NP_358618.1|1003486..1005444|+|1959 bp|D NA ligase|S.pneumoniae|R6|NC_003098.1|ORF|111
atgaataaaagaatgaatgagttagtcgctttgctcaatcgctatgcgactgagtactataccagcgataatccctcggttkcagacagtgagtatgaccgcctttaccgtgagttggtcgagttagaaactgcttatccagagcaagtgctagcagacagtccgactcatcgtgttggtggcaaggttttagatggttttgaaaaatacagtcatcagtatcctctttatagtttgcaggatgctttttcaygtgaggagctagatgcttttgatgcgcgtgttcgtaaggaagtggctcatccgacctatatttgtgagctgaaaatcgatggcttatctatctcgctgacttatgaaaaggggattttggttgctggggtaacacgtggagatggttcaattggtgaaaatatcacagaaaacctcaagcgtgttaaggacatccctttgactttgccagaagaactagatatcacagttcgtggggaatgttacatgccacgcgcttcctttgaccaagttaaccaagygcgccaagaaaatggagagcctgaatttgctaatcctcgtaatgcggcagcaggaactctgcgtcagttggatacagcagtagttgccaagcgtaatcttgcaacgtttctctatcaagaagccagcccttcaactcgtgatagccaagaaaagggtttgaagtacctagaacaactaggttttgtggtcaatcctaagcgaatcttggctgaaaacatagatgaaatctggaattttatccaagaagtaggacaggaacgggaaaatctgccttacgatattgatggagtggtaatcaaggtcaacgacctagcaagtcaagaagaacttggttttacmgttaaggctccaaagtgggcagtagcctacaagttccctgcygaagaaaaagaagctcaactcttatcagttgactggacagttggccgtaccggtgttgtaactccaactgctaatctaacaccagtacaacttgccggtacgactgttagccgtgcgaccctgcacaatgtagattatattgctgaaaaagatatccgaaaagacgatacggtcattgtatataaggctggtgacatcatccctgccgttttacgtgtggtagagtccaaacgggtttctgaagaaaaactagatatccctacaaactgtccaagttgtaactctgacttgttgcactttgaagatgaagtggccctacgttgtatcaatccgcgttgccctgctcaaatcatggaaggcttgattcactttgcttctcgtgatgctatgaatattacaggccttggtccatctattgttgagaagctttttgctgctaatttagtcaaggatgtggcggatatttatcgtttgcaagaagaggatttcctccttttagagggrgttaaggaaaagtccgctgctaaactgtatcaggctatccaagcatcaaaggaaaattctgccgagaagctcttatttggtttgggaattcgtcatgtcggaagcaaggytagtcagcttttacttcaatatttccattcaattgaaaatctgtmtcaggcagattcagaggaagtggctagtattgaaagtctaggtggcgtgattgccaaaagtcttcagacttattttgcgrcagaaggctctgaaattctgctcagagaattgaaagaaactggggtcaatctggactataaaggacagacggtagtagcggatgcggccttgtcaggtttgaccgtggtattgacaggaaaattggaacgactcaagcgctcagaagctaaaagtaaactcgaaagtctgggtgccaaagtgacaggtagtrtttctaaaaagaccgacctcgtcgtggtaggtgcagacgctggaagtaaactgcaaaaagcacaagaacttggtatccaggtcagagatgaggcatggctagaaagtttgtaactaat

SEQ ID NO: 1161 - DNA, 1125 bp, Streptococcus pneumoniae
  misc_feature (1)..(1125): tiling:Spneumo1:WAN024FMM; Cluster includes WAN023P65 pne5 4_11||||7469..8593|+|1125 bp|Type 25A capsule operon, Glim mer 2.02 orf prediction|S.pneumoniae||WAN01UCGY|ORF|000
atgaataaaagagataggaattactatgttggattagtaatgaagattgttactaaacctttaaaaatgttgaaggtaagggaagaacgcattttatttaaaagctatgatgcagaaaatatatcgtgtaatccaaaatatatttataatgaactaaaaaaaaataatcgttatgaattgatttgggttttgaaaaaccctgaaaaaaccccggaggtaaaagctataaagtatatgtcattgaaatggttgtattatatagcaacatctaagtatgtgataacaaatacaggttttaatttttggttacctaaaaagaaagaacagatatatctgaacacatggcacgggggtggagcgtataaagatagtgacaatctaagtaatataagtaaagcgcaaataacccaaactcaaaaaagtgctgaattggaagattattttatttcgagttgtgccgtttttacaaaggagtacgcagagaaaagactaggattcaaaggaaaaattttagaggtgggtacgccgagaaatgattatctaattcataaccatgataatgcttctttaaaaaatagtattagaagaagattaaatattgcagatgatcatttcatagtaatctatgctccaacatggcgtgatgacgcttctactatagaggatttagattatgatagtttgctagagtgtttaagagaaaaatattcagaagtgactattttagtccgagggcatcaccttcaaaagaacttggtatgtattaagaattcaaatattattaatgtatcagattatgatgatatgcaagaattattacttatatcagatttgttagtaactgattactcatcatcaatttgggatatgattcatggaggtaagaaagttttgttatatactccagatttagatgaatacttaaaatatcgtgaatttcatgtagatataaaagaatggagtattccatattttaagactaatgaggagttgattcattttatattttcaaatggatttactaacatggacgaagtaatgaagaatcatatgaatagatttggtagttttgaacatgggaacgctacccaaaaaatagtagaattaatagaaaagggaaataaa

SEQ ID NO: 1162 - DNA, 2099 bp, Streptococcus pneumoniae
  misc_feature (1)..(2099): tiling:Spneumo1:WAN024EZT; Cluster includes WAN0243MW spr1 531|nanB|15903574|NP_359124.1|1508214..1510307|-|2094 bp|S ialidase B precursor (neuraminidase B)|S.pneumoniae|R6|NC_ 003098.1|ORF|111
atgaataaaagaggtctttattcaaaactaggaatttcygttgtaggcattagtcttttaatgggagtycccrctttgattcatgcgaatgaattaaactatggtcaactgtccatatctcctatttttcaaggaggytcatatcaactgaacaataagagtatagatatcagcyctttgttattagataaattgtctggagakagtcagacagtagtaatgaaatttaaagcagatraaccaaactctcttcaagctttgtttggcctatctaatagtaaagcaggctttaaaaataattacttttcaattttcatgagagattctggtgagataggtgtagaaataagagacgcccaaragggaataaattatttattttcyagaccagcttcattatggggaaarcataaaggacaggcagttgaaaatacactagtatttgtatctgattctaaagataaaacatacacaatgtatgttaatggaatagaagtgttctctgaaacagttgatacatttttgccaatttcaaatataaatggtatagataaggcaacactaggagctgttaatcgtgaaggtaaggaacattacctcgcaaaaggaagtattgrtgaaatcagtctatttaacaaagcaattagtgatcaggaagtttcaamtattcccttrtcaaatccatttcagtkaattttcywwtsaggwgrytmtactcaasytramtatttkrgaataccgacactatwkamaktwmgtagtggaagagttctatcaagtattgatgcacgttatggtgggactcatgattctaaaagtaagattaatattgccacttcttatagtgatgataatgggaaaacgtggagtgagccaatttttgctatgaagtttaatgactatgaggagcagttagtttactggccacgagataataaattaaagaatagtcaaattagtggaagtgcttcattcatagattcatccattgttgaagataaaaaatctgggaaaacgatattactagctgatgttatgcctgcgggtattggaaataataatgcaaataaagccgactcaggttttaaagaaataaatggtcattattatttaaaactaaagaagaatggagataacgatttccgttatacagttagagaaaakggtgtcgtttatratgaaacaactaataaacctacaaattatactataaatgataagtatgaagttttggagggaggaaagtctttaacagtcgaacaatattcggttgattttgatagtggctctttaagagaaarrcataatggaaaacaggtycctatgaatgttttctayaaagattcgttatttaaagtgactcctactaattatatagcaatgacaactagtcagaatagaggagagagttgggaacaatttaagttgttgcctccgttcttaggagaaaaacataatggaacttacttrtgtccyggacaaggtttagcattaaaatcaagtaacagattgatttttgcaacatatactagtggagaactaacctatctcatttckgatgatagtggtcaaacatggaagaaatcctcagcttcaattccgtttraaaatgcaacagcagaagcacaaatggttgaactgagagatggtgtgattagaacattctttagaaccactacaggtaagatagcttatatgactagtagagattctggagaaacatggtcgraagtttcgtatattgatggaatycaacaaacttcatatggcacacaagtatctgcaattaaatactctcaattaattgatggaaaagaagcagtmattttgagtacaccaaattctagaagtggccgyaagggaggycaattagttgtcggtttrgtcaataaagaagatgatagtattgattggarataccactatgatattgatttgccttcgtatggttatgcctattctgcgattacagaattgccaaatcatcacataggtgtactgtttgaaaaatatgattcgtggtcgagaaatgaattgcatttaagcaatgtasttcagtatatagatttggaaattaatgatttaacaaaataactaat

SEQ ID NO: 1163 - DNA, 1445 bp, Streptococcus pneumoniae
  misc_feature (1)..(1445): tiling:Spneumo1:WAN024CYB; Cluster includes WAN0244HK spr0 426|trkH|15902470|NP_358020.1|425479..426918|-|1440 bp|Trk transporter membrane-spanning protein - K+ transport|S.pn eumoniae|R6|NC_003098.1|ORF|211
atgaataaaagtatgattcgttacctcctttcaaarttacttttgattgaagctgttctyctyttggttcctgtkgckatygctgtctattaccgtgaatcgagccaagtctttacrgccctcttttcgaccatagggattctcgtattgttaggcggttcagggartttacagaagccawaaaatcaacggatttatgccaaggagggagtcttgatcgttgccctctgttggatcctttggtctttctttggtggtctcccctttgtcttttctgggcaaatcccyagcsttattgatgccttttttgaaattagttctggrtttacaactactggagcaagtattttgaacgacrtttcggttctcagccgttccctcctcttctggcgaagttttacccacttgattggagggatgggagtgcttgtttttgcacttgctattatggacaatgccaaaaatagycacctagargtratgaaggctgaggttccwggtcctgtytttggyaaggttgtatccaaaytaaaaaacactgcccagatyctctatctcctttaymtagcyctcttytccctctttgtcatcatctattatctagcyggtatgcctctctacgatagttttgtyattgctatggggacagcgggaactggaggmtttaccgtctataacgayggaattgcccactatggyagctcactgattacctatctggtyagtatmggagttytgrtttttggrgtaaatttcaayctctactactacctyatgctccgtcgsrtyaaggccttctttggwgaygaagarcttmgggcttacttggtcatygtrctggtttctacaggcttgattagcctcaayacyctctacctctacccagggttttcaaagagctttgaaatgrccttcttccaggtttccaacatcattacaacaactggttttggatatggagatattaccaactggcccctcttctcycagtttatcctcctyttcctcatgrcaatcggtggytctgctggatcaactgcaggtggactcaagattattcgaggcctcatcctttcaaaaattgccaaaaaycaaattttgtcmatyctatckccccaccgtgttttgacyctccatgtkaatmaaayggtgattgayaargatacccagcataarattctcaagtactttgtcatctatgctatgattttgctakcscttatctttattgtcagcmtagatagcaatgattttctgrtcgtgaccagcgctgtctttagctgtttcaataayatcgggcctattctaggaaccacttctagtttctcaatctttagtccyatctcaaaaattctcctmtcctttrcaatgattgcaggscgcttggagatttacccaatcctmcttctctttatgaaragaacttggtctaagagataactaat

SEQ ID NO: 1164 - DNA, 710 bp, Streptococcus pneumoniae
  misc_feature (1)..(710): tiling:Spneumo1:WAN024F39; Cluster includes WAN0243GC spr1 768||15903810|NP_359360.1|1735907..1736611|+|705 bp|Conser ved hypothetical protein|S.pneumoniae|R6|NC_003098.1|ORF|1 11
atgaataaaatatttatatatgcaggagtgcgaaatcataactctaagactttagagtatactaagagactttcaagtatcatttctagtagaaataatgttgatatatctttcaggacacctttcaattcagagctagaaatatctaattctgattcagaagagttgtttaagaaaggaattgataggcaaagtaatgctgatgatggaggtgttataaaaaaagagttattagagtctgatattataattatctcttctcctgtatatttacaaaacgtatctgtggacacaaaaaactttattgaaaggattggggggtggagccatctttttcgattagctggaaagtttgttgtaacattagatgttgctgagagtaacggctctgataatgtgtcagaatatcttagagatatattttcatatatggsaggacagatattacaccaagtttcaattaccaattcactcaaagatattgcagaggctcagttgatggaggcaacttataaaattgaagatgtacttgaagggaaaattaagtacaaaacaacggattatcaagaaagagcttaccagacattaaaattaattttagaaaattatgattccgaacattttgagaagatgtattgggagaaaaaacgcctttttgaagctaatagtttagaggaatggtattatgttgaaaatattaaataactaat

SEQ ID NO: 1165 - DNA, 200 bp, Streptococcus pneumoniae
  misc_feature (1)..(200): tiling:Spneumo1:WAN024DEH; Cluster includes WAN024480 spr0 770||15902814|NP_358364.1|764775..764969|+|195 bp|Hypothet ical protein|S.pneumoniae|R6|NC_003098.1|ORF|120
atgaataaacaacaatttattattatggcgctrtttacagctgctgagacctattttttcaatgaagcctggatgactggccgctatattatggcagccytttgggcaattttactctttagaaatttccgagtcagttatgtgatgggyaaaatcgttgatgtcatcgatcagcattttaataggaaagactarctaat

SEQ ID NO: 1166 - DNA, 1067 bp, Streptococcus pneumoniae
  misc_feature (1)..(1067): tiling:Spneumo1:WAN024C9X; Cluster includes WAN0244OM spr0 172|pepP|15902216|NP_357766.1|182039..183100|+|1062 bp|Ami nopeptidase P|S.pneumoniae|R6|NC_003098.1|ORF|111
atgaataaacgcgtacaagcatttctagctaaaatgcaagaaaaagaactagatggtrtcatcatcaacaatcttaaaaacgtctattatttgactggtttttggggctcaaacggaacagtctttatcagycgtgaccgtcaggtcttagtgacagactctcgctatatcatcgcagctaagcaagaaaccagtggttttgagattgtggctgatcgtgatgaattggctgtcattgcaggaattgttaaggacatgrrcttgactcgtatcggttttgaagatgagatttcagtgtcttattaccaccgtatgcaggcagcttttgcaggtttgracttgyttccrcaaactcagtttgtggaaggtcttcgtatgattaaggatgaggcagagattgcagcgattcgcaaggcttgttctatctcagaccaagctttccgcgatgcgcttgactttatcaaaccaggaaaaactgaaawtgagattgccaacttccttgayttccgcatgcgtgagttgggagcatctggcttatcttttgatacgatcctagctagcggtatcaattcttctaaaccccatgcccatccaatgcacaaaccagtggagttgggagaagccatyaccatggacttcggctgtctctatgaccactatgtcagtgatatgacccggactatctatctagggcatgttagcgatgagcaggcagagatttacaatacggttctaaaagctaaccaagccttgattgaccaagctaaggcaggcttaggtttccgtgactttgacaaaatccctcgtgatattatcattgaggcaggttatggyramtactttactcacggcattggccacggtattggtctggatatccatgaggaaccmtactttagycagacttctacagaaactattaagacaggtatggycttraccgatgaaccaggtatctatatcgaagrcaaatatggcgttcgtatcgaggatgatatcctgattacagagacaggttgtgaattattgaccmtagctccaaaagagttgatagtcatttarctaat

SEQ ID NO: 1167 - DNA, 1005 bp, Streptococcus pneumoniae
  misc_feature (1)..(1005): tiling:Spneumo1:WAN024DQO; Cluster includes WAN0244D7 spr0 583||15902627|NP_358177.1|599026..600015|+|990 bp|Hypothet ical protein|S.pneumoniae|R6|NC_003098.1|ORF|110
atgaataaacgtctattttyaaaaatgagtctggtgacgttgccaattttagccttgttttcacaaycagttttggcggaagaaaacatccatttttcgagctgtaaggaagcttgggcgaatggctattcggatattcacgagggrgaacctggttattctgccaagttagaccgtgatcatgatggtgtggcttgcgaattgaaaaatgctcctaagggtgcttttaaagcaaaacagtcaacggctattcaaatcaacacaagttcagcaacaacaagtggttgggttaagcaggacggcgcttggtactactttgatggaaatggaaatctagtgaaaaatgcatggcagggaagctattacctgaaagctgatggtaaaatggcacagagtgaatggatttatgactcttcttatcaagcttggtattatttgaaatcagatggttcttatgcaaaaaatgcatggcaaggagcttattaccttaaatcaaacggtaaaatggcacaaggtgagtgggtttatgattcttcttaccaagcatggtattacttgaaatcagatggttcatatgctcgcaatgcatggcaaggaaactactatttgaaatcagatggtaaaatggctaaaggtgaatgggtttatgwtgccacctatcaagcttggtattatttgacatcagatggttcttatgcttacagtacatggcaaggaaattactatctaaaatcggatggtaaaatggctgtcaatgaatgggttgatggtggacgttattatgttggcgctgacggagtttggaaggaagktcaagcaagtacagcttcttctagtaatgatagcaatagtgaatattctgctgctttaggaaaggcaaaaagttataattcgttattccacatgtcaaaaaaacgtatgtatagacaattaacttctgattttgataaattttcaaatgatgcagctcaatatgccattgatcatttagatgatctaactaat

SEQ ID NO: 1168 - DNA, 1561 bp, Streptococcus pneumoniae
  misc_feature (1)..(1561): tiling:Spneumo1:WAN024DVW-5; Cluster includes WAN0243AW sp r1965||15904006|NP_359556.1|1953453..1956569|-|3117 bp|Hyp othetical protein|S.pneumoniae|R6|NC_003098.1|ORF|111
atgaataaagaaaaaataaaaagaaaattaatcacaataytgtttgtatgtattgggatgttatgttttggattgttagcaggagttaaggctgataatcgtgttcaaatgagaacgacgattaataatgaatcgccattgttgctttctccgttgtatggcaatgataatggtaacggattatggtgggggaacacattgaagggagcatgggaagctattcctgaagatgtaaarccatatgyagcgattgaacttcatcctgcaaaagtctgtaaaccaacaagttgtattccacgagatacgaaagaattgagagaatggtatgtcaagatgttggaggaagctcaaagtctaaacattccagttttcttggttattatgtcggctggagagcgtaatacagttcctccagagtggttagatgaacaattccaaaagtatagtgtgttaaaaggtgttttaaatattgagaattattggatttacaataaccagttagctccgcatagtgctaaatatttggaagtttgtgccaaatatggagcgcattttatctggcatgatcatgaaaaatggttctgggaaactattatgaatgatccgacattctttgaagcgagtcaaaaatatcataaaaatttggtgttggcaactaaaaatacgccaataagagatgatgcgggtacagattctatcgttagtggattttggttgagtggcttatgtgataactggggctcatcaacagatacatggaaatggtgggaaaaacattatacaaacacatttgaaactggaagagctagggatatgagatcctatgcatcggaaccagaatcaatgattgctatggaaatgatgaatgtatatactgggggaggcacagtttataatttygaatgtgccgcgtatacatttatgacaaatgatgtaccaactccagcatttactaaaggtattattcctttctttagacatgctatacaaaatccagctccaagtaaggaagaagttgtaaatagaacaaaagctgtattttggaatggagaaggtaggattagttcattaaacggattttatcaaggactttattcgaatgatgaaacaatgcctttatataataatgggagatatcatattcttcctgtaatacatgagaaaattgataaggaaaagatttcatctatattccctaatgcaaaaattttgactaaaaatagtgaggaattgtctagtaaagtcaactatttaaactcgctttatccaaaactttatgaaggagatgggtatgctcagcgtgtaggtaattcctggtatatttataatagtaatgctaatatcaataaaaatcagcaagtaatgttgcctatgtatactaataatacaaagtcgttatcgttagatttgacgccacatacttacgctgttgttaaagaaaatccaaataatttacatattttattgaayaattacaggacagataagacagctatgtgggcattatcaggaaattttgatgcatcaaaaagttggaagaaagaagaattagagttagcga

SEQ ID NO: 1169 - DNA, 636 bp, Streptococcus pneumoniae
  misc_feature (1)..(636): tiling:Spneumo1:WAN024FRE; Cluster includes WAN023PB7 pne4 5_12||||8854..9489|+|636 bp|Type 22F capsule operon, Glimm er 2.02 orf prediction|S.pneumoniae||WAN01UCHA|ORF|000
atgaataaagaaataataaagaataaattaaaactaattgtttatcctatcattaattttatttctaggagaagattaaaaaataaaaaattcaccattatttgtgataattgttgggctggaaaagtgtaccaagagttaggtttgccctaccaaacaccctttatcgggatgtttgttttttcgcctgattatatcaagatgctcaagaatttgaaatactatttgagcggaaatatctcgttgaaatttgttaaggaatcaaagcacattgaaaactttgataatgcttatccaattgcactccttgacgatatcgagcttcatttcttgcactatgcagatgaaaaagaggctactcagaaatggcaacgtcgtttagaaagaattcattgggataatttgtattttaagttcaatgacaatgatgcttgtacctatgaccttatgagagaatttgatcaattaccgtacaaaagtaaagtcattttttcatctaagaattattctgatttacattcattaacttattttaaagagaaggaaaaagattgtagtgttggaattgatcttaaaatctatcatcgttatttcgatgttgtaaggtggctgaatgaaggcggagtggacttgagt

SEQ ID NO: 1170 - DNA, 1149 bp, Streptococcus pneumoniae
  misc_feature (1)..(1149): tiling:Spneumo1:WAN024FL8; Cluster includes WAN023OS5 pne7 5_13||||9337..10476|+|1140 bp|Type 35A2 capsule operon, Gl immer 2.02 orf prediction|S.pneumoniae||WAN01UCEX|ORF|000
atgaataaagaatttttgaagtatatttatattcgattattaagaaatttaaggagaattttctttattatcccgataataagraatagagttgtttttgaatctttctcaggagatgcttatagttgcaatcctaaatatatttctgaagaattaagaaaacagtatggtgattctgttgaaattatctgggcttttaatgatccaaacaaattcaaaaaagaattaccaaaggagattgtgacttgtcgttaccgtagtttcaatcatctgatmtatagaatcacttcaaaagtttatrtttgtaatttcctgcaagcaatygaaattccaaagcgtaaaggacaactagagattcaaacttggcatggaggaggttgctataaaaaagttggggtggctgaaaaaggacgccaggctgcttatgttaaacgacaacggatgcacgttgaagaaacagatctctttattacaagtagtaaatattttgaaaatgaggtagtaaaaaaacaatttgggtataagggagaaattttatctattggtatgcctcgaaatgatattttaataaatttaccaatttcaagtcaagttgagaaattaaaggagaaattgggattaccaaacaataaattgatagcactttatgctccgacctggagatcaggtactaaacagtatgaaacacttgatataaaaaaacttactcaagccgttgataaaaaatttggtaaaaaatgtatygttcttttcagatcgcatctatatggaaatcaatcttatgatgatgttgtggatgtctctcagtatagtgatatgcaagaattattgttgctttcagatatactgattactgactattcttcgtctatgtgggatttctctctctcttttaaaccgtgttttttatatacccccgatttgaaggattatctagatgaaagaggttttgatgaagayatacattcatggggattttcagtttctgaatcaaataaggaactagttgaaaatattttacagtttrataatgaagaatatagacaaaaaatgaagaatcatcatcagtttttagaatcttatgaacaaggagatgcagygaaaagagtygtggcgaagattgctgaatattgtaatttatatagagga

SEQ ID NO: 1171 - DNA, 258 bp, Streptococcus pneumoniae
  misc_feature (1)..(258): tiling:Spneumo1:WAN024GFZ; Cluster includes WAN023LVU 3143 36_1070||||558424..558681|-|258 bp|EGAD orf prediction|S.p neumoniae|R6|NC_003098.1|ORF|110
atgaataaaggagcgcaaagcccccttcaagcccggttccttaacagtcttcacaaaatttttctgaagatgttccacttctatcattgccatatctatctccctatcgtaaggaatagcaacattgtgtttttaactacaaatattctaaatccttrctttctacaccttctacattttattactacaraaggctttataccaacctattatagtccaataaaaaacgaaatgcaagmgtttgcctatggattgtga

SEQ ID NO: 1172 - DNA, 1770 bp, Streptococcus pneumoniae
  misc_feature (1)..(1770): tiling:Spneumo1:WAN024CWN-5; Cluster includes WAN0244KA sp r0328||15902372|NP_357922.1|327393..332696|+|5304 bp|Conse rved hypothetical protein|S.pneumoniae|R6|NC_003098.1|ORF| 111
atgaataaaggattatttgaaaaacgttgtaaatatagtawtcggaaattttcattaggtgttgcttctgttatgattggagctrcattctttgggacaagtccggttcttgcagatagcgtgcagtctggttccacggcgaayttaccagctgatttagctactgctcttgcaacagcaaaagagaatgatggrcrtgattttgaagcgcctaaggtgggagragaccaaggttctccagaagtyacagatggacctaagacagaagaagaactattagcacttgaaaaagaaaaaccggctgaagaaaaaccaaaagaggataaacmtgcagctgctawacctgaaacrcytaagacggtaacycctgaatggcwdacggtagmgaawaaagarcaamagggaacagtcactatccgagaagaaaaaggtgtccgctacaaccaaytatcctcaactgctcaaaatgataacgcaggyaaaccagccctgtttgaaaagaagggcttgaccgttgatgccaatggaaatgcaactgttgatttaaccttcaaagawgattctgaaaagggcaaatcacgctttggtgtcttyytgaaatttaaagataccaakaayaatgtttttgtcggttaygacaaggatggctggttctgggartayaaawctccarswamtagcacwtggtataraggyarycgtgtwgytgcwccwgaamcrggwtcwryaaaccgtctytctatcactctcaagtcagayggwcarctmaatgccagcaayaaygatgtcaatctctttgacacagtgacwctrccwgskgcggtcaatgaymatcttaaaaatgagaagaagatycttctcaaggcrggmwcttatgrcratgascgwacrgttgtyagcgttaaaacrgayaaycaagarggsgtaaaarcrgakgatacycctgcysaraaagaaacaggtcckgwwgttgaygatagcaaggtgacttatgayacgatycagtctaaggthctyaargcagtrattgaccaagccttccctcgtgtcaaggaatacascttgaayggrcatactttgccaggacargtkcaacagttcaaccaagtctttatcaataaccaccgaatcacccctgaagtyacttataagaaaatcaatgagacaacagcagagtacttgatgaagcttcgcgatgatgctcacttaatcaatgcggaaatgacagtacgcttgcaagttgtrgacaatcaattgcactttgatgtgacyaagattgtcaaccacaatcaagtcactccaggtcaaaagatygatgacgaaagmaaactactttcttctattagtttcctcggcaatgctttagtctctgtttctagtratcaaactggwgctaagtttgatggggcaaccatgtcaaacaatacgcatgtcagcggagatgatcatatcgatgtaacyaatccaatgaargayytrgcyaagggttacatgtatggatttgtttctacagataagcttgctgctggtgtttggagtaactctcaaaayagctatggtggtggttcgaatgactggactcgtttgacagcytataaagaaacagtcggaaatgccaactatgtaggaatccacagctctgaatggcaatgggaaaaagcttataagggcattgttttcccagaatacacgaaggaacttccragtgctaaggttgttatcactgaagatgccaatgcagacaagaamgtygattggcargatggtgcc

SEQ ID NO: 1173 - DNA, 792 bp, Streptococcus pneumoniae
  misc_feature (1)..(792): tiling:Spneumo1:WAN024FH2; Cluster includes WAN0243NL spr1 506||15903549|NP_359099.1|1484402..1485253|-|852 bp|Conser ved hypothetical protein|S.pneumoniae|R6|NC_003098.1|ORF|2 11
atgaataaagggatttatcagcatttctccatagaagatcgtccatttcttgacaagggaatggaatggataaagaaggtagaagatagctatgctccttttttaactccttttatcaatcctcatcaggagaagctattaaagattttggccaaaacctatggtcttgcttgtagcagtagtggggaattcgtctcgagtgagtatgttcgagttttattatacccagattatttccaaccagagttttcagattttgaaatatctctccargaaattgtgtattccaataaatttgaayatttaacgcatgctaagattttagggacagtcatcaatcaattagggattgaacggaaactttttggagatatcctagtagatgaagaacgggcgcagattatgattaatcagcagtttcttcttctctttcaagatggactaaagaaaattggtcgtatacctgtttcgctggaggaacgtcctttcaccgagaaaatagataagctagaacagtatcgagaactggatttatctgtgtytagttttcgattagatgttcttttatcaaatgttttgaaactatctaggaatcaagcaaaccagttgattgaaaagaaacttgtccaagtaaattatcatgtggtagacaaatcagattacactgttcaagttggagacttgattagtgtgagaaaatttggycgcttgagattacttcaagataagggacaaacgaaaaaagagaagaaaaaaataaccgtccagttattattaagtaagykaactaat

SEQ ID NO: 1174 - DNA, 2161 bp, Streptococcus pneumoniae
  misc_feature (1)..(2161): tiling:Spneumo1:WAN024C4O; Cluster includes WAN02407E |pbp 1a||BAA32073.1|||1195 bp|penicillin binding protein 1A|S.p neumoniae||AB006877|ORF|000
atgaataaatacattcttatgcgaatattaaagtatactggaatctttttcctaactctctttatcgcattatttctattgggtgggggtgttttcctctattttgtaagcaaagctccagccctatcagatagtaagttagttgcgacaacttctagcaagatttacgacaacaataacgaactcattgccgatctgggctctgaacgccgagtaaacgctcaggccaacgaaatccctactgatttagtcaaagccatcgtgtctatcgaggaccatcgcttctttgatcacagaggggtagatacgattcggatcatgggtgccttcttacgtaacttacaaagcaactctttacaaggagggtcaaccttaacccagcagttgattaagttaacctatttctcaacatcaacttcggatcaaaacctctcccgaaaagcacaagaagcatggttggctgttcaattggaacaaaaagctaccaaacaagaaatccttacctactacatcaataaggtctatatgtcaaatggtaactatggaatgcagacagcagcccaaaattactatggaaaagacttaaaagacctctctctgcctcaattagctttgctagcaggtatgcctcaggcaccaaaccaatacgatccttactctcatccagaatcagcattggagcgtcgtaacttggttctttcagaaatgaaagggcaagattacattagtgctgagcaatatgaaaaagctatcaacacacctatcactgatggtttacaaagtcttaagtcgactgctacttatccagcatatatggataactatctaaaagaggttatcgaccaagtagaacgagaaactggctataaccttctaactactgggatggatgtttacacaaatgtagaccaagaggctcaaaaacgtctgtgggatatctacaactccgagcaatacgtctcttaccctgacgatgatttgcaagtcgcatctacggtcgtagatgtttccaatggtaaagtcatcgcccaacttggagctcgtcaccaagcaagtaacgtttcatttggtaccaaccaagctgtggaaaccaatcgtgactggggttcaacaatgaaaccaatcaccgattatgcacctgccatagaatacggtgtatatgattccactgcaactatggttaatgatattccttataactatccgggaacaagcacacctgtctacaactgggatcgagcatattttggtaatattactctgcaatatgcccttcaacaatcacgtaatgttacagcagttgaaacattaaacaaggttggtttagatcgagccaaaactttcctaaatggcttaggtatcgattacccaagcatacactatgctaacgccatttcaagtaatacaacagaatctaacaaacattacggtgcaagtagtgaaaaaatggctgctgcttatgccgcctttgctaatggtggtatttaccacaaaccaatgtatatcaataaaatcgtctttagtgatggtagtgagaaagaattttctgatgctggtacacgagctatgaaagaaactactgcctatatgatgaccgaaatgatgaaaactgttttagcttacggaaccggacgtggtgcttacctaccatggcttccacaagcaggtaagacaggtacttctaactatactgatgacgaaatcgaaaaacatatcaagaatactggctacgtagctccagatgaaatgtttgtaggctatactcgtaagtattctatggctgtatggactggttactcaaatcgtttaactccaattgttggagatggtttcctagttgctgctaaggtttatcgctcaatgatatcgtatctatcagaagatgaccaacctggagattggacgatgccagacggcctgttccgaaatggagaattcgtatttaaaaatggtgctcgttctacgtggaactcacctgctccacaacaacccccatcaactgaaagttcaagctcatcatcagatagttcaacttcacagtctagctcaaccactccaagcacaaataatagtacgactaccaatcctaacaataatacgcaacaatcaaatacaacccctgatcaacaaaatcagaatcctcaaccagcactaaccataa

SEQ ID NO: 1175 - DNA, 114 bp, Streptococcus pneumoniae
  misc_feature (1)..(114): tiling:Spneumo1:WAN024CGV; Cluster includes WAN023S6F cont ig_480_2||||856..969|+|114 bp|Glimmer 2.02 orf prediction| S.pneumoniae|670|WAN01UCZE|ORF|000
atgaataacaacatgttgaccaatatcgcacttaaagcaattcaggagcttgctcttgaaaatagaaaacgaacacacagattggagaacttagaaaatgaacacagaacagct

SEQ ID NO: 1176 - DNA, 162 bp, Streptococcus pneumoniae
  misc_feature (1)..(162): tiling:Spneumo1:WAN024BEJ; Cluster includes WAN0243P3 spr1 452||15903495|NP_359045.1|1435671..1435832|+|162 bp|Hypoth etical protein|S.pneumoniae|R6|NC_003098.1|ORF|101
atgaataactctattagaaaagtcaaattaatttctagaaatattttagcarctacagcgtactattccaaactcaatcaactatgctctttgattttcattgagtatcaaaagaaaaacttaggaatcaatcctaagctctcttctgaagtaggtacatga

SEQ ID NO: 1177 - DNA, 1000 bp, Streptococcus pneumoniae
  misc_feature (1)..(1000): tiling:Spneumo1:WAN024DSB; Cluster includes WAN023ZOL-con |pspA||AAF67352.1|||684 bp|PspA|S.pneumoniae||AF253404|ORF |000
atgaataagaaaaaaatgattaaaacaagtctagccagcgcagctatcttmrgggctggttttgttacgtctcagcctacttttgtaagagcagaagaakctcccgtagcyagtcrgtctaaagctgagaaagactatgatgcagcagtgaaaaaatctgaagctgctaagaaacattaygaagaagytaaaaagaaagcagaagacgctcagaaraaatatgaygaggrtcagaagaaaackgwrgmaaaagcrrarmragaaararaagcttctgaaaagatagctgaggcaacaaaagaagttcaacaagcgtacctagcttatcwacaagctagcaacgaaagtcagagaaaagaggcagataagaagataaaagaagctacgcaacgcaaagatgaggcggaagctgcatttgctactattcgaacaacaattgtagttcctgaaccaagtgagttagctgagactaagaaaaaagcagaagaagctaaagcagaagaaaaagtagctaagagaaaatatgattatgcaactctaaagstagcactagcgaagaaagaagtagaggctaaggaacttgaaattgaaaaacttcaatatgaaatttctactttggaacaagaagttgctactgctcaacatcaagtagataatttgaaaaaacttcttgctggtgcggatcctgatgatggcacagaagttatagaagctaaattaaacaaaggagaagytgagctaaacgctaaacaagctgagttagcaaaaaaacaaacagaacttgaaaaacttcttgacagccttgatcctgaaggtaagactcaggatgaattagataaagaagcagaagaagctgagttggataaaaaagctgatgaacttcaaaataaagttgctgatttagaaaaagaaattagtaaccttgaaatattacttggaggggctgattctgaagatgatactgctgctcttcaaaataaattagctactaaaaaagctg

SEQ ID NO: 1178 - DNA, 800 bp, Streptococcus pneumoniae
  misc_feature (1)..(800): tiling:Spneumo1:WAN024DSL; Cluster includes WAN0240QS-con |pspA||AAF27700.1|||1185 bp|PspA|S.pneumoniae||AF071804|OR F|000
atgaataagaaaaaaatgattttaacaagtctagccagcgtcgctatcttaggggctggtttggttrcgtctymgcctactktkgtragagcagaagaakcycccgtagctagtcagtctaaagctgagaaagactatgatrcagcgaagagagacgctgagaatgcgaaaaaagctttagaagaagcaaaacgtgcgcaggaaaaatatgccgattatcagaggagaattgaggagaaagcggcaaaagaammacamgcttctctagagcaacaagaagcaaataaggactatcaattaaagttgaagaaatatcttgacggaaggaacctctcaaatagttctgtgttaaagaaagaaatggaggaagctgagaaaaaagataaggaaaaacaagcagaatttaataagattagacgagagatagtggttcctaacccgcaagagttagaaatggctagacgaaaatcagaagtggctaaagcaaaagaatcaggacttgttaaaagagtagaagaagctgagaaaaaagttactgaagccagacaaaaattggatgctgaacgtgctaaagaagttgttcttcaagccaaaatcgctgagttggaaaatgaagttcataaactagaacaaaagctcaaagagattgatgagtctgattcagaagattatgttaaagaaggtttccgtgctcctcttcaatctgaattggatgctaagcaagctaaactatcaaaacttgaagagttgagtgataagattgatgagttagacgctgaaattgcaaaacttgaaaaaga

SEQ ID NO: 1179 - DNA, 785 bp, Streptococcus pneumoniae
  misc_feature (1)..(785): tiling:Spneumo1:WAN024DSA; Cluster includes WAN02435L-con SP0117||15900059|NP_344663.1|118423..120657|+|2235 bp|pneu mococcal surface protein A|S.pneumoniae|TIGR4|NC_003028.1| ORF|010
atgaataagaaaaaaatgattttaacaagtctagccagcgtcgctatcttaggggctggtttkgttacgtctcagcctacttttgtaagagcagaagaatctccacaagttgtcgaaaaatcttcattagagaagaaatatgaggaagcaaaagcaaaagctgatactgccaagaaagattacgaaacggctaaaaagaaagcagaagacgctcagaaaaagtatgaagatgatcagaagagaactgaggagaaagctcgaaaagaagcagaagcatctcaaaaattgaatgatgtggcgcttgttgttcaaaatgcatataaagagtaccgagaagttcaaaatcaacgtagtaaatataaatctgacgctgaatatcagaaaaaattaacagaggtcgactctaaaatagagaaggctaggaaagagcaacaggacttgcaaaataaatttaatgaagtaagagcagttgtagttcctgaaccaaatgcgttggctgagactaagaaaaaagcagaagaagctaaagcagaagaaaaagtagctaagagaaaatatgattatgcaactctaaaggtagcactagcgaagaaagaagtagaggctaaggaacttgaaattgaaaaacttcaatatgaaatttctactttggaacaagaagttgctactgctcaacatcaagtagataatttgaaaaaacttcttgctggtgcggatcctgatgatggcacagaagttatagaagctaaattaaaaaaaggagaagctgagctaaacgctaaaca

SEQ ID NO: 1180 - DNA, 1096 bp, Streptococcus pneumoniae
  misc_feature (1)..(1096): tiling:Spneumo1:WAN024DSI; Cluster includes WAN023ZOQ-con |pspA||AAF68094.1|||769 bp|PspA|S.pneumoniae||AF254259|ORF |000
atgaataagaaaaaaatgattttaacaagtctagccagcgtcgctatcttaggggctggttttgttgcgtcttcgcctactgttgtaagagcagaagacgctccacaagttgtcgaaaaatcttcattagagaagaaatatgaggaagcaaaaacaaaagctgatactgccaagaaagattacgaaacggctaaaaagaaagcagaagacgctcagaagaaatatgatgaggatcagaagaaaactgaagagaaagcgaaaaaagagaaagaagctgctaagaaagtagacgatgctagtttagcggtacaaaaagcatatgtagaatatagaaaagttcaagaatctcgtagtaattacagaaatcggagtgattataataaaaaattagcagaggcgcaagtaaaaatagatgaagcgaataaaaaactaaccgcagctaataatgagtttaaaactgtaagagcagttgtagttcctgaaccaaatgcgttggctgagactaagaaaaaagcagaagaagctaaagcagaagaagtagtagctaagaaaaaatctgataaggcagctcaagaggtagaagtagcgaagaaagaagtagaggctaaggaacttgaaattgaaaaacttcaagatgaaatttctactttggaacaagaagttgctactgctcaacatcaagtagacaatttgaaaaaacttcttgctggtgtggatcctgatgatacagaagctatagaagctaaattaaaaaaaggagaagctgagctaaacgctaaacaagctgagttagcaaaaaaacaaacaggacttgaaaaacttcttgacagccttgatcctgaaggtaagactcaggatgaattagataaagaagctgctgaagctgagttgrataaaaaagytgawkmwcttcaaaayaaagttgctgatttagaaaaagaaattagtaaccttgaaatattacttggaggggctgatyctgaagatgatactgctgctcttcaaaataaattagctactacaaaagctgaattggaaaaaactcaaaaagaattagatgcagctcttaatgagttaggccctgatggagatgaag

SEQ ID NO: 1181 - DNA, 1000 bp, Streptococcus pneumoniae
  misc_feature (1)..(1000): tiling:Spneumo1:WAN024DSJ; Cluster includes WAN0240QZ-con |pspA||AAF27707.1|||1313 bp|PspA|S.pneumoniae||AF071811|OR F|000
atgaataagaaaaaaatgattttaacaagtctagccagcgycgctatcttaggggctggtttkgttgcgtctcagcctactgttgtamgagcagaagaagctcccgtagctaagcagtctcaagctgagagagactatgatgcagcaatgaaraaatctgaagctgctaagaaagaatacgaagaagctaagaaagatttagaagaagcaaaagctgstcagaaaaaatatgaagacgatcaaaagaaaactgaagagaaagcaaagcttgttcaaaaagcggatgaagagcgtcaaaaagcgaatgtggcagttcraaaggcgtwtttaawactccgagaagcacaagaacaattgarcaaamgtccaaacaataagaaaamtgccgctcaacagaaattaaaagatgcattagctcatattgatgaggwracattaaaacmmaaagaggcggaagcgratttcaataaggwrcaascmmaagtagttcctgaagcagataagttakctgagrctaagaaaaaarcagaacaggytgwwawaaaagamccagaacttgctwmwaaagtagcagaagctaaascmmaagcagaagaagctgagaaaaaagctgttgaagccaaacmmaargtggatgctgaaaaatatgctcttgaagctaaaatckctgagttggaatatgaagttcagggactagraaaagagctcaaagagattgatgagtctgactcagaagattatattaaagaaggtctccgtgctcctcttcaatctaaattggatrccaaaaaagctaaactatcaaaacttgaagagttgagtgataagattgatgagttagacgctgaaattgcaaaacwtgwarwwsawstwraagatytsaaaaacwcakamkgtgagcaagctgaacaatatcttgttgcagctaaaaaagacttagatgctaaaaaagctgaattagaaaatactgaagctgaccttaagaaagcagttgatgagc

SEQ ID NO: 1182 - DNA, 600 bp, Streptococcus pneumoniae
  misc_feature (1)..(600): tiling:Spneumo1:WAN024DSH; Cluster includes WAN0240RD-con |pspA||AAC09239.1|||255 bp|pneumococcal surface protein A| S.pneumoniae||AF036620|ORF|000
atgaataagaaaaaaatgrtywkarcargtctakccagcgtcgctatcttaggggctggtttkgttacgtctcagcctactttkgtwagagcagaagaagcccccgtagctagtcagtctaaagctgagaaagactatgatgcagcagtgaaaaaatctgaagctgctaagaaggcttacgaagaagctaaaaagaaagcagaagacgctcagaaaaaatatgatgaggatcagaagaaaactgaagagaaagccgaaaatgaaaaaaaggcagcagcagacttgaacgaagccacagaagtgcatcaaaaagcatatgtaaggtattttgaaattcaacgagcaaaagattcaaaaaaatataaaaataatcgtgataagtacaataaagatctcgctgaagcagatcaaaaaataaaggatacaaaaacagtattagatgaaaagcaatctaaattttatgctgtaagagcagttgtagttcctgaagcaaaggagttagctgttactaaacaaaaagcggaagaaactaaaaaaggcgccgaagtagctaaggagaaatatgataaggcagctcaagaggtagaagtagcgaagaaa

SEQ ID NO: 1183 - DNA, 1000 bp, Streptococcus pneumoniae
  misc_feature (1)..(1000): tiling:Spneumo1:WAN024DSG; Cluster includes WAN0240QW-con |pspA||AAF27704.1|||1245 bp|PspA|S.pneumoniae||AF071808|OR F|000
atgaataagaaaaaattgattttaacaagtctagccagcgtcgctatcttaggggctggttttgttacgtcttcgcctacttttgtaagagcagaagaagctcccgtagctagtcagtctaaagctgagaaagactatgatgcagcgaagaaagatgctaagaatgcgaaaaaagcagtagaagatgctcaaaaggctttagatgacgcaaaagctgctcagaaaaaatatgacgaggatcagaagaaaactgaaaagaaagctgctgcggtaaagaaaattgatgaagaacatcaggcggctaatcttaaatctcagcaagcattagttgaattcttagctgctcaaagagaaggtaatcctaaaaagaaaaaagctgcgcaagccaagttagaagaagcagaaaaagcagaaaaggagaagaaaaaggaatttgataaagcacaggcagtggtagttcctgaagcaactgagttagctgagactaagaaaaaagcagacgaagctaaagtaaaagaaccagaacttactaaaaaactagaagaagctaaagcaaaatcagaagaagctgagaaaaaagctactgaagccaamcaaaaagtggatgcagaacatgctaaagaagtcgytcctcaagctaaaatcgctgarttggaaaatsaagttcakaaactagaamaarakctcaaagagattgatgartctgaytcagaagattatgttaaagaaggtytccgtgctcctcttcaatctgaattggatgcyaarcaagctaaactatcaaaacttgaagagttgagtgataagattgatgagttagacgctgaaattgcaaaacttgaaaaaratgtagaagatttcaaaaactcaaacggtgagcaagctgaacaataccgtgctgcagctgaagaagacttagctgctaaacaagctgaattagaaaaaactgaagctgaccttaagaaagcagttaatgagccagaaaaaccagctccagctc

SEQ ID NO: 1184 - DNA, 2342 bp, Streptococcus pneumoniae
  misc_feature (1)..(2342): tiling:Spneumo1:WAN024GNW; Cluster includes WAN0244J6 spr0 368|mutS2|15902412|NP_357962.1|366411..368747|+|2337 bp|DN A mismatch repair protein|S.pneumoniae|R6|NC_003098.1|ORF| 221
atgaataagaaaatattagaaacattagagttcgataaggtcaaggccttgtttgagcctcatttgttgaccgagcagggcttggagcaattgagacarctggctccgactgccaaagcagataaaatcaaacaggcttttgctgagatgaargaaatgcaggctcttttcgtcgagcaaccgcattttactattctctcaactaaggaaattgcaggagtctgcaagaggttggagatgrgagcggatctcaatatcgaggagttcctactcttgaaacgcgtgcttcttrccagccgagaacttcaaartttttacrccaatctggaaaatgtcagcttggaagaattagccytttggtttgagaaattacatgattttccgcaattacaaggaaatcttcaggcctttaatgatgcgggtttcattgaaaattttgccagtgaagaattggcgcgaatccgtcgaaaaatacatgatagcgagagtcaggtacgcgatgttttacaagacttrctcaagcaaaaagcgcagmtgttgacggaaggaattgttgctagcagaaatggccgtcaggttttaccagtcaaaaacacctaccgcaataagattgcaggtgtcgttcatgatatttctgctagtggaaacaccgtctatatcgaaccmcgtgaggtagtcaaactgagcgaagaaattgctagtctgcgagcagatgagcgctatgaaatgcttcgcattctccaagaaatttctgagcgtgtccgccctcatgcggctgagattgctaatgaygcttggattatcggtcatctggacttgattcgtgccaaggttcgatttatccaagaaagrcaagcagtcgtgcctcagctgtcagaaaatcaagagattcaactgctccatgtctgccatcctttggtcaaaaatgccgtcgcaaatgatgtcyattttggtcaagatttaacagctattgtcattacaggtcccaatacaggtgggaagaccatcatgctcaaaactctgggcttgacacaggtcatggcccagtcaggattgccgattttagcagacaagggaagtcgtgttggtattttkraagaaatytttgctgatattggagatgagcagtctattgagcagagcttgtctaccttctctagycatatgaccaatatcgtggatattcttggyaaggtcaaccaacattcactcttacttttggatgagttgggggctggtactgatccccaagagggagcagcccttgccatggctattctggaggaccttcgcctgcgtcaaatcaagaccatggcgacgacccactatccagaactcaaggcctacggtattgagacagcctttgtgcaaaatgccagtatggagtttgatactgcaactcttcgcccgacctatcgctttatgcagggtgttcctggccgaagtaatgcctttgaaattgccaaacgtctaggcctatctgaagttatcgtaggagatgccagtcagcagatcgatcaggacaatgacgtcaatcgtatcattgagcaaytagaagagcagacgctggaaagcsgcaaacgyttggacaatatccgtgaggtggagcaagaaaatctcaagatgaaccgtgygctaaaaaaactctacaacgagcttaatcgtgaaaaggaaaccgagcttaacaaggcgcgtgaacaggctgctgagattgtggatatggccctaagtgaaagtgaccagattctcaaaaatctccacagtaaatcccaactcaagccccacgaaatcattgaagccaargccaagttgaaaaaattggctcctgaaaaagtggacttgtctaaaaayaaggtccttcaaaaggcyaagaaaaaacgagctccaaaggtgggagatgatatcgtggttctcagttatggtcagcgtggtaccttgaccagtcaactcaaggacggycgctgggaagcccaagttggcttgattaagatgaccttggaagagaaagagtttgatcttgtycaagcccagcaagaaaaascagtcaagaagaaacaggtcaatgttgtgaaacgaacttctgggcgaggacctcaagctagactggatcttcgaggcaagcgctatgaagaagccatgaatgagctagatrccttcatcgaccaagcyttgcttaacaatatggctcaagttgatatcatccatggtatcggaacaggagtcatccgtgaaggagttaccaaatacttgcaaagaaacaaacatgtcaagagtttcggctatgccccacaaaatgctggaggcagtggtgcgactattgtcacttttaaaggatarctaat

SEQ ID NO: 1185 - DNA, 993 bp, Streptococcus pneumoniae
  misc_feature (1)..(993): tiling:Spneumo1:WAN024FL9; Cluster includes WAN023OS6 pne7 5_12||||8340..9332|+|993 bp|Type 35A2 capsule operon, Glim mer 2.02 orf prediction|S.pneumoniae||WAN01UCEX|ORF|000
atgaataagattaryttaactgataatttaccgttaatttcagttgttttaccagtatacaacgtagagaattatttagaaaartgtttgaattctgttgtgagacagacgtataaaaacatagaaattataatagtaaatgatggyagcttagattcttcaatagatatttgtaataagtatgcaaataaagatagtcgaattaaagtatttacaaaacctaatggaggtttgtctgatgctagaaatttcggtrtcaaaaaatctatgggtgagtttataacattcgttgattcagatgactatgttacagatgattatgtagaatatttgtatagcttagtcaaaaaatataattgtaaaatgtcaatgtgttcaatatttgtccattatatttctaatgataaaatgatcaataatgggacaggaagagaattgatgatgacagcagagcrgtgtattgaaaaaatgtgctatcatgatgaggtggatacatgtgcttatgcaaaattatatcatagaagtctatttagtgaaatatgcttccctaaaggaaggatattcgaagatattggaacaatttatcgcttttttgrtactgctgggcagattgcctgtggttttaacgcaaaatattattatgagattcgggaaaattcgattgttacatcatcatttagtgaaaaaaaatttgatttgttatttatgacagatcaaatgcgaaattttgttgatcaacgytatccatctttgaaagctgcaacaaaacgtcgagctgtctatgcaagatttagtacccttaaccaattattrgatgtacaaggatataatgaagaaaaaaaagaaataattcgttttatccaagacaacaaggaagcgttacttgaaaatcctaagactcctaagcgggatagattagctgttagagctctctcccttggattttgcatttataaattgttatggaagcaatatytaaaaattcaaagaggt

SEQ ID NO: 1186 - DNA, 597 bp, Streptococcus pneumoniae
  misc_feature (1)..(597): tiling:Spneumo1:WAN024DKW; Cluster includes WAN0244O9 spr0 185|nrdG|15902229|NP_357779.1|194080..194670|+|591 bp|NrdD activating enzyme, generating glycyl radical|S.pneumoniae |R6|NC_003098.1|ORF|111
atgaataatccaaaaccacaagaatggaaaagcgaggaacttagtcaaggtcgtatcattgactacaaggcctttaactttgtkgayggmgaaggcgtgcgyaactctctctatgtakcaggytgyatgtttcactgcgagggrtgttataatgtwgcgacytggtcyttyaatgcwggcattccctatacagcwgarttrgaagarcagatyatggcagaycttgcccarccytatgttcarggsttracyttrctrggaggggarccttttctyaatactggsattctcttgccwctwgttaarcgsatycgraaggaattgycagacaaggacatytggtcctggacsggctacacttgggaagaaatgatgttggaaactccagataaactggaaytcttrtcaytgattgacattcttgtcgatggamgataygatcgaactaagagaaatctyatgctccagtttcgaggttcrtcyaaccaacgaattatcgatgtgcaaaaatcgctcaaaagtgggcaagtagtgatttgggacaagctcaatgacggaaaagaaagctatgaacaggtgaagagagaaykaactaat

SEQ ID NO: 1187 - DNA, 1136 bp, Streptococcus pneumoniae
  misc_feature (1)..(1136): tiling:Spneumo1:WAN024DDB; Cluster includes WAN02446A spr0 832|proB|15902876|NP_358426.1|832944..834074|+|1131 bp|Gam ma-glutamyl kinase|S.pneumoniae|R6|NC_003098.1|ORF|111
atgaataatcggagtgagactatgaaatacaaacggattgtctttaaggtgggtacttcttctctgacaaatgaggatggaagtttatcacgtagtaaggtaaaggatattacccagcagttggctatgctgcacgaggctggtcatgagttgattttggtgtcttcaggtgccattgcggctggttttggagccttaggatttaaaaagcgtccgactaarattgctgataaacaggcttcagcagcggtagggcagggrcttttgttggaagaatatacraccaatcttctcttgcgtcaaatcgtttctgcacaaatcttgctgacccaagatgactttgtggataagcgtcgttataaaaatgcccatcaggctttgtcggttttgctcaaccgtggggcaattcctatcatcaatgagaatgatagtgtcgttattgatgagstcaaggttggggacaatgacactctaagtgcycaagtagcggcgatggtccaagcagaccttttrgttytcttgacagatgtggacggtctctatactggaaatcctaattcagatccaagagccaaacgcttggagagaatcgagaccatcaatygtgagattattgatatggctggtggagctggttcgtcaaacggaactgggggtatgttaaccaaaatcaaggctgcaactatcgcgacggaatcaggagttcctgtttatatctgctcatccttgaaatcagattccatgattgaggcggcagaggagaccgaggatggttcttactttgttgctcaagagaaggggcttcgtacccagaaacaatggcttgccttctatgctcagagtcaaggttctatttgggttgataaaggggctgcggaagctctctctcaayatggaaagagtcttctcttatctggtatcgttgaagcagaaggagycttttcttacggtgatatcgtgacagtatttgayaaggaaagtggaaaatcacttggaaaaggacgcgtgcaatttggagcatctgctttggaggatatrttgcgttctcaaaaagccaagggtgtcttgatttaccgtgacgactggatttccattactcctgaaatccaactactttttacagaattttarctaat

SEQ ID NO: 1188 - DNA, 678 bp, Streptococcus pneumoniae
  misc_feature (1)..(678): tiling:Spneumo1:WAN024FNA; Cluster includes WAN023P7B pne5 3_13||||5662..6339|+|678 bp|Type 25F capsule operon, Glimm er 2.02 orf prediction|S.pneumoniae||WAN01UCCQ|ORF|000
atgaataatcgtatagtagacatcagtttgtttgatttattgaatgtcttatggcttcgtaaatggatcattgtttttgtatcatttgtttttggatgtatttcttttttatattatcaattttttgtacccaaaacctatacaagtgatactcgtatatatgtggtaagcaaaggggataataaaaatctgtctaatgcagatttgcaagcaggaagtgctctaacaaaggattacaaagaaatcattttatcagatgaagtgttagaagaaacaatttctgatttaaaactagaatcaactttggaatctctagcttcgaaaattaaaatttctatccctgcggaaactcgaattatttccattagtgttacaaatacgaactcagatgaagctgctcgaatagcaaatgggataaggaaggtagctgcccttaaaatcaaggaagtaactcaagttacagatgtcaccactttacagactgcacgccctccccaaactccgtcaggaccgcatgtgcgaaaatctactacagcagggcttgttcttggtgcattcttaacagtctttctagtagttgccaaggaaatattagatgatcgcataaaacgttttgaagaacttgaaaaattgggaatccctattttaggctcaatmcctttatcaaaaaatataaag

SEQ ID NO: 1189 - DNA, 435 bp, Streptococcus pneumoniae
  misc_feature (1)..(435): tiling:Spneumo1:WAN024ERD; Cluster includes WAN02422R SP16 20||15901457|NP_346061.1|1520171..1520599|-|429 bp|PTS sys tem, nitrogen regulatory component IIA, putative|S.pneumon iae|TIGR4|NC_003028.1|ORF|010
atgaataatctttcgcttgtccttatggatatatctgttcaaaatcgtcaagaagcctacaaagaattagcaaatcaaatcagccttcttgtttctgaagatacagaaaaaatagaagagcttctatattaccgtgagagacagggaagtatagaggttgctaaaggtgttcttctaccacattgtgaaggaaactttcaacatcatgtcttagtgattactagattaaaatcacctatcagagaatggtcgaaggatatccagtgtgttgaccttattatcggtttggccattgcagtatcacaggacaagtcatgtattaaaacattgatgagaagactagcagatgaatcattcataaatcaattaaaacagttaacaaaagaagaattacgggagataatatatggaaatcaaagatattctctaactaat

SEQ ID NO: 1190 - DNA, 270 bp, Streptococcus pneumoniae
  misc_feature (1)..(270): tiling:Spneumo1:WAN024DA9; Cluster includes WAN0243YS spr1 103||15903146|NP_358696.1|1104862..1105125|-|264 bp|Hypoth etical protein|S.pneumoniae|R6|NC_003098.1|ORF|121
atgaataatttgtataaattagttccaacaagacgtttyatcaagcaattgaaaaaattggaccgttatacgcagaagctaattacaaactatttacaaaccaatgttttggaagacccaagacgacacggaaaggctttggttggtaatcgcgttkgtcaatggcgctatagaattggtaattatcgagttatygtacaaattgtagatgatgaattagtygttgctactctagaagttggtcatcggagagatatttatykaactaat

SEQ ID NO: 1191 - DNA, 198 bp, Streptococcus pneumoniae
  misc_feature (1)..(198): tiling:Spneumo1:WAN024GL3; Cluster includes WAN0242UW SP05 31||15900444|NP_345048.1|511718..511915|+|198 bp|bacterioc in BlpI|S.pneumoniae|TIGR4|NC_003028.1|ORF|021
atgaatacaaaaatgatggaacaattttctgttatggataatgaagaactcgaaatagttagtggaggaagaggcaatttaggatctgcaatcggtggttgtattggagcagtactattagctgctgcgactggtccgataactgggggagcagcaacacttatttgtgtaggttcaggaattatgtcctctttgtaa

SEQ ID NO: 1192 - DNA, 201 bp, Streptococcus pneumoniae
  misc_feature (1)..(201): tiling:Spneumo1:WAN024GKX; Cluster includes WAN023QPM cont ig_1336_13||||9418..9618|+|201 bp|Glimmer 2.02 orf predict ion|S.pneumoniae|670|WAN01UE74|ORF|000
atgaatacaaaaatgatgkmacaattttctgttatggataatgaaatgcttgataggatagagggaggaatatttggagttgacgatgctttgttttgggcagggttaggctatgttgcaggtagcattgttgatacagcaattgatgattttacgaatcaatgccggaaaaatcctcatcagtggttctgtgttcgtgta

SEQ ID NO: 1193 - DNA, 276 bp, Streptococcus pneumoniae
  misc_feature (1)..(276): tiling:Spneumo1:WAN024GKZ; Cluster includes WAN0242UV SP05 32||15900445|NP_345049.1|512382..512651|+|270 bp|bacterioc in BlpJ|S.pneumoniae|TIGR4|NC_003028.1|ORF|011
atgaatacaaaaatgttgtcacagttagaggttatggatactgaaatgcttgcgaaagttgaaggggggtatagctccactgattgtcaaaatgcactgattacaggagtcactacgggaattataactggtggaactggagcaggtttggccactttaggagtagctggacttgctggtgcatttgttggagcacacattggtgcaattgggggtggattaacatgcttaggaggtatggttggtgataaattgggactaagttggctaactaat

SEQ ID NO: 1194 - DNA, 1697 bp, Streptococcus pneumoniae
  misc_feature (1)..(1697): tiling:Spneumo1:WAN024DYX; Cluster includes WAN0243CZ spr1 890|argS|15903931|NP_359481.1|1869051..1870742|+|1692 bp|A rginyl-tRNA synthetase(arginine--tRNA ligase) (ARGRS)|S.pn eumoniae|R6|NC_003098.1|ORF|331
atgaatacaaaagrattgattgctagcgaattrkytagcatcattgatagcmtggaccaagaggywattttaaagttactggaaacccctaaaaactcagaaatgggdgacatygctttccctgctttttctcttgcmaaagtcgaacgtaaagcaccacaaatgattgcgrctraactggctgaaaaaatgaacagccargcctttgaaaaagttgtcgcaacaggaccttacgttaactttttccttgataaatctgccatttctgctcaagtattgcaagctgttacmactgaaaaagaacactatgctgaccaaaatattggyaaacaagaaaatgttgttatcgacatgtctagtccgaatatcgctaaaccattttytattggccacctgcgttcaactgttatcggagatagcttgtcacatattttccaaaaaatcggttatcaaacggtcaaggtcaaccatttgggagactggggtaaacaatttggratgttgattgttgcctacaaaaaatggggcgacgaagaagctgtaaaagctcatccaatcgatgaactccttaaactctatgtccgcatcaacgctgaagctgaaaatgaccctagcttggatkaagaagcgcgcgaatggttccgtaaacttgaaaatggagatgaggaagctctcgctctttggcaatggttccgcgatgaaagtttagtggaatttaaccgcctttacaatgaattgaaggttgaatttgacagctataacggagaagccttctacaatgataagatggatgcagttgtagacattctttctgaaaaaggactacttcttgaatcagaaggtgcccaagttgtsaatcttgagaaatayggaattgaacatccagcyctcatcaagaartctgatggtgcaactctctatatcacacgtgacttrgctgcagccctytaccgtaaaaaygaatacsaatttgctaaatctatctaygtcgttggtcaagarcaatctgcccactttaaacarctcaaagctgtcttgcaagagatgggctacgaytggagtgacgacattacycacgttccttttggtytggttacaaargaagggaagaarctctctactcgtaaagggaatgtcatcttgctagagcctactgttgcagaggctgttagccgtgccaaggtccaaatcgaggctaaaaatcctgaactagaaaacaaagaccaartagcacatgctgttgggrttggagccattaaattctatgacctcaaaacygaccgtacaaatggatacgacttcgacctagargctatggtatccttcgagggtgaaactggaccttacgttcaatatgcctacgctcgtatccaatctatcttacgcaaagccgatttcaaaccagaaacagctggcaactatagcttgaatgatactgaaagctgggaaatyattaaactcattcaagacttcccacgtattatcaaccgtgcggcagataactttgaaccttctatcattgctaaatttgcaattagcctrgctcaatcctttaacaaatactatgcacatacacgtatcttggatgaaagcccagaacgcgacagccgtctagccctcagctacgcaaccgcagtcgttctmaaagaagcccttcgcttgcttggagtagaagcgccagagaagatgtaactaat

SEQ ID NO: 1195 - DNA, 849 bp, Streptococcus pneumoniae
  misc_feature (1)..(849): tiling:Spneumo1:WAN024CZ4; Cluster includes WAN0243CC spr1 913|rrmA|15903954|NP_359504.1|1892472..1893320|+|849 bp|23 S rRNA m1G745 methyltransferase|S.pneumoniae|R6|NC_003098. 1|ORF|111
atgaatacaaatctcaagcccaaacttcagcgttttgcttctgcgactkcctttgcctgtcctatctgtcaagaaaatctgactctgttagagactaatttcaagtgctgcaaccgtcattcttttgacttggcgaaatttggctatgtcaatctagymcctcaaatcaagcaatctgctaactayracaaggaaaattttcaaaaccgtcaacaaatcytagaagccggcttttaccaagctatcttagatgctgtatctgacttgcttgcaagctcaaaaactaccacaacaattttggatatcggttgtggtgaaggattctattctcgcaaactacaagaaagtcactctgaaaaaactttctatgccttygacatctccaaagattcagtccaaatcgckgctaaaagtgaacccaactgggcagtcaattggttygttggcgacttggcacgmcttcctawmaaagacgctarcatggatatyctgcttgatatcttctcacctgccaactatggagaatttcgtcgcgttttatccaaagacggtatcttgataaaggttatcccaactgaaaatcacctcaaagaaatccgtcaaagagtacaggaccagctgacaaacaaggagtattctaaccaagatatcaaggagcatttccaggaacactttaccatcctatctagtcaaactgcctctctgactaagactatcacagcagaacaactccaagccctactcagtatgactcctctcctctttcacgttgaccagwgcaarattgactggwgcmaactgacagagattacyatcgwagcagagattytkgttgggaaagcattctaa

SEQ ID NO: 1196 - DNA, 1353 bp, Streptococcus pneumoniae
  misc_feature (1)..(1353): tiling:Spneumo1:WAN024GNE; Cluster includes WAN023ZC4 AL44 9924.1_101||||72426..72722|-|297 bp|Glimmer 2.02 orf predi ction|S.pneumoniae||AL449924.1|ORF|001
atgaatacaatgttggataaaatgcaagaaaaactttctccaattgcaatgaaagttgggaatcagaagtttttagttgctttacgtgattcatttgtggggactatgcctgttattatgacaggttccattgctttgttattaaatgcttttctagtggatttaccacaacaatttcacctagaaagtattacgaaaacctttcagtggcttgttgacatcaataatttggtattcaagggaagtataccaattgtttccttgttgttcatctattgcttgggagtgaatatcgctaagatttacaaggttgatacagtttctgctggtttggtatcacttgcttcgtttgtcatttcgattggaagtacagttacaaagagtttccctttggcaaatgtaggagatgtgaaattagatcagatcttacaaggaattgataatctagcatttgatggtaaaaatctgatggtaactattgggaatgtgattccaggaaaccatattaatgccagaggctactttacagccatgatgattggatttttagcctctattattttctgtaaagtaatgaaaaagaactgggtaatcaagttaccagattcagttccccctgcgattgctaagccgttcacttctatcattccaggatttatggcgatgtatatagtagccatcttgacttatgttttccatttacttagcaatgacttattgattgattgggtttacaaggtgttacaaacgccattactaggtttgtctcaaagtttctttgcagttattctgatgatctttttgaataagttattctggttttttggtctccatggaggaaatgtattggctcccatcatggaagggctatttggagttgctatgttagcgaatctggatgctttccaaaaaggtgaaccgattccttatatatggacaagtgggtcttttggggcgtttgtctggtttggaggattaggattagtacttgctattttaattttttcaagaaacagtcattatcgaaaagttgctaaacttggtctagcaccagttctgtttaatattggtgagccggtaaattatggtttaccagttgtcttgaatcctttgctatttataccatttgtacttagcccggttttcatggcaacggtagcttactgggcaacaagctggggtcttgtttcacctgttacacaaaatgttacttgggtaatgcctccaattttatatggtttcttctctacagcatttgattggcgtgccatcatcttatcagttgtttgtttgattattagtgtcttgacttatttcccatttgtgaaaatggcagataaaactgaattgagt

SEQ ID NO: 1197 - DNA, 360 bp, Streptococcus pneumoniae
  misc_feature (1)..(360): tiling:Spneumo1:WAN024CEH; Cluster includes WAN0240SR |||A AG38041.1|||357 bp|Orf25|S.pneumoniae||AF295925|ORF|001
atgaatacacgtgtctttaaagacatctcaaaataccaacacagggcttggttaggyttcacyacaagrcaaatcatctttgtyytaccagcctttattgtcacaattattgttttgggcttgaatctctttttctggcaatttggagattggtttgtttacggttttgtgtttgcytttaccawycccctcwtgctttttggagtctataaacccaatgatttatattttgaacattatttgaaataccgtcttcattttgaaytaacgrtwcccctacgcacaattwcaggaaagaaaggachtgaacatgaaaagaaaatcaaatacattaaagaaacaamarrcttcaaygactwa

SEQ ID NO: 1198 - DNA, 869 bp, Streptococcus pneumoniae
  misc_feature (1)..(869): tiling:Spneumo1:WAN024D2V; Cluster includes WAN0243GH spr1 763|plcR|15903805|NP_359355.1|1730704..1731567|-|864 bp|Tr anscriptional activator|S.pneumoniae|R6|NC_003098.1|ORF|11 1
atgaatacactcgcagagaaattcagattgaaaagaaaagagttgagactctcccaacaaactcttgcagaaggaatttgtgaacaaagycagattagtaaaattgaragaggkcatttyattccctccgcagacytkttrttcaaactctcwcaacgacttgaagtmccwttrgattaytttttyaatgaacaaatygaarttaartctaacctctctaatttcaarcawytrtctgctcgmctattagaygayagaaattatgahratttrgaatatmtttataraatwgarrtwgaacgaagyacttttctaacaytagaagaccgaacttaycttgaatggattaaakctatwattgacttctatcaatatgayagtaagtgtgaggcwatttcktcattggaaaatatattattaaaagtctcytcaaatactctgatttatttaaaggcrttgaatactctatctaatttctattccttagtgggtcgtgaacaagaatatgaggcaaactactctcatttaatrgagttrtatcagacaaaaaatttkgascatcaagrgtttttrtttggytayatcaragttcgttacaactackctcactacctagtrtcaaaggaaaaatataaygaagcyatccaagaagctcttgaracgattgaactctgtaaacaaagacagacaagctaccaaytggctccyctacttattcttgtaggaaatgctggagccaaatttctagacaragaacaagtcaaaaattattatatagaagcaagagagttatgtaagatttataacaatcctttaatgttgatgaagatagaaaattatttgaaggaaytagatactgtttarctaat

SEQ ID NO: 1199 - DNA, 578 bp, Streptococcus pneumoniae
  misc_feature (1)..(578): tiling:Spneumo1:WAN024EUA; Cluster includes WAN0244MR spr0 239||15902283|NP_357833.1|233107..233679|+|573 bp|Hypothet ical protein|S.pneumoniae|R6|NC_003098.1|ORF|111
atgaatacagtgaaaaataagcaagaaatcttagaggcttttagagaaartccagatatgatggccattctgacgatcatccgagaccttggtytgaaagactcgtggttggcagcaggttctgtcagaaatttcatytggaatctyttgtcagacaaatcmccttttgayywtgaaacagatrtagatgtgattttctttgatccrgatwtttcttatgaggaaaccttattactgragaaaaagctgmgagaggattttcctcagtaccagtgggaattgaaaaatcaggtctatatgcatcagcacagtcctcacactgcttyctataccagttctcgtgatgctatgagtaagtatccagaacggtgtacgrcagttggactgcgcttgaatgaagaatyagattttgaactctatgyaccttatggtttggaggatattttgaattttcaagttcgtccaactcctcatttcttagaaaatgaagaccgaatggaactctatcaaacacgtttatycaagaaaaattggcaggagaaatggaaaaatttgatttttaaaaatacttaactaat

SEQ ID NO: 1200 - DNA, 2241 bp, Streptococcus pneumoniae
  misc_feature (1)..(2241): tiling:Spneumo1:WAN024C9S; Cluster includes WAN023R0Z cont ig_1420_8||||5599..5808|-|210 bp|Glimmer 2.02 orf predicti on|S.pneumoniae|670|WAN01UDWM|ORF|001
atgaatacattattgacattacgaggtaaaagttttacacaaaaatcaagaaataatggtatgggaccaataactatacccaaaaaaacaataattacattggaacatttgaagtatcttcatttttcattagaagagacgaaaacatattgggagaaaaataacattatcgatggtattttgatcagtatttactataatcgaattgttgccaaaagtaaccgtattaatggctatttcaatgtaggaggagggaatccattccctaatgatactattgtgggagcaaaattcaatgatgagaagacaaaacatattgttactcattatatttctagagatgctcttaataaaacaataaccgttttaagtaagataattgaagtttttgaggaacattttgatagagcgataacatgtgagatgttttctgattcatcaacgtttgcttctataaatttttcggagtatggtatttcaaaaagcaaatttcaacagtatttgagagattcttgctttattgagaattttggagttgagcacactactgtttctgatattcaaaattctatcgtgacattttatgatgtccatacagacatttttagattactgaataaattaaatattgatatttcagaagctaatatcatgaatcagaccacggtcttgcttgatgaaaaaaatattgaattgctactatcaaaagcgccctatcttgtctccatgattgtggaagatttttctaagttatctgtagatgatttttctttagataataatgatttaaaaataaatcttccatctccaatgaacgaaccagttgttggcgttattgataccttatttgacaaaagagtttactttaatgagtgggtagaatatcatgattttgtctcacctgatattagcaaagatagccaagattacaagcatgggacagctgtgacttctttaatcgttgatggagccaatttgaaccctaatctggatgatggttgtggaaattttagagtgaggcattttggtgtgtcactacaaagtggatttaattcatttacaatcataaaacagataaaagagattgtttctcagaatgctgatattaaggtttggaatctttctttagggtccaatgatgaaataagagaaaattttatctctgcagagggagcattattagacgaaattcaatttgagaatgatgtaatttttatcatagctgggacaaatgcttcagtaataaatgggaaacgcaaaagaataggtgctcctgctgattcacttaattctataatagtaaattctgttgattttaataatcaatcagtgtcatattcacgagagggtattgttttatcattctttgttaaaccagatgtgtcatattatggaggaggaaatggtgactttataaatgtttgtgaacctctaggattaggtcgtgtagctggaacaagttttgcggcaccttttattgcaaggaaaatggcctatctcattcatattatgggacttagccgagaagaagcgaaggctttgctaattgatgcagcaataccctggaatgataagaaaacattcactgatttatctttgataggaaatggtattgttccaataaaaatggatgatattttatctacacctgatgatgaaattaaatttattgtgtcagatatctctagggcttatgatacctataattatgattttccagtacctatttctagtgagagttatccatatgtagctaaagcaacaatgtgttatttccctaactgctcaagaaaacaaggggttgattatacaaatactgagatgcagcttacttttggtaggttaaagtcagacggtatcaaatcgataaataaagacaaccagcatgccgaagataccccaggatatgtgagagaaaacgctgctagaaatatatttaggaaatgggataatgtcaagcatattggagagtcgtttacttctcgaaagagagctaaagcaattttaaatccatctaatcctcagtgggggatgagtattaaaacaatcgaacgtttgaaaagcggtgatggacaaggagtacgttttggtgtagtagttacattaaaagaattaaatggggttaatcgtattgaagattttattcagcaagctgaattacgcggttggctagttaatagattgcaagtagaagctcaagtagacctctttaatagtttaaatgaagaaattgaatttgaa

SEQ ID NO: 1201 - DNA, 1422 bp, Streptococcus pneumoniae
  misc_feature (1)..(1422): tiling:Spneumo1:WAN024CCX; Cluster includes WAN02406R |cps 19fJ||AAC44967.1|||1422 bp|possible polysaccharide transpo rt protein|S.pneumoniae||U09239|ORF|000
atgaatactaaaattaaaaatataataactagtttttcttatgttatttcttcaaatctgctcatagttttaacctcatcactagttgttttgattkttcctaaaataatgggggtaactgagtacagttactggcaactttatattttttatctgacctatatcggttttttccacttgggttggattgatgggatttatctcaaatatggtggcttagaatatacaaatttagatagaaaacagttttattctcagatgattctattttctagtttcttaatgctaatctcgctggtattatttactttgaacctaataactgtaagggatgaaaacgcaagatatatttataatatggctatcatyagcatgayagtcacaaacttaagaacactctatgtttatatcttgcagatgacaaatcgcttgaaggatagttcagtcattctaattagtgatcgcgttttatatgtactccttttattcatgtttattgtatttggatggcatgagtacaaggtcatgatttgggctgatattctaggtcgaacattttctctcatgctttccttctggatttgtaaagatattgtgtttcagcctttgtcaaaatttatcttagatttcaaggagtcccttgataatatccgtgttggaatcaatttaatgctatctaacattgcgagtagcatgattataggcattgttcgtatgggaattcaatggaattggaatattgaaacattcgggaaagtgtcattaactttgagtatatctaatttattaatgacttttattaatgccattggattagttatctttcctttgataaagcgaacaaagactgagaatttacctaaaatttattctaatttaagaaatgctttgatgttggttatgttcgcaatcttgctcttctactatcctttaaaatttatycttgatatttggcttcctgcttataaggatgccttagttttcatggccctaatttttcctatgtcagtttatgaagggaaaatggctttggtgataaatacatatttaaaagcaatgagaatggaaaaagacattctcaaaattaatgctttggttatgttaactagtatrgtagtgacattagtgactactmtactactaaataatttggggctgacagttgtatctatagttattttacttgctttaagaagtataatagctgaattaattttatccaaaaaactgaagatatcagtcaagcaagacattgctttagagttacttatgacgattatatttatttcttcaagttggtatctctctatttggattgcagtaataatttatttattggcgtatactttatatttgtatttaaagcacaaagatatcagaatgtatatagaatactttaaaaatcataaaaaaatatcataa

SEQ ID NO: 1202 - DNA, 210 bp, Streptococcus pneumoniae
  misc_feature (1)..(210): tiling:Spneumo1:WAN024GKY; Cluster includes WAN0242UN SP05 40||15900453|NP_345057.1|515361..515564|+|204 bp|BlpN prot ein|S.pneumoniae|TIGR4|NC_003028.1|ORF|010
atgaatacttattgtaatataaatgaaacaatgctgagtgaggtttatggaggtaattccggaggagcagctgtagttgctgctttaggttgtgcagcgggtggagtgaaatatgggagacttctaggaccatggggcgctgcaataggaggaattggaggagcagtggtttgtggatatttagcctataccgctacatcactaactaat

SEQ ID NO: 1203 - DNA, 1769 bp, Streptococcus pneumoniae
  misc_feature (1)..(1769): tiling:Spneumo1:WAN024G7C; Cluster includes WAN024432 spr0 948|nplT|15902992|NP_358542.1|931945..933708|+|1764 bp|Neo pullulanase|S.pneumoniae|R6|NC_003098.1|ORF|121
atgaatactttaggagacaaattgatggaattgagtgctatttaccatrggmctgagtcggagtatgmctatctttataaggatwagaaactccatattcgaattcgaactaagaaaggggacattgaaagcatcaacttgcactatggggacccttttatctttatggaggagttttatcaggatacaaaagaaatggtcaagataacttctggtaccttatttgaccattggcaggttgaagtgtcagttgactttgcacgtatccagtatctytttgagctcagagatacagaaggtcaaaatattttgtatggcgataaagggtgtgtggaaaattctctagaaaatcttcatgcaattgggaatggatttaagttgycttakcttcatgagattgatgcctgcaaggttcctgactgggtttcaaatacggtatggtatcagatatttcctgaaagatttgccaatggcaatgctctattaaacccagaagggactttagactgggattcatctgtcacacctaagagcgatgatttctttggtggtgatttacaggggattattgatcatatgrattacttgcaagacttgggtattactggactatatctttgtcccatctttgaatctacaagcaatcacaagtacaatacgacagattactttgaaattgaccgtcattttggagacaaggagacctttcgggaactggtggatcaagcgcatcatcgtggcatgaaagtcatgctggatgcggtatttaatcatattgsttcgcaatctcttcaatggaaaaatgtcgtcaaaaatggtgaacagtctgcttataaggattggttccatattcaacaattcccagtgacaactgaaaagctagttaataagagagacttaccctatcatgtttttggtttcgaggactatatgcctaagctaaatacagccaatccagaggtcaagaattatcttttaaaggttgcgacttattggattgaagagtttaatatcgatgcttggcgtttggatgtggctaatgagattgaccatcagttctggaaggattttcgtaaggcagttttagctaaaaatcctgatctttatatcctaggagaagtctggcatacatctcagccttggctaaatggagatgagttccatgccgtcatgaattatcctttatctgatagtatcaaggactatttcttacgaggaattaagaagacagaccagttcatcgatgaaatcaatggagagtctatgtattacaagcagcagatttcagaggtcatgtttaatctcttggattcacatgatacagagcgaatcctgtggacggccaatgaagatgttcaactggttaaatcagccttagcctttctctttttacaaaaaggaacaccgtgcatttattacgkaaccgagcyagccttgactggaggaccagatccagattgtcgtcgttgtatgccttgggaacgtgtatcaagtgacaatgatatgctgaactttatgaagaggctgattaarattcggaaatacgcgtcagtaatcatttcgcatggcaagtatagccttcaagaaatcaamtctgatctagtagctctggaatggaaatacgaaggacggatcctcaaagcaatattcaaccaatcaacagaagattatcttttagagaaagaagcagtagcactagcaagcaattgccaagaattggakaatcagcttgtcatctctccagatggatttrtgattttctaactaat

SEQ ID NO: 1204 - DNA, 324 bp, Streptococcus pneumoniae
  misc_feature (1)..(324): tiling:Spneumo1:WAN024DAG; Cluster includes WAN0243ZO spr1 071|lacF|15903114|NP_358664.1|1070343..1070660|-|318 bp|PT S system, lactose-specific IIA component|S.pneumoniae|R6|N C_003098.1|ORF|111
atgaatagagaagaagtaacattgttaggttttgaaatcgtagcctatgctggcgatgctcgttcaaaactattggaagccttgaaggctgctgaagctggtgattttgaaaaagcggacgctctggtagaggaagctggtagctgtattgcagaggctcaccacgcgcaaacaagtctattgactaaggaagcttcwggtgaggacttrgcktatagtgtraccatgatgcatggycaagaycacttratgacaactatcttgttaaargayytratgcaycatttratygaactytayaagagaggagttmaamtaactaat

SEQ ID NO: 1205 - DNA, 638 bp, Streptococcus pneumoniae
  misc_feature (1)..(638): tiling:Spneumo1:WAN024GDU; Cluster includes WAN0244BP spr0 637|thiE|15902681|NP_358231.1|644210..644842|+|633 bp|Thia mine phosphate pyrophosphorylase|S.pneumoniae|R6|NC_003098 .1|ORF|111
atgaatagagaagcacttagactatatctggtaaccaatcgctatcaagattccgtggaaagctttcttgcaaaagttgagacggcctgccgttcaggggttaccatagtccaattgcgagaaaaaaatctcacaaccaatcaatattatcaactggcaaaacaagtcaaggaaataacagatgcttatcaggtacccttgataatcgatgatcggttggatgtttgtcttgcggttgatgcwgcwggtctgcatatyggagatgaygaaytmccagtttcggtwgcycgmmaagtcttgggtcctgaaaaaatcctcggtgtcaccgctaaaacggttaaaagagctctggaagcggagaaatcaggtgcagattacttgggkacaggagccattttyccracmaccaccaaggaaaatgcrcccatyacyctgatwtcraccttgaaaacaatttgccaaacggttgccattccartagttgctattggmggcttgacwtcrgagaatattgatcagcttatggrcactggcatagctggtgtagctgttgtacgtgatttgatgcaagcagaagatattgaggcaaaaacgcaagcctttttaamaaagttgcatracattctttcctaactaat

SEQ ID NO: 1206 - DNA, 924 bp, Streptococcus pneumoniae
  misc_feature (1)..(924): tiling:Spneumo1:WAN024CO7; Cluster includes WAN0241Y1 SP17 98||15901627|NP_346231.1|1714242..1715159|-|918 bp|ABC tra nsporter, permease protein|S.pneumoniae|TIGR4|NC_003028.1| ORF|011
atgaatagcaaagcgaagcaagtttctctttgggaaagaatcaagaaacaaaaactcttgttattgatgactgtccccggtttagttttaacctttatctttaaatacatccctatgtatggggttttaatcgcatttaaagattacaatcctttaaaaggaattttagggagtgattggattggtttttctgagtttacaaaattcatatcctctcccaactttggtatcttgttagccaacacattaaaattaagtatctatggtttattgcttggctttttaccaccaatcattctygckattatgctcaatcaactcttgagtgaaaaagtcaaaaaacgaattcagctcattttatacgcaccaaactttatctcagtcgttgttattgtcggtatgattttcctcttcttttcagtgggaggaccaatcaacaattttctttctatgtttggaatgaaggctgacttcttgacaaatccagacttctttagaccyttatacatctttagtggtatctggcaaggaatgggctgggcttcaacgctctacacggcaacattggtaaatgtagatccagccttagtagaagcagcycgactggatggagccaatatcttccaacgaatctggcacattgatattccagctcttaagcctattatggttatccaatttgttttagctgcaggtggaattatgaatgtcggatatgaaaaagcattcttgatgcagacatcgttaaatttgccaacttctgaaattatctcgacatatgtctataaagttggtcttgtatcaggagactattcttactcaacagcggttggtttgtttaatgcagtgattaacgtagtattgcttgttgcagttaaccaaatcgttaaacgcatgaataatggtgaaggaattctaactaat

SEQ ID NO: 1207 - DNA, 515 bp, Streptococcus pneumoniae
  misc_feature (1)..(515): tiling:Spneumo1:WAN024DHX; Cluster includes WAN0244GU spr0 452||15902496|NP_358046.1|459320..459829|+|510 bp|Hypothet ical protein|S.pneumoniae|R6|NC_003098.1|ORF|121
atgaatagcagagtagaatttcggattttcaccattgttgatttggacaagraagaagaayatttacatgagatgcatttgaaaggttggaggtatagaackagtcgttttggtttgttctattttgascaakgtcaaccrgacgatgtyatctaycgtatctatgattctagatttcttaaaragyataakmrtgaactgcaagattttagagatagaggttgggaattgataggagcaggttcttgttcgattcttcgtaaatcgtcttctgatttacttccagaggwtcaagtctatatgagtaargggctcaaatgggaagttatgcgatctagacttcgttcctgtayagctactttctyaggtggtcttgttgtttgtatgagtttgtttagagaggatctttctatgtctttctttcttatttttgttttatatgcttttctgatttcttatctaattyatggttatttcagactaaaaaggaaataccgagtagatgaatarctaat

SEQ ID NO: 1208 - DNA, 228 bp, Streptococcus pneumoniae
  misc_feature (1)..(228): tiling:Spneumo1:WAN024G98; Cluster includes WAN023LMT 3146 57_1565a||||834366..834593|-|228 bp|EGAD orf prediction|S. pneumoniae|R6|NC_003098.1|ORF|110
atgaatagtagtcgtctccaagcccttcttcaaggctgtgacaatggcatgggttgtttgataggcatccttaccactacgaagaacaaccgcatttccactcttaagagtcaaagcagccgcatcagacgtcacatttggacggctttcatagataataccgatgacacccatagctacacgtttttttgtgataaccaaaccattttcaagctgacttgtttctaa

SEQ ID NO: 1209 - DNA, 597 bp, Streptococcus pneumoniae
  misc_feature (1)..(597): tiling:Spneumo1:WAN024C82; Cluster includes WAN023QQM cont ig_1343_2||||2524..3120|-|597 bp|Glimmer 2.02 orf predicti on|S.pneumoniae|670|WAN01UE6I|ORF|000
atgaatataatttttgatttagggaatgtgttgattgaatggaataaagaaaaaattttatcaaaaatctgtaagaatgatttagaatataatttatttaataagttkgtatttcaatctaacttgtggattgatttggataatggtaaaattagtttagagttcttagagaatcaattaatcgatgaaatgggacatcaatatcaggatcaaattcatgagttagtatggaattggtttaactatgttgatttatatgatgaagtttatgaattaataaaacagctaaagaaaaagaattttcaaatttatgttttatcaaatacctcctcaatttttcatattttattagattctgttctatctaaagtatcatctgttttagatggttacgtaatttcttgtgaagttaaaatgatgaaaccacaaaaagaaatttacttgtcattagttaataaatatcaattagatataaaagattgtatatttttagatgatttagaagaaaatgtagaagctgcaagaactctaggtattaaagcatttcaaattaaagagcgtaaagagatctcaaatatactaaaagatctcttaaac

SEQ ID NO: 1210 - DNA, 1173 bp, Streptococcus pneumoniae
  misc_feature (1)..(1173): tiling:Spneumo1:WAN024DLK; Cluster includes WAN0244PJ spr0 139|ugd|15902183|NP_357733.1|147932..149104|+|1173 bp|UDP- glucose dehydrogenase|S.pneumoniae|R6|NC_003098.1|ORF|131
atgaatatagcagtaattggtttggggcatgttgggctggcctacgcgttactatttgcatytaaatataaagttgttgcatatgatatagattctgtaaaaataaataatttaaaaaagggcattcttccatctaaaaatgaagagcttatgaagtttttttgcgagaataacttaaatattactttttttgatacattttctgaaattaaaaataatattgattattatattattgcgcttccgacagattatgatgagaaaatwggtagttttaatacatatgaaatcgaacaaacggtatcgaagattctgagggtaaaacctaatggaaagattattttaaagtcaacagttccgwtcggcttttcaaacaaattaaaaaggctgtttgatacaaaaaatatcatttttgtccctgaatttttgagagaaggttgttctatatatgataatttatatccaagtcgcatagttgttggagatgagacagttgaaggaagaaaaattgcagagttgttcctttcgattagtactmatagtactgccaatattaaaaatgttatgttagtttctcctactgaagcagaagcaattaagcttttttctaacacattcttagctctccgtgttgctttttttaatgaactarmtwmttttgctgagaggagaagtttaaatgctgaagttgtaataaaaggtgtttgtttagatccaagaattggaaatttttataataatcyttcttttggatttggaggatattgtcttcccaaagatactaaacaattaaaaaaagaatttatagaaataaatgccccagtgatagaagcgattgatatttcaaacacaaatagaaaacagttcatagttaaacaaatattggaacgaaagccaaagatagtaggaatatataaattggggatgaaatataattcagataattacaaagagtcagctattttaagtataattaatgaactattgattgtcggtataaaaattttagtatatgaaccaaatttaaacgttagtatagataacgtaattwttgaaaagaattttgaactatttacaaaacaaagtgatctaattgttgcaaatagatgggataggggccttgaagcttataaagataaagtttacacaagggggatctggataagagattaa

SEQ ID NO: 1211 - DNA, 945 bp, Streptococcus pneumoniae
  misc_feature (1)..(945): tiling:Spneumo1:WAN024CDD; Cluster includes WAN02411C |cps 6aP||AAL68421.1|||945 bp|putative galactosyl transferase|S .pneumoniae||AF246898|ORF|000
atgaatatagtttatgccacagataataattttgtagatgtattgagtgcttcyatcaaatcactttacactactaattcagatttggatttaaatttatggattattgctgataaagtttcggatagaaataaagaaaagataaatagattatcaaaacaatttgcgcagagagaaattaattggatagagaacgttgagatcccatttaaattacatttagataggggatcaattagttcatttagcagattatttctgggaagtgttcttccatcttcaatgagtaaagttctttatcttgacagtgatattattgttatggattctttacgaagtatttttgatattgattttaagggtaaaattctctatggggtgaatgatacttttaataaagaatacaagcaggtgttgggtataccaattgacaagccaatgtttaatgctggagttatgcttattaatttagagttatggagaaataataacgtcgaagaaagatttttgcaagtaattcaaaagtttaatggtactatattacaaggagatttaggggttttaaatgcagttttatataactcatttggtgtacttcctccagaatataattatatgaccatatttgaagatttgacttatgaagaaatgatagtttttaaaaaaccaattaattattattcaaaagaggaaattaaaaatgccagagaacgtatagtcttacgacatttcacaactagttttttatcaaaaagaccttggcaagaaggcagtaatgttgcacatatagaccaatttaaaaaatactatgaaggtagttataaaaatgttaaagaatctattttactaaaaatagttcaaaaattacccaaaaaatgttcagtttttttattaggaattattcaatcaaaatttagacctaaattgtatagaattttgaaataa

SEQ ID NO: 1212 - DNA, 924 bp, Streptococcus pneumoniae
  misc_feature (1)..(924): tiling:Spneumo1:WAN024CD3; Cluster includes WAN023PIT pne3 3_16||||9493..10416|+|924 bp|Type 16A capsule operon, Glim mer 2.02 orf prediction|S.pneumoniae||WAN01UCI4|ORF|000
atgaatatatcaattgtattatcaacatttaatggtgatgaatatattgttgaacagttagatactctaagaaatcaaacgcgccttgctgaggaagtcttgattagtgatgatgcatctacagatgatactgttcaaataattgaagattatattgctaaatataagttggataattggtctataaaaaaaaawaaagagaatcaaggatggaagaataattttgccatgttattagaggaggcgaaaggagatatcgtttttctttgtgatcaagatgatatttggcatttagataaaattcaaaaaatgtctaagattatggaaaataatgataaaattttgttgttagcctctaattacacacctttttatgttggtgatggtgtcaagattaaattggataaaagtgatttggataatagtgaggcagtgtatcaaccaaattttttagataacttctttcatattagaaggccagggtgtgtttatgcggtgaacaaaaagattattccatattttttagaaatccgaagtaacgaagatgcacatgatgccttgttatggaggctagcttcgtttcttaatgggttatacatttactcctactctactatagattttagaagacacgatagcaacgcgactggtagcagagaaagaagtttcctaaggagaaaagagcaagttatttattatgatgatttgcttcagagattagataaatttagtaaacaacatgatttatcactttcaaatgaacaaattagtgttttgaacgactacattctatggggaaaaaatcgaagagaattgtttatgaaaaggaatgtatttatattttttaaattatttaaatatcataagttgtattggtcgttcaggtcatatattactgattttatagtgttatatatgaaggag

SEQ ID NO: 1213 - DNA, 1170 bp, Streptococcus pneumoniae
  misc_feature (1)..(1170): tiling:Spneumo1:WAN024CSP; Cluster includes WAN0242FL SP11 29||15900995|NP_345599.1|1063228..1064391|-|1164 bp|integr ase/recombinase, phage integrase family|S.pneumoniae|TIGR4 |NC_003028.1|ORF|010
atgaatatcaaagaaaaaatcaaaaagaatggccaaagagtttattatgctagtgtttatctaggcgttgaccaactaacgggcaaaaaagcccgtacaactgttacagcaaccactaaaaagggcgttaaagtaaaagcgcgtgatgcgatcaatacttttgctgctaatggctatacagttaaagacaagccgacaattacaacatataatgagcttgtaaaagtttggtgggatagttacaagaatacagttaagccaaatactcgccaatccatggagggattggttagagtgcatttattgcctgtatttggcgattacaagctatctaaacttactacgcctattcttcaacagcaagtaaacaaatgggctgacaaggcaaataaaggcgaaaaaggggcatttgctaactactctttgctccataacatgaataagcgtattttgaaatatggcgtagctatccaggtaatacaatacaacccagctaatgatgtcatcgttccacgcaaacagcaaaaagaaaaggctgctgtcaaatacttagacaacaaagaattaaaacagtttcttgattatttagatgctctggatcaatcaaattatgagaacttatttgatgttgttctgtataagactttattggccactggttgccgtattagtgaggctctggctcttgaatggtctgatattgacctagaaagcggtgttatcagcatcaataagacactaaaccgctatcaggaaataaactcacctaaatcaagcgctggttatcgtgatataccaatagacaaagccacattacttttactgaaacaatacaaaaaccgtcaacaaattcagtcttggaaattaggccgatctgaaacagttgtattctctgtatttacggagaaatatgcttatgcttgtaacttacgcaaacgcctaaataagcattttgatgctgctggagtaactaacgtatcatttcatggtttccgccatacacatactactatgatgctctatgctcaggttagcccgaaagatgttcagtatagattaggccactctaatttaatgatcactgaaaatacttactggcatactaaccaagagaatgcaaaaaaagccgtctcaaattatgaaacagctatcaacaatttactaactaat

SEQ ID NO: 1214 - DNA, 743 bp, Streptococcus pneumoniae
  misc_feature (1)..(743): tiling:Spneumo1:WAN024DXB; Cluster includes WAN0243BY spr1 927||15903968|NP_359518.1|1909881..1910621|-|741 bp|Hypoth etical protein|S.pneumoniae|R6|NC_003098.1|ORF|121
atgaatatgaaaaagaaacgtagattgttatytttgatgtctatkgtcttrrggttcttgggcatgtttgtagggatgtttaaggcacgtgtcgaatcccacgaaattattttagatgtaaaagccttgatgccatggatatcagctatttgtttactgataggtttcattagtatgtttttgactttcaatttcttaaagaaaagcagaaaatttcattcyttgtatcaagaggaaatggatgacgatctgaatgaaacctattatgtgcaaatgtatcggaatcttgagtttggaaccattgcttttaatattacaggtgtagcgattccattggctatttttatttcattaagtgaggtgattatattgcatacaaaccctcaaacatttttcctttctttcttactctttgtggtattcttagtcgctcaaaaatctctttttaaaaccattgcgattgttcgtcagtttgatttggaatttttcgctacaccaaaggatgtcttgaactatataaattcttatgatgaaggggagcgtcaggctaatttggaacagagttttcgaattttattccaattacaccaatatgtcttaccagccttatatatktttcttattatcatttctttcttgacaggagagattcagttactagctttcttgcttgtaggagccatccatgtttatatcaatgtgatgcagttacctatggtaaaacgttatttcaaataactaat

SEQ ID NO: 1215 - DNA, 891 bp, Streptococcus pneumoniae
  misc_feature (1)..(891): tiling:Spneumo1:WAN024ES4; Cluster includes WAN0241SI SP20 03||15901826|NP_346430.1|1906180..1907064|-|885 bp|ABC tra nsporter, ATP-binding protein|S.pneumoniae|TIGR4|NC_003028 .1|ORF|011
atgaatatgattaaggtagaaagcctaaataaaaacatcaagggcaaggctattttgaagggtatttcctttgaggtagctgaaggtgaatgcgtcgccttgattgggcccaatggtgctgggaagaccacactcttggactgtctgcttggagataaactggtcacaagcggtcaagtatccatccaaggcttgtcagtgacgagttctcagttagactatattagaggttatctgcctcaagaaaatgtcatcgttcagaaattaaaggtcaaagagttgattgctttctttcaacgtatctatccaaattccttgagcgatcaggaaatcgatcaactattgcagtttgaccagcaacaaaaagagcaattcgcagaaaaattgtcaggcgggcaaaagcgtctcttctcttttgtcttgaccttgattgggcgaccaaagcttgtctttttagatgaaccaactgctgccatggatacttcaactcgtcaacgcttttgggaaatcgttcgggacctaaaagcgcaaggagtcacgattctctattcgtctcattatattgaagaggtagagcatacggctgaccggattttggttttaaataagggagagttgattcgtgatacgacgcctctagctatgcgtagtgagggaattgaaaagcattttatccttcctctggcatacaaggaagtcattgagcagtctaacttggttgaaaactggtcacaaaaacaggatgctctacaagtagtcacacgcgaagcagatgctttttgggaactgttagttcaagcaggatgtggcatacaagaaattgaagttaataatcgtagtttgttggatacaatctttgaagaaacgcagaagggagataacctaactaat

SEQ ID NO: 1216 - DNA, 372 bp, Streptococcus pneumoniae
  misc_feature (1)..(372): tiling:Spneumo1:WAN024CZG; Cluster includes WAN0243DO spr1 865||15903906|NP_359456.1|1835575..1835946|-|372 bp|Conser ved hypothetical protein|S.pneumoniae|R6|NC_003098.1|ORF|1 12
atgaatatgtatcgtgttatagaaatgtacggagattttgaaccgtggtggttcttagaaggttgggaaraaratattgtagcaagtagaaaatttgaccagtattatgatgctctcaaatactacaaaacttgctggtttagattggaacaagaatcscctctttataaaagtagaagcgacttratraycattttttgggacccggaagaccaacgctggtgtgatgaatgtgatgagtatttacaacaataccattctttggctcttttgcaggatgagcaggttatcccagacgaaaaactacgctcaggctatgaaaaacaaaccagtcaggaaaggaatcgttcttgccgtatgaaattaaaatag

SEQ ID NO: 1217 - DNA, 362 bp, Streptococcus pneumoniae
  misc_feature (1)..(362): tiling:Spneumo1:WAN024DIJ; Cluster includes WAN0244I5 spr0 405||15902449|NP_357999.1|401195..401551|+|357 bp|Hypothet ical protein|S.pneumoniae|R6|NC_003098.1|ORF|111
atgaatattaccaatttgttttctatcaagacaggatgtgatgaaactgataggcaactgcaaaaactattttttcagttggatttacaattgggagaattgacagatcaactaagaaaattagattcyaattttgttcctcgtagtcaatttgtagacacgttggatttgaatgatgtagaatataaagaaattttaaactattttatcttccatcgtaatgatagtgaagaaagtttggtagaatggttatatgattggatttccacaaatcgttatgaacttcctaaagagttttcgattcgtatggctcataaataccatgaaagtgttactgaarttttcggagatgaataactaat

SEQ ID NO: 1218 - DNA, 1017 bp, Streptococcus pneumoniae
  misc_feature (1)..(1017): tiling:Spneumo1:WAN024C9T; Cluster includes WAN023R10 cont ig_1420_7||||4529..5545|-|1017 bp|Glimmer 2.02 orf predict ion|S.pneumoniae|670|WAN01UDWM|ORF|001
atgaatattacttatatagttggaaatggtttggatttgcaatatggtttgaaaacaagatatagggatttctacgaattccaaaataaggtttatataagtaggacagagaacgaggaaaaatattcaaatttcatttatgagtctctattttctgataaagtaaatgattatgaaaattggtcagattttgaattgtcaattggtaaattracaaaagataacgacctcatctcctcaagtatagaaataaaggagaaatttatagatgattttagtgaagtagttgatgatttaagagaatatctacgcatacaacaagaaaaaaatcttgagaaaggtaatgcaattgactttataagcactctagatratatgaggacctctctccctgtaattaatcaacctgctatcgataaaaaatayaatgaraatcyayatcarsacgayatygtraatataktaacwcttaattayacamatgtaatcgataaattatataatgrgtcagcaaaatcattyagsaatcaattacgarctaatmwttataawtttyayattgmgccwccaattcatgcacatggracggtrgatrtytgcacrgttttaggrgttagtgaygarayacaratttcaaatagttttgatgaagaacaaaargaatccytaataaaaartttagttttraaraactatagagaaaatatggatgtwaaraatagygatattataaaaaattctgacatcatwattctytatggggtttctttgggagaractgatrggtatatctggartcagattgctgaacratcaatcagmrgttctgttcctgtcataatttaccaytatgtacctcattttgatscrggraaycccaytagagyaaaacgcytatatagaaatgtagaagayaaattcatacaraatagtggwatwgayttagagttagagaaraaattaagagayaaccttattgtygttattggwaagactatttttratctratrgaragg

SEQ ID NO: 1219 - DNA, 1551 bp, Streptococcus pneumoniae
  misc_feature (1)..(1551): tiling:Spneumo1:WAN024CRQ; Cluster includes WAN0244IE spr0 396|prfC|15902440|NP_357990.1|392362..393906|+|1545 bp|Pep tide chain release factor 3|S.pneumoniae|R6|NC_003098.1|OR F|111
atgaatattcaagaagaaattaagaaacgtcgtacctttgccattatctcccacccggacgcggggaaaacaaccatcactgagcagttactctactttgggggtgagattcgtgaggctggtacggtaaaagggaagaaaacagggacttttgctaaatctgactggatggatatcgagaagcaacgtgggatttctgttacttcatctgttatgcaatttgactacgacggcaagcgcgtgaatatyttagacacgccagggcacgaggacttctcagaagatacctatcgtaccttgatggcggtggatgctgcggtcatggtcgtggactctgccaaggggatcgaggctcaaaccaaraaattgtttgaggttgtgaaacatcgtggcattccagtytttacctttatgaacaagctggaccgtgacggtcgtgagcctttggawctcttgcaagaattggaagaaatcttgggcattgctagctaccctatgaactggcctatcgggatggggaaagcctttgagggcttgtatgacctctataaccaacgtttagarctttayaaaggggatgagcgttttgcyagyctagaagayggrgacaaactytttggtagcaatcctttytacgagcaagtcaaggatgacattgagctkttaaatgaagcygggaatgagttttcagaggaagctattctggctggagaattgacgcctgtctttttcggttcagccctgacaaactttggtgtgcagaccttccttgaaaycttcctcaagtttgctccagaaccacatggtcacaagaaaacagayggtgamattgtggatccttatgacaaggatttctcaggmtttgtctttaaaatccaagccaacatggaycctcgtcaccgtgaccgtattgcctttgtccgtatcgtatcwggcgratttgagcgyggcatgagtgtcaatctccctcgtactggtaagggkgcyaaactrtctaatgttacycagtttatggcggaragtcgtgagaatstgaycaatgccgtrgcaggtgatattatcggggtttacgataccggtacttatcargttggggataccttgacrgttggwaaaaacaagtttgaatttgaaccmytgccaacctttacwcctgarattttcatgaaagtttctgcyaagaatgttatgaagcaaaaatccttccacaaggggattgagcaattggtgcaagaaggwgcyrttcagctttataagaattaccaaacaggtgagtacatgctrggmgctgtwggtcaactccagtttgaagtctttaaacaccgyatggaaggygartacaatgcrgaagtrgtyatgarcccaatgggtaaaaagaccgttcgttggatcaagcytgaggacttggatgaacggatgtcgtcaagtcgcaatatyttagccaaagaccgttttgaccaaccagtctttctctttgaaaatgactttgccctccgctggtttgcggacaagtatccagacgtagagttagaggagaagatgykaactaat

SEQ ID NO: 1220 - DNA, 773 bp, Streptococcus pneumoniae
  misc_feature (1)..(773): tiling:Spneumo1:WAN024F3T; Cluster includes WAN0244IN spr0 387|accA|15902431|NP_357981.1|385546..386313|+|768 bp|Acet yl-coenzyme A carboxylase carboxyl transferase subunit alp ha|S.pneumoniae|R6|NC_003098.1|ORF|111
atgaatattgcaaaaatagtcagagaagcgcgtgagcagagtcgcttgacaaccttggactttgcgacaggcatttttgatgaatttatccaattacatggtgaccgttcttttcgtgatgatggtgcagttgttggtggtattggttggcttggagaccaagctgtaacagtkgttggtatccaaaaaggcaagagtttgcaagacaacctcaaacggaattttggccaaccacatccagaaggctaccgaaaggcactgcggttgatgaaacaggctgagaaatttggccgtccagttgtgacctttatyaatacagcaggtgcttatcctggtgtcggagcrgaagaacgtggtcaaggggaagctatygctcgcaatctcatggaaatgagtgacctgaaagttcctattatcgccattattatcggtgaaggtggttcaggcggggctctggctctagctgtcgcggaccgtgtctggatgctggaaaattctatctatgccattctcagtccagaaggctttgcttccattttatggaaggacggtactcgcgcyatggaagcagcagaactgatgaaaatcacttcgcatgaactgttagaaatggacgtggtggataaggtgatttctgaartaggactttctagtaaagaactrattaagagtgtcaaaaaagaactccaaacggagctggctagactttcacaaaaaccgctagaagagttgctggaagaacgctatcaacgatttagaaaatactaactaat

SEQ ID NO: 1221 - DNA, 1070 bp, Streptococcus pneumoniae
  misc_feature (1)..(1070): tiling:Spneumo1:WAN024FPN; Cluster includes WAN023PP5 pne2 0_17||||12850..14034|+|1185 bp|Type 11A capsule operon, Gl immer 2.02 orf prediction|S.pneumoniae||WAN01UCJ5|ORF|000
atgaatattgtaagttatctaaaaaaaaacggtattacacatactttaaaaattattaatgaatataaaatgcaagagctgtttgatagtcttgttagtatttttacaaagcagaaggaacttcgtaacagtattgtcattgaatgtcatactgattttgaaaataatggtggtgcgttctatgactatctaatcaataatgagtataataaaaaatataaaattgtcttactattgaaggataaattagttaaagaattaccagaaaatgtagattatttttatttaagaaagcccagtttacgaaaatcctatgtaatgtcattaagtaaattctttacttttgataatgatatgcttcgtaaatatagaaaagatcaaaaacacttttatttaacacatggatgctttcctttaaaaagtacaataggtaaaataacagttccgaattatgttgattttgttctatctccctcgggcaatgtagataatattatagttaagcagtttggattaacatctaaagagcaatgtcttcacactggatttccgtgtcatgatatcttttattcaaaaccagaacctctagtatttttatctaattatgataaaaaaattatctgggcaccaacttttagaaagggtggtggctataatagaaatgatagtacagctagctatcctttaggcattccgttacttgaaacactagatgaactggcaaacctaaacacatatctaagccaacgggatattgccctgattgtaaagttacatccaatgcaagatatttcagatttggagttgaaacaatttagtcatattaagtttctgacaaatcaagatttgaatcgtaaaaatacaaatctgtatcaattgctgatgaattcagatgctttactcagtgactattctgcaatctcgtatgattatttacaccttgataaaccaatagggtatgttttttcggatctaaatgattataagttggggctttcagttgataatgtagatgattacatagcaggwgataagatactgtcttttaacaacttgctgcactttattga

SEQ ID NO: 1222 - DNA, 1043 bp, Streptococcus pneumoniae
  misc_feature (1)..(1043): tiling:Spneumo1:WAN024GGC; Cluster includes WAN0244E2 spr0 552||15902596|NP_358146.1|552212..553249|+|1038 bp|Conserv ed hypothetical protein|S.pneumoniae|R6|NC_003098.1|ORF|11 0
atgaatcaaacagtagaatatatcaaagaactgacagccattgcgtcgccaacaggctttactcgtgagattgcggactatttagtcaagactctagaaggttttggttaccagccggttcgcacatccaagggcggtgtcaatgtaactattaaaggtcaaaatgatgagcaacatcgctatgtgactgcccatgtagatacgcttggtgctattgtccgtgctgtcaaaccagacggccgtctcaaaatggaccgtatcggtggctttccttggaacatgattgaaggagaaaactgtaccattcatgtggctagcacaggtgaaaaagtatcaggaaccatcctcatccaccaaacttcttgccatgtctataaggatgcaggaactgcagaacgcacgcaagacaatatggaagtgcgtttggacgccaaagtaactagtgaaaaagaaactcgtgctcttggcattgaggtcggtgattttatcagttttgacccacgaactgtcgtgacagagacaggttttatcaagtctcgccatttggatgacaaggtcagtgcggcgattttgctcaatctccttcgcatttataaggaagagaagattgaattgcccgtaacaactcattttgctttttcagtctttgaagaagtgggacacggtgcaaactctaacattcctgctcaggtagtagaatatctggctgtggatatgggagccatgggagatgaccagcaaacagacgaatatacagtgtctatctgtgtcaaggatgcttctggaccttatcactatgacttccgtcaacatttggtggctttggcgaaagagcaagatattccatttaagctggatatctatccattttatggttcggacgcttcagcggctatgtctgcaggggcagaagtcaaacacgcccttctcggtgctggtatagagtctagccattcctatgagcgtacccatattgactcggtgatcgcaacagaacgaatggtcgatgcttatcttaagagcacgttggtggactaactaat

SEQ ID NO: 1223 - DNA, 587 bp, Streptococcus pneumoniae
  misc_feature (1)..(587): tiling:Spneumo1:WAN024DC9; Cluster includes WAN02443X spr0 917|ccl|15902961|NP_358511.1|904183..904764|+|582 bp|citru lline cluster-linked gene|S.pneumoniae|R6|NC_003098.1|ORF| 111
atgaatcaacccttggtgcttagcttctttcaccaagcatattacacgcggataaccgccaaaggagaaaagatgaaaaaattaactattcgtgatgttgcagatattgcaatcgtcgctgctatctacgtcgttttgactgtcacaccgcccctaaatgccatcagctatggtgcttatcagtttcgtatttcagaaatgatgaactttatggctttttacaatcctaagtacatcatcggagttaccatcggttgtatgattgctaatttctttagcttcggactgctagatgtctttgttggtggtggttcaaccttagtattcctcagtttaggtgtttggctttttgcaaaatatagcaaggattacctctttaacggattgattcgaaaagatcatttcttcttttcaatcctcttttcaatttccatgtttactatcgctgcagagttaaatattgtagcagaattaccattcttccttacttggtttacaacaggaatcggtgaatttgcttcattgattattggagcgattattattggtaaaattggtcgtcgaattgatttaagtaaatarctaat

SEQ ID NO: 1224 - DNA, 923 bp, Streptococcus pneumoniae
  misc_feature (1)..(923): tiling:Spneumo1:WAN024FSM; Cluster includes WAN0243UJ spr1 256|pstC|15903299|NP_358849.1|1254711..1255628|-|918 bp|AB C transporter membrane-spanning permease - phosphate trans port|S.pneumoniae|R6|NC_003098.1|ORF|312
atgaatcaagaagaattagctaagaaaatgttgcttccatcaaagaattctcgtctggagaaattaggaaaaggtttgacctttgcctgtctttctttgatagtcatccttgtggccatgattttggttttcgtagcgcaaaaaggcttgtcgaccttctttgtcaatggtgtgaatatctttgactttcttttgggaggaacttggaatccttctagtaaagaatttggtgcccttcctatgattttgggttcctttatcgttaccattctctcagcccttatcgcaacaccctttgctattggtgcagcagtttttatgaccgaagtatcaccaaaaggggcgaagattttgcaaccagctattgaactcctggttgggattccttcagtagtgtayggatttattggcttgcaagtcgtcgttccctttgttcgcagtgtctttggtgggactggttttgggattttgtcagggatttccgtcctctttgtcatgattttgccgaccgtaacctttatgacaacggatagcttgcgtgcggttcctcgttattatcgtgargcyagtttcgctatgggagccactcgctggcagactatctggcgtgtgatcttgaaggcggcccgttctggtattttcactgcagtggtctttgggatggcgcgtgcctttggtgaggctytagctatccagatggttgtcggaaactcagctgttatcccaacttccttgaccacaccagctgcaactttaacttctatattaactatgggaattgggaacactgtcatgggaactgtaaataataatgttctctggtcactggccttggtactgctcttgatgagyttagtttttaacagtgtgattaaattgattacraaagaaagaggaaagaaaaattatgcgcgctaactaat

SEQ ID NO: 1225 - DNA, 320 bp, Streptococcus pneumoniae
  misc_feature (1)..(320): tiling:Spneumo1:WAN024DJY; Cluster includes WAN0244LM spr0 280|PTS-EII|15902324|NP_357874.1|278777..279091|+|315 bp|P hosphotransferase system sugar-specific EII component|S.pn eumoniae|R6|NC_003098.1|ORF|110
atgaatcaagaggaactgcaggttgcagcatttgaaattatcctgcattcgggaaatgcaaggtcagaaatacatgaagcatttgcaaaaatgagagaaggtagttttgatgatgcagaaagyaaattaaatcaatcaaatgagataattcttgaagcgcatcatgcacaaaccaaactcytgcaagaatacgcaagtggagtggaaattaaaattgaaattatcatggtacatgctcaagatcatttaatgaccactatgacattattagaagtagcaaaggaaatgttagctctttataagaaagttaactaactaat

SEQ ID NO: 1226 - DNA, 987 bp, Streptococcus pneumoniae
  misc_feature (1)..(987): tiling:Spneumo1:WAN024DKG; Cluster includes WAN0244N2 spr0 228||15902272|NP_357822.1|219268..220248|+|981 bp|Conserve d hypothetical protein|S.pneumoniae|R6|NC_003098.1|ORF|111
atgaatcaagataggaataaactgctytctaaaattgcttatctgtattatattgaaaacttaaatcagtcacaaatagcagcaaaattaggaatttatagaacctctattagtagaatgytaacagaagcaaggaatgyaggaattgttaaaattgaaatagagaattttgataccaatatgtttaagttggaaaattatgtaaaagaaaaatayrgtytggaaagtttagaaattattccaaatgaatttgatgatamtccaacaattttatctgaaagaatttctcaagttgcagcaggygtccttaggaatctaattgatgataatatgaaaattggcttttcttgggggaaaagtttaagtaatttagtagatttaattcacagtaaaagtgtccgaaatgttcacttctatcctctagcaggtggtcctagtcacatacacgctaaataccatgtgaatacactgatttatgaaatgtctagaaaatttcatggagagtgtacatttatgaatgcaacgattgtgcaagaaaataaattgttagcagatggtattttgcaatcaagatattttgaaaatttgaaaaatagttggaaagatttagatatagctgtagtcggaattggtgattttagcaataaaggraarcatcaatggttagacatgcttacagaggatgactttaaagaattgaccaaagttaaaactgtaggagaaatttgttgtcgattttttgattcaaaaggtaaagaagtctatgaaaayttacaggaaagaacgatagcmatctctttggaagatttaaaaaatattcctcaaagtttmgctgttgcttacggtgatacgaaagtatcttcgattctytctgtcttgcgtgctaatttagtaaatcatttgattacagayaaaaatacaattttaaaagttttggaagaagatggkgatttgacttttagagagattctaggtgagykaactaat

SEQ ID NO: 1227 - DNA, 710 bp, Streptococcus pneumoniae
  misc_feature (1)..(710): tiling:Spneumo1:WAN024E2K; Cluster includes WAN0243E8 spr1 844|araD|15903886|NP_359436.1|1821096..1821800|-|705 bp|L- ribulose 5-phosphate 4-epimerase|S.pneumoniae|R6|NC_003098 .1|ORF|121
atgaatcaagtaatcaatgctatgcgtaaacgagtctgtgatgccaatcaatcattgccaaaacatggacttgtcaaatttacctgggggaatgtatctgaagtyaatcgcgaactcggtgtcattgttatcaaaccatcaggcgtggattatgacgaattgacacctgaaaacatggtagtgactgatctagatggtaagatcctagaaggggatttaagaccatcttccgacctcccaactcatgtgcaattatataagrcttggtcagaaattggtagtgtggttcacacccattcgacagaagctgttgsttgggctcaggcaggtcgtgatattcctttctacggaacaacccatgcagattatttctacggttcaatcccttgcgcccgtagtttgaccaaggacgaagtagaagtggcctatgaaaaagatactggcctggttatcgtagaagartttgaacatcgcggacttaacccggttgaagtaccaggaattgttgtacgcaatcacggtccattcacctggggcaaaaatccagagratgctgtttatcactctgtcgtacwagaggaagtatcaaagatgaatcgctttacagaacaaatcaatycaagagttgracctgctccccagtacatactagaraaacactaccaacgtaaacatggaccaaatgcttattatggtcaaaagtaactaat

SEQ ID NO: 1228 - DNA, 261 bp, Streptococcus pneumoniae
  misc_feature (1)..(261): tiling:Spneumo1:WAN024C3R; Cluster includes WAN023M42 3145 53_657a||||345714..345974|-|261 bp|EGAD orf prediction|S.p neumoniae|R6|NC_003098.1|ORF|110
atgaatcagctccacctcatcaaagctattataggaacttttctgctcaagggcatagaggatatgctcgtccttacgatttgtcgtcatgtcctatcctttcttgatataagagctcaatccccagatcggcccaacgattttttaaggttttggttgattgcgcatcaaaactcagggcgatgccacagtcaccaccaccagcaccactactcttggcaacggyctgcaaatcttgactggcttctttcaactgtctaa

SEQ ID NO: 1229 - DNA, 300 bp, Streptococcus pneumoniae
  misc_feature (1)..(300): tiling:Spneumo1:WAN024FZ3; Cluster includes WAN0240Q2 |||A AG13000.1|||300 bp||S.pneumoniae||AF227520|ORF|000
atgaatcagcttgartttcagcgtaatcacctrcaaatggactattayagcgagagctaccaagattttgaacgtgacttctaccgctactcyaacatgaatattccattgaccttcctracygatgatatcctmaaaacaatggcgacttcacgtaagaattactttgtcctcaataaggaaaagtccagagataaccgcgatcacttcttcatatttgaagtaagwaccktagawgagaatccrctaatctatcattatacatataagaaaactacaayatatttagcagaaaaatag

SEQ ID NO: 1230 - DNA, 147 bp, Streptococcus pneumoniae
  misc_feature (1)..(147): tiling:Spneumo1:WAN024CLT; Cluster includes WAN0242DZ SP11 88||15901053|NP_345657.1|1125899..1126045|-|147 bp|hypothe tical protein|S.pneumoniae|TIGR4|NC_003028.1|ORF|020
atgaatcattcttttaaaaaaataactgtattttgttttatagtttcttgtgttctttgtttattagacttaatgaattttaaaaatgtagctacttttttatttttctgtcttcctgtttttgttttgatttacaaaaataaataa

SEQ ID NO: 1231 - DNA, 305 bp, Streptococcus pneumoniae
  misc_feature (1)..(305): tiling:Spneumo1:WAN024CZP; Cluster includes WAN0243EC spr1 840||15903882|NP_359432.1|1815535..1815834|-|300 bp|Conser ved hypothetical protein|S.pneumoniae|R6|NC_003098.1|ORF|1 11
atgaatccaaatattacttttttaatcatgcttgtaggtatgatggccttgatgttctttatgcaacgttctcaaaagaaacaagctcaaaagcgtatggaaagcttaaataaactacaaaaaggctatgaagtgattacaatcggtggactttatggaacagtcgatgaagtagatacggagaagggaacaatagttcttgacgtagatggagtttacttgacttttgaactagctgctatcaagacagtattaccgctgaaagaaacagcttcactagaaggcgcaattgaaaaataactaat

SEQ ID NO: 1232 - DNA, 353 bp, Streptococcus pneumoniae
  misc_feature (1)..(353): tiling:Spneumo1:WAN024D9I; Cluster includes WAN0243WW spr1 171|rplS|15903214|NP_358764.1|1173490..1173837|-|348 bp|50 S Ribosomal protein L19|S.pneumoniae|R6|NC_003098.1|ORF|11 2
atgaatccattaatccaaagcttgactgaaggtcaacttcgtacagatatcccatcattccgtcctggtgayactgttcgtgtacaygcgaaagttgtcgaaggtaaccgtgaacgtatccagatttttgaaggtgttgttatcgcacgtaaaggtgctggaatctcagaaaactacacagttcgtaaaatctctaacggtrtaggtgttgagcgtatcttcccaatccacactccacgtgttgaaaaaatcgaagttgtwcgttacggtaaagtacgtcgtgcgaaattgtactacttgcgtgctcttcaaggtaargcagctcgtatcaaagaaatccgtcgttaactaat

SEQ ID NO: 1233 - DNA, 1367 bp, Streptococcus pneumoniae
  misc_feature (1)..(1367): tiling:Spneumo1:WAN024GJO; Cluster includes WAN0244GG spr0 466||15902510|NP_358060.1|472107..473114|-|1008 bp|Conserv ed hypothetical protein, truncation|S.pneumoniae|R6|NC_003 098.1|ORF|311
atgaatcctaatctttttagaagygtcgagttttatcagagacgttaccataactatgcgacagtrttmatyatacctctktcattactrtttactttcatcttgattttctcccttgttgccacaaaagaaattactgttacttcccaaggrgaaatcgcccctacaagtgtcattgcmtcyattcagtcraccagtgataatcctatcctwgctaatcatttagtggcaaatcaagtagttgaraaaggkgacttactcatcamatactctgaawcaatggaagaragtcagaaaactgccttagmaactcaattacaaagayttgagaagyaaaaagaaggacttggaatyttgaaacaaagcttagaaaaagcgactgatcttttttctrgcgaggatgartttggctaccataatacctttatgaattttactaaacaatcccatgatattgaactgggtatcwcaaagactaacacygargtttcaaatcaagctaatcttdccaatagcagttcatcagcyatygaacaagaaattacaaaagttcaacaacaaattggagaatatcaagagytgagagatgctatcataaataacagagcacgcttaccaactrgcaatccryaccagtcaattttraatcgttatcttrtagcctcwcaaggacaaacacaaggaackgcagaggagccatttttatctcaaattaatcaaagtattgcaggtctkgaatcatctatcgcaagcctcaaaattcagcaagctggtatcggaagtgtagcaacttatgataayagtttagcarccaaaattgaagtactccgcactcartttttacaracagcytcwcagcaacaactaacygtggagaaycaattaacagaattaaaagtacaactagatcaagcsacacagcgyttrgaaaayaataccttaacckcyccaagtaaaggtatcgttcatctgaacagcgaatttgaaggtaaaaatagaattccaactggtacagaaattgctcaaatattccctrtcatcacagatacaagagaagtactaatcacttactacgtakcwtctgactatctmccyytactagataaaggacaaactgtaagattaaaactggagaagattggaaatcacggcayyaccatcatcggccaacttcagaswattgatcaaactcctaccagaacagagcaaggmaatctctttaaattaaccgctcttgcaaaactatctaaygaggatagtaaactcatccaatatggcttacaaggtcgcgtcactagtgtaactrcaaagaaaacatattttgattatttcaaagataaaattttaacmcattctgattaactaat

SEQ ID NO: 1234 - DNA, 240 bp, Streptococcus pneumoniae
  misc_feature (1)..(240): tiling:Spneumo1:WAN024FAU; Cluster includes WAN023KO3 3138 86_3154||||1680855..1681094|+|240 bp|EGAD orf prediction|S .pneumoniae|R6|NC_003098.1|ORF|110
atgaatcctttctctccaaatcwgctgattcagataatagtaagctatcctatattgtaccacttttttagcaatttgaaaacaaaggaaacgttttccaaaataaaaaccctattttatccaccatatcaaggcttcaaaatgwtacttcaactccattctcaattacccgataagtctgattttgcaaatcaatttctactactgctgttacggacttatctttattttgacgtttga

SEQ ID NO: 1235 - DNA, 1184 bp, Streptococcus pneumoniae
  misc_feature (1)..(1184): tiling:Spneumo1:WAN024G5S; Cluster includes WAN02440Z spr1 023|ABC-MSP|15903067|NP_358617.1|1002215..1003393|+|1179 b p|ABC transporter membrane-spanning permease - macrolide e fflux|S.pneumoniae|R6|NC_003098.1|ORF|111
atgaatcgctatgcagtgcagttgattagccgtggggctatcaataaaatgggaaatatgctctatgattatggaaatagtgtctggttggcttctatggggactataggacagacagttttaggaatgtatcagatttctgagctcgtcacatctattctcgtcaatccctttggcggagttatttcagaccgtttttctcgtcgtaagattttaatgacggcagatcttgtttgtgggattctttgtctggctatttctttcataaggaatgatagctggatgattggcgctttgattgttgctaacattgtgcaggctattgcttttgccttttctcgcacagccaataaagctatcataactgaagtggtggagaaaratgagattgtgatctataattctcgcytagagctggttttgcaggttgtaggtgttagctctcctgttctttccttccttgttttacagtttgcaagtctcmatatgacgctactgctagactcgctgacttttttcattgcttttgttctagtggctttccttccaaaagaggaagcaaaagttcaagagaaaaaggcttttactgggagagatatttttgtagatatcaaggatgggttacactatatctggcatcagcaagaaattttcttccttttgctggtagcttccagcgttaatttcttttttgcagcttttgaatttctacttcccttttcgaatcagctttacggrtcagaaggagcctatgcargtattttaactatgggggctattggttccatcattggggctcttctagctagtaaaattaaagctaatatttataatcttttgattttactggctttgacaggtgtcggagtttttatgatgggattaccacttccaacttttctttccttttctggaaatttagtttgtgaattrtttatgacgatttttaatattcacttttttactcaagtacaaaccaaggttgagagcgaatttcttggragagtactgagtacaatttttaccttagctattctatttatgcctattgcaaaaggatttatgacagtcttgcmaagtgtmcatctytmttctttcytgatwattggamktggwgttrtmrycttrtmttkywtakckytyrkwtatgttcgaactcattttgaaaaattgatataactaat

SEQ ID NO: 1236 - DNA, 200 bp, Streptococcus pneumoniae
  misc_feature (1)..(200): tiling:Spneumo1:WAN024AWF; Cluster includes WAN0244L1 spr0 301|yorfE|15902345|NP_357895.1|300618..300812|-|195 bp|Tra nscription regulator|S.pneumoniae|R6|NC_003098.1|ORF|110
atgaatcgtgtgaaagaatttcgcaaggaaytgggyatttcccagctcgarctcgccaaggatatcggtgtctcgagacagacyatcaatatgattgaaaacgacaagtacaatccaacyytggaactctgtctcaatctcgcycgcagcctccaaactgacctcaacagtctcttttggraggaagatttttaactaat

SEQ ID NO: 1237 - DNA, 2021 bp, Streptococcus pneumoniae
  misc_feature (1)..(2021): tiling:Spneumo1:WAN024FFZ; Cluster includes WAN0243MO spr1 539|recG|15903582|NP_359132.1|1520712..1522727|-|2016 bp|B ranch migration of Holliday junctions, junction-specific D NA helicase|S.pneumoniae|R6|NC_003098.1|ORF|111
atgaatctacatcaacccttgcatgtcttgcctggtgtgggaccaaagtcagcagaaaaatacgccaaactaggaattgaaaacttgcaagatctcttgctctactttcctttccgttatgaagacttcaaaaccaagcaggtgctggagctggaagacggtgagaaggcagttctttctggtcaggtagtgactcctgctagtgtccagtattatggtttcaagcgcaatcgcctgcgttttagtctcaagcagggagaggtcgtttttgcggtgaatttctttaaccagccctatctggctgataaaatagagttgggagcaacccttgctgtctttggaaaatgggaccgcgctaaggctagtctgamtgggatgaaggttctggctcaggtagaagatgacctccagcctgtytatcgtctggctcagggaatcagtcaggccagtctggtyaaggtcatcaagacggcttttgatcagggactggacctcttgatagaagaaaatctgccccagtctttactagacaaatacaaactcatgtcccgttgtcaggcagtccgwgctatgcattttccaaagkatttggcagaatacaagcaggctcttcgccgtatmaagtttgmggaactcttttatttccaaatgcagytgcagaygctcaartctgaaaatagagttcagggragtggtctggttctgaattggtctcaggaaaaagtgacagcagttaaagyaagtcttccttttgccctgacccaagctcaggaaaagagtttgcaggaaattttaactgatatgaagtccgaccaccacatgaatcgtctcctacaaggggatgtggggagtggaaaaacggtagtcgctggcttggccatgtttgcggcagtgacagcaggttatcaggctgccctaatggtaccaacagaaatcctcgcagagcaacactttgagagtttacagaacctttttcccaatttgaaactggctctcttgayaggttccttgaaagctgcagaaaagagagargtcttggagaccattgccaagggtgaggctgatttgattatmggaactcacgctctgatacaagatggggtggagtatgctcgtcttgstttgattattatcgatgagcagcaccgttttggtgtagggcaaaggcgtattttacgggaaaaaggtgacaatccagatgtcctcatgatgacggcgactcccattccacggacgcttgccatcacagcctttggagatatggatgtttccattatcgaccagatgccagcaggtcggaagcctattgtgacgcgctggatcaaacatgagcaactacctcaggtcttgacttggttagagggggaaattcaaaaaggttcccaagyctatgtcatctctcctttgattgaagaatcagaagctctagatttgaaaaatgccattgccttatcagaggagttgacgactcattttgcaggcaaggcagaggtggctcttctacatggtaggatgaagagtgacgaaaaagaccagatcatgcaggatttcaaggagagaaagacggatattctggtttcgacgacggttattgaggttggggtcaackttcccaatgcgactgtcatgattatcatggatgccgatcgcttcggkctcagycarcttcaccagcttagaggtcgtgtcggtcggggggacaagcagtcctacgctgttctcgttgcyaatcccaagacggattctgggaaagaccgcatgcgyatcatgacagaaacgaccaatggatttgtccttgcggaggaagatttgaaaatgcgtggttctggtgagatttttggaaccagacagtcaggacttccagagttccaagtggctgatattatcgaagattttccgattttagaagaagcaagaaaggttgctagctacattagttctatagaarcttggcaagaagatccagagtggcgcatgattgcccttcatctggaaaagaaagaacatctggattaactaat

SEQ ID NO: 1238 - DNA, 432 bp, Streptococcus pneumoniae
  misc_feature (1)..(432): tiling:Spneumo1:WAN024C79; Cluster includes WAN023M73 3142 92_484||||248114..248545|-|432 bp|EGAD orf prediction|S.pn eumoniae|R6|NC_003098.1|ORF|110
atgaatctcattggttgcaaccgcaacctgcttcgattccctattttctctgggactttcttaacgctttcgcatcctatcttaccaacggaagtgtgcgaatgcacggttagcttcagccatacggtgagtatcttcacgtttcttaacwgctgcaccagtgttgttagcagcatccaagatttcttttgcaagacggtcttgcattgtgtgttcaccacgaagacgagcgattgttaccaaccaacgaagtccaagtgttgtacgacgttctggacgaacttyaactgggacttggtagttagaaccaccaacacgacgtgcacgtacttcaagtacaggcatgatgttttccatagctgtttcaaatacttcaagtgcatcgttgccagtagcttctttgatttgctcaaaagcaccgtaaacrattga

SEQ ID NO: 1239 - DNA, 1361 bp, Streptococcus pneumoniae
  misc_feature (1)..(1361): tiling:Spneumo1:WAN024D3N; Cluster includes WAN0243HR spr1 717||15903759|NP_359309.1|1697564..1698919|-|1356 bp|Conse rved hypothetical protein|S.pneumoniae|R6|NC_003098.1|ORF| 121
atgaatctgaaagtgaaacaaaaaataccattaaaaatcaagcgcatgggaattaacggtgagggaatcggcttttaccaaaaaacattagtctttgtaccaggagctctcaaaggcgaagatatctattgtcagattacttctattagacgcaactttgttgaagcaaaattactgaaggtcaacaagaagtctaaatttcgaattgtgccatcttgtactatttataatgaatgcggaggctgccaaatcatgcacctgcattatgataagcagctggagttcaagacggacttacttcatcaagcgctgaaaaaatttgctcctgcaggatatgaaaattatgaaattcgtccaactattggaatgcaggaaccaaaatattacagagctaagttacaatttcagacycgaaaatttaaaaatcaggtcaaggcgggcttatatgcacaaaactctcactatttagtagagttgaaagactgcctggtacaagataaggaaacccaagtgattgctaatcgcttagcagaattacttacttatcaccagattccaatcacggatgagagaaaagttctaggtgtccgtactattatggtccgacgcgcgagaaagaccggacaggttcagattattattgttacaaaccgccagcttaatttaactcaattggtaaaagagttggttaaagatttcccagaagttgtgacagtagctgttaatacaaatacagctaaaaccagtgagatatatggtgaaaagacagagattatctgggggcaagagagtattcaagaaggtgtactcaattatgaattttcactatcccctcgagctttttatcaactaaatcctgarcaaacagaagtcctytatagcgargcagtaaaagcgctggatgttrrtaaagaagaccatttgattgacgcttattgtggagttggaacrattggwtttgcctttgcaaagaaagtwaaaacactcagaggtatggatattattccagaagctattgaagatgccaagcgaaatgctaaaagaatgggatttgacaatactcattatgaagctggaacggcagaagagattattcctcgttggtacaaggaaggctaccgagcagatgctttgattgttgacccaccacgtacaggtctggatgataagttattagatactattcttacttatgtaccagaaaaaatggtttatatttcttgtaatgtttcgaccttggctcgtgatttggtacgcttagtagaagtctatgatcttcattatatycagtcggtcgatatgttcccacatacagctcgaactgaagctgttgtaaaattaataaaaaaagtttaactaat

SEQ ID NO: 1240 - DNA, 237 bp, Streptococcus pneumoniae
  misc_feature (1)..(237): tiling:Spneumo1:WAN024DXP; Cluster includes WAN023KFV 3130 78_3529||||1890607..1890843|+|237 bp|EGAD orf prediction|S .pneumoniae|R6|NC_003098.1|ORF|110
atgaatctgctcatcctgcatcaagacataattcccaataagaactggttggccatctatatgagatttgatccccttgcttgcgatatattggagtttcccatgcatttcctcatgttcaattccctctatctcagcttgcttgacgatggcattagcaataggatgataaatgtgttcctcaagacaggcactgattctgagaatatcttcctcactatagtctccaaaaggtaa

SEQ ID NO: 1241 - DNA, 855 bp, Streptococcus pneumoniae
  misc_feature (1)..(855): tiling:Spneumo1:WAN024CEF; Cluster includes WAN0240SP |||A AG38039.1|||309 bp|Orf23|S.pneumoniae||AF295925|ORF|001
atgaatcttagtttagtctcaccctttgtttaccttgcatctgaaaaaatatcagctgaaaatttatttgaaggrtttartgtrgatttacaatctacggtagatctgattaaatcwctatctarctacaatccaachgtttggacttatatgtctagtattactaaaagygtcatgcagccycttggagttgcgattytatcrgttgttctcatcytagaattttcraagatggcwaagaaaattgctaactcwggwggagcgatgacytttgaagcmttrgcrccratgytgattagttatatyatggtcgcagttgtaattaccaayactaccgtbattgtagaagcyatcatcgggattgcgagtcaygccattgarcaagtggcytcgattgtggctcacggtggggcraagtatgatacmmtctctggattaaaaggktcaggatttattggccggatgattgtgggctttttcgccctcctcatttggcttgttcggatagtaagtgcwgccatggttaaycttttggtatctattcgatttattcaactctaccttatgatyccatttgcccctcttacgattccaacatttttaagtgatgaatggaagtctattggtwtwggctatttaaaaaatattatggtytatgcggtacaaggggttctyatttttctgattgtttctcttgttcctttgtttgaatctgctggkaaaatagctgtytcaaatggtgcaggagtcytgcaatcacttgcgattatgtttggtagtttggtacaagctatcttactgattattgccctcgttggttctcaacgtacggctcgctcaatyttaggtatgtaa

SEQ ID NO: 1242 - DNA, 357 bp, Streptococcus pneumoniae
  misc_feature (1)..(357): tiling:Spneumo1:WAN024G94; Cluster includes WAN023LMJ 3140 30_1583||||841919..842251|-|333 bp|EGAD orf prediction|S.p neumoniae|R6|NC_003098.1|ORF|110
atgaatcttttcagccaaggcatcacttgtcaaaggaccagtagcgataaccgtaataacatctgtcggcaattctgtaatttcatcacgaaccacttcaatcaaggggtggttggcaactttttcggtcaccatttgagagaaaccatcacggtccactgcaagggcaccacctgcaggaacacgtgtagcctcagcagattccaaratmacagaacccaagcgacgcatttcttccttragragrccaacwgcatttgtcaaagcatcyccacgcaargaattggaacaaaccaactcagcaaaattgtctgttttrtgctgrggtgtwgacttgacaccacgcatttcatatag

SEQ ID NO: 1243 - DNA, 644 bp, Streptococcus pneumoniae
  misc_feature (1)..(644): tiling:Spneumo1:WAN024C8L; Cluster includes WAN0244NK spr0 210|adk|15902254|NP_357804.1|207070..207708|+|639 bp|Adeny late kinase (ATP-AMP transphosphorylase)|S.pneumoniae|R6|N C_003098.1|ORF|111
atgaatcttttgattatgggcttacctggtgcaggtaagggaactcaagcagcaaaaatcgtagaacaattccatgttgcacatatctcaacaggtgatatgttccgcgctgcaatggcaaatcaaactgaaatgggtgttcttgctaagtcatatattgacaagggtgaattggttcctgacgaagttacaaatggaatcgtaaaagaacgyctttcacaagatgatattaaagaaacaggattcttattggatggttacccacgtacaattgaacaagctcatgccttggacaaaacattggctgaacttggcattgaactagaaggtrttatcaatattgaagtgaaccctgacagcctyttggaacgtttgagtggscgtatcatccaccgcgtaactggagaaactttccayaaggtctttaacccaccagttgactataaagaagaagaytactaccaacgtgaagatgataagcctgagacagtaaaacgtcgtttggatgttaatattgctcaaggagaaccaatcattgctcactaccgtgccaaaggtttggttcatgacatcgaaggtaatcaagatatcaatgatgtcttctcagatattgaaaaagtattgacaaatttgaaataactaat

SEQ ID NO: 1244 - DNA, 806 bp, Streptococcus pneumoniae
  misc_feature (1)..(806): tiling:Spneumo1:WAN024CUJ; Cluster includes WAN02445D spr0 865|pyrDII|15902909|NP_358459.1|857180..857980|+|801 bp|Di hydroorotate dehydrogenase electron transfer subunit|S.pne umoniae|R6|NC_003098.1|ORF|111
atgaatcycacatgtaagaagcgtttgggtgtcattcggttggaaaccatgaaggtggttgcacaagaggaaatcgcgccagcaatctttgaattagtcctagaaggagaaatggttgaagccatgcgagcaggccaatttcttcatctgcgtgtaccrracgatgcccatctcttacgtcgtcckayktcaawwwmgystatykwcrargcwaacaagcagtgtcacctcatttatcggattgasggagctgggactgcaattttttcaaccttaagtcagggagacactctygatgtgatggggcctcagggaaatggttttgacttgtctgaccttgatgagcagamtcaggttctccttgttggtggtgggattggtgttccacccttgcttgaggtggccaagsaattgcatgmacgtggagtgaaagtagtgacagtcctcggttttgctaataaggatgctgttattttgaaaacggaattggctcagtatggtcaggtctttgtaacgacagatgatggttcttatggcatcaagggaaatgtttccgttgttatcaatgatttagayagtcagtttgatgctgtttacycgtgtggggctccaggaatgatgaagtatatcaatcaaacctttgatgatcacccaagagcctatttatctctggaatctcgtatggcttgtgggatgggagcttgctatgcctgtgttctaaaagtaccagaaarcgagacggtcagccaacgcgtctgtgaagatggtcctgttttccgcacaggaacagttgtattataactaat

SEQ ID NO: 1245 - DNA, 654 bp, Streptococcus pneumoniae
  misc_feature (1)..(654): tiling:Spneumo1:WAN024DFW; Cluster includes WAN0244C7 spr0 619|ABC-NBD|15902663|NP_358213.1|628681..629328|+|648 bp|A BC transporter ATP-binding protein - unknown substrate|S.p neumoniae|R6|NC_003098.1|ORF|111
atgaatgaaataatyayattaaaaaatattgagttgaaattaaaaaaracatgtgtttttcaaaaccttaaytttagttgtaaacagggggaaattataggaattactggtgcgaatggctcagggaaaagtgtattgtttaaattaatagctggtttatatagtccgtcttatggagaagtgttaatcaatggggaaaatattgttcctgagagaaaaattccagctaatttgggagctttgattgaagaacctggttttataaattattatagtggctttaagaatttacaatatttggcaagcatacgaggagtagttggtaatcaggaaatcaatgatacactgaaaatagttggtctatatgagcaaaaagaccagaaagttaaaacttattcgctaggtatgaggaaaaagctagggattgctcaagcaattatggagaatccctctattcttttactagatgaacctatgaatgccttggataaatcaagtgtagaaaatatgagaacattgtttagaaagctctctagtgaaaaagggacaacaattttgattgctagtcayagtgaagaggatattcgtatcttatgtgataaagtatatgcaatagaagataaagtatgtacactgtgttcagatykaactaat

SEQ ID NO: 1246 - DNA, 245 bp, Streptococcus pneumoniae
  misc_feature (1)..(245): tiling:Spneumo1:WAN024F2V; Cluster includes WAN0241XT SP18 06||15901635|NP_346239.1|1720584..1720823|-|240 bp|conserv ed domain protein|S.pneumoniae|TIGR4|NC_003028.1|ORF|111
atgaatgaacgttaccagtgtttaaaaactaaagaatatcaggcacttttatcttccaagggtagacaaattttcgctaaacgtaagattgatatgaaatctgtctttgggcagataaaggtttgtttgggttataagagatgtcatctgagaggtaagcgtcaagtgagaattgacatgggattcrtactcatggccaacaacctgctgaaatataataagagaaagaggcaaaattaactaat

SEQ ID NO: 1247 - DNA, 744 bp, Streptococcus pneumoniae
  misc_feature (1)..(744): tiling:Spneumo1:WAN024GI7; Cluster includes WAN024174 |cps 9vF||AAM62290.1|||744 bp|putative beta-1,4-N-acetyl-mannos aminyltransferase Cps9vF|S.pneumoniae||AF402095|ORF|000
atgaatgagagaatgcaaatattaggarttaytatagatccattaacgatgaaagaaacagtggatgctgttgaacagtatgttttaaagaagcatcctttgcacttgatgggagttaacgcagataaaattaatcagtgccatgaagatgagaaaatcaaaaaaatcgttaatgaatcaggaatyattaatgcggatggagcatcagttgttcttgcaagtaagtttttaggaacgcctgttcctgaacgagtagcgggtattgatttgatgcaatgtcttttagagttgtcaaataaaaaaggatattcagtttacttttttggagcyaaagaagaarttttacaagatatgctaaaagtttttaaacaaagatatcctaatcttaatgttgttggctatagaaacggatatttttcacctgaagatgaaaaaaagattcaggaagatattaaaggaggmaaaccagattttgtatttgtagggattacttctcctaaaaaggartatatcatccaatcattcatggataatgggattaatgctgtctttatgggtgttggtggcagttttgatgtattatcaggacacattaaacgagctccattatggatgcaaaaattgaatctggaatggttgttccgtgtagttaatgaacccaarcgyctttttaagcgttattttrtagggaatgttacttttattaagcgagttttagatgaaaagcgaaaatcaaaaaaataa

SEQ ID NO: 1248 - DNA, 542 bp, Streptococcus pneumoniae
  misc_feature (1)..(542): tiling:Spneumo1:WAN024FJ2; Cluster includes WAN0243PP spr1 430|dpr|15903473|NP_359023.1|1413497..1414033|-|537 bp|DNA binding protein starved cells-like peroxide resistance pr otein|S.pneumoniae|R6|NC_003098.1|ORF|110
atgaatgaggtaaagaaaatggtagaattgaaaaaagaagcagtaaaagacgtaacatcattgacaaaagcagcgccagtagcattggcaaaaacaaaggaagtcttgaaccaagctgttgctgatttgtatgtagctcacgttgctttgcaccaagtgcactggtatatgcatggtcgtggtttccttgtatggcatccaaaaatggatgagtacatggaagctcttgacggtcaattggatgaaatcagygaacgcttgattacactcggtggaagcccattctctacattgacagagttccttcaaaatagtgaaatcgaagaagaagctggtgaataccgtaatgttgaagaaagcttggaacgtgttcttgttatctaccgttacttgtcagaacttttccaaaaaggtttggatgtcactgatgaagaaggtgacgatgtracaaacggtatctttgyaggcgctaaaactgaaacagataaaacaatttggatgcttgcagccgaacttggacaagcacctggtttgtaactaat

SEQ ID NO: 1249 - DNA, 1202 bp, Streptococcus pneumoniae
  misc_feature (1)..(1202): tiling:Spneumo1:WAN024FEY; Cluster includes WAN0243LT spr1 571|mvaS|15903613|NP_359163.1|1552473..1553669|-|1197 bp|3 -hydroxy-3-methylglutaryl coenzyme A (HMG-CoA) synthase|S. pneumoniae|R6|NC_003098.1|ORF|221
atgaatgataaaacagaggtaaatatgacaatcggtattgataagattggttttgcgaccagtcaatatgtcttgaaattacaagacttagcagaagcgaggggaattgaccctgaaaaattaagtaaaggactcttactcaaggaattgagtattgcgcccctaactgaggayatcgtgaccttggcggccagtgctagtgactctattttaactgagcaagaaagacaagaagttgacatggtcattgtggckaccgagtcaggaattgaccagagtaaggctgcggccgtctttgtgcatggcttgctgggcatccagcccwywgctcgtagtttcgagattaaagaagcctgctayggrgcgacwgctgccctccattatgccaaattgcatgtggaaaattctccggagtccaaggtmttggtcattgccagtgatattgccaaatayggtattgaaactccrggagaaccaactcaaggtgctggaagtgtagctatgttgattacacaaaatccacgcatgatggcctttaataatgacaatgtagctcagacccgtgacatcatggatttctggcgaccaaattactcgacaactccytatgtaaatggtgtctattctacccaacaatacttggatagtttgaaaacgacttggcttgaatatcaaaaacgctaccagcttactttggatgattttgckgctgtttgtttccacttgccttatcctaaattagcgctaaaaggcttgaaaaaaatcatggataagarcytgcctcaagagaaaaaagacctcttrcaaaagcattttgaccagtctattctctacagtcaaaaggtggggaayatctacacaggttcacttttccttggacttttgtctctcttggaaaatacagatagcttgaaagctggggataaaatcgycctttatagttacggaagtggagctgtggctgagttcttcagtggtgaattggttgaaggatatgaagcttatttggataaagaccgyttgaacaagctcaaccaacgaactgccctatccgttgcagactatgaaaaggtcttttttgaggaagtaaacttggatgaaacwaactctgcccagtttgctggctatgaaaatcaagattttgccttggttgaaattctygaccaccaacgccgttatagcaaggttgaaaaataactaat

SEQ ID NO: 1250 - DNA, 1118 bp, Streptococcus pneumoniae
  misc_feature (1)..(1118): tiling:Spneumo1:WAN024GFL; Cluster includes WAN0244DD spr0 577|msrA|15902621|NP_358171.1|586941..588053|+|1113 bp|Pep tide methionine sulfoxide reductase paralog|S.pneumoniae|R 6|NC_003098.1|ORF|111
atgaatgataagttaaaaatcttcttgttgctaggagtattttttctagccataaccggtttctatgttctattgatacgaaatgcagggcagacagatgcctcgcaaattgaaaaggcggcagttagccaaggaggaaaagcagtgaaaaaaacagaaattagtraagacgcagacttgcacgaaatttatctagctggaggttgtttctggggagtggaggaatatttctcacgygttcccggggtgacggatgccgtttcaggctatgcaaatggtagaggagaaacaaccaagtacgaattrattaaccaaacaggtcatgcagaaaccgtccatgtcacctatgatgccaagcaaatttctctcaaggaaatcctgcttcactatttccgcattatcaatccaaccagcaaaaataaacaaggaaatgatgtggggacccagtaccgtactggtgtttattacacagatgacaaggatttggaagtgattaaccaagtctttgatgaggtggctaagaaatacgatcaacctctagcagttgaaaaggaaaacttgaagaattttgtggtggctgaggattaccatcaagactatctcaagaaaaatccaaatggctactgccatatcaatgttaatcaggcggcctatcctgtcattgatgccagcaaatatccaaaaccaagtgatgaggaattgaaaaagaccctgtcacctgaggagtatgcagttacccaggaaaatcaaacagaacgagctttctcaaaccgttactgggataaatttgaatccggtatctatgtggatatagcaactggggaacctctcttttcatcaaaagacaaatttgagtctggttgtggctggcctagttttacccaacccatcagtccagatgttgtcacctacaaggaagataagtcctacaatatgacgcgtatggaagtgcggagccgagtaggagattctcaccttgggcatgtctttacggatggtccacaggacaagggcggcttacgttactgtatcaatagcctctctatccgctttattcccwragaccwaatggaagaaaaaggctacgcttatttactagattatgttgattaactaat

SEQ ID NO: 1251 - DNA, 108 bp, Streptococcus pneumoniae
  misc_feature (1)..(108): tiling:Spneumo1:WAN024DPK; Cluster includes WAN0242I6 SP10 31||15900902|NP_345506.1|973181..973282|+|102 bp|hypotheti cal protein|S.pneumoniae|TIGR4|NC_003028.1|ORF|121
atgaatgatgtagcaataatccttgaaacaaaatcagaagaaagagatattagcaaacaaatttttattgatgagttaatgaaaaatatagacataattctaactaat

SEQ ID NO: 1252 - DNA, 306 bp, Streptococcus pneumoniae
  misc_feature (1)..(306): tiling:Spneumo1:WAN024FGS; Cluster includes WAN023KW4 3138 49_2804||||1493580..1493885|+|306 bp|EGAD orf prediction|S .pneumoniae|R6|NC_003098.1|ORF|110
atgaatggagttcgtaaatttgcctacacttacaactctgtccgattttcaatggctcgtaagagtgtcacttcgtccgcatactcaatgtccgctcccacagcgagacctcgtgctagacgcgtaaccttgataccagccggcttgagcaaacgtgaaagatacatggaagtcgcttcaccatccgctgtagcattagtcgccacaatcacttctgaaacctcactatccataagacgagtcataaggctcttgagattgatatcgtccggactgataccattcataggagaaatgaggccatga

SEQ ID NO: 1253 - DNA, 306 bp, Streptococcus pneumoniae
  misc_feature (1)..(306): tiling:Spneumo1:WAN024D3H; Cluster includes WAN0243HG spr1 728||15903770|NP_359320.1|1706704..1707003|-|300 bp|Hypoth etical protein|S.pneumoniae|R6|NC_003098.1|ORF|111
atgaatggtatgaaagctaaaaaaatgtggatggcaggyytggctctgctaggtatcggaagccttgcycttgcyacgaaaaaagttgcagatgaccgtaagctcatgaagactcaggaagagttgacagagattgtgcgagaccatttttccgacatgggggaaattgcgaccctytatgttcaagtttacgaaagcagtctggagagcttggttggtggcgtcatttttgaggatggycgtcattatacctttgtctatgaaaatgaagacctagtctatgaggaggaagtcttaykaactaat

SEQ ID NO: 1254 - DNA, 677 bp, Streptococcus pneumoniae
  misc_feature (1)..(677): tiling:Spneumo1:WAN024D65; Cluster includes WAN0243NI spr1 509||15903552|NP_359102.1|1485996..1486667|-|672 bp|Conser ved hypothetical protein|S.pneumoniae|R6|NC_003098.1|ORF|1 11
atgaatgtaaaagaaaatacagaacttgtttttcgagaagttgcagaggctagtctgagtgctcatcgagagagtggttcggtctctgtcattgcagttaycaagtatgtagatgtaccgacagcggaagccttgcttccgctaggtgtycatcatatcggtgaaaatcgtgtagataagtttctggaaaaatatgaagctttaaaagatcgagatgtgacttggcatttgattggtaccttgcaaagacgtaaggtgaaagatrtcattcaatacgttgattatttccatgcattggactcagtaaagctagcaggggaaattcaaaaaagaagtgaccgagtcatcaagtgtttccttcaagtaaatatttctaaagaagaaagcaaacacggtttttcgagagaggaactgctggaaatcttgccagagttagccagactagataagattgaatatgttggtttaatgacgatggcaccttttgaggctagcagtgagcagttgaaagagattttcaaggcggcccaagatttacaaagagaaattcaagagaaacaaattccaaatatgcctatgaccgagttaagtatgggaatgagtcgtgattataaagaagcgattcaattcggttccacttttgttcgtataggtacatcattttttaagtarctaat

SEQ ID NO: 1255 - DNA, 801 bp, Streptococcus pneumoniae
  misc_feature (1)..(801): tiling:Spneumo1:WAN024ESD; Cluster includes WAN0243GV spr1 749||15903791|NP_359341.1|1719183..1719977|-|795 bp|Hypoth etical protein|S.pneumoniae|R6|NC_003098.1|ORF|111
atgaatgtcaaaaagataatgtcaatttttcaatccttttatgttgatgtcagtattgaggaactgactttgactttaccaatcagttttgtaaaaaggtttgagtatactcaaatgacttttcataaggaatcatttttattgattaaagaaaagagaagggggagtttgagttcatttgttactcaggctcgcactatgggtgawaaagycaatatggatgttgttttggtgttttcgaagttatcagacrgtgaaaaaaagcaattacttcaagctagagttccgtttgtagactttaagggaaacctcttcttccctmcattgggactagtactsaatgcgaatgatactgaartccctaaggaattaacacctagcgaacaattaacgtggattgcctttttattgacaaaaggtcaaaaagtagtaratgttgatttgctttcacaagtcactggacttccaaactcaacaatttataggtgtttgaggacttttaaagctttatattggttaaacaagcaaaataagctttacacatatacggtgtcaaagaaagaattattcttaaaatccgtgtcatgtttatttaatcccawcrwrrawygswttttattgccagatggcgatataaagcagataaaatctgtttctaaycttctatatggyggtgcttatgctttgtcgcattcaacttttttagctgaaacggatgaaaataytwgctrtgtcatatggcagagaaaattcaatcagttatccttgccactttctcagcatgttttaaaabkaactaat

SEQ ID NO: 1256 - DNA, 194 bp, Streptococcus pneumoniae
  misc_feature (1)..(194): tiling:Spneumo1:WAN024AHL; Cluster includes WAN0247L1-rc R 6.IG_98||||85586..85779|-|194 bp|Between spr0077 (hk08) (+ strand) and spr0078 (rpsD) (+ strand)|S.pneumoniae|R6|NC_ 003098.1|IG-rc|110
atgaatgtcctcctgatataaataatatttcggtggaaatagtcacttagaaagccctgattcgtgcagatgcccttcgcctaaacagccaaggttacttgtcataagacacctgttgacgagcttcatgctttcctgctgatatttcacacaaaatctattctaccatgaatagctggatttgtaaaggggtt

SEQ ID NO: 1257 - DNA, 645 bp, Streptococcus pneumoniae
  misc_feature (1)..(645): tiling:Spneumo1:WAN024FJ3; Cluster includes WAN023KZA 3124 93_2655||||1413002..1413640|+|639 bp|EGAD orf prediction|S .pneumoniae|R6|NC_003098.1|ORF|110
atgaatgtgagtgacaatcacttcatcaaggtaagsttcaaaagcctgaaaaatttgcttcccaccgataatgtagagattcttttcttgakcctgataccagtcaagaacagactggacgtcctgaaaagtagcaaccccatctatcttttcttccggattacgcgtcaaaatcarggtttcccgttttggaagcaagcgacgccccatcccatcaaaggtcacacgccccatcaagatagcatgattcagagttgtttctttaaagtgctgcaattctgctggcaaatgccaaggcagacgattttccttaccaatcamaccctcttcatcctgggcccaaatagctacgattttcttagtcatgcttccatccttttcactgatagtactattttatcaaaaaactcaaaaaaagactggtttggaatagcttacaaaatagaaaaaatctgtaagaaatttcctacagatttatctatgtttccttatttcttacaaaccaggtgcttgtccaagttcggctgcaagcatccaaattgttttatctgtttcagttttagcgcctrcaaagataccgtttgtyacatcgtcaccttcttcatcagtgacatccaaacctttttggaaaagttcykaactaat

SEQ ID NO: 1258 - DNA, 1985 bp, Streptococcus pneumoniae
  misc_feature (1)..(1985): tiling:Spneumo1:WAN024DJZ; Cluster includes WAN0244LN spr0 279|bglG|15902323|NP_357873.1|276788..278767|+|1980 bp|Tra nscription antiterminator BglG family|S.pneumoniae|R6|NC_0 03098.1|ORF|120
atgaatgtgttaaacattaaagagaaagatatccttcaatttttaataaaaaataaggaacgttttgttacaagcaaagaactrgcagaatatttatcctgttcagatagaactgtccgtaatgtactgaaattaattgagaagacaatgattattcaaggagtccggttgatttcaaaacaaggtcaagggtatcaaatattttttgagaatcaaggcgcttaycargagtttagacaaacttatgaactggmagaagactatacgaaaactgcggtttcaaaaggtgatgatcgtttagtatttatcttaaataaattattatttgagcaagttccagttctttttgatgatttagctgatgaactttacgttagtcgttcaacattatctcatgatttcaraaagatacgagtgatgttatcagagtataatttgtccattgagagtagggcgaataaaggagtttatgtctcaggcgaggaacgtgataaacgacgttttatcataaattatttcctagagaatcaattttttaaaacaatacattgctatgtaaaatttaacttttttgatcaaactgttccattagaagaatttgctagaattgttttggatgaatgccaagaggccaacctaaaactatctgattttgtactacagaatttagtagttcacatagcattgtctgtgattcgtttaaaatccggatttgaaataaaaaatatagactgtcagatgactgatgatgcaayagagagaaaggttgcccaaagaattctttctaaagtaagagaagtaacaaatcaggaatttccagttcaggaaatagactacattactttgcatttgttagctaagagtcaacaatgtcaaaaaaatcagaagaatatttctgaagaagttttaaaaaaatctttayttaaaacatttcagaatttaggattagatgatatgtataacttttcttcagatttccaactaattgaaggattgataactcatctaatgacactacaagtacgtttagaaagccggattaccttaaataaccctttrgtagatgaaattaaacagaattatagtgatatattctttatgactagagaaattcttgcaaatatggacaagttcttggagtggwcaatatcagatgatgaartagcatatgtaagtcttcactttttagctgctatggaacgtagcaaagagagtactaagtttaatattcttgctatttgtgcaacrggatttggtgcagcccaaatgttaagaaatcgtttggaaacggagtttgggaascgagtagaagttgttgatgtaataggctaytatgaattgaatcaagaaaaacttaaaggaatagattttatagtgtcrgctrttgatttatcaaatctatattttcaaatyccagtttttaaagttagtgtrtttcttaagagtgatgagatggaaatgattmgmaaagctatggatywraykmawgtttcwagtyatrtacmatcrtcaaagattarcaartttgaaaacaacrrctttagacagtattttagtaaagaaaaytttttaatatgtactraatmwgacaaggwaaatttacttgaaaagatggttgagrgtttatctgttggtgaatcaaatgagtttgaacaatctttactttatggaattaaacagcgmgaagaattaagttcagttgttttttctgaaaaaattgcagttccgcatcctattcarccctttggtacagagggaaaggtttcgrttgcaatytgtaaagattcgttactctgggataatcaaagttcayatgtccagctagtatttcttctatctccatcaatatatgggaacgaaggtttggcaactgtgactaaaaagatagtctctctgacagagaatgatgarttgcaaaatcagctaatatcttgcaataactttgaagattttattaacatatttgagaagataaaatarctaat

SEQ ID NO: 1259 - DNA, 806 bp, Streptococcus pneumoniae
  misc_feature (1)..(806): tiling:Spneumo1:WAN024FOD; Cluster includes WAN0243SW spr1 315|ABC-MSP|15903358|NP_358908.1|1304208..1305008|-|801 bp |ABC transporter membrane-spanning permease - aspartate/gl utamate transport|S.pneumoniae|R6|NC_003098.1|ORF|210
atgaatgttacaacgattttagcatcagattggtaccaaaacttgatgcaattgattccggatggcaagctgtttagcctacgttcggtctttgatggaatccctagaattgtccaacaacttccaacaacaattatgttgacaattggtggtgccctttttggcttggttttggcgcttctttttgccattgtgaagatcaatcgtgtcaagattttatatcccttgcaggccttctttgttagtttcttaaaagggacaccgattttggtgcaactcatgttgacctactacggaatccctttggctttgaaagccctcaatcagcaatggggaactggtctcaatatcaatgcgattccagctgcagcttttgcgattgtcgcctttgcctttaatgaggcagcttatgctagtgaaaccattcgtgcagccattctctcagttaatcctggtgagattgaggcggcacgcagtctgggtatgacccgagcgcaagtttatcgacgagtgattattcctaatgcagcggtggtagctactccaaccttgattaattccctcatcggtttgaccaagggaacatctctagcttttagtgcgggtgttgtggaagtctttgcccaagctcagattytaggtggagctgattatcgctattttgaacgcttcatytccgttgcccttgtttattgggtagtcaatatcggaattgaaagcctcggtcgtttcatcgagagaaaaatggctatttctgcacctgatacagtgcaaacagatgtgaaaggagaccttcgttaactaat

SEQ ID NO: 1260 - DNA, 103 bp, Streptococcus pneumoniae
  misc_feature (1)..(103): tiling:Spneumo1:WAN024DR2; Cluster includes WAN0242X7 SP04 44||15900361|NP_344965.1|417235..417336|-|102 bp|hypotheti cal protein|S.pneumoniae|TIGR4|NC_003028.1|ORF|121
atgaatgttatttttrtttttattaaaaagataccgatttcatttactaaaaaagaaaaaagaactgatttctcagtccttcattaatcttattccacactaa

SEQ ID NO: 1261 - DNA, 1422 bp, Streptococcus pneumoniae
  misc_feature (1)..(1422): tiling:Spneumo1:WAN024FQS; Cluster includes WAN023PSQ pne1 4_15||||11738..13159|+|1422 bp|Type 9L capsule operon, Gli mmer 2.02 orf prediction|S.pneumoniae||WAN01UCJV|ORF|000
atgaatgttgaaaaaaatttgaaacgtggaattttctatactgcaatagggaagtattcgaatgtagttattcaattacttgtaacagcaattcttagccggattctctcacctgtagaatatggtatcgtagcagtagtaaatgtatttcttttattttttcaaatgttagcagattcaggaataggacctgctattgttcaaaataaagaactgaataagtcagatttaatcagcattttctcattaacgatttatagtggaatcgtactttcttgtatttttgctttactaggatatcctatgggggtgttatacggcgaaactatttatgttagtttatttccgcttttaggtctttgtgttttattttataccattacaattgtaccgcaagctattctaatgaaaacgatgaactttaaaatagttaattttctaactattttttctaacattgctagtggcttggtgggcgttattytagcggtatcacattttggtgtctattctctaattttttctaatattgtaaragcaatggttttatttatcgctttatattctaaagcaaagataaatttctattggaaagtttcaaaaagttctattggtaaaatttttgagttttcaaaattccaatttttgtttaatttttggaattattttgctagaaatttagataatttattaattggacgattgattagcccgtcagatcttggttattatgataaggcttatcaattatctttgtaccctaatcaaattttatcacaggttgtgacaccagcattgcatcctattatgtccaattttcaagataatatcagtaagataggcgaagtttatcttcagatttctagaatattcgtaatagttggcatacctatttcggcttatttatactttaatgctcaatatgttgttacatttatgtttggagataattggtcccaaagcgttccggtgtttcaaatattagcagcaacaatttggttacaaatggctaatagycctactggtgcattttaccaagcaactaatcagacaargttattgtttagaattggcttattgacatcttttattaatattttagctattgttattggtgtaatgttgcaaagcatccaatgtgttgcgtacatgcttttgatttctttcagtcttagtttagtaatcaatactctttacttaacaaaaaaagtattaaatatttctgctcaaaaatatataaaaccgatattaattaatttgacaattatcagtccctatattgtgtttaatttgtttatctcggattttgtaaacgaccttattttacatttatcagttcagtttgttattttatttttaatatggggaattgggatgtatattagcggagagtatcgacgagtcttcgcggttataagaaaa

SEQ ID NO: 1262 - DNA, 238 bp, Streptococcus pneumoniae
  misc_feature (1)..(238): tiling:Spneumo1:WAN024F2E; Cluster includes WAN023L9A 3132 94_2226||||1194577..1194813|-|237 bp|EGAD orf prediction|S .pneumoniae|R6|NC_003098.1|ORF|110
atgaatkagkamwktmwyyttatactcatctgtyttcamaaagcattctagtccrtctccgattaacgatggactttatcayctccttctccagtccttgtatgacatcttccaaagttcgaaaggctttattcttaaatccacgtttacgaatctctttccacacttrttcaatggggttcatytctggtgtgtatggaggaataaatgcaaagccaatattagtcggaatctttaa

SEQ ID NO: 1263 - DNA, 1172 bp, Streptococcus pneumoniae
  misc_feature (1)..(1172): tiling:Spneumo1:WAN024GA8; Cluster includes WAN02447H spr0 789||15902833|NP_358383.1|785081..786247|+|1167 bp|Hypothe tical protein|S.pneumoniae|R6|NC_003098.1|ORF|441
atgaattaccttgttatttctccctactatccacaaaactttcaacagtttaccatcgaactagctaataaaggcatcacagycttgggaattggtcaagrgtcttacgagcaattggatgagcccttgcgcaatagcttgaccgagtattttcgtgttgataatcttgagaacatagatgaagtcaaacgtgcagttgcttttctcttttataaacatggtccaattgrccgcatcgagtctcacaatgaatactggcttgagctagacgcaacactcagagaacaattcaatgtttttggtgccaaaccagaggatctcaaaaagacgaaatataagtctgaaatgaagaaacttttcaaaaaagcaggtgttcctgtggtacctggagctgttatcaagacggaagcagatgttgatcaagcagtgaaagaaatcggtcttccaatgattgccaaacctgataatggagtgrgagcagccgcaacctttaaacttgagacagaagacgatatcaatcacttcaagcaagaatgggaccattcaaccctttatttctttgaaaaatttgtcacttccagcgaaatctgtacctttgacgggctcgtggacaaggatggaaagattgtcttctcaacaacctttgactacgcctatacaccgcttgacctcatgatttataagatggacaattcttattatgtgctcaaggatatggatcctaaactgcgcaagtatggggaagcaattgtcaaagaatttggtatgaaagaacggtttttccatattgagttcttccgtgagggggacgattatattaccatcgagtacaataaccgccctgcaggtggttttaccattgatgtttataactttgctcattccttggacctttatcgtggctatgcagctattgtcgcaggagaggagttcccggcgtcagactttgaaactcagtattgtttggctacttctcgccgtgcaaatgctcactatgtttattcagaagaggatttgcttgccaaatatagccagcagttcaaggttaaaaaagtcatgccagctgccttcgcggaacttcaaggarattacctgtatatgctgacmactccgagtcgacaagaaatggakcagatgattgcwgatttcggacaacgtcaagaataactaat

SEQ ID NO: 1264 - DNA, 1353 bp, Streptococcus pneumoniae
  misc_feature (1)..(1353): tiling:Spneumo1:WAN024CT2; Cluster includes WAN0242HD SP10 61||15900931|NP_345535.1|996187..997533|+|1347 bp|protein kinase, putative|S.pneumoniae|TIGR4|NC_003028.1|ORF|010
atgaattacgaaaagtatttaaactatttggactatgaaactgaaatagaagacgcataccataatttattattagaatataaaattagtgataattttagtgatgaacattggttatataatttgccgtctaatatcacccaatctaagggatttaaaatacacctgagcgcttcaatattaaatgctaatttggttgctaaaaaattctttgattttatattttctagagagaagaagataaatttcaaaattttggttagcattaaagaactttctttgcaaaatacagggcttaatggttattcacaagtcgggaaattcattacaatttatccaaaagataataaagagtttcaacgtttgttacacaaattagaaatattgtataaaggtgtaaagggtgtaaacataccatcagatttcagatttcaacttagcgaggttgtatattacagatatggggagttcgtaaaagatagcactttcaaggataaaagagataagaaaatcccttcaaatgtgaatgttccaataagggattactatattccaagatataacactattcctgatcaatatattattttggaagtgatttctaaaaatgccaaaggtggagtttataaagtatttaatactcaaaagcgagtttattctttattaaaagaagctagtgatttatcgttggttgattttacaaatagagattctgtgaatcgtttaataaatgaaagagaaatattagtagaattggaaaaggaggaatttactccaaaagtttttaacgatttttacataaagaattcgtattttgtggaatttgagtttattattgcagataaattaagcgagtataatatggttagtggctcgtatgattggtttttaacattaattgattatatggagataataaactccaaatataatctttcctatagagatttatcatttaataatatacttattgataatagaaataatatttatattatagactttgagcatgccctaaggaaagaaactcaaattgaagaaaaaaagttgcctctatttggaactccagggttttatgaaaccaacttaaatttattgaataatcaaccagaggatattatgggattggttttgttattatattggagtcagaatttagatgattttaacgtcttttcaaaaatgagttttttagaagcgatggagtatgcaatgaattttaattcgcgtcgcttagacacacttgataaatcagattggctttatgatatttataaaaaagcgttcaattataaatatgatactttttctgaattaaaaaaagattttatagaggtattaaaactaactaat

SEQ ID NO: 1265 - DNA, 246 bp, Streptococcus pneumoniae
  misc_feature (1)..(246): tiling:Spneumo1:WAN024CFL; Cluster includes WAN023RWU cont ig_1609_9||||5888..6133|-|246 bp|Glimmer 2.02 orf predicti on|S.pneumoniae|670|WAN01UDCD|ORF|001
atgaattatcaaaaattaaatgatattactggtgctaccaaaaatgaaaaagataaatactatgtttacggactctatgaagaaggtaagcaactacctttctatattggtaaaggagagggaactcgcctaatatcacatatcgatgaagcgcttacagagataaatcaagaagaaaacatacaaattagtaaaaaaattcaaattattagaaaacataagggcaaaattatacctgtaatcatt

SEQ ID NO: 1266 - DNA, 1509 bp, Streptococcus pneumoniae
  misc_feature (1)..(1509): tiling:Spneumo1:WAN024D7I; Cluster includes WAN0243QF spr1 404||15903447|NP_358997.1|1388112..1389620|+|1509 bp|Conse rved hypothetical protein|S.pneumoniae|R6|NC_003098.1|ORF| 101
atgaattatggaggaaatacccgtatgagaaaccttttatccacaaaagttcaaagacaattacgcttaatggaaaccctaattcagaatcgtaattggatgaaattacatgaactagccgaaaaattaggatgtacagaacgaatcttaaaaagtgatttaaatgaattacgtattgcctttccatctattaacatccaatcttctgttaacggaatcatgatagatttagaagttaacactagtgtagaagatatttatcaataytttcttgctaattctcaatcttttcaattactagagtatatgttcttcaatgaggggctacctatttatcgaacaatagaaaatctttactttagtagtgccaacctctatcgactgggcagaaatattacaaaggttctttcatctcagtttcaaattgaattatcttttactccatccgagatacgtggaaatgagatcgatattcgttacttttttgcccaatacttttctgagcgctattatttcctagattggccttttcctgaccttcctgaggaagatttaacagagtttgctgacttcttctataaaatcacraattatccaatgcgattttcaatttatagaatgtacaaactgatgatagctatcagtatccacagggttaaaaatggtcacttcattgacctccccaaccacttttacaaagaatattatcctcttttaaagagcattccraatttccaggagacacttgcttatttctctaaacattttgggcttgaaatgactccagatacaatcgctcaaatttttatttcttttcttcagaatgatattttcctagatcctcaagaattcttcaactctttagaagataacagtcaagcaagatactcttaccaattacttagtcaaatattagaasgcctatcaawacaatataagattacttttactaaccacgatgagctgatttggcatttacacaacactgctttctttgaaagacaggaaatcttttctaccccaatcttatttgaacaaaaagcattgacgattaaaaaatttgaagtttacttcccagactttatgggaagtgcgcgtcaagaaytggctcaataccgtcaggcaattggacagcatgaccatcctgaacagttggaacacttgatgtacaccatcttaacccatgctgaaaacctctctactcagttgttagaaaatcgaccacctatcaaggttttgattatcagtaactttgaccatgctatatcccttacctttgttgatatgctttcctattactgtaataaccgctttaccttcgatatttgggatgaattaaaaacaagtcctgagattttaaatcagacagattacgatatcatcgtgtctaatttctatattycagggattaccaagaagtttatttgccgaaatcatctgtcaatcatgaatttggttaatcatcttaacaccttatcaaatgagattcatttgtccaatactttataa

SEQ ID NO: 1267 - DNA, 1614 bp, Streptococcus pneumoniae
  misc_feature (1)..(1614): tiling:Spneumo1:WAN024FWB; Cluster includes WAN0243W0 spr1 203|ABC-NP|15903246|NP_358796.1|1198448..1200055|-|1608 bp |ABC transporter ATP-binding/membrane spanning protein - m ultidrug resistance|S.pneumoniae|R6|NC_003098.1|ORF|211
atgaattatttaaaatttataaaaaagactaaacttatattaatggggattttaatatttctatcttcgtttaatggtgtcttgctctcaggaattattgtatatgcaggtagtttaaatcagacttcctcattttctgacgttctaagatttggtgctataagtattctgggttggtcagcaatctatatatcaaattactatttagaagtaacggaagcatcaataackaaagatataaatgtaaaaattaaacaaggatattttagagaacagtatctttyttctgaaatggttaaagattactcatctattatttcagttttgtcaaatgatttgagattaatcgaagaaaactattttagacaaatttttgaaataatttcttcaatattgttgttcatcgtctctctaagttttatgctttatttaaacttcctagtttcaataatatttattgtattatcagcattgccgattatagtacctgtctttatgaagaagatgttgtctaattcagctaatgagtactctaacagcaatgcagagtatactcacataataaaagaaatttttaatggttttaagacattaaaatcttattctgttactaaagaaataattagtttgtcggataaaaagttggataaactagaagattctacttttaatttgaaacgatcagaggttctttcaaaattggttgcagtactaatttcaggtttttgctttctagttcccttggttgtaggatgttattttgtaatttatcataaaagcctttcttttagtgaactgataggtattttcttagcaaacgataaagttttagggccgatacaatcaattgcctattcattaaataagataaatacaaccaaagatttaaggaaaccgtttttaaaatacttaagtggagagaagaattttrtagaygctgaacatgataataacggactgtatacttcatcaatagatgagatacacatgaaagatgttgtatattctattacaccagaaaataaattaagtattgacttctcatttaagtcaccatttagggtattattaacaggaacttctggyagtgggaaaacaacgattttaaatttaattaatggttctttaaagccacaaaaaggttatgtaaatttgttatcacatgggaaaaagagttcagattcaataccaacagttgatcagacaccatatatttttgacactactattcgtgagaacgtaactttatttcaaaatgaatatttttcagatgatcagataattgaggtgttaaaaaaggtaaatctatatgaagaattagaaaagatagatatactaaattatcaatgtggtgaaaatggtagtaatttgtctggaggtcaaaaacaaaaaatagctttagctagagctctgattagaaataataaagtgtacttatttgacgaaatatcagctaatttagataatgataattcmaattccatacatgatattctgttcaatttaggtatttcatttattgaagtttcacatcattatgacttaaatgacaagagatacactgatatatataaattggaaaatggaacacttttcaaaattaagykaactaat

SEQ ID NO: 1268 - DNA, 261 bp, Streptococcus pneumoniae
  misc_feature (1)..(261): tiling:Spneumo1:WAN024G4F; Cluster includes WAN023LG3 3144 83_1938||||1048786..1049046|-|261 bp|EGAD orf prediction|S .pneumoniae|R6|NC_003098.1|ORF|110
atgaattattttcgaaaacgtagggagagacaagcgaaatctaatagtggaatttactgtccygcagctaatcgttccaaaattcaatatgaaactaaagaaaaagctgaccatgcggttcaatatgataacggaggtttagttagaagctattattgtcgtacatgtgcgtgttggcatactacttcaaaatctaataaacctccgctaagtttgaaaaactatggtctgaaactctttggtttagataaatcagaatag

SEQ ID NO: 1269 - DNA, 228 bp, Streptococcus pneumoniae
  misc_feature (1)..(228): tiling:Spneumo1:WAN024GMA; Cluster includes WAN023KH6 3132 81_3479||||1864386..1864613|+|228 bp|EGAD orf prediction|S .pneumoniae|R6|NC_003098.1|ORF|110
atgaattcactagcctgggcaatattggctgcgcgctccatttcaaatagagtagcattccccttcccctgtctcaagttatctgcaatcgttccactaaaaagaatggcacgttggagaacgatggaaactgttttacgcagggttccttcactcacttctcgaatatccttgccaccgattttaatggccccgtcctgtggatcaaagagacgtggaatcaattga

SEQ ID NO: 1270 - DNA, 102 bp, Streptococcus pneumoniae
  misc_feature (1)..(102): tiling:Spneumo1:WAN024CNO; Cluster includes WAN0246SH 5613 45-65-1||||||102 bp|DNA Streptococcus pneumoniae phage Dp- 1 open reading frame 261|S.pneumoniae||WAN0246SH|ORF|000
atgaattcacttccctttgccctaaaacaggacagcctgacttcgcgaatgttttcattagttacattccaaacgaaaagatggttgaatctaaatcattga

SEQ ID NO: 1271 - DNA, 270 bp, Streptococcus pneumoniae
  misc_feature (1)..(270): tiling:Spneumo1:WAN024FIL; Cluster includes WAN023KYV 3138 40_2674||||1424553..1424822|+|270 bp|EGAD orf prediction|S .pneumoniae|R6|NC_003098.1|ORF|110
atgaattccttctgcacggaagccacgaattttcaaaccacgagtcaattcatccacacggcgtttggtacgaccaaatacaatagcgagttctggttgtgccacatccatgagacgagtcatggtgtcaaatttttcttgttccttaacacggatatagtactggtcaaccaattctgttgtcaattccttagccgcaatcttgacatgttcaggggctttcataaactgaacaccgatacgtttgatggcatctggcatagttgctga

SEQ ID NO: 1272 - DNA, 323 bp, Streptococcus pneumoniae
  misc_feature (1)..(323): tiling:Spneumo1:WAN024DBN; Cluster includes WAN024431 spr0 949||15902993|NP_358543.1|933794..934111|+|318 bp|Hypothet ical protein|S.pneumoniae|R6|NC_003098.1|ORF|111
atgaattgtagaggacatgaaacaagacaaagaattgttagagattttgaagttcagcctaaagyacatattaagctgttagcaaatcaacaaaaacatagtgatgcaggagcaactattgaagatgaatattatgtatttatcgctgagagtaaaattgatggcaagaaggaagttattcagtgttgcatgggtgcggcaagggattttttagaactaattaatcacaaagggytacctctttttaatccgcttgtaggtgattctcatgtaaataatagacaagaatatgacaatacagggagtggaaatttataactaat

SEQ ID NO: 1273 - DNA, 1219 bp, Streptococcus pneumoniae
  misc_feature (1)..(1219): tiling:Spneumo1:WAN024D87; Cluster includes WAN0240T6 |cps 3M||AAC96026.1|||1218 bp|Cps3M|S.pneumoniae||U66845|ORF|00 0
atgaattgtatagaaagttatcaaaaatggctaaatgtccctgatcttccagcttatttaaaagatgaattgctcagcatggatgacaaaacaaaagaagacgccttttacacaaaccttgaattcggaacagctggtatgcgtggttatattggtgctgggacaaaccgtattaatatctatgtggtgcgtcaagcacacagaaggccttgccaaattagttgaatcaaaaggcgaaacsgccaaaaaagctggggttgctattgcctatgactcgcgacatttttcaccagaattcgcttttgaatctgcccaagtattagcggcccatggcattaaatcttatgtttttgaaagcctacgccctactcctgagctgtcttttgctgttcgtcatctcggagcatttgctggtattatggtaaccgccagtcatacccctgctccttttaatggttataaagtttacggttctgatggtgggcaaatgcttccagctgatgctgatgctttaactgactatattcgtgcgattgataacccatttgctgtagtccttgctgacttagaagaagctaaatcaactggtcttattgaagtaattggtgaaactctcgatgctgcctaccttgaagaggttaaaagcgttaatatcaatsaagatttgattgaccaatacggtcgcgatatgcaaattgtctacacacctcttcatggtactggagaaatgctagcacgtcgagctttagcacaagctggtttcgaatctgttcaagttgtcgaagctcaagcaaaaccagacccagacttctcaacagttgcatcaccaaaccctgaaagtcaagccgcctttgccttagctgaagaactagggcgtcaagtcgatgctgatgtattagtggcgactgaccctgatgctgaccgtctcsgtgttgaaattcgtcaagctgatggcagttattggaacctttctggtaaccaaatcggtgctcttatcgccaaatacattttagaagctcacaaacaagctgggacactcccaaagaatgctgcattggcaaaatcaatagtatcaactgaattagtcaccaaaattgcggaaagctatggygcaaccatgtttaacgtswtwacaggtttcaaattcatcgctgagaaaattcaagaatttgaagaaaaacataaccatacctacatgtttgggtttgaagaaagctga

SEQ ID NO: 1274 - DNA, 924 bp, Streptococcus pneumoniae
  misc_feature (1)..(924): tiling:Spneumo1:WAN024CJF; Cluster includes WAN0242HC SP10 62||15900932|NP_345536.1|997547..998464|+|918 bp|ABC trans porter, ATP-binding protein|S.pneumoniae|TIGR4|NC_003028.1 |ORF|010
atgaattgtttcttgaaaatgaataatgtaagtgttcgttatgatgacgtaatagctttaaaagatataactttacaaataaataagggagatttcattggcttattaggttcaaatggtgcaggtaaatctacgttaattaattctattgtaggttttcaagagatttatttaggagaaatagagtattgtgataaagatttgatagttagttctcaaccttttgctcatttaggctttactcctcaaaccacagtaattgatttttatactactgtgaaggacaatgtaatattggggctgaaccttgctggaaagtttgggaaaaatgctgagaagttgtgtcaaatagccttagaaattgttgggttagctgataaaaaaaataatttggtagaaacattgtcaggtggacaactgcaacgcgtccagattgctagagcaatagctcataatccagatttttatattttagatgaacctaccgttggtttagatactgaatctgccgaaaaatttttaatgtatttaaaagataagagtttggaaggaaaaactattatcatatcttcacatgacataaatctactcgaaaagttttgtaaaaaaatactttttttacaaaatggctccatatcattttttggtgatatgcgtgactttgtagataattcaactatcaaattaaatttttcaatgcagaatagaatttctagatatcaaattgaatttttagaaaattttagatttaaagttcacatcgaagataatgatagttttacaatagaagtccctatagaagaaaagatcttagatgttatcaatgaggtaggaaaagcatgtgaaattaaaaacttttcaacaagtaaattaaccttacaagaaagttatttgcaaagaataggaggagaaaaaykaactaat

SEQ ID NO: 1275 - DNA, 504 bp, Streptococcus pneumoniae
  misc_feature (1)..(504): tiling:Spneumo1:WAN024CZN; Cluster includes WAN0243E5 spr1 847|PTS-EII|15903889|NP_359439.1|1823351..1823836|-|486 bp |Phosphotransferase system sugar-specific EII component|S. pneumoniae|R6|NC_003098.1|ORF|111
atgaatttaaaacaagctttaattgacaatgactcgatccgactaggtttagaggctaacrattggaaagaagcagtcaaggtagcagtagatcccttrattgaaagtggggcaattttgccagagtattacgatgctatcattgaatcgactgaagagtatgggccttactatatcttgatgccaggtatggctatgccccacgctagacctgaagcwggtgtgcaaagtgatgccttttcattrattaccttacaaaatcctgttgtattttcagatgggaaagaggtatctgttttgttggcactagcagcaacaagytcaaaaattcacacaagtgtagccattccacaaattattgccctrtttgaattagaagattctattgcacgtttacaggcttgccagactaaagaagatgtcttggctatgattgaagaatctaaggatarcccttatctcgaaggattggatttggaaagttarmtaakaggaataaagaaa

SEQ ID NO: 1276 - DNA, 507 bp, Streptococcus pneumoniae
  misc_feature (1)..(507): tiling:Spneumo1:WAN024DIR; Cluster includes WAN0244IR spr0 383|accB|15902427|NP_357977.1|382363..382848|+|486 bp|Biot in carboxyl carrier protein of acetyl-CoA carboxylase|S.pn eumoniae|R6|NC_003098.1|ORF|111
atgaatttaaacgatattaaagacttgatgactcaatttgaccagtcaagtttgagagaattttcttataaaaatgggacggatgagttgcagtttagcaagaatgaagcragacctgtgcctgaagttgcaactcaagtcgctccagcacccgttctagcaacaccgagtccagtagctcctacatctgctccagcagagactgtagcagaagaagttccagctccagctgaagcaagtgtggctastgagggaaatcttgtagagagtccacttgttggagtggtttacttggctgctggaccagataaacctgccttcgttacagttggtgatagtgtcaaaaaaggtcaaacattggtaattatcgaagccatgaaagtcatgaatgaaatcccagctcctaaggatggtgtggtaacggaaattctcgtctctaacgaagaaatggttgagtttggtaaaggattggtacgtatcaaaykmrmkaaycaccaccaccaccac

SEQ ID NO: 1277 - DNA, 353 bp, Streptococcus pneumoniae
  misc_feature (1)..(353): tiling:Spneumo1:WAN024DFP; Cluster includes WAN0244BJ spr0 643||15902687|NP_358237.1|651331..651678|+|348 bp|Hypothet ical protein|S.pneumoniae|R6|NC_003098.1|ORF|111
atgaatttaaatcaattagatattatcgtttcaaatgttccccaagtctgtgctgacttggagcatatyttggataaaaaggcagattatgctratgatggttttgctcagtttacgattggtagtcactgccttatgttgtcacaaaatcatttggttcctttggaaaactttcagtcaggaatcattattcatatcgaggttgaggatgtagaccagaactacaaacggttgaacgagcttggtataaagsttttacacggaccaactgtaaccgattggggaacagagtccttattagttcaaggacctgctggtctagtgcttgatttttatcgtatgaaatarctaat

SEQ ID NO: 1278 - DNA, 206 bp, Streptococcus pneumoniae
  misc_feature (1)..(206): tiling:Spneumo1:WAN024AUY; Cluster includes WAN0243RH spr1 366|atpE|15903409|NP_358959.1|1348096..1348296|-|201 bp|Pr oton-translocating ATPase, F0 sector, subunit c|S.pneumoni ae|R6|NC_003098.1|ORF|121
atgaatttaacatwtttaggcttatgtattgcctgtaygrscgtatctgtcrgtgaarstttattgatkwwtggactgtttaaatcagtagcacgccaaccagatatgctttctgagtttcgtagtttgrtgtttttagbtkttrccytkattgaagsaactttctttstaactcttgtcttctcatttattatcaaataactaat

SEQ ID NO: 1279 - DNA, 714 bp, Streptococcus pneumoniae
  misc_feature (1)..(714): tiling:Spneumo1:WAN024FL6; Cluster includes WAN023OS0 pne7 5_18||||11419..12132|+|714 bp|Type 35A2 capsule operon, Gl immer 2.02 orf prediction|S.pneumoniae||WAN01UCEX|ORF|000
atgaatttagcagttatttttgctggaggmtccggtacgcgaatgaatgcaaaggatagacctaagcagtttcttttggtacatggtaagccaattattgttcacactattgagctatttgagaaccatccagagattgatggaattatcgttgtttgtattgargattggattccgtatatggaggagatgaaatatygctatagattagataagattgctaagattgttccagggggggcaactggtcaattatctatttataatggtttagtcgcggctgaacaastttatggaatagaggataatgttgtgttaatccatgatggagtccgtcctttaattacagcagacactatttcagataacatccaatccgtaaaagaaaagggaaatgctattacttgtacagtggccaaagaaacagttatcttagtagatgatgaaaataaggtagrcgaagtgcctagtcgtgaacattcgcgatttgccaaggctcctcagagtttttggctaaaagatattctaggtgcacatcgagmctctgtagataayggtagaaatrattttattgattcatgcaccatgatgagayaytatggtcatgatttacatgttgttgttggtccgtatgagaatattaagattacaacgcctgatgatttttatayatttagggctttgtacgatcttcgtgagaatragcaactaaaa

SEQ ID NO: 1280 - DNA, 706 bp, Streptococcus pneumoniae
  misc_feature (1)..(706): tiling:Spneumo1:WAN024DI7; Cluster includes WAN02445B-5 sp r0867|lytB|15902911|NP_358461.1|858971..861136|+|2166 bp|E ndo-beta-N-acetylglucosaminidase|S.pneumoniae|R6|NC_003098 .1|ORF|111
atgaatttaggagaattttggtacaataaaataaataagaacagaggaagaaggttratgaagaaagtaagatttatttttttagctctgctatttttcttagctagtccagagggtgcaatggctagtgatggtacttggcaaggaaaacagtatctgaaagaagatggcagtcaagcagcraatgagtggrtttttgatactcattatcaatcttggttctatataaaagcagatgctaactatgctgaaaatgaatggctaaagcaaggtgacgactatttttacctcaaatctggtggctatatggccaaatcagaatgggtagaagacaagggagccttttattatcttgaccaagatggaaagatgaaamgaaatgcttgggtaggaacttcctatgttggtgcaacaggtgccaaagtaatagaagactggrtctatgattctcaatacgatgcttggttttatatcaaagcagatggacagcacgcagagaaagaatggctccaaattaaagggaaggactattatttcaaatccggtggttatctactgacaagtcagtggattaatcaagcttatgtgaatgctagtggtgccaaagtacagcaaggttggctttttgacaaacaataccaatcttggttttacatmaaagaaaatggaaactatgctgataaagaatggattttygagaatggtc

SEQ ID NO: 1281 - DNA, 710 bp, Streptococcus pneumoniae
  misc_feature (1)..(710): tiling:Spneumo1:WAN024D64; Cluster includes WAN0243NF spr1 512||15903555|NP_359105.1|1489540..1490244|-|705 bp|Hypoth etical protein|S.pneumoniae|R6|NC_003098.1|ORF|111
atgaatttatgggatattttctttacgactcaggcaaccragccgcccaaatttgaccttttttggtatgttagcctatttacgctcttagccttaaccttttatacagcccatcgctatcgtgaaaakaaggtttaccaacgatttttccaaatcttgcagactgttcagttaatccttctttatggttggtactgggtcaatcatatgccactgtcagaaagcctacccttttaccattgccgtatggctatgtttgtggtactcttgcttcctggtcartccaaatataaacaatactttgcattattgggaacatttgggacattagcagcctttgtttatccagtgccagatgcttacccttttccacatatcaccattctatcctttatctttggtcatttagcactcttggggaactctctagtttatctattgagacagtataatgcgcgattgctggatgtgaagggaatttttctcatgacctttgccctaaatgccttgatttttgtggtcaatttggtgacaggtggcgattacggatttttgacaaaaccgccattggttggggatcacggtctagtagctaattatttacttgtttcaattgtgctggtagctactatcagtttgactaagaaaatcttagaattctttttagctcaagaagcagaaaaaatgattgyaaaggaagcttaactaat

SEQ ID NO: 1282 - DNA, 849 bp, Streptococcus pneumoniae
  misc_feature (1)..(849): tiling:Spneumo1:WAN024FYW; Cluster includes WAN0243XF spr1 152|licD2|15903195|NP_358745.1|1153665..1154474|+|810 bp|l icD Protein|S.pneumoniae|R6|NC_003098.1|ORF|111
atgaatttcacgcttataaattggaggattaggatgcaatatttagaaaaaaaagaaattaaagaaattcaactagccctgctggactatattgatgagacttgtaagaaayatgatattccttattttctcagttatrgaaccatgcttggagccatccgccacaaaggtatgattccttgggatgatgatattgatatttccctttatcgtgaggattatgagcgtttactgaagattattgaagaagaaaatcaccmtcgctacaargttctttcctacgatacatcttcttggtacttccataatttcgcatcgattttggacacttctactgttatagaagaccatgttaagtacaagcgtcatgataccagccttttcatcgatgtcttcccaattgatcgatttacagacttgagcattgtcgacaagagctataagtatgtggcycttcgtcaactagcttayatcaaaaaatcacgagcagttcacggtgatagcaaactaaaagattttcttagattatgtagctggtacgctctccgatttgtcaatcctcgctacttwtacaagaaaattgatcaaytagtcaaaaatgctgtaaccaacactcctcaatatgaaggaggagttgggatcggtaaggaagggatgaaagaaatcttcccagttgatacctttaaagaactsatyttaactgagtttgagggccgtatgttgcctgttcccaaaaaatatgaccaatttttaacccagatgtatggcgattatatgacaccaccatcaaaagaaatgcaagartggtatagtcatagyattaaagcttatcgyaaaarcykaactaat

SEQ ID NO: 1283 - DNA, 154 bp, Streptococcus pneumoniae
  misc_feature (1)..(154): tiling:Spneumo1:WAN0249E9; Cluster includes WAN024E3F R6.I G_2225.2||||2010580..2010733|+|154 bp|Between E (transposa se) (- strand) and spr2019 (tsf) (- strand)|S.pneumoniae|R 6|NC_003098.1|IG|110
atgaatttgaagtatagtctcctaaatgcacttagcccttattatagggctttttgttttaattattctaatcgagtgagactggggraaaaacaatttcaggaaaaatmtaagccctatacaaaaaaggaagcaawttgcttcctttctatta

SEQ ID NO: 1284 - DNA, 302 bp, Streptococcus pneumoniae
  misc_feature (1)..(302): tiling:Spneumo1:WAN024C9J; Cluster includes WAN0244O4 spr0 190|rplW|15902234|NP_357784.1|197350..197646|+|297 bp|50S Ribosomal protein L23|S.pneumoniae|R6|NC_003098.1|ORF|111
atgaatttgtatgatgttatcaaaaaacctgtcatcactgaaagctcaatggctcaacttgaagcaggraaatatgtatttgaagttgacactcgtgcacacaaacttttgatcaagcaagctgttgaagctgctttcgaaggtgttaaagttgccaatgttaacacaatcaacgtaaaaccaaaagctaaacgtgttggacgttacactggttttactaacaaaactaaaaaagctatcatcacacttacagctgattctaaagcaatcgagttgtttgctgctgaagctgaataactaat

SEQ ID NO: 1285 - DNA, 219 bp, Streptococcus pneumoniae
  misc_feature (1)..(219): tiling:Spneumo1:WAN024CF5; Cluster includes WAN023RW3 cont ig_1609_41||||28305..28523|-|219 bp|Glimmer 2.02 orf predi ction|S.pneumoniae|670|WAN01UDCD|ORF|001
atgaattttggacaaaacctttataactggtttctatcaaacgctcaatcactggtgcttttagcaatcgttgtgattggcttgtatcttggcttcaagcgtgagtttagcaaactgattggctttttaattattgcgattattgcggttggcttagtcttcaacgctgctggagtaaaagacattttactagagctattcaatcgcattattggtgct

SEQ ID NO: 1286 - DNA, 840 bp, Streptococcus pneumoniae
  misc_feature (1)..(840): tiling:Spneumo1:WAN024FNN; Cluster includes WAN023PB4 pne4 5_15||||11909..12748|+|840 bp|Type 22F capsule operon, Gli mmer 2.02 orf prediction|S.pneumoniae||WAN01UCHA|ORF|000
atgaatttttgttttgtgattttgcattatcgtaccagcaatgacactatagagtgtatcaaatcgattcaaaagcttgagggaaattataaaattgtaattgttgataacgcttctcaaaatggcagtatagaaagggtagaagccttatttgcaaataatgacgagatagttataataaaaaacacgaaaaacttaggatttgctgcaggaaataatattggatacgcctatgctcggactcaaataaaagctaatatgattgctgtacttaataatgatattgttattaagcaaaaagatttcattaatcgtatatttgaactctatagaaattctcagtttcatatcgctggtccagacattgtctctcttgtagatggtcatcatcaaagtcctgttgttgagaagatcaattctatatctaaggcaaataaagaactttttaaatatagaatcttgagaattattaataaaataggattatatgagctgatgactagacagccaaaaaaaaaattaaatagagtaagtgctgcagaccctataggatatcaggaaaatgttattttacatgggagttgtgtaattttttcaccattatatgtttcagaggaggagtttgcttttagaccagatacgttcatgtatatggaagagcctattctatatgaatattgcatgcttaaaaattataagacagtatttgatccttctattgtaatttatcataaagaggactcatcaacaaattcgttgtataatgcggcatatgcaaaaagagagtttgtttttaaaaatatgattagatctctaaagatttatagaagtctattgaag

SEQ ID NO: 1287 - DNA, 1005 bp, Streptococcus pneumoniae
  misc_feature (1)..(1005): tiling:Spneumo1:WAN024CJ5; Cluster includes WAN0242B8 SP12 92||15901152|NP_345756.1|1226596..1227594|+|999 bp|SAP dom ain protein|S.pneumoniae|TIGR4|NC_003028.1|ORF|010
atgaatttttttagcaaactatttaatttaaaacaaaataatcataatagagacacaaattctgattgtaacaatttttacctaaacgaattagaatgtggccttactcctgggcaactcatactcatagattggactcaaaaaacagggagaaattataatttcccaagatattttaaatactctcttcaaattgaccctgaatctacacacaatcaattatacaaattaggatacttcactaaaaataagactttatcatatcttacagtagtagaattaaaaactatattatctaaacataatttagctacttctggaaaaaaagcagaattaattacaagaataattaataatgttaacattgacaatttagatattccgttcgaatttaaactaacaaaagaagcacaaaatcttattatcgaacatagtgactatatcaaagcatactatgataaagacataactatggaagattattgtaaagaaaaaaacaatatctcttttaaagcaacttttggtgatataaaatggagtctcttaaataaacaagctcataggaatactgtatcaggagattttggatgcttatctaacacacgaaaggctcagggaagacatttggaacaagaaggtaatattaaacatgctttaatatattacatagaatctttgataattactatttcaggattagaaaacaatttttcagccactgattatccagtatattatcccgattcgatacctgactactcactaaaacatattcaaacattaatggaatcattatctgatgacgattatgattttgcttttgatgaagcattatttcgcttctcaattttgaatgcaaatcattttttatctaaggaagatattgactatttaagagttaatttacctcgttccactgctgaagaaataaacaattacttaaagaaatatgaatgttatagtcctttaaataatttagaacttgacgattttgaactaactaat

SEQ ID NO: 1288 - DNA, 620 bp, Streptococcus pneumoniae
  misc_feature (1)..(620): tiling:Spneumo1:WAN024B2H; Cluster includes WAN0244JA spr0 364|spi|15902408|NP_357958.1|363875..364489|-|615 bp|Signa l peptidase I|S.pneumoniae|R6|NC_003098.1|ORF|111
atgaattyatttaaaaatttcttaaaagagtggggaytrttcctcctrattctgtcattactagctttragycgtatctttttttggagcaatgttcgcgtagaaggacattccatggatcckaccctagcggatggygaaatyctcttygttgtwaarcwcctycctattgaccgttttgatatcgtggtkgcccatgaggaagatggsaataargacatygtyaarcgygtsatyggaatgcctggygayaccatycgttacgaaaatgataaacthtacatcaatgacraagaaacggacgarccttatctagcagactatatcaaacgmttcaagrmygacaaactccaaagcacytactcaggcaagggmtttgaaggaaataaaggaactttctttagaagtatcgctcaaaaagcycaakccttcacagttgatgtcaactayaayaccaactttagctttacwgtyccagaaggagartaccttctcctyggagaygaccgcttggtttcgagcgacagycgccacgtrggtaccttcaaagcaraagatatcacaggggaagctaaattccgcttmtggccaatcacccgtatcggaacattttaactaat

SEQ ID NO: 1289 - DNA, 1697 bp, Streptococcus pneumoniae
  misc_feature (1)..(1697): tiling:Spneumo1:WAN024G3O; Cluster includes WAN0243ZP spr1 070|lacE|15903113|NP_358663.1|1068652..1070343|-|1692 bp|P TS system, lactose-specific IIBC component|S.pneumoniae|R6 |NC_003098.1|ORF|210
atgaayaaactaattgcatttatcgagaaaggaaagcctttctttgadaaactatctcgtaatatctatcttcgtgctattcgtgatggtttcattgcaggtatgcctgttattctcttctcaagtatctttatcttgattgcctttgtaccaaactcatggggctttaaatggtctgatgaagttgtagcctttctgatgaaaccttatagctattctatgggtattctggctctcttggtagctggtacaacagctaagtcattgacygactcagtaaaccgkagcatggaraaaaccaatcaaatcaastatatgtcaacrytgttrgcagcrattgttggtttgttgatgttggcagctgatcctatcgaaartggtctagctactggattcttggggacaaaaggtttgctttcagccttccttgctgcctttgttactgtagccatctataaggtytgtgttaagaacaacgtcactattcgtatgcctgacraagttccaccaaatatctcacaagtctttaaagatgtgattccattcactctatcwgtkgtttctctttatgctcttgayttaytagcwcgtyattttgttggttctagtgtggcagaatcaatcggtaaattcttcgcaccactcttctcagcagcagacggataccttggtattaccattatctttggtgcctttgccttcttctggtttgtkggkattcatggtccatctatygttraaccwgctatcgcagckattacctatgcmaatgcygaagtyaacttgaaccttctccaacaaggkatgcaygcwgayaaratycttacttcwggwacwcaaatgtttatcgttacyatgggwggtacwggtgcgacwytkgtygttccattyatgttcatgtggttracaaaatcraaacgtaaccgtgcaatcggwcgtgcttcagtagttccwacyttcttyggtgtaaatgaaccaatcttgtttggtgcaccdcttgtwttraayccratyttcttcattccatttatytttgctccwatygcaaacgtwtggawyttyaaattcttyattgaaactcttggaatgaaytcattyactgctaatctaccatggacaactccagctccactaggtctagttcttggaactaacttccaagtgctatcattcattcttgctgcccttctaatcgtggttgacgttgtcatttactatccattccttaaggtctatgatgaacaaattcttgaagaagaacgttcaggtaagtcwaatgatgaattgaaagaaaaagttgctgcaaacttcaacactgcaaaagcggatgctattcttgaaaaagcrggtgtcgatgcagcacaaaataccatcactgaagaaacaaatgtcctcgttctctgtgcwggtggaggwacaagtggtctccttgcaaatgctytraataaggcagcagcagaatacaatgtccctgtgaaagcagcagcaggcggctatggtgctcaccgtgaaatgttaccagagtttgatcttgttatccttgcccctcaagttgcttcaaactttgaagatatgaaagcagaaacagataagctcggtattaaactagcgaaaacagaaggcgctcaatacatcaaattaactcgtgatggaaaaggtgctcttgcattcgtacaagcgcaattcgattaactaat

SEQ ID NO: 1290 - DNA, 2111 bp, Streptococcus pneumoniae
  misc_feature (1)..(2111): tiling:Spneumo1:WAN024C5D; Cluster includes WAN0244KV spr0 307|clpL|15902351|NP_357901.1|306052..308157|+|2106 bp|ATP -dependent protease ATP-binding subunit|S.pneumoniae|R6|NC _003098.1|ORF|111
atgaayaacaaytttaataattttaayaacatggatgatttatttaaccaattgatgggtggtatgcgaggatayagttctgaaaatcgmcgttacttrattaatggacgygaagtsacacctgaggaatttgctyactatcgtgcractggtcaattrccaggaaatgcagaawctgatgtgcaaatgcmacaacaggcwtcaggtatgaaacaagryggtgtccttgcwaaactrggtcgaaacttracagcagaagcgcgtgagggcaagytggaycctgttatcggacgaaacaaggaaattcaagaarcatctgaaatcctctcacgccgyaccaagaacaatcctgttttrgtcggagaygcaggtgttggtaagacagcmgttgtcgaaggyctagcgcaagcsattgtgaacggmgatgtyccwgctgctatyaagaacaaggaaattrtttcyattgatatctcaggtcttgaggctggtactcaataccgtggtagctttgaagaaaatgtccaaaacttrgtcaatgaagtgaaagaagcagggaatattatcctcttctttgatgaaattcaccaaattcttggtgctggtagcactggtggagacagtggttctaaaggrcttgcggatattctcaagccagctctctctcgtggagaattgacagtgattggggcaacaactcaagacgaataccgtaacaccatcttgaagaatgctgctcttgctcgtcgtttcaacgaagtgaaggtcaatgctccttcrgcagagaatacttttaamattcttcaaggmattcgtgayctctatcaacaacaccacaatgtcatcttgccagaygaagtcttgaaagcagcggtggattattctgttcaatacattcctcaacgtagcttgccagataaggctattgaccttgtcgatgtaacggctgctcacttggcggctcaacatccagtaacagatgtgcatgctgttgaacgagaaatcgaaacggaaaaagacaagcaagaaaaagcagttgaagcagaagattttgaagcagctctaaactataaaacacgcattgcagaattggaaargaaaatcgaaaaccacacagaagatatgaaagtgactgcaagtgtcaacgatgtggctgaatctgtggaacgaatgacaggtatcccagtatcgcaaatggragcttcagatatcgaacgtttgaaagatatggctcatcgcttgcaaracarggtgattggtcaagataaggccgtagaagytgtagctcgtgctatcygtcgtaaccgtgctggttttgatgaaggaaatcgcccaatcggcarcttcctctttgtaggrtctactggggttggtaagacggagcttgctaagcaattggcactcgatatgtttggaacccaggatgcgattatccgtttrgatatgtctgaatacagtgaccgcacagctgtttctaagytaattggtacaacagcaggctatgtgggttatgatgacaatagcaataccttaacagaacgtgttcgtcgcaatccatactctatcattctcttggatgaaattgaaaaggctgaycctcaagttattacccttctcctccaagttctagatgatggtcgtttgacagatggtcaaggaaatacagtaaacttcaagaacactgtcattattgcgacctcaaatgctggatttggctatgaagccaacttgacagaagatgcggataaaccagaattgatggaccgtttgaamcccttcttccgtccagaaytcctcaaccgctttaatgcagtcatcgagttctcacamttgactaaggaagayctttctaagattgtagatttgatgttggctgaagttaaccaaaccttggctaagaaagacattgacttggtagtyagtcaagcggctaaagattatatcacagaagaaggttacgaygaagtcatgggggttcgtcctctccgtcgmgtggttgaacaagaaattcgtgataaggtgacagacttccacttggatcatttagatgctaaacatctggaagcagatatgraagatggcgttttggttattcgtgagaaagyctaactaat

SEQ ID NO: 1291 - DNA, 249 bp, Streptococcus pneumoniae
  misc_feature (1)..(249): tiling:Spneumo1:WAN024G33; Cluster includes WAN023LEJ 3148 71_2008||||1082303..1082551|+|249 bp|EGAD orf prediction|S .pneumoniae|R6|NC_003098.1|ORF|110
atgaaycttagcatctcgaataattccatttttcccaatctgctcacgtcctgcctcaaactgaggtttgacaagtgctaccacctgaccttgatcagccaagacacggtgcaaggctggcaaaatcagactaagggaaatgaaactcacatcaatactggcaaagctcggctcctgctcgaaatcagtcttttcagcatagcgraaattgaactgctccatgctgacaactcgtgggtcttggcgtaa

SEQ ID NO: 1292 - DNA, 1368 bp, Streptococcus pneumoniae
  misc_feature (1)..(1368): tiling:Spneumo1:WAN024B3J; Cluster includes WAN024175 |cps 9vE||AAM62289.1|||1368 bp|UDP-glycosyl-1-phosphate transfe rase Cps9vE|S.pneumoniae||AF402095|ORF|001
atgaaygrraaaryaktaardymytcattggccataatycakagyttycttrttattttattgacttatctacttagtrctgtgagagaarcggagattgyttcarcaacagctattgcactttrtatcctmcattattttktyttttatatcagtgwttatggrcargmtttctttaaaagrrgatatttgattgaacttvtccagacattgaaatatatcctattctttgcactagcgattrgtatytctaattttttcttagaggatcratttartatttccagacgaggcatgatttacttcctmacattacatrctcycttrgtctatgkgctaaamctatttatcaagyggtattgkaagcggrcttatcycaaytttaaaggargtaagaagatyctcytrcttacagcaacttytcrtrtcgaaaargtactggatagattaatagaatcaaatgagktkgttgggragttgrtagcygtcagtgtcttagataaaycagattttcagcatgattrtttaaagrtagtagcagaggrggrgatagtaaactttgygactmaygaggtggtmgatgaagtctttatcratcttccrrgtraaaaatacaatattggagagctkgyytctcagtttgaaacgatgggaattgatgtaayagtyaatctaaatgcttttgrtygtagtttrgcacgtaacaagcaaatycgtgagatggcaggrttaaacgttgtgaytttttctacarcattttataagactagycayvtratbgctaagmgrattattgatatyrtgggtgcattkgtmgggytgataytatgtggtytagyyagtrttgtaytggyycytttgattcraaaggatggggghtctrctatttttgctcagacgcgtatwgraaaaartggtcgycrsttyacyttttayaagttycgctcyatgtgtgtagatgcygaggmsaaaaaaagagaactyatggaacaaaataccatgcarggtggaatgtttaaggyggaygatgayccwcgtatcacgaaarwtggtygttttatacggaagactagcttggacgagctrccacagktttayaatgttctaaagggagatatgagyttggtwggyacacgrccaccaacagtggaygagtatrarcactatachccagaacaaaaacgycgdctragytttaaacctggyrtaacaggbttatggcagrtyagygracgaagtgaratyaaraatttygatgaarttgtyaarttagatgtrgcytatatwrahgrttggacaatytggaaagayattgaratyttrytkaaracdgttaargtwgtattkatgarrgayggagcgaartar

SEQ ID NO: 1293 - DNA, 884 bp, Streptococcus pneumoniae
  misc_feature (1)..(884): tiling:Spneumo1:WAN024C3X; Cluster includes WAN0244K0 spr0 338|mvk|15902382|NP_357932.1|343094..343972|+|879 bp|Meval onate kinase|S.pneumoniae|R6|NC_003098.1|ORF|111
atgacaaaaaaagttggtgtcggtcaggcacatagtaagataattttaataggggaacatgcggtcgtttacggttatcctgccatttccctgcctcttttggargtggaggtgacctgtaaggtagttyctgcagagagtccttggcgcctttatgaggaggataccttgtccatggcggtttatgcctcactggagtatttgratatcacagaagcctgcrttcgttgtgagattgactcggctatccctgaraaacgggggatgggttcgtcagcggctatcagcatagcggccattcgtgcrgtatttgactactatcaggctgatctgcctcatgatgtaytagaaatcttggtcaatcgagctgaratgattgcccatatgaatcctagtggtttggatgctaagacctgtctyagtgaccaacctattcgctttatcaagaacgtaggatttacagaacttgagatggatttatccgcctatttggtgattgccgatacgggtgtttatggtcatactcgtgaagccatccaagtggttcaaaataagggcaaggatgccctaccgtttttgcatgccttgggagaattaacccagcargcagaarttgcgatttcacaaaaakatgctgaaggrctgggacwaatcytcagtcaagcdcatttacatytaaaagaaattggwgtcagtagccytgaggcagactytttggttgaaacrrctcttagyyatggtgctctgggtgccaagatgagcggtggtgggctaggaggttgtatcatagccttggtaaccaatttgacrcacgcacaagaactagcagaaagattagaagagaaaggagctgttcagacatggatagagagcctgtractaat

SEQ ID NO: 1294 - DNA, 671 bp, Streptococcus pneumoniae
  misc_feature (1)..(671): tiling:Spneumo1:WAN024E2F; Cluster includes WAN0243E6 spr1 846|sgh|15903888|NP_359438.1|1822669..1823403|-|735 bp|Hex ulose-6-phosphate synthase (HumpS)|S.pneumoniae|R6|NC_0030 98.1|ORF|211
atgacaaaaagaatacctaatttacaagttgcattagaccattcagacttgcaaggagcgattaaagcagctgtttctgttggtcaggaagtagatattatcgaagctggaactgtttgcttgcttcaagttggaagtgaactggctgaagtcttgcgtagccttttcccagataagattattgtggcagacacaaaatgtgctgatgctggtggaacagttgctaaaaataatgcggttcgtggagcagactggatgacttgtatctgttgtgcaaccatccctactatggaagcagctctaaaggctatcaagactgaacgaggagaacgaggcgaaatccagatcgagctttatggcgattggacttttgaacaagctcagctttggctagatgcaggtatytcacaagctatttatcaccaatctcgtgatgctcttcttgctggtgaaacttggggtgaaaaagaccttaataaggttaaaaaactcattgacatgggcttccgtgtatctgtaacaggtggtctagatgtagatactctcaaactctttgaaggtrttgatrtctttacctttatcgcaggtcgtggaattacagaggctgyggatccagcaggagcagcgcgtgccttcaaggatgaaatcaaacgaatttgggggtaactaat

SEQ ID NO: 1295 - DNA, 1085 bp, Streptococcus pneumoniae
  misc_feature (1)..(1085): tiling:Spneumo1:WAN024FY6; Cluster includes WAN0243XD spr1 154|carA|15903197|NP_358747.1|1158238..1159317|-|1080 bp|C arbamoylphosphate synthase (glutamine-hydrolysing) light s ubunit|S.pneumoniae|R6|NC_003098.1|ORF|111
atgacaaaaagaattctagtattagaagatggcacagtttttgaaggcaaggccttcggagcagatattgatgtaacaggcgaaatcgtctttaatacaggratgaccggctaccaagaatccattacagaccagtcttataatggacaaatcttgacctttacttatcctttggtaggaaattatggtattaatcgtgatgattatgaatccattattccaacttgtaagggagtcgttgtttttgaagaagcgcgtagagctagcaactggcgcaaccaaatgaccttggatgaatttttgaaagccaagaaaattccagggatttcaggaattgatacgcgtgctcttaccaagattatccgtaagcatggtactatgcgtgcaaccttgacccatgttggggacagtatggaccatgtgacggaccagctccaagcaacagttttaccgacagacaatatcaaacaggtttctactaaaacgtcttatccagctccaggagttggtttgagcgtggtgctagtggactttggtctcaagcactcaatcctacgtgaactttctaaacgcaactgtaacgtgacagttgttccttattcgacaacggctgaagaaattctccatctcaatcctgayggagttwtgttgtcaaatggtccaggtaacccagaagacgttccacaagcactcgacatgattcgcggtgtacaaggaaaaattccaatctttggtatttgtatgggacaccaactctttgcaatggcaaacggggctaagacctataagatgaagtttggycaycgtggattcaaccatgcggtacgtgaaatcgcaacaggacgagtagacttcaccagccagaaccatggttatgcagtcagccgcgaggatttgccagagcacttgattattacccacgaagaaatcaatgacaagtcagtggaaggtgtgcgccacagataccaacctgctttctctgttcaataccacccagatgcagcycctggrccacacgacgctagctacctatttgacgagtttatcgagatgatggaartttttaaacaatcaaactaactaat

SEQ ID NO: 1296 - DNA, 1098 bp, Streptococcus pneumoniae
  misc_feature (1)..(1098): tiling:Spneumo1:WAN024B7Q; Cluster includes WAN023P2E pne5 9_18||||15738..16187|+|450 bp|Type 33F capsule operon, Gli mmer 2.02 orf prediction|S.pneumoniae||WAN01UCGI|ORF|000
atgacaaaaagtagaatcaattggatagattttggaaaaggcttttccatatttttagtcttagcaggacatgtgttgcttggactgtatcaatcggaaaaatttcccacagcaaataacatactatcgttgttgatagcacaagtctacatatttcatataccagtattttttgccttatcaggatactttttcaaacctgtgtcggatttgaaggagttctggcaatatgctaaaaagaagacaattgtttttggtctgccatatattttctattcgatcattcactttggtcttcaaaaagttgcaggggcgactgttagagtcccgacgactatatttgatttaataaatatctataaaaatcctattggagtctcatggtatttatacatactctggtcgattttgataatgtatggattagtatctattttaatcaaaaatcgtagaatattatttttgataagtgtttttgcttattgtttaaccctatttgttcaaacagatatttatatyattcaaagaacgctagtttggggtatttgtttctttcttggaagtgtattgaacgaaattcactttaataaaattagtttgaaaaaatttcttgttttctttgtgatatttgactttatttatatgcttgtatggttcttattttatgaagtagagtctaaaagggatagtgtaagctatagtaacccaggggtgtgggggattgcttttattgtctgtatattagttgcgtttgtaatcttccctaaaatatcggaaaaatttcctaaaactttcctatatttcactaaatatggtaaagatagtttaggtatctatatcctccatgcaccaatttgtagcatgattcggattctaatgttgaaagtgggaataaactcagtttttcttcacgttgttgttgggattgtcttgggttggtatttatccatactggcaacttatatattgaaaaaaattccatttttgaatattgttttattaccacaaaagtatattaaattaaaatggctctttgtcaactgtagtgggttgaagtcagctaagctcgagaaaggacaaaattcgtcctttcttttt

SEQ ID NO: 1297 - DNA, 1050 bp, Streptococcus pneumoniae
  misc_feature (1)..(1050): tiling:Spneumo1:WAN024B7Y; Cluster includes WAN023PT6 pne1 3_24||||18529..18840|+|312 bp|Type 9A capsule operon, Glim mer 2.02 orf prediction|S.pneumoniae||WAN01UCJY|ORF|000
  misc_feature (364)..(364): n is a, c, g, or t
atgacaaaaagtagaatcaattggatagattttggaaaaggcttttccatatttttagtmttagyaggrcatgtgttgcttggactgtatcaatcggaaaaatttcccacagcaaayaayatactatcrttgttgatagcacaagtctacatatttcatataccagtattttttgccttatcaggatactttttcaaacctgtgtcggatttgaaggagttctggcaatatgctaaaaagaagacaattgtttttggtctgccatatattttctattcgatcattcactttggtcttcaaaaagttgcagggkcatctgttcgtgttyytacaaccatatctgatttgctaaatatctataaanwtcctytkggrgtttcrtggtatytatatayrytmtggtcgatwttgatartytatggwttaytrtctrttktwktcaaaaatcgtagwmysttwtkttwgwtaagtgttttygcytatwktttmacmctatttrttcaaacwgatatttwtattrtkcaamgracgytrgtttgggggmtttgtttctttcttggcagtgtattgartgaaattcactttgataaaattaatttgaaaaaatttctttttttmtttgtgytatttgattttatttatatgttcgcttggttcttgttttatgaagtagggtctaagaaggattatgtaagctataktaacycaggtttgtgggggattgcttttrttgtctgtgtattagttgcttttgcgatttttcckaaaatggagaaaaattttcctaaaactttcctatatttcactaaatacgggaaagatagtttagggatytatattcttcatgcaccaatttgtagcatgattcggattctaatgttgaaagtrggaataaactcagtttttmttcacgttgttgttgggattgtgctaggctggtatttatccatactagcaacttatatattgaaaaaaattccatttttgaatattgttttattaccacaaaagtatattaaattaaaaggctctttgtcaactgtagtgggt

SEQ ID NO: 1298 - DNA, 1158 bp, Streptococcus pneumoniae
  misc_feature (1)..(1158): tiling:Spneumo1:WAN024DJK; Cluster includes WAN0244KM spr0 316|cps2I|15902360|NP_357910.1|315715..316872|+|1158 bp|Th e type 2 capsule locus of Streptococcus pneumoniae|S.pneum oniae|R6|NC_003098.1|ORF|100
atgacaaaaagtatcttatattttttatctacatctgatatatcatcgggagctacccggtcattgttacgattagtttcgatagttgaggattcagactttagggttattatcattttaccagaacatggaaatgtggaagatgagcttgtaaacaaaggaattaaatactatgttgtaaaacaatatatttggaattattggataaaatatctcagtcatactaaaaatattttttactatttgaaattgccgttaaagtatttattaaacagaatatcgtttcacaaaatcaacagaattataaaaaaagaaaaagttgatattattcatatgaatacgttgacttcttttttaggagctcaggcagcaatcaaacagagaaaaatattaatatggcatataagggagtttatggaagaggacttaggaattgaattttgtaatagaaaaaaagcaattgatttaataaataaatcaacatgtgtaatttctatatctgattcaatttctaaaaatttttccaacgaagttttggcttataaaaaagtcattcataatggtttatcaattgatgactattttatagataaagtcgcatttcagaaccaaaagattaacattttatcttcaggtagaattacgcctggaaaagggcaggttgatttagttagagcgatagctaatcttcctgagagatataaacagatgtttaaagttgatattataggaatagttgaaagcgaagaatattttaaagaaataaaagaagttatttcaaattataaacttgacggtattgagtttcatggttttcaatctgatccaactgattttttcagaaaatgtgatatcgtatgtgtgtgttccaaaaaagaagctttcggtcgtattacagttgagggaatgttgtctggagcgttagttattgggacaaattcaggtggtacaaaagagataatttctacaggagaaacaggatatctgtatgaaccaggagattatatgcagcttagtgaaattttaaaaactataataaacaataggagttccatcttggaaattgctttgagaggacaagagaaggctacattacgtttttcagataaaaataatgccatgcagatcatgcaactatataaggaactagaaaattga

SEQ ID NO: 1299 - DNA, 845 bp, Streptococcus pneumoniae
  misc_feature (1)..(845): tiling:Spneumo1:WAN024DGP; Cluster includes WAN024413 spr1 019||15903063|NP_358613.1|997722..998561|+|840 bp|Conserve d hypothetical protein|S.pneumoniae|R6|NC_003098.1|ORF|111
atgacaaaaattaagattgtaaccgattcatctgttactattgaacctgaactagtaaagcaattagatattacaattgttccattatctgtaatgattgataatgttgtttattctgatgcggatttgaaagaagaaggtaaatttcttcagttgatgcaagaaagtaagaatcttccgaaaacaagtcagccacctgtaggtgtctttgctgagatttttgaagacctatgcaaagatggtggccagattcttgctattcatatgtcccatgctctttcgggtacggtagaagcagcacgccaaggtgctagcctatctactgcagatgtgaytgttgttgatagttccttcactgaccaagccctgaaattccaagttgttgaggctgcgaagttagctcaagaaggtaaagatatggaggcaattttatctcatgtagaagaggttaaaaaccatacagagctttatattggtgtttcaactttggaaaatcttgtcaaaggtggacgaattrgccgtgtaactggcttgttgagctcycttctcaatatccgtgytgtcatgcaaatgaaagaccatgaattgcagccaatggttaaaggtcgtggaactaaaacatttaaaaaakkgttagatgagttgataacatcgctttctgaacgtgctgtagcagagattggaatttcatattctggtagtgatgattgggcaaaagagatgaaagaaagcttacaagcttatgttgaaaagccaatttctgttttggaaacgggttccattattcaaactcacacgggtgagaacgcttgggctattttgatacgttaccactcctaactaat

SEQ ID NO: 1300 - DNA, 713 bp, Streptococcus pneumoniae
  misc_feature (1)..(713): tiling:Spneumo1:WAN024B7T; Cluster includes WAN0243CW spr1 893|phoP pnpR|15903934|NP_359484.1|1872170..1872877|+|708 bp|Response regulator|S.pneumoniae|R6|NC_003098.1|ORF|111
atgacaaaacaagtcttattagtggatgatgaagaacacattctgaaattgcttgactaccatttaagtaaggaaggcttttctactcaattggtracaaatggacggaaggccttagctttggcagaaacagaaccctttgattttatcttgcttgatatcatgttaccacaattagatggcatggaagtttgtaagcggctgagagccaaaggcgtcaaaactccaattatgatggtttctgcgaaaagtgatgaatttgataaggttttggccttggaattaggggctgatgactacctgaccaagccttttagccctagagaattgctggcgcgtgtcaaggctgtcctcaggcgaactaaaggagaacaagaaggagatgattcagataatatcgctgacgattcttggctatttgggaccttgaaagtataccctgagcgtcatgaagtctacaaggcgaataagttactgagtttgaccccaaaagaatttgaactcttgctctatcttatgaaacatcccaacatgacactgactagagagcgtcttttggaacgtatctgggggtatgactttgggcaggaaacacgtttggtggacgttcatattggtaagttgagggaaaaaattgaagacaatcctaaagcccctcaatttattcgaaccattcggggttatggttataagttcaaggagttatarctaat

SEQ ID NO: 1301 - DNA, 171 bp, Streptococcus pneumoniae
  misc_feature (1)..(171): tiling:Spneumo1:WAN024DIC; Cluster includes WAN0244HR spr0 419||15902463|NP_358013.1|416246..416416|-|171 bp|Hypothet ical protein|S.pneumoniae|R6|NC_003098.1|ORF|110
atgacaaaacaartccctaaatttactaaagacactgctcaactttacacctgtaaatggttgttgtataataaagttacaaagatgtacgaccacactgttgtaaatcatagtgttcgcgaatatattactgatagcatttctacaaatacaaktraagagasyggatag

SEQ ID NO: 1302 - DNA, 1349 bp, Streptococcus pneumoniae
  misc_feature (1)..(1349): tiling:Spneumo1:WAN024EYK; Cluster includes WAN0243QM spr1 397|asnS|15903440|NP_358990.1|1375766..1377109|-|1344 bp|A sparaginyl-tRNA synthetase (asparagine--tRNA ligase)|S.pne umoniae|R6|NC_003098.1|ORF|111
atgacaaaacgtgtaacgattattgaygtaaaagactatgttggtcaggaagtgacgattggcgcttgggttgccaacaaatcaggaaaaggraaaatcgctttcttacaattgcgtgatggaacagccttctttcaaggtgtgrcttttaaaccaaactttgtcgaaaaatttggtgaagaagtgggacttgagaagtttgatgttatcaaacgyttgagccaagaaacgtctgtttatgtgacaggtattgtcaaagaggacgaacgttctaaatttggctatgagttggacatcacagacatcgaagtgatcggtgaatctcaaractacccaatcacaccaaaagaacacggaacagactttttgatggataaccgtcacytgtgsstacgctctcgtaagcaagtagctgtgttgcaaayccgtaacgctattatmtatgyaacttatgagttctttgacaagaayggttttatgaagtttgacagcccaattctttcaggaaatgcggcagaagattctacagaactctttgaaactgactacttcggaacgccagcctacttgagccaatcaggtcagctttacctagaagcaggggctatggctcttggtcgtgtctttgactttggtccagttttccgtgctgaaaaatcaaaaacacgccgtcacttgactgagttctggatgatggatgctgagtactcatacttgacacatgatgagtcgcttgacttgcaagaagcttatgtgaaagctyttytacaaggtgttyttgaccgcgcgcctcaagccttggaaaccttggaacgtgatacagaactcttgaaacgctacattgcagagccattcaaacgtatcacttaygatcaagccattgacctcttgcaagagcatgaaaatgatgaagatgctgactacgagcatcttgagcatggtgatgactttgggtcaccacacgaaacttggatttcaaaccactttggtgtgccaacatttgtcatgaactatccagcagccatcaaggccttctacatgaaaccagttcctggaaatccagagcgcgtgctttgtgcagacttgcttgctccagaaggctatggagaaattatcggtgggtctatgcgtgaggaagattacgatgcccttgtcgctaagatggatgaacttggcatggatcgtacagaatatgaattctaccttgaccttcgtaaatacggtacagttccacacggaggatwtggtatcggtatcgaacgtatggtaaccttcgcagcaggaacaaaacatatccgtgaagctattycattcccacgtatgttgcaccgtatcaaaccataactaat

SEQ ID NO: 1303 - DNA, 570 bp, Streptococcus pneumoniae
  misc_feature (1)..(570): tiling:Spneumo1:WAN024F52; Cluster includes WAN0244OS spr0 166|tag|15902210|NP_357760.1|174766..175329|+|564 bp|3-Met hyladenine DNA glycosylase I, constitutive|S.pneumoniae|R6 |NC_003098.1|ORF|111
atgacaaaacgttgttcgtgggtcaagatgaccaayccrctctacatcgcctatcatgatgaggagtggggycagcccctccatgatgaccaagyrttgtttgagttgttgtgtatggaaacctatcaggcaggcctgtcttgggaaacggtrctcaacaaacgccaagctttccgagaagymtttyatrgctatcaaattcamkcagtcgcagagatgacygacactgaattggaagccwtgctggagaatccagcyatcattcgaaatagagccaagmtttttgctacacgcgctaacgcccaagcctttctacrrytacaggmagartayggctcttttgatgcctatctttggtcttttgttgaggggaaaaytgtcgttaacgatgttcctgattatcgccaagcsccagctaaaacacccttatctgagaaattagccaaagatctcaaaaaacgaggcttcaagttcacaggcccagtcgccgtattgtcttttctacaggctgcagggctagttgatgaccacgagaatgattgtgagtggaraggtcttaaaykaactaat

SEQ ID NO: 1304 - DNA, 941 bp, Streptococcus pneumoniae
  misc_feature (1)..(941): tiling:Spneumo1:WAN024D5G; Cluster includes WAN0243LK spr1 580|fmt|15903622|NP_359172.1|1560141..1561076|-|936 bp|Met hionyl-tRNA formyltransferase|S.pneumoniae|R6|NC_003098.1| ORF|111
atgacaaaactaatctttatggggacccccgacttttcagcaacagtcttaaaaggacttttgacagatgaccgttacgaaattctagccgytrwsacccagccagaccgtgctgttggtcgtaaaaaagttatccaagaaaccccagtcaagcaggctgccaaggaagcaggaytatctatctaccaacctgaaaaattatctggaagtccagagatggaagawcttatgaagctaggagcagatggaattgtgactgctgcttttgggcagtttctcccaagcaaactccttgatagcatggactttgctgtcaacgttcatgcctccctccttcctagacaccgtggtggtgcgcctatccattatgccttgattcaaggggatgaggaagctggtgtgaccatcatggaaatggttaaggaaatggatgcaggagatatgatttctcgtcgcagcattccgatcacagatgaggacaatgttggcrccttgtttgaaaaattggcgctagttggtygtgatttgcttttggacactctgcctgcctatattgctggtgatatcaaacctgaaccgcaggatacgagtcaggttaccttctctccaaatataaagycaraggaagaaaaactgractggaacaaaaccaatcgtcaactctttaaccaaattcgtggaatgaacccctggcctgttgcccatrctttycttaagggcgaccgctttaagatttatgaagccctaccagtagaaggtcagggaaatccaggtgagattctctctatckgcaagaaagaattgattgtcgcaacggctgaaggggctctatccctcaaacaagtgcagccagctggtaagcctaagatggacattgcttccttcctcaayggrgttggacgtacattgactgtaggagaacgatttggtgactaactaat

SEQ ID NO: 1305 - DNA, 1073 bp, Streptococcus pneumoniae
  misc_feature (1)..(1073): tiling:Spneumo1:WAN024EWI; Cluster includes WAN0243I4 spr1 704|amiE|15903746|NP_359296.1|1673429..1674496|-|1068 bp|A BC transporter ATP-binding protein - oligopeptide transpor t|S.pneumoniae|R6|NC_003098.1|ORF|111
atgacaaaagaaaaaaatgtaattttgactgctcgcgatattgtcgtggaatttgacgttcgtgayaaagtattgacagccattcgcggcgtttcccttgaactagtcgaaggagaagtattagccttggtaggtgagtcaggatcaggtaaatctgttttgacaaagaccttcasaggtatgctcgaagaaaatggtcgyattgccsaaggtagtattgactaccgtggtcaggacttgacagctttatcttctcacaaggattgggaacaaattcgtggtgctaagattgcgactatcttccargacccaatgactagtttggaccccattaaaacaattggtagtcagattacagaagttattgtaaaacaccaaggaaaaacagctaaagaagcgaaagaattggccattgactacatgaataaggttggcattccagacgcagatagacgttttaatgaatacccattccaatattctggaggaatgcgtcaacgtatcgttattgckattgcccttgcctgccgacctgatgtcttgatctgtgatgagccaacaactgccttggatgtaactattcaagctcagattattgatttgctaaaatctttacaaaacgagtatcatttcacaacaatctttattacccacgaccttggtgtggtggcaagtattgcggataaggtagcggttatgtatgcaggagaaatcgttgagtatggaacggttgaggaagtcttctatgaccctcgccatccatatacatggagtctmttgtctagcttgcctcagcttgctgatgataaaggggawctttactcaatcccaggaacacctccgtcactttatactgacctgaaaggggatgcttttgccttgcgttctgactacgcaatgcagattgacttcgaacaaaaagctcctcaattctcagtatcagagacacattgggctaaaacttggcttcttcatgaggatgctccraaagtagaaaaaccagctgtgattgcaaatctccatgataagatccgtgaaaaaatgggatttgcccatctggctgactarctaat

SEQ ID NO: 1306 - DNA, 956 bp, Streptococcus pneumoniae
  misc_feature (1)..(956): tiling:Spneumo1:WAN024F4N; Cluster includes WAN0244L0 spr0 302|yllC|15902346|NP_357896.1|300978..301928|+|951 bp|YllC protein|S.pneumoniae|R6|NC_003098.1|ORF|111
atgacaaaagaatttcatcatgtaacggtcttactccacgaaacgattgatatgcttgacgtaaarcctgahggtatctacgttgatgcgactttgggyggagcaggmcatagcgagtatttattaagtaaattaagtgaaaaaggccatctctatgcctttgaccaggatcagaatgccattgacaatgcgcaaaaacgcttggcaccttacattgagaagggartggtgacctttatcaaggayaacttccgtcatttacaggcaygtttgcgcgaarctggtgttcaggaaattgatggaatttgttatgacttgggagtgtctagtcctcaattrgaccagcgtgagcgtggtttttcttataaaaaggatgcgccactggacatgcggatgaatcaggatgctagyctgacagcctatgaagtggtkaaymaytatgactatcatgayttggttcgtattttcttcaartayggwgaggayaaattctctaaacagattgcgcgtaagattgagcaagcgcgtgaagtgaagccgattgagacaacgactgagttagcagagattatcaagttggtcaaacctgccaaggaactcaagaagaagggkcatcctgctaagcagattttccaggctattcgaattgaagtcaatgatgaactgggrgcggcagatgagtccatccagcaggctatggatatgttggctctggatggtagaatttcagtgattacctttcattccttagaagaccgcttgaccaagcaattgttcaaggaagcttcaacagttgaagttccaaaaggcttgcctttcatcccagatgatctcaagcccaagatggaattggtgtcccgtaagccaatcttgccaagtgcggaagagttagaagccaataaccgctcgcactcagccaagttgcgcgtggycagaaaaattcacaagtaactaat

SEQ ID NO: 1307 - DNA, 522 bp, Streptococcus pneumoniae
  misc_feature (1)..(522): tiling:Spneumo1:WAN024DA2; Cluster includes WAN0242CS SP12 34||15901096|NP_345700.1|1166235..1166750|+|516 bp|transcr iptional regulator, biotin repressor family|S.pneumoniae|T IGR4|NC_003028.1|ORF|010
atgacaaaagatcgcaaacaagccctgctccaactcttgaaagaagctcctaaagccctcaatggccaaagattagctgagcactttcatgtcactcgacaagttattgttcaagatattgcaattttaagagctgatggatctccaattctatctaccaatcgtggttatatctataaagatgctaatgcaaatacttatcatcacaaattatttaaggtcaagcatgaagttgaagaaattggacgagaattacttgctatcgtagataatggtggtcgcgttcaaaatatcttgattgatcatcctgtttatggagagattgaaaccttactaaaactgacctgtcgccgcgacgtgcaacattttctagaacaagttgaacgttctgactttaagccaatttctgagttaacagatggtattcattatcacctagttgaagccgagacacaacaagacctccactatatcgaggaggccttggatcagctaggttatttagtaaaagacctarctaat

SEQ ID NO: 1308 - DNA, 516 bp, Streptococcus pneumoniae
  misc_feature (1)..(516): tiling:Spneumo1:WAN024DA3; Cluster includes WAN0243YH spr1 114||15903157|NP_358707.1|1114387..1114902|+|516 bp|Conser ved hypothetical protein|S.pneumoniae|R6|NC_003098.1|ORF|1 01
atgacaaaagatcgcaaacaagccctgctccaactcttgaaagaagctcctaaagcccttaatggccaaagtttggcggaacattttcatgtcacacgtcaggtcattgtgcaggacattgcaattttgagagccgatggcgctcctatcctatccaccaatcgtggctacatctataagcaaattgataccaatccttatgttcacaaacttttcaaagtgaaacatgaagttgaagaaatcggtcaggaactccttgctattgtcgataatggtgggcatgtccagaataccttgattgaccatcccgtttatggagaaattgaaaccttgcttaaactgtcttgtcgcagagatgtgcaacattttctagaacaagtcgagcattctgactttagacctctatctgaattgacagatggcatccattaccacctagtcgaagccgaaacacaacaagacctccactatatcgaggaggccttggatcagctaggttatttagtaaaagactag

SEQ ID NO: 1309 - DNA, 381 bp, Streptococcus pneumoniae
  misc_feature (1)..(381): tiling:Spneumo1:WAN024BHE; Cluster includes WAN023RWP cont ig_1609_14||||9278..9658|-|381 bp|Glimmer 2.02 orf predict ion|S.pneumoniae|670|WAN01UDCD|ORF|001
atgacaaaagattggawttttaatcaaccattagaaagyaaatcagaaaatcaagrrgatycagataaaattgcggccttatttrgaaatcatcaaggaggtaatgakgtaaattatgaagcagcttttcaaaagcgwaaacaagcrcctgtgacggawtcaaattctagttctaaaccyaaagttacagaggttagaacaggaaaagagacagatatcactacaagttatcagcaacatcttaaaagactkattgcdgataacaatagcgatattcaaagyagtcaaaagaaaattgaagagctacatacdttkatygacacaaagaataaagmcaataagaaattvcagtccatttatgatgcgatttcsgawttacac

SEQ ID NO: 1310 - DNA, 845 bp, Streptococcus pneumoniae
  misc_feature (1)..(845): tiling:Spneumo1:WAN024GF4; Cluster includes WAN0244D5 spr0 585|thyA|15902629|NP_358179.1|601207..602046|+|840 bp|Thym idylate synthase|S.pneumoniae|R6|NC_003098.1|ORF|221
atgacaaaagcagatacgatttttaaagagaatattgaaygcattctaaaggaaggtgttttctcagagcargctcgtcctaagtacaaggatgggactgttgctaattccaagtatgtaactggtgccttttccgagtacgacttatctaaaggagaatttcctatcacaacyttgcgtcccattgcaatcaaatccgccatcaaagaagytctctggatttaccaagaccagtcaaatagcttagargtrcttaatgayaagtacaatgttcactactggaatgactgggaagtkggrgayacrggaacyattggtgarcgctayggtgcygttgttaagaaacacgacatyatcaayaagcttytcaaacagttggaarccaayccttggaaycgccgcaatatyatttcgctctgggattaccaagctttcgaagaaacagatgggctrctcccrtgygcctttcagaccatgtttgatgtycgscgtrthgatggrgaaatctatctggatgcgaccttgayccagcgctcsaatgayatgctrgtrgcccaccacatcaacgctatgcagtatgtggctttgcagatgatgattgccaarcattttggctggaaggttggraagttcttctacttcatcaacaacctccatatctatgayaatcaatttgaacaagctcaggaattrctccgtcgkgarccgtcaaactgccaaccacgyttggttttraatgttcctgatggractaatttctttgatatcaaagcagaagattttgarttggtggattatgaccctgttaagccrcagttgaagtttgacctagctatttaactaat

SEQ ID NO: 1311 - DNA, 1430 bp, Streptococcus pneumoniae
  misc_feature (1)..(1430): tiling:Spneumo1:WAN024C4B; Cluster includes WAN0244K3 spr0 335|gnd|15902379|NP_357929.1|339733..341157|+|1425 bp|6-ph osphogluconate dehydrogenase|S.pneumoniae|R6|NC_003098.1|O RF|111
atgacaaaagctaactttggtgtygtaggtatggccgtaatgggtcgtaaccttgcccttaatattgaatcwcgtggttacacagttgctatctacaaccgtagtaaagaaaaaacggaagatgtgattgcttgccatcctgaaaagaaytttgtaccaagctatgacgttgaaagttttgtaaactcaatcgaaaaacctcgtcgtatcatgctgatggttcaagctggacctggtacagatgctactatycaagcccttcttccrcaccttgacaarggtgatatcttgattgacggwggaaayactttctacaaagataccatccgtcgtaatgaagaattggcaaactcwggtatcaactttatcggtactggrgtttctggtggtgaaaaaggtgcccttgaaggtccttctatcatgcctggtggacaaaaagargcctacgaattggttkcggatgttcttgaagaaatctcagctaaagcaccagaagatggcaarccatgtgtgacttayatcggtcctgatggagctggycactatgtgaaaatggttcacaayggtatygagtacggtgatatgcaattgatcgcagaaagctatgacttgatgcaacacttgctaggcctttctgcagargatatggctgaaatctttactgagtggaacaagggtgaattrgayagctacttgatygaaatcacagctgatatcttgagccgkaaagacgatgaagrccaagatggaccaatcgtagactacatccttgatgctgcaggtaacaagggaactggtaaatggackagccaatcatctcttgaccttggtgtaccattgtcactgattactgagtcmgtgtttgcacgctacatttcmacttacaaagaagaacgtgtacatgctagcaaggtgcttccaaaaccagctgccttcaactttgaaggagacaaggctgaattgattgaaaaratccgtcaagccctttacttctcaaaaatcatttcatacgcacaaggatttgctcaattgcgtgtagcctctaaagaaaacaactggaacttgccatttgcagatatcgcatctatctggcgtgatggctgtatcatccgttctcgtttcttgcaaaagattacagatgcttacaaccgygatgcagaycttgccaaccttcttttggaygartacttcttggatgttactgctaagtaycaacaagcagtrcgtgatatcgtagctcttgcggttcaagcwggtgtgccagtgccaactttctcagcagctattacttactttgatagctaccgttcagctgaccttccrgctaacttgatccaagcacaacgtgactactttggtgcycacacttaccaacgtaaagacaaagaaggaaccttccactactcttggtatgacgaaaaataactaat

SEQ ID NO: 1312 - DNA, 632 bp, Streptococcus pneumoniae
  misc_feature (1)..(632): tiling:Spneumo1:WAN024C9Q; Cluster includes WAN0244O6 spr0 188|rplC|15902232|NP_357782.1|196076..196702|+|627 bp|50S Ribosomal protein L3|S.pneumoniae|R6|NC_003098.1|ORF|111
atgacaaaaggaatcttagggaaaaaagtgggaatgactcaaatcttcactgaagctggcgaattgatccctgtaacagttattgaagcaactccaaacgttgttcttcaagttaaaactgttgaaacagacggatacaacgctatccaagttggtttcgatgacaaacgcgaagtattgagcaacaaacctgctaaaggacatgtagcgaaagctaacacggctcctaagcgcttcattcgtgaattcaaaaacgttgaaggcttggaagttggygctgaaatyacagttgaaacattcgcagctggagaygttgttgaygtaackggtacttctaaaggtaaaggtttccaaggtgttatcaarcgccacggacaatcacgtggaccratggctcacggttctcgttaccaccgtcgtccaggttctatgggrcctgttgcacctaaccgcgtattcaaaggtaaaaaccttgcaggacgtatgggtggygaccgcgtaacaattcaaaaycttgaagttgtacaagttgttccagaaaagaacgttatccttatcaaaggtaacgtaccaggtgctaagaaatctcttatcactatcaaatcagcagttaaagctggtaaataactaat

SEQ ID NO: 1313 - DNA, 1065 bp, Streptococcus pneumoniae
  misc_feature (1)..(1065): tiling:Spneumo1:WAN024FUZ; Cluster includes WAN0240H6 |cap 8H||CAB43611.1|||1065 bp|galactosyl transferase|S.pneumoni ae||AJ239004|ORF|000
atgacaaaagttttgcaaattgggcctagtatraatttatctaaaggtggtatgagcgctgttattagagatttgacatatagcccgttattgtcaggtgattttgatataactgcttatcaatcttttattgatggctctcttgtaacacggttaacctattctagttatgctcttcttaaatttgtagttcattctggtaattatgacatataccatattcacactgctacaagagggagttgttggagaaaattactgtatttgaaattacttaaaagtaaaaataaaaaagctattttgcatattcatggagcagaatttcaaatattttatgactcacttcctgagtataaaaaaaataaagttagagaaatgttagaattatctgattatgtgattgtactttcccaaacttggtatgattttttttcaaatattaatataaatgcaaaaattgtaatagttgaaaatggtgtagacacttctttttatgtagaaaaaaagaaaagtataacaagcaacaactttctttttttaggaaggatgggcaaaagaaaaggagcctatgatttaatagatgccatgaatcaagcagtggctataaatcctaatttgcatttgacaatggctggagatggagaacttgaagacatacgtcaaaagatatcaaatctgaatttgactgatcatattacaatatatgattgggttaatcagagagataaaaaaatactatttcaagctaatcagactttgatattgccttcttataatgaggggctcccgatggcaatattggaagctatggcttctggattagcaatcatatcaacgcctgtaggtggcatacctgaaattatacacgaggataatggctggttaattcaaccgggtgatatttctcagttatctaatattattttagaagcaagttacaatcccgatgttgtaagtttaatggggagcaataatcataagttggttgaagagaagtatagttttcatagtatgcatggtaaaattaaaaaaatttataatactctattagaaacgaaaaaataa

SEQ ID NO: 1314 - DNA, 893 bp, Streptococcus pneumoniae
  misc_feature (1)..(893): tiling:Spneumo1:WAN024FF9; Cluster includes WAN0243LY spr1 565|scrK|15903608|NP_359158.1|1545468..1546355|-|888 bp|Fr uctokinase|S.pneumoniae|R6|NC_003098.1|ORF|111
atgacaaaattatatggaagcttggaagckggcggtacaaagtttgtctgtgctgtcggtgatgaaaactttaacgttgyrsamaaaacacaatttccaacaacaactccaatcgaaacaatcgataaaaccattgagttcttctcaaaattcgataaccttkctggtcttgcagttggttcatttgggccgattgatattgacaaaaactcaaaaacttatggctttatcacgacgactccaaaaccaaactgggcaaatgtrgacttrcttggtgcycttcgtcgcgccctmraygtgccaatgtacttyacaacagacgtaaayagctctgcttrcggtgaartggttgcccgtarcaatgctggtggtcgtatcgaaaacttggtttactacacaatcggtacaggtatcggtgcrggygtcmtccarcgtggtgagtttatcggtggtgtgggtcaccctgaaatgggtcattattatgttgytagacacccaatggatattgaaaaagagtttaagggtgtttgtcytttycataagggatgtctrgaaggytatgcagctggtcyaagtttggaagctcgtacaggtgtmcgtggggaaamtattgaaytcaacaaccctgtttgggatgttcaagcctactatatcgctcaagctgcggttaatgcsacagtgactttccgcccagacgtgattgtctttggtggaggggtcatggctcaacaacatatgctggaccgtgtccgtgagaaatttacatctcttcttaatggttacctaccagtaccagatgtgcgtgactatatcgtgacgccagcagtcgcaggaaatggttctgccacacttgggaacytwrytmwtgcaaaagaagtttcaaaataactaat

SEQ ID NO: 1315 - DNA, 652 bp, Streptococcus pneumoniae
  misc_feature (1)..(652): tiling:Spneumo1:WAN024CAK-3; Cluster includes WAN0244OY sp r0160|hexB|15902204|NP_357754.1|168072..170021|+|1950 bp|D NA mismatch repair protein|S.pneumoniae|R6|NC_003098.1|ORF |111
atgacaaactggagcgagaagaagcatccagcttcccagarttggagtttttcggacaaatgcacgggacttatctctttgcccaagggcgagatggactttacatcatagatcagcacgctgctcaggaacgggtcaagtacgaggagtaccgtgaaagcattggcaatgttgaccaragycagcagcaactcctagtrccytayatctttgaatttccwgcggatgaygcyctkcgtctcarrgaaagaatgscwctyttagaggaagtdgghgtctttctagcwgagtacggrgaaaatcaattyatyytdcghgarcatcctatttggatggcagargargaratygartcwggyatctatgaratgtgygacatgctmctyttgaccaaggaagtttckatcaagaaataycgrgcagagytggctatcatgatgtcytgcaagcgrtctatmaaggccaaycatcgtatygatgaycaytcrgchagacarctcctytatcagctytctcaatgtgacaatccctataactgtcctcacggacgtcctgttttggtgcattttaccaagtcggatatggaaaagatgttccgacgtattcaggaaaatcacaccagtctccgtgagttggggaaatattaactaat

SEQ ID NO: 1316 - DNA, 897 bp, Streptococcus pneumoniae
  misc_feature (1)..(897): tiling:Spneumo1:WAN024FJ7; Cluster includes WAN0243PV spr1 424||15903467|NP_359017.1|1409498..1410388|-|891 bp|Conser ved hypothetical protein|S.pneumoniae|R6|NC_003098.1|ORF|1 11
atgacaaagaaacaacttcacttggtgattgtgacagggatgrgtggcgcagggaaaactgtagccattcagtccttcgaggatctaggttatttcaccattgataatatgccgccagctctcttgcctaagtttttgcagctggttgaaattaaggaagacaatcctaagttggccttggtagtggatatgcgtagycgttctttcttttcagagattcaagctgttttggatgagttggaaaatcaagatggtttrgatttcaaaatcctctttttggatgcggctgataaggaattggtcgctcgttacaaggaaaccagacggagtcacccactagcagcagacggtcgtattttagatggaatcaagttggaacgtgaactcttggcacctttgaaaaatatgagccaaaatgtggtggatacgactgaactcactccacgtgagctgcgyaaaacccttgcagagcagttttcagaccaagaacaagcycagtctttccgtatcgaagtcatgtctttcggatttaartatggaatcccgattgatgcggacttggtctttgatgtccgtttcttgccaaatccctattatytaccagaactgagaaaccaaacgggtgtggatgaacctgtttatgattatgtcatgaaccatcctgagtcagaagacttttatcaacatttattggccttgattgagccgattctgccaagttaccaaaaggaaggtaagtccgttttgaccattgcyatgggatgtacgggtggacaacaccgtagtgtggcatttgctaaacgcttggygcaggacttatccaagaattggtctgttaatgaagggcatcgcgacaaagaccgcagaaaggaaacggtaaaccgttcaykaactaat

SEQ ID NO: 1317 - DNA, 417 bp, Streptococcus pneumoniae
  misc_feature (1)..(417): tiling:Spneumo1:WAN024CJ8; Cluster includes WAN0242F8 SP11 42||15901008|NP_345612.1|1070675..1071085|+|411 bp|hypothe tical protein|S.pneumoniae|TIGR4|NC_003028.1|ORF|010
atgacaaagaagaaaattgagcgtatttctgtaatacaccgagaaaagattttatggctcaagtggtatttcatgcgagataaagaacaacctaagtatagtgtccttgagcgtaaaatgtttgatgctgctaaaaatcaagatatgctagcttatcaaaaatacgcaactatcaagcagataacagatattagggtacaaacaagtgaggctgacattttagaggctgtaaaagaggtttatgtgtacaatcacatgaatgttatcggagcttgtcagcggatattatttatcagtcaatcaccagcttatgataagttaaataagtggtttaatatctattctgatttgtattttagcgttgtacccttgcccaaaatgggggtatatcatgagatggtaggtatcctarctaat

SEQ ID NO: 1318 - DNA, 492 bp, Streptococcus pneumoniae
  misc_feature (1)..(492): tiling:Spneumo1:WAN024FSL; Cluster includes WAN023L6C 3151 49_2341||||1255132..1255623|+|492 bp|EGAD orf prediction|S .pneumoniae|R6|NC_003098.1|ORF|110
atgacaaagaggacggaaatccctgacaaaatcccaaaaccagtcccaccaaagacactgcgaacaaagggaacgacgacttgcaagccaataaatccgtacactactgaaggaatcccaaccaggagttcaatagctggttgcaaaatcttcgccccttttggtgatacttcggtcataaaaactgctgcaccaatagcaaagggtgttgcgataagggctgagagaatggtaacgataaaggaacccaaaatcataggaagggcaccaaattctttactagaaggattccaagttcctcccaaaagaaagtcaaagatattcacaccattgacaaagaaggtcgacaagcctttttgcgctacgaaaaccaaaatcatggccacaaggatgactatcaaagaaagacaggcaaaggtcaaaccttttcctaatttctccagacgagaattctttgatggaagcaacattttcttagctaattcttcttga

SEQ ID NO: 1319 - DNA, 581 bp, Streptococcus pneumoniae
  misc_feature (1)..(581): tiling:Spneumo1:WAN024D6X; Cluster includes WAN0243PH spr1 438|entB|15903481|NP_359031.1|1422161..1422736|-|576 bp|Is ochorismatase|S.pneumoniae|R6|NC_003098.1|ORF|111
atgacaaaggctttaatttcgattgattatacagaagattttgttgctgatagtgggaarctracagcaggygctccagctcaggcgatttcggatgccatyagcaaggtaactcgattagcttttgaacgaggagattatatcttctttactattgatgctcatgaagaaaacgattgtttccatccggaaagtaagttatttcctcctcataatctgattgggacgagtggacggaatttatatggagatttggggatcttttatcaagagcatggttcagacagtcgtgtcttttggatggataaacgccattactcagctttttcagggactgacctagatattcgtttgagagagcgtagagtgtctaccgttatcttaacaggtgtcttgacggatatctgtgtcctacatacagctatagatgcctataatctaggatatgacatcgagattgttaaaccagctgttgcttccatctggcctgaaaatcatcaatttgccctaggtcatttcaaaaatacactcggagctaagttagtagatgaaaatctaaatgaactttytgagtaactaat

SEQ ID NO: 1320 - DNA, 1289 bp, Streptococcus pneumoniae
  misc_feature (1)..(1289): tiling:Spneumo1:WAN024DU3; Cluster includes WAN024394 spr2 029||15904070|NP_359620.1|2019340..2020623|-|1284 bp|Conse rved hypothetical protein|S.pneumoniae|R6|NC_003098.1|ORF| 111
atgacaaaggttgtttttgaagaaaaatactatccagctgtaaaagaaawggtttatcgaactcgtttggccaacggattgacagttgctcttttgcctaaaaaggaatttaaagaggtttacgggagtgtmactgtacagtttggttcgrtagatacgyttgtcacagaagttgacggakatgtaaaacaatatcctggaggaattgctcattttcttgaacataaattatttgagagagaagattctagtgatttgatgtcggcttttacgagtctaggtgcagatagtaatgcctttacaagctttacaaaaacaaactatcttttttcagcaacggattattttttagaaaatttakatttacttgatgaattggtaacatcagcacactttactgaagcttccattctgacagagcaggatattattcagcaagaacgagaaatgtaccaagatgatccagattcgtgtttattcttttcaactttagcgaatttgtatcctggtacacctttagcaactgatatagttggaagtgaggagtccatttcccaaatcaatctaactaatttgcaagaaaattttacaaagttttacaaacctgtaaacatgtctctgtttttagttggtaattttgatgtggagcgagtacaggactattttgaaagcaaagaactgaaagattcagattttcaggaagtagcaagagaaaagttgtttttacagcctgtaaagcyaacagatagtatgagaatggaagtatcttctcccaaactagcgattggagttagaggtaagcgagaagtttctgaagcggattgctatcgacatcatattttattaaaattattgtttgcaatgatgtttggttggacttcggatcgttttcaaaaatgttatgaatcaggtaaaattgatgcrtccttatctctggaagttgaartaacaagtcgctttcattttgtcatgttgacaatrgatacgaaagagccagttgctttgtctcatcaatttaggaaggctattcgtaattttacaaaggatttagatattacagaggaacatttagatattatcaaaagagagatgtttggcgaatttttcagtagcatgaactctcttgaatttattgcaacgcaatatratgcttttgaaaatggtgagayaatttttgatttgccgaaaattttacaggaaattactttagaggatgtccttgatgctggacatcatttaatagatgatggtgacatagttgattttacaatattcccatcgtarctaat

SEQ ID NO: 1321 - DNA, 570 bp, Streptococcus pneumoniae
  misc_feature (1)..(570): tiling:Spneumo1:WAN024C43; Cluster includes WAN023Q18 cont ig_1213_2||||2046..2462|-|417 bp|Glimmer 2.02 orf predicti on|S.pneumoniae|670|WAN01UEL9|ORF|000
atgacaaataaaaaaataagagtatttttaagcagacctaatccatttacagagaatcaaaatttatttattaaagaattgattaaatttttaagacgacacaatattgaatgtgtaacattacaagctgctgagtatactccttacgaagtcatgaattcgttgagtgagatgatacaaaggagttacggaattataattgttgcatttggtcagacatttatttctagtggaaccagaaaaatgggagctgaggataatccagacttctttgcatccaaagagacccacttaaagaataagtgggttacaagtgtttattgtcatattgaagggattttagcgttaacttataatcttccaatgctatctattcctcaagaaagtttaactgaagaagggattttaaagaagggagaatattctataacatcacctgaattctcattagaaacaaaagaaaatatattaatgtacttgcaatcagaagggtttcaaaaaagttttcatgtatggaaaaaccttcttgatgataagtataactttatcaaaggaggggaaataaactat

SEQ ID NO: 1322 - DNA, 821 bp, Streptococcus pneumoniae
  misc_feature (1)..(821): tiling:Spneumo1:WAN024C64; Cluster includes WAN0244LC spr0 290|gno|15902334|NP_357884.1|291814..292629|-|816 bp|5-ket o-D-gluconate 5-reductase|S.pneumoniae|R6|NC_003098.1|ORF| 111
atgacaaatacatcattctcaattgagcagttttctttaaaaggaaaaattgctctcatcaccggcgcttcttatggaattggatttgctattgccaaatcctacgctgaagccggcgctactattgtctttaacgatatcaatcaagatctggtcaataaagggattgaagcttatcgtgaagttggcatcsaagcccatggatatgtctgtgacgtgacagacgaggacggtatccaagccatggtcaagcaaatcraacaagaggttggtgtcattgacatcctcgttaataacgctggtattatccgccgagttccaatgtgcgaaatgagcgccgctgatttccgtaaggtcatcgatattgacttaaacgcaccatttatcgtttcaaaggcagttattccttctatgataaagaaagggcatggaaagattatcaatatttgttcgatgatgagcgaactgggacgtgaaacagttagcgcttatgctgctgctaaagggggcttgaaaatgttgacccgcaacattgcgtctgaatacggtggagccaatatccaatgtaacggaattggaccrggttatattgccactcctcaaacagcacctcttcgtgarttgcaagaagatggttctcgccacccatttgaccagttcatcattgcaaaaacacctgctgcacgttggggaaatmctgaagatttgatgggccctgctgtctttctcgctagtgatgccagcaattttgtcaatggccacatcctatatgtagatggcggtatcttagcctacatckgaaaacaacctgagtaactaat

SEQ ID NO: 1323 - DNA, 1070 bp, Streptococcus pneumoniae
  misc_feature (1)..(1070): tiling:Spneumo1:WAN024D47; Cluster includes WAN0243IQ spr1 682|pepA|15903724|NP_359274.1|1653449..1654513|-|1065 bp|G lutamyl aminopeptidase|S.pneumoniae|R6|NC_003098.1|ORF|111
atgacaacattattttcaaaaattaaagaagtaacagaacttgctgcagtctcaggtcatgaagcgcctgtccgtgcttatcttcgtgaaaagttgacaccgcatgtggatgaagtggtgacagatggcttgggtggtatttttggtatcaaacattcagaagctgtggatgcaccgcgcgtcttggtcgcttctcatatggacgaagttggttttatggtcagcgaaatcaagccagatggtaccttccgtgtcgtagaaatcggtggctggaaccccatggtggttagcagccaacgtttcaaactcttgactcgtgatggtcatgaaattcctgtgatttcaggttctgttcctccgcatttgactcgtggaaaggggggaccaaccatgccagccattgccgatatcgtttttgatggtggttttgcggacaaggctgaggcagaaagttttggcatccgtcctggtgataccatygtaccagatagttctgcaattttgacagccaatgaaaaaaatatcatctcaaaagcttgggataaccgctacggtgtcctcatggtaagcgagctagctgaagctttatcrggtcaaaaactcggcaatgaactctatctgggttctaacgtccaagaagaagttggtctgcgtggcgctcatacctctacaaccaagtttgacccagaagtcttcctcgcagttgattgctcaccagcaggtgatgtctacggtggtcaaggcaagattggagatggaaccttgattcgtttctatgatccaggtcacttgcttctcccagrgatgaaggatttycttttgacaacggctgaagaagctggyatcaagtaccaatactactgtggtaaaggcggaacagatgcaggtgcagctcatctgaaaaatggtggtgycccatcaacaactatcggtgtctgcgctcgttatatccatyytcaccaamccctctatgcaatggatgacttcctagaagcgcaagctttcttacaagccttggtgaagaaattggatcgttcaacggttgatttgattaaacattattaactaat

SEQ ID NO: 1324 - DNA, 554 bp, Streptococcus pneumoniae
  misc_feature (1)..(554): tiling:Spneumo1:WAN024DIW; Cluster includes WAN0244J4 spr0 370|mip|15902414|NP_357964.1|370629..371177|+|549 bp|Macro phage infectivity potentiator protein|S.pneumoniae|R6|NC_0 03098.1|ORF|110
atgacaacatttactatccatacagtagagtcagcaccagcagaagtgaaagaaattcttgaaacagtagaaaaagacaacaatggctatattcccaacctaatcggtctcttggccaatgccccgactgttttagaagcctaccaaattgtctcatctatccaccgtcgcaacagcctgacacccgttgagcgtgaagtggtgcaaatcacggcagccgtgaccaatggttgtgccttctgtgtcgcaggtcacacagccttttccatcaaacaaatccagatgaatgatgacttgattcaagctcttcgcaatcgtactccaattgaaacagatcctaaattggataccctagctaagtttaccttggcagttatcaataccaagggtcgtgtaggagatgaagccttgtctgagtttttagaagctggctacactcaacaaaatgccttggatgtggtttttggtgtcagcctagcaatcctctgtaactatgccaacaacttagctaatacaccaattaatccagaattgcaaccttatgcctaactaat

SEQ ID NO: 1325 - DNA, 450 bp, Streptococcus pneumoniae
  misc_feature (1)..(450): tiling:Spneumo1:WAN024G3L; Cluster includes WAN023LF2 3148 70_1978||||1069133..1069507|+|375 bp|EGAD orf prediction|S .pneumoniae|R6|NC_003098.1|ORF|110
atgacaacgtcaaccacgattagaagggcagcaagaatgaatgatagcacttggaagttagttccaagaactagacctagtggagctggagttgtccatggtagattagcagtgaatgagttcattccaagagtttcaataaagaatttgaaaatccatacgtttgcrattggagcaaagataaatggaatgaagaagattggattyaawacaagwggtgcaccaaacaagattggttcatttacaccraagaargtwggaactactgaagcacgtccgattgcacggttacgtttygattttgtyaaccacatgaacatraatggaacraccartgtcgcaccwgtaccwcccatrgtaacgataaacatttgwgtaccagaagtaagaatcttgtctgcatgcatcccttgttggagaaggttcaagttaacttcggcattggcatag

SEQ ID NO: 1326 - DNA, 599 bp, Streptococcus pneumoniae
  misc_feature (1)..(599): tiling:Spneumo1:WAN024CDK; Cluster includes WAN0244QY spr0 088||15902132|NP_357682.1|95749..96342|-|594 bp|Hypothetic al protein|S.pneumoniae|R6|NC_003098.1|ORF|211
atgacaagaaytgaatacctgactcagctagaactctatctcaagaaastacstgaagctgaccgtatcgaagccatggactatttcagagagctctttgacgatgctggartcgaaggagaagaagaactcatcgctagtttgggractcccmaagmagcggcccacgaagttctatccaatcttctcgmtaaaaaaatcwatgwagcacccgctcaaaaaaataaccgrcaaattttacatatcgccttgttagccctccttgcagcacctatcggcattcctctgggaatcgccatcctcgtgaccctgttcgcaatycttgtagccgctttgactgtcattctggctttctttgcagtttccatactgggtatcatcggcggattcctatttttagttgaaagtttcactrtcctcgcccaagccaaatcagcctttatcttgatttttggttctggtttactggctatcggtgcttcttcgctagttttacttggcatttcctatgyarctcgcttcttcggtctactcattgttcgtctggtacaatttgttcttaaaaaaggaaagagaggtaatcagcatgcgtaactaat

SEQ ID NO: 1327 - DNA, 447 bp, Streptococcus pneumoniae
  misc_feature (1)..(447): tiling:Spneumo1:WAN024FJR; Cluster includes WAN01UC3K |||| ||432 bp|Incyte orf contig SPN2C0488 11969-12400|S.pneumon iae|23F|WAN01UC3K|ORF|001
atgacaagacaaaaaaacgccctacgtggccattttgtagctccatacaatggaggaactgaaccatcaacagaagatacatggttggaacttgctaaatggatctcagacgtatcrgatgatacagacgagaaaacagatgatcaagcwtactatgacggtgatggagttgaagaaacaaccgtggtcagcgtaaaaggtgcttatacctttgagggtacttacgatccagacgataaagcacaggctcttattgctgggatgaagtacaagacaggggatgaccgtaagctatggcacaaggttgtttcktctgacaggaagaaacaatgggtgggagctgcaactgcaacagaaatcaaagcaggttctggcgctgcctctgactatgaggcgtttggatgtaagctttcttacaactcaacgccaaaagagactggtattggg

SEQ ID NO: 1328 - DNA, 836 bp, Streptococcus pneumoniae
  misc_feature (1)..(836): tiling:Spneumo1:WAN024DU4; Cluster includes WAN024395 spr2 028||15904069|NP_359619.1|2018477..2019307|-|831 bp|Conser ved hypothetical protein|S.pneumoniae|R6|NC_003098.1|ORF|2 11
atgacaagtatgagaaaaaaaacaattggagaggttttacgattagctagaatcaatcagggattgagtttagatgaattgcagaaaaagacagaaatccagttagatatgttggaagcaatggaagcagacgatttcgatcaacttccaagtcctttttacacgcgttctttcttgaaaaaatatgcatgggctgttgagttagatgaccaaattgttttggatgcttatgattctgggagtatgattacttatgaggaagtagatgttgatgaagatgagttgacaggtcgtagacgttcaagtaagaaaaagaagaaaaaaacatcatttttacctttattttattttatcctttttgctttatcgattttaatttttgtgacttattatgtttggaactatattcaaactcaaccagaggagccttctctttctaattacagtgtggttcaatcaacaagttcaactagctctgttccccactcctcaagtagtagttcttctagtatagaatcagctataagtgtatcaggcgaaggaaatcatgtagaaatcgcttataagacaagtaaggaaacagttaaattgcaattggcagtttcagatgttacaagttgggtcagtgtttcagaaagcgaacttgagggcggtgtaaccttatcgccaaagaagaaaagtgcagaagcaacagttgcaactaaaagtcctgtaacaattacgttaggtgttgtaaaaggtgttrmtttgacagtagataatcagactgttgatttatcgaaattaacagctcagactggacaaatcactgtaacctttactaaaaattaactaat

SEQ ID NO: 1329 - DNA, 72 bp, Streptococcus pneumoniae
  misc_feature (1)..(72): tiling:Spneumo1:WAN024A4G; Cluster includes WAN024EDS-rc R 6.IG_1285.1||||1242025..1242096|-|72 bp|Between spr1241 (- strand) and spr1242 (- strand)|S.pneumoniae|R6|NC_003098. 1|IG-rc|110
atgacaagttcattgaatgaaggtggtaccgcggtttttcgcccttcgtgatatgagcttgtcttttgattt

SEQ ID NO: 1330 - DNA, 1004 bp, Streptococcus pneumoniae
  misc_feature (1)..(1004): tiling:Spneumo1:WAN024C6R; Cluster includes WAN0244M5 spr0 261|manL|15902305|NP_357855.1|262185..263183|-|999 bp|Phos photransferase system, mannose-specific EIIAB|S.pneumoniae |R6|NC_003098.1|ORF|221
atgacaataatgagtatcggaatcattattgcgagccacggcgaatttgctgcgggtattcatcagtcaggatctatgatctttggtgracaagaaaaggttcaagttgtgacctttatgccaaatgaaggtcctgatgatctatacgctaagtttaataacgctgttgctgcatttgacgcagaagatgaggttctagttttrgctgacctttggagtggttctccatttaaccaagctagtcgcgtgatgggagaaaatcctgagcgtaagtttgccatcatcacaggacttaacttaccgatgttgattcaagcctacacagagcgcctcatggacgctgctgcaggtgtagaaaaagtcgctgctaatatcattaaagaagccaargatggcatcaaagctcttccagaagagctaaatccagtygaagaagttgcaagcgctgcagctgctccagttgcccaarctgctatcccagaaggaactgttatcggagacggtaaattgaaaatcaatcttgcccgtcttgacacacgtctacttcacggtcaggttgcaactgcttggactccagattcaaragcaaatcgtatcatygwtgcttcagataacgtggctaaagacgaccttcgtaaagaattgattaaacaagcagctccaggtaatgtcaaggctaacgtggttccaattcaaaaactgattgagatttcaaaagacccacgttttggagaaacacatgcccttatcttgtttgaaacacctcaagatgcccttcgtgccatcgaaggcggcgtgccaatcaagactcttaaygttggttctatggctcactcaacaggtaaaacattggtcaataccgttttgtctatggacaaagaagaygttgckacatttgaaaaaatgcgtgacttgggtgttgaatttgatgtccgtaaagtaccaaatgattctaaaaaagatttgtttgacttgattaacaaagccaatgtcaaataactaat

SEQ ID NO: 1331 - DNA, 636 bp, Streptococcus pneumoniae
  misc_feature (1)..(636): tiling:Spneumo1:WAN024EX7; Cluster includes WAN0243L8 spr1 592||15903634|NP_359184.1|1570616..1571245|-|630 bp|Conser ved hypothetical protein|S.pneumoniae|R6|NC_003098.1|ORF|1 11
atgacaatcgaactattgactccctttaccaaggtagagttggagccagaaatcaaggagaaaaaacgcaaacaagttgggattttaggggggaattttaaccctgttcacaatgcccatctcattgttgcggatcaagtacggcaacagttgggactggatcaagttctkctcatgcctgaataccaacctcctcacgttgataaaaaggaaaccatccctgaacaccatcgtctcaagatgcttgagttggcaattgagggrattgacggcctagtcattgaaaccattgagttggagcgcaagggtatttcctacacctacgayaccatgaagattttgacagagaagaatccagatacggattattactttatcatcggtgccgacatggttgactatctgcctaagtggtaccgaattgatgaactggttgacatggttcagtttgtgggggttcagcgtccacgctacaaggtagggacttcctatccagttatctgggtggacgtaccgctcatggatatctcgtccagcatggtgcgkgmcttccttgcccaaggtcggaaacccaactttctcctacctcagccagtgctagactacatcgagaaggargggctctacykaactaat

SEQ ID NO: 1332 - DNA, 420 bp, Streptococcus pneumoniae
  misc_feature (1)..(420): tiling:Spneumo1:WAN024CJN; Cluster includes WAN0242LS SP08 89||15900772|NP_345376.1|837993..838406|+|414 bp|hypotheti cal protein|S.pneumoniae|TIGR4|NC_003028.1|ORF|011
atgacaatctatytgacagaaaagcaaattgaaaaaataaatgctttagcaattcaacggtattctccaaatgagaaaattcaaacagttagtycttctgccttaaatatgattgtgaacttaccagaacaatttgtctttgggaagyctctttatccaacaatttttgataaagcaacgatactatttgtccaattgataaagaagcatgtttttgctaatgctaataaaagaactgctttcttcgttttggtcaaatttttacaattaaayggctatcgtttttctgtaacggtagaagaagcagtaaaaatgtgtgtaaccatcgcagtagaagctttaactgatgaaaaaatgacaagctactccaaatggrtttctgaacattctgttagagaaaaggtcaaaaagctaactaat

SEQ ID NO: 1333 - DNA, 497 bp, Streptococcus pneumoniae
  misc_feature (1)..(497): tiling:Spneumo1:WAN024DJR; Cluster includes WAN0244L9 spr0 293|PTS-EII|15902337|NP_357887.1|294547..295038|+|492 bp|P hosphotransferase system sugar-specific EII component|S.pn eumoniae|R6|NC_003098.1|ORF|111
atgacaatgccaaatattattatgacccgtatcgatgaacggttgattcatggacaaggacaactttgggtaaaatacctaggttgtaatacggtcattgttgccaatgacgaagtaagcacggacaagatgcaacaaactctgatgaaaacagttgtgccagactcagttgccatgcgtttcttccctttgcaaaaggtgattgatatcattcacaaggctaatcctgctcaaacgatctttatcgttgtaaagratgtraaggaygctttaaccttggtagaaggtggtgtcmctatcaaagaaatcaatattgggaacattcacaatgcymctggtaaagagcaagtgacacgctccatcttcctrggtgaagaggacaaggyrgccctcaaggaattrarccaaactcatcaagtaacatttaatacgaaaacaactccaacaggaaatgatggagctgttcaagtcaacattatggactatatttaactaat

SEQ ID NO: 1334 - DNA, 800 bp, Streptococcus pneumoniae
  misc_feature (1)..(800): tiling:Spneumo1:WAN024D2F; Cluster includes WAN0243Y6 spr1 125||15903168|NP_358718.1|1126344..1127138|-|795 bp|Conser ved hypothetical protein|S.pneumoniae|R6|NC_003098.1|ORF|1 11
atgacaattaaactagtagcaacggatatggacggaaccttcctagatgrgaatggrcgctttgatatggaycgyctcaagtctctmttggyttcctacaaggaaaaagggatttactttgcggtrgcttcgggtcggggatttctgtctctrgaaaaattatttgctgrtgttcgtgatgacattattttcatcgcggaaaatggcagtttggtagagtatcaaggtcaggacttgtatgaagcgactatgtctcgtgacttttatctggyaacttttgaaaagctgaaaacktcaccttatrtagatatcaataaactgctcttgacgggtaakaagggttcatatgttctagatacggttgatgagacctatttgaaagtgagtcagcaytataatgaaaatatccaaaaagtagcgagtttggaagatatcacagatgacattttcaaatttacaaccaacttcacagaagaaacgctrgaagmtggkgargcttgggthaaygawmaygtycctggtgtyaaggcyatgacaactggctttgaatcyattgatattgttctggactatgtcgataagggwgtrgcyattgttgaattagytaaaaaacttgsyatcacaatggatcaggtcatggcttttggagacaatcttaatgacttacatatgatgcaggttgtgggacatcctgtagctcctgraaatgcacgaccwgarattttagaattagcaaagactgtgattggtmaccataaggamcrgtcggttatagcttrtatggagggcttataactaat

SEQ ID NO: 1335 - DNA, 352 bp, Streptococcus pneumoniae
  misc_feature (1)..(352): tiling:Spneumo1:WAN024AVP; Cluster includes WAN0243TD spr1 298|transposase E|15903341|NP_358891.1|1291786..1292136|-| 351 bp|Degenerate transposase|S.pneumoniae|R6|NC_003098.1| ORF|122
atgacaattcatctatctagcctagggsaggtctatctcgtgtgtgggaaractgatatgagacaaggaatcgattcactggcttatctsgttaaaacccactttgaattggatcctttctccggtcaartytttctcttttgtggtggacgtaaagaccgctttaaagycctttactgggatggtcaaggattttggctactatataaacgctttgagaacggcagaytgayttggcymagtacagaaaaggatgtcaaagctctcrcaccwgaacaagtagaytggctkatgaarggcttttctatcactccmaaaatayarytwatcagaaagtcgtgatttctattga

SEQ ID NO: 1336 - DNA, 357 bp, Streptococcus pneumoniae
  misc_feature (1)..(357): tiling:Spneumo1:WAN024AVQ; Cluster includes WAN02427C SP14 42||15901292|NP_345896.1|1362487..1362837|-|351 bp|IS66 fa mily element, Orf2|S.pneumoniae|TIGR4|NC_003028.1|ORF|010
atgacaattcatctatytagcctaggrcaggtctatctcgtrtgtgggaaaacggatatgagrcaaggmatygattcaytgrcttatctggttaaaacccrctttgaattrgatyctttctcmggtcaagtytttctcttttgtggtggacgtaaagaccgctttaaagccytttactgggatggtcaaggattttggctaytatataaacgctttgagaacggmaractgacttggcymagtacagaaaaggatgtcaaagctctcrcaccwgaacaagtagaytggctkatgaagrgcttttctatcactccmaaaataaayyyatcagaaagtcgtgatttctatykaactaat

SEQ ID NO: 1337 - DNA, 452 bp, Streptococcus pneumoniae
  misc_feature (1)..(452): tiling:Spneumo1:WAN024ESH; Cluster includes WAN0243K9 spr1 627||15903669|NP_359219.1|1601116..1601562|-|447 bp|Conser ved hypothetical protein|S.pneumoniae|R6|NC_003098.1|ORF|1 11
atgacaattcgttttgaagaaaaggtgagcacagaaaacgctcaatttgtatgccagtggtccaactccctaggcaaakyctttcaagaacaatggatrggaccaaggattccttttcymctgacmmttcaagccttggaaggartcytttcaatctttgawgracaagagtttgtsggwyttatccagaaaatyaggctagaagacagyaatcttcatatyggragattytttatcaacccccagaaacaggrgcaaggcttaggtagcmaggctttaaggaaatttgttagtttrgcmtttgaaaatrragatatagayagtatttctctaaatgtcttcgaggcaaatcaaagagctcagaatctttaccaaaaagaaggatttgaaatcgttcaaatggttgaagcacctgtacgaaaatatagtakattgaaactagaatarctaat

SEQ ID NO: 1338 - DNA, 485 bp, Streptococcus pneumoniae
  misc_feature (1)..(485): tiling:Spneumo1:WAN024DC5; Cluster includes WAN02443R spr0 923|bltD|15902967|NP_358517.1|909797..910276|+|480 bp|Sper mine/spermidine acetyltransferase|S.pneumoniae|R6|NC_00309 8.1|ORF|110
atgacaattgaactaagagatgttacaatggaaaattattttgatgttttaaatttggatgtcaaggaatatcaaaaacaattcattgcaaccaacgcaattagtttagctgaagcatacgtctacactaaaaatggagattttgtagctccattggcagtttatgataatgatgyaattataggttttgtgatgatagcttatgataaaaagatcggaattagtagtggaaattatttactatttcgttttatgattgataagaattttcaaaatcaaggatattttaaaccaattatggataaagtactagactatgttcgaacagcgccagcaggtttaagcaataaactttggttgtcytatgaaccagaaaatgaacaggcaagattttgttayctcagttatggatttaaagaaactggggaaatatccgagaatgaagtagtagcaatctatgatttaacaattgagaaataactaat

SEQ ID NO: 1339 - DNA, 482 bp, Streptococcus pneumoniae
  misc_feature (1)..(482): tiling:Spneumo1:WAN024CFU; Cluster includes WAN0244RQ spr0 060|PTS-EIIB|15902104|NP_357654.1|67629..68105|+|477 bp|Ph osphotransferase system sugar-specific EIIB component|S.pn eumoniae|R6|NC_003098.1|ORF|111
atgacaattgtaggatgccgtattgatggacgtttgatccacggacaagtagccaatctttgggctggaaaactaaatgtttcacgcattatggttgtagacgacgaagttgtcaacaacgatattgaaaagagtggtttgaaacttgcgacaccaccaggtgtgaaattgagtattttgccagttgagaaagctgcagccaatattcttgstggyaaatacgatagccaacgtctctttatcgtggctcgtaaaccagaccgcttccttggtttggtagaagcaggtgtaccacttgaaacycttaatgttgggaatatgtctcaaacaccagaaactcgttctattacacgttctatcaacgtagtagacaaggatgtggaagacttccacaaactggcagaaaaaggtgttaaacttactgctcagatggttccaaatgatccaatttcagactttttgagcttattaaaatarctaat

SEQ ID NO: 1340 - DNA, 1518 bp, Streptococcus pneumoniae
  misc_feature (1)..(1518): tiling:Spneumo1:WAN024COM; Cluster includes WAN0241Z3 SP17 58||15901589|NP_346193.1|1658113..1659624|-|1512 bp|glycos yl transferase, group 1|S.pneumoniae|TIGR4|NC_003028.1|ORF |011
atgacaatttacaatataaatttaggaattggttgggctagtagcggtgttgaatacgctcaagcctatcgtgctggtgtttttcggaaattaaatctgtcctctaagtttatctttacagatatgattttagccgataatattcagcacttaacagccaatattggttttgatgataatcaggttatctggctttataatcatttcacagatatcaaaattgcacctactagcgtgacagtggatgatgtcttggcttactttggtggtgaagaaagtcacagagaaaaaaatggcaaggttttacgtgtattcttttttgaccaagataagtttgtaacctgttatttggttgatgagaacaaggacttggttcaacatgccgagtatgtttttaagggaaacctgattcggaaggattacttttcttatacgcgttattgtagcgagtattttgctcccaaggacaatgttgcagtcttataccaacgaactttttataatgaagacgggactccagtctatgatatcttgatgaatcaagggaaggaagaagtttatcatttcaaggataagattttctatggaaagcaagcttttgtgcgtgcctttatgaaatctttgaatttgaataagtctgatttggtcattctcgatagggagacaggyattggwcaggttgtgtttgaggaagcacagacagcacatytagcggtagttgttcatgcggagcattatagtgaaaatgctacaaatgaggactayatcctttggaataactattatgactatcagtttaccaatgcagataaggttgacttctttatcgtgtctactgatagacaaaatgaagttctacaagagcaatttgccaaatatactcagcatcagccaaagattgttaccattcctgtaggcagtattgattccttgacagattcaagtcaagggcgcaaaccattttcattgattacggcttcacgtcttgccaaagaaaagcacattgattggcttgtgaaagctgtgattgaagctcataaggagttaccggaactaacctttgatatctatggtagtggtggagaagattctctgcttagagamattattgcaaatcatcaggcagaggactatatccaactcaaggggcatgcggaactttcgcagatttatagccagtatgaggtctacttaacggcttctaccagcgaaggatttggtctgaccttgatggaagctattggttcaggtctacctctaattggttttgatgtgccttatggtaatcagacctttatagaggatgggcaaaatggttatttgattccaagttcatctgaccatgtagaagaccaaatcaagcaagcttatgccgctaagatttgtcaattgtatcaagaaaatcgtttggaagctatgcgtgcctattcttaccaaattgcagaaggcttcttgaccaaagaaattttagaaaagtggaagaaaacagtagaggaggtgctccatgatykaactaat

SEQ ID NO: 1341 - DNA, 191 bp, Streptococcus pneumoniae
  misc_feature (1)..(191): tiling:Spneumo1:WAN024DLX; Cluster includes WAN0244PU spr0 128||15902172|NP_357722.1|137522..137707|-|186 bp|Hypothet ical protein|S.pneumoniae|R6|NC_003098.1|ORF|121
atgacaawttttgacattcttgacaatcaatttttatccttatctgaaaatgaattrtcagatattgatggcggtctcgctcccttrgttatctttggagtagcagtatcttggaaggytattgcaggtggaacagcacttataggttctggtttggcagctggttattttttaggaggagattaactaat

SEQ ID NO: 1342 - DNA, 762 bp, Streptococcus pneumoniae
  misc_feature (1)..(762): tiling:Spneumo1:WAN024BFR; Cluster includes WAN0244I2 spr0 408|glnQ|15902452|NP_358002.1|403910..404650|-|741 bp|ABC transporter ATP-binding protein - glutamine|S.pneumoniae|R 6|NC_003098.1|ORF|111
atgacacaagcaatccttgaaattaaacacctcaaaaaatcctatggacaaaacgaagtgctaaaagacatttcwctcactgtccacaagggagargtyatytctatcatcggaagctctggaagyggraaatcraccttcctacgctccattaacctacttgaaacrccaactgatggacaaatcctttatcatggacaaaacgtcctcgaaaaaggctatgacctcacgcaataccgtgaaaagttrgggatggttttccaatcctttaacctctttgaaaatctcaaygttcttgaaaacacaatcgtcgctcagacaactgtcctwaaacgcgaacgcacagaagctgaararattgccaaagaaaacctggaaaaggtcggcatgggagaacgctactggcaagcsaraccmaaacaactctcaggtggtcaaaaacaacgtgtggccatcgctcgtgccctytcmatgaatcckgacgcyattctctttgatgaaccaacatcagctctcgatccagaaatggttggagargtcctcaaaatcatgcargayctggctcaggaaggcttgaccatgattgtcgtaacccatgaaatggaatttgcccgtgatgtctctcaccgtgttatctttatggataagggygtgatygctgaagaaggtaaaccagaagacctcttcacyaatcctaaagaagaccgwacaaaagarttycttcaacgytatctcawactmamtrawaatcaaagagcaaac

SEQ ID NO: 1343 - DNA, 1557 bp, Streptococcus pneumoniae
  misc_feature (1)..(1557): tiling:Spneumo1:WAN024GKN; Cluster includes WAN0242VL SP05 05||15900419|NP_345023.1|486053..487333|+|1281 bp|type I r estriction-modification system, S subunit, putative|S.pneu moniae|TIGR4|NC_003028.1|ORF|011
atgacaccagaacaacttaaagcaagtattctccaaagagcgatggaagggaaattagtgccgcaaaatcccaatgacgaacctgcaagtgaattattaaagagaattaaagctgaaaaagaaaaacttatcagtgaaggaaaaatcaaacgagataaaaaggaaactgagatatttcgtggtgatgatgggaaacattatgggaagtttgctgatggaagcactcaagaaattgatgttccttatgatattcctgatacttgggagtgggtgaggataaaatcaatttattggaattttgggcaaaataagccagagaaatcctttaggtatatagatacgtctagtattgatagaaaaaagaacataatcaactacaaaaatctacaatatctttcacctgaacaagcgccttcccgtgcyagaaaattagtttcgcagaatagtgtcttattttcaacagttagaccatatctaaaaaatattgctgtagttagagaacttaaagagtatttgatagctagtacagcatttawtgttttggatactttacttaacgaaacatatttgaaatattatttattatcagataattttatcaatcgtgttaataataaatctactggaacaagttatcctgcaatcaatgattataattttaatctattattaattgctctccccccactatccgaacaacaacgaatagtagaagcaatcgaatcagctttagaaaaagtagatgaatatgctgaaagttataatagactagaacagctagataaagaatttccagataaactaaaaaaatctattcttcaatatgctatgcaaggaaaattagttgaacaagacccaaatgatgaatcagtcgaagttttacttgaaaaaatacgagcagaaaaacaaaaactctttgaagaaggcaagattaaaaagaaagatttggacatttctattgtttcccaaggagatgataactcttattatgaggaagtaccttgtgaaataccagawagttgggaatgggtgaggttaaacgatataacctcctacattcaaagagggaagtctccaaaatattcaaatattcctatataccctgtgattgctcagaaatgtaatcaatggtctggcttttctattgacttagcaagatttattgatcccgaaacagttcatagttaccagaaagaaagattactaagagatggtgatttaatgtggaattcaacaggtctaggtacgttaggacgattagctatttaccatgaaaataaaaatccttatggctgggctgttgcagatagccatgttacagttataagagtcttatcgggrgttattaattgccatttcatctataattttctttcctctcctattgttcagtcagttattgaagaaaaagcgtcgggtagtacaaaacaaaaagaattattaacgaaaactataaaagaatatttaatccccctcccaccccttcctgaacaatccagaatcgttgataaaatcgaacaatttttcgcccatattgacgcactaattctarctaat

SEQ ID NO: 1344 - DNA, 1569 bp, Streptococcus pneumoniae
  misc_feature (1)..(1569): tiling:Spneumo1:WAN024GKO; Cluster includes WAN0242VI SP05 08||15900422|NP_345026.1|488751..490319|-|1569 bp|type I r estriction-modification system, S subunit|S.pneumoniae|TIG R4|NC_003028.1|ORF|013
atgacaccagaacaacttaaagcaagtattctccaaagagcgatggaagggaaattagtgccgcaaaatcccaatgacgaacctgcaagtgaattattaaagagaattaaagctgaaaaagaaaaacttatcagtgaaggaaaaatcaaacgagataaaaaggaaactgagatatttcgtggtgatgatgggaaacattatgggaagtttgctgatggaagcactcaagaaattgatgttccttatgatattcctgatacttgggagtgggtgaggwtttctacattggttgaaattgtcagaggtggctctccacgmccaatcaaagattatcttacttctgaagtagatggaataaattggataaaaataggtgatwctgaaaagggtgaaaagtatataaataatgttaaagaaaaaatcaaamaatcaggrcttaacaaamctagatttgtaaaaaaaggtacatttttgttaactaattctatgagttttggtagaccttatattttgaatgttgatggtgcaatmcacgatggatggttggctatttcgaactatgaaaactcattaaataaagattacctattctatattctttcatcaaatgtagtttattctcaatttctatctctaattagtggagctgttgtgaaaaacttgaatagtgataaagttgcttctattcttatccctctccccccactatccgaacaacaacgmatartagaagcaatcgaatcagctttasaaaargtwgrkgaakatgctgaaagttataatagactagaacagctagataaagaatttccagataaactaaaaaaatctattcttcaatatgctatgcaaggaaaattagttgaacaagacccaaatgatgaatcagtcgaagttttacttgaaaaaatacgagcagaaaaacaaaaactctttgaagaaggcaagattaaaaagaaagatktggamatkwctaytgytwyyywwgkagatkatrrctcttattatgggaayaaagacgaaacaacctcttatcctatatatgaaatcccagaagcatggagatatattaaatttgctagcctagttaacttcagaataggaaaaactcctccacgcagtgaagctactttttggggaactgaaataccttgggtatctatatcagatatgcctatatctggttatgtaactaatrcgagagaatctatttctaaattagcattaaaatcaaagaaaatagacatttcacctaaaggaactttattaatgagttttaaattatctattggaaaagttgccatattggatattcctgccactcataatgaagccattatatcgatattcccctatgctaataaagaaaatattatcagagattacttaatgatatttttgccacttatctctactttaggtgattcaaaagatgctatmaaagggaaaacattaaatagtaccagtatctccgaattattaatccctatttctaatcatgaagagatgaaaagaatcatttycaaagttgatttactttttcaaaaagtttctcaactttttgagtaa

SEQ ID NO: 1345 - DNA, 1794 bp, Streptococcus pneumoniae
  misc_feature (1)..(1794): tiling:Spneumo1:WAN024CFV; Cluster includes WAN0244RR spr0 059|bgaC|15902103|NP_357653.1|65845..67632|+|1788 bp|Beta- galactosidase 3|S.pneumoniae|R6|NC_003098.1|ORF|221
atgacacgatttgagatacgagatgatttctatctcgatggaaaatcatttaagattttatctggtgccattcattattttaggrttcctccagaggattggtatcattcgctctataacttgaaggctcttggttttaatacggtagagacttatgttgcttggaatttacacgagcctygtgaaggtgagtttcattttgamggtgatctggatttagagaaatttctccaaatagcgcaggatttgggtctctacgcaattgtgcgtccgtctccatttatctgtgcggaatgggaattcggtggcttaccagcttggctcttgaccaagaacatgcgaattcgctcatccgacccagcatatatcgaggcagttggtcgctactatgatcagttattgccaagactggtgcctcgtttgttgracaatggtggcaatattctcatgatgcaggttgaaaatgagtatggttcttacggagaagataaggcttacctgagagcgattcgacagctaatggaagagtgtggcgtaacctgtccyctctttacatcagatggtccatggcgagctactctgaaagctggaaccttaattgaagaggacctctttgtaacaggaaactttggttytaaggcaccttacaacttttcgcagatgcaggaattctttgatgaacatggtaagaaatggccactcatgtgtatggagttctgggatggttggttcaatcgctggaaagaaccgattatcacacggratcctaaggaattggcagatgcagttcgagaggttttggaacaaggmtctatcaatctttacatgttccacggtggtrcaaactttggtttcatgaatggttgctcrgctcgaggaactttggacctgccacaagttacrtcttatgattacgatgcccttctggatgaagaaggaaatccaactgctaaatatcttgcagtcaagaagatgatggcaacacatttttcagagtatccgcagttggaaccactctacaaagagagtatggagttggatgctattccactagttgaaaaagtttctttrtttgaaaccttagatagcttgtcaagtcctgtagaaagtctctatcctcaaaagatggaggagctgggacaaagttatggctacctactttatcgaacagaaacaaactgggatgcagaagaagaaagacttcgtatcattgatggtcgagatagggcccagctgtatgtcgatggtcagtgggttaaaactcaatatcagacagagattggggaagatattttttatcaaggtaaaaagaaagggctatctaggttagatatcttgatagaaaatatggggcgtgtcaactatgggcataagttcttagcggatacgcaacgtaagggaattcggacaggggtctgtaaggatctgcatttcttactaaactggaaacactatccactcccactagacaatcctgagaaaattgatttttcaaaaggatggactcaaggacaacyagccttttacgcttatgactttacagtcgaagagccaaaagatacttacctagacttgtctgagtttgrtaagggrgttgcctttgtcaatgggcaraatctaggacgtttttggaacgttggcccaactctctcactttatatccctcatagctatctcaaggaaggtgccaaccgyatcattatctttgaaacagaaggtcaatataaagaagagattcatttaactcgtaaacctacactaaaacatataaagggggaaaacttaykaactaat

SEQ ID NO: 1346 - DNA, 234 bp, Streptococcus pneumoniae
  misc_feature (1)..(234): tiling:Spneumo1:WAN024CE5; Cluster includes WAN023MD5 3153 77_153||||71013..71246|-|234 bp|EGAD orf prediction|S.pneu moniae|R6|NC_003098.1|ORF|110
atgacacggttaaagtctaaatcaacgagctctttgacatcttctgccttgtctaaaactttacgggcaagactagatacaacttcaaaacgttcagacttaacagcaaattctgtaggatcaaagaccaagagagytgtcaacatcatagacgtaaagctagaagtcatggcaaatccagcatcattagagacagctggttgcaagagcaagagattacgrtcatcaccgtga

SEQ ID NO: 1347 - DNA, 455 bp, Streptococcus pneumoniae
  misc_feature (1)..(455): tiling:Spneumo1:WAN024FEV; Cluster includes WAN0243LP spr1 575||15903617|NP_359167.1|1554780..1555229|-|450 bp|Hypoth etical protein|S.pneumoniae|R6|NC_003098.1|ORF|111
atgacactaacaacctttttattacaagcagtagcaagttttcttgccattatcacttttttaatcgtactcaatgtgcaacggtctatgctcttrcctggagggattttgggcatgactgtctggctaatctatctcttgctcaaggaaccgaccaatgtcattgtagctaccttcattgcagccattattggttcttgtgtcagccagattttaagtattctttataagacacctgctgtggtctttatcttggccattttggcaccgctggttccaggttatctctcctaccgamcaactgccttttttgtgacaggggactataataaagcactggcaagtgcgaccttggttgtcatgttggctytggtaatctctattggaatggctagcggaacagtgattctcagactstatcattatataaaaacacatcgagtatcgtarctaat

SEQ ID NO: 1348 - DNA, 453 bp, Streptococcus pneumoniae
  misc_feature (1)..(453): tiling:Spneumo1:WAN024CSM; Cluster includes WAN0242FE SP11 36||15901002|NP_345606.1|1067622..1068068|+|447 bp|conserv ed domain protein|S.pneumoniae|TIGR4|NC_003028.1|ORF|010
atgacactagatttagacaacatgacacaagcagaatttgatgaggtaatggctgaaatccagctacaaagtccaaacatttttcaactgatttctgattttgtaaataaaaaagtaaccagtgtggaaatagacgacttgttgaatatgaagcgagctgagacaggtaaagcattgtcaccgttacagattcaagaattgcagtatatgctagaagattttagcccagagcttatccatgaggcgttaaaagaggctgtcagtcagggtaaagcaaactttgcatacatcaaggtaatccttaaccgttggaaacaggacaatttattgacggtggaacttgttagaaatagcagggcagcgcgtgaggctaaaaaacagcaaaccaatcaactagagcctaccagctatgaagattggataccaacacaagaaaaaccatttctarctaat

SEQ ID NO: 1349 - DNA, 216 bp, Streptococcus pneumoniae
  misc_feature (1)..(216): tiling:Spneumo1:WAN024DPR; Cluster includes WAN023SL6 NC_0 03098.1_947||||739670..739885|-|216 bp|Glimmer 2.02 orf pr ediction|S.pneumoniae|R6|NC_003098.1|ORF|101
atgacactattttaccataatttgactcaaattgtaaatcgtttacaaattgataataaaacgaaaaagaccgaagaaagcragtcacgaagccattttcttcaatctctttcaacacttataaataataaaccatttagaactataaatatcacagtccagataaaaacaaaaagtttatcatctataatcaggcagattattatttctattgct

SEQ ID NO: 1350 - DNA, 531 bp, Streptococcus pneumoniae
  misc_feature (1)..(531): tiling:Spneumo1:WAN024BFP; Cluster includes WAN0243JE spr1 658||15903700|NP_359250.1|1632104..1632634|-|531 bp|Conser ved hypothetical protein|S.pneumoniae|R6|NC_003098.1|ORF|1 21
atgacacttaattatatcgaaattttaatcaaactggtcttgactctcaaatggctcaacaacaatgttcactttgtgaaacgtttgattgatggtaagccaactctccttatcaaaaatgggaatattgacccagaagcctgtcgttcagttggtttgtctgcatcggatgtakccctcaaacttcgtagycaagrgattttccagatgaagcaagtcaaacgagctgtgcaagagcaaaatgggcaactyatcgttgtgcaaatgggagatgaaaatcctaagtatccagttgtgactgacggtgtgattcaagtagatgtcttggratcgattgktcgtagcgargagtggttgcttgataacctcagtaaacaagggcatgacaatgtagccaatatctttattgctgaatatgacaagggtgctgttacagtsgtaacttatraawaaswaawacctggggtcttgtactcttcgaaaatctcttcaaaccgcgtcaacgtcgccttgccgtatgtaggttactga

SEQ ID NO: 1351 - DNA, 1185 bp, Streptococcus pneumoniae
  misc_feature (1)..(1185): tiling:Spneumo1:WAN024DE9; Cluster includes WAN02440H spr1 041||15903085|NP_358635.1|1028574..1029752|+|1179 bp|Hypot hetical protein|S.pneumoniae|R6|NC_003098.1|ORF|111
atgacacttccagttagaaaatccctgcacgatgcagttttacaggcttcgaaagcggatacttgggaacaagckaccaaggaatggaatgaagtttccttkatktttaacggtatcggccgtagcaattgtgtctgtggaaatgccatcaaatacgcttatgaactctttaacggtgtcacaggccaacgcctctttccaattggtagcgactgtgttcgtcattttcatcgattgycccttgaccagcaattggaagaggaagaaaaactgctcagaaaggttgaaaatctaaccagaaaagctcagaaaaaggaaaaaatcaaggtcaataaaagtractttgacgagcgacttctaaaatggctctgggaaaaaggtgttttcaaacccaatcgtggcaatcaatttgcgcctgagagagactaccagcttttcctagaagtctttcagggaggaagttggaccaaggcggaaccaaagaaaaaggctcggatggaagamgtccttgaaaagtgtatcaaaccctttttacttgggaaatcggatgaccaactctaccttgtcaagctaggcaaggagaaaattgactacgaacaagaactccgtatccaggcagagaaagaacgcaagaagagggataaaatcgccaagcaatatgcagayaatctggttctagccatgggacccgcagagcgtgcttatcaagattactttggctttacagagaccctgactcaagaagaacgcaagtgggaaaaaattctttttggtaaaaatagagcagaacgrgctatcaaggccaaacaataccaaaaagagctggaaaaagaccaacgaattgccagtcaggatmcaattgaaagaaaacagaagcagacttggmtcctcaattcctattttcgwgagcttcctgaagaaaaagctcgattttctagrctcttattagaatatmgaaaaagtggtgaagtacccttttcaactgaatacctgtcmgatcatctcatcgactttttctataaaatgaaagcctttgaatttgaaatcgcaccagaacaagtccgagattttctaaaaaaaagcctgcaggaagaccatcgctcatcagcacaaggaagctggatagaaggaattctcctcaactgcctcaaaccatttttagracgattagtgataykaactaat

SEQ ID NO: 1352 - DNA, 1631 bp, Streptococcus pneumoniae
  misc_feature (1)..(1631): tiling:Spneumo1:WAN024FB7; Cluster includes WAN0243IA spr1 698|dexS|15903740|NP_359290.1|1666290..1667915|-|1626 bp|D extran glucosidase|S.pneumoniae|R6|NC_003098.1|ORF|221
atgacacttgataaaggaaaagtagtctatcaaatctatccaaaatcttacaaagacaccactgaaaacggtattggggatttccgtgggattatcgaaaaaattccctatttagccaaactaggygtggatatggtctggctcaatccattctatccaagccctcaacgggataatggttacgatatttcagattatatggcagtggatcctctttttggtgatatggctgattttgagraaatggtrtgtgtyggtaaagagcacaagattgactttatgctggacatggtacttaatcattgttcgacagagcatgaatggtttcagaaagccctagctggtgataagtattatcaagactttttcttcatccaagaccaaccaacagattggcagtctaagtttggtggttctgcatggrcgcctttcggggatactgggaaatactatcttcacctatttgatgagacccaggctgaccttaactggcgcaatyccaatgtccgtaaggagcttttcaaggttgttaatttctggcgcgacaagggtgtcaaaggtttycgatttgatgtgatcaatttgatcggtaaggacgaggtttcagtggactgtcctgaaaatgaagggaagccagcttatacagacaaacccatcgttcataactatttgcgtatgatgaaccaagccacttttggatcygacgatagctttatgacagttggggaaatgtcttctaccaccatggaaaactgtgtcctytattcgtcgcctgatcgtcaggaattatccatgacctttaattttcatcacctcaaggtggactataaggatggacaaaagtggaccttggctccctttgattttgaagagttgaagagtctttaccatagttggggtaaggaaatgagtgataaagacggttggagtgccctcttttggaayaatcacgatcaaccacgtgccttgaaccgttttgtcgatattcaaaacttccgcaaggaaggagccacyatgctagcrgccagcattcacctgtcacgtgggacaccttatatctacatgggtgaggaaatcgggatgattgacccagactatgattctatggctgattatgtggatgtcgaatcgcttaatgcctatcagatgctcttagaagaaggaaagagtcagcaagaagccttccagattattcaagctaagtcgcgtgataattcacgcattcymaykmaktgggatgcttcggaaaatgcargattttcaacaggcactccttggttgaaagctggtaaatcctataaakacatcaatgtagaaaatgaaatccagggtccgatttttaccttctatcaagacttgattcgactgcgtaaggaaatgccaatcatttcagaaggaagttacaaaccagcctttgaagatagcaaacaagtctacgcttttgaacgccagtttgaggatcaaaagttactagtgctcaataacttttatgctaaagaagtggaaatcgacttgccagcagtctaccaaaatggacagattttgatwtcaaactatgaagatgcagaagtgtctgagaaaattctactmaaaccctatcaaacactggctatttatgtaaattaactaat

SEQ ID NO: 1353 - DNA, 638 bp, Streptococcus pneumoniae
  misc_feature (1)..(638): tiling:Spneumo1:WAN024DG3; Cluster includes WAN0244CC spr0 614|pyrE|15902658|NP_358208.1|625148..625780|+|633 bp|Orot ate phosphoribosyltransferase|S.pneumoniae|R6|NC_003098.1| ORF|111
atgacacttgctaaagatatcgctagccacctcttgaaaatccaagccgtttacctcaaaccagaggaacccttcacttgggcatctggtatcaagtcaccgatttacactgataatcgtgtgacactagcctatccagaaactcgtaccctaattgaaaatggttttgtggawgctatcaaagaagcctttcctgaagtagaagtgattgcaggaactgcaacagcagggattccacacggagccattattgctgataagatgracttgccttttgcctacatccgtagyaaaccaaaagaccacggagctggtaatcaaatcgaaggtcgcgtagctcaaggtcaaaaaatggtagtggttgaagaccttatttcaacgggtggttcagttcttgaagctgtagcagcagccaagcgagaaggagcagatgtrcttggagttgtagcgattttcagctaccaattgccaaaagcagataagaactttgcagatgctggtgttaaacttgtgacgctttcaaactatagcgakcttatccatctagcccaagaagaaggttacatcacgccagagggccttkatcttctaaaacgctttaaagaagaccaagaaaattggcaagaaggttarctaat

SEQ ID NO: 1354 - DNA, 459 bp, Streptococcus pneumoniae
  misc_feature (1)..(459): tiling:Spneumo1:WAN024CSN; Cluster includes WAN0242FF SP11 35||15901001|NP_345605.1|1067173..1067625|+|453 bp|hypothe tical protein|S.pneumoniae|TIGR4|NC_003028.1|ORF|010
atgacagaaacaacatatgagaatttaactagacgtatagacagaattagcgcagaaatgcgagaaattagcgaagaaaatggcctaagaatcctttctttattggaaagtcagacaaaatccatcaaagatgagttgtcccgtttactttggattgaacttcctgaattgaatgaaagccataaaatcgaagcggtctctaaaagcactacgggaatgtttttcgcccctggtatttttgaaatggacgctatgcgaaaagcattctttaaacgccaagctaagcacttttttgagaacgaagcagagcaacaggcgtatatagagcatgctgaaaaggagtatttagaggctactgtaaccttaaaagatattctttttaactctaaaaatggaactcagaaagcaaataaaagttgtcttatagagaagtttgaggaggcaatgcaaykaactaat

SEQ ID NO: 1355 - DNA, 719 bp, Streptococcus pneumoniae
  misc_feature (1)..(719): tiling:Spneumo1:WAN024FFH; Cluster includes WAN0243M9 spr1 554|frp|15903597|NP_359147.1|1535481..1536194|-|714 bp|Hom ologue of NADPH-flavin oxidoreductase|S.pneumoniae|R6|NC_0 03098.1|ORF|111
atgacagaaaccattaaattgatgaaggctcatacttcagtgcgcagrtttaargagcaagwmmttccycargwagayttramtgaratyytgacagcagcccagatggcatcatcttggaagaatttccaatcctactctgtgattgtggtacgaagycaagagaagaaagatgccttgtatgaattggtacctcaagaagccattcgccagtctgctgttttccttctctttgtcggagatttgaaccgagcagaaaagggagccmgacttcataccgacaccttccaaccccaaggtgtrgaaggtctcttgattagttcggtsgatgcrgctytkgctggacaaaaygccytgytggcagctgaaagyttgggytatggtggtgtgattatyggyttggtwcgrtacaagtcwgaagaagtggcagarctctttaacctrcctgactacacctatyctgtctttgggatggcactrggtgtkccaaatcaammtcatgatrtgaaaccragactgccactagakaatgtwgtctttgaggaagaataccaagaacagtcaactgaggcaatccaagcttatgaccgtgtkcaggctgactatgctggrgcgcgtgcgaccacaagctggagtcagcgyctagcagaacagtttggycaagcwgaaccaagctcaactagaaaaaatcttraacagaagaarttattgtarctaat

SEQ ID NO: 1356 - DNA, 740 bp, Streptococcus pneumoniae
  misc_feature (1)..(740): tiling:Spneumo1:WAN024ETM; Cluster includes WAN024496 spr0 728|glnQ|15902772|NP_358322.1|727536..728270|+|735 bp|ABC transporter ATP-binding protein - glutamine transport|S.pn eumoniae|R6|NC_003098.1|ORF|111
atgacagaaaccttgataaaaattgaaaatttacataaatcytttggaaagaatgaagtattgaagggcatcaacctcgagattaaaagaggagaagttgtcgttatcatcggtccttcagggagygggaaatctaccttgcttcgctctatgaatttgttggargaagcaaccaaggggaagsttatctttgagggagtcgatattacggacaagaagaatgacctgtttgccatgcgtgagaagatgggcatggttttycaacaattyaayctctttcctaatatgactgtgatggaaaatatyaccttgtcmcctatcaagacyaaaggtgamagyarggmmgttgcwgagaaragagcycargarcttttggaaaaagttggtttgccagataaggcagacgcttatccacagagtytgtcrggtggscarcaacarcggattgccatcgcgcgtgggttggctatggaaccagatgttttgctctttgacgarccaacttcagccytrgatcctgaratggtwggwgargtwytggctgttatgcaagayctwgccaagtcaggratgacyatggttatcgtaacacatgagatgggatttgcccgtgaggtggcagatcgtgtyatctttatggcagacggtgtggttgttgaagayggracacctgagcagatttttgaacaaacccaagracaamggactaaagayttcttgagwaaggttttataactaat

SEQ ID NO: 1357 - DNA, 2750 bp, Streptococcus pneumoniae
  misc_feature (1)..(2750): tiling:Spneumo1:WAN024D6K; Cluster includes WAN0243Q9 spr1 410|pacL|15903453|NP_359003.1|1393746..1396442|-|2697 bp|P -type ATPase - calcium transporter|S.pneumoniae|R6|NC_0030 98.1|ORF|421
atgacagaaagagagtctgttttgcacacaatgtcaaggaggagacacatgtcaaaagaacaaaaacgccaagcgttttatactcagagccctgaagaggtcttgcaggctgtggatgcgaccgagcaaggtttgtcatcaagtgaggcggaaaagcgccttgccgaatttgggcacaatgaactcgaagaaggcgagaaacgatcaatcttggtcaaattcatcgagcaatttaaggatttgatgattatcatcctagttgcggcagcaatcttgtcagtcgtgacttctggtggggaagatatcgcagatgccattatcatcctagctgtggttatcatcaacgctgcctttggtgtttaccaagaaggaaaagctgaagaagctattgaagccctcaaatccatgtctagtccagttgcccgcgttcttcgtgatggacacatggcagagattgactctaaagaattggtaccaggcgatatcgttgcccttgaagcaggtgacgtggtaccagcggacctacgtttgatagaagccaactctcttaaaattgaagaagcagccttgacaggtgaatctgtaccagtcgaaaaagacttgtcagtcgakcttgcgacagatgctggyattggtgaccgtgtcaacatggccttccaaaactcaaacgtaacctatggtcgtgggatgggtgttgttgtcaatacaggtatgtayactgaagttggtcatattgctggtatgcttcaagatgcggatgagactgatacaccactcaaacaaaayttgaacaacctttctaaggtcttgacctatgctatcttggtcattgcccttgttacttttgtagtgggtgtcttcattcaagggaaaaatccacttggtgagttgttgacttctgttgcccttgcygttgcagccattccagaaggacttcctgctatcgttaccatcgttctttctcttggtactcaagttttggccaaacgacattccatcgttcgtaagttgccagcagttgaaacacttggttcaactgaaatcatcgcttctgataagactggtacgctgactatgaacaagatgacagtcgaaaaagtcttctacgatgcggttctacatgactcagctgatgatattgaactaggtcttgaaatgccactacttcgttcagttgtcttggccaatgatacgaaaatcgatgtggaaggtaacttgattggtgacccaaccgaaacagcctttatccaatatgccttggacaagggctatgatgtcaaaggtttcttagagaaatatcctcgtgtagctgaattgccatttgactctgaccgtaagctcatgtcaacagttcacccattgccagatrgtcgtttccttgtagcagtcaagggtgcgccagaccaactcttaaaacgttgtcttcttcgtgataaggctggggatattgctccgattgatgagaaggttacaaatctcattcrtacaaacaattctgaaatggctcatcaagccttgcgtgtccttgcaggtgcttataagattatcgatagtattccagaaaatctcacttctgaagagcttgaaaatgatttaatttttactggtttgattgggatgattgaccctgaacgtcctgaagccgctgaggctgttcgtgtggctaaggaagcgggaatccgtccaattatgattacaggtgaccaccaagacacagcggaagccattgccaaacgtttgggaatcattgacgcaaacgatacagaaggtcacgttttaactggtgctgaactcaatgaactgtcagatgaagaatttgaaaaagtygttggtcaatactctgtttatgcccgtgtgtctccagaacacaaggttcgtatcgtcaaggcttggcaaaaacaaggtaargtcgttgccatgacaggtgayggtgtcaatgaygcsccagctctgaaaacagcmgayatyggtatcggtatgggaatcactggtacagargtttctaagggggcttctgayatgattcttgcagatgataactttgcgactattatcgtcgcagtggaagaaggacgtaaggtcttctcaaayattcaaaagactattcagtacctactttctgcyaatactgctgaagtattaaccatcttcctatcaaccttgtttggttgggaygtcttrcagccrgttcatcttttgtggatyaacttggtaacggataccttcccagcwatygcwctwggtgttgaacctgcggarcctggtgtcatgaatcataaaccacgtggacgcaaggcaagcttcttctcaggtggtgttttgagttctatcatttatcaaggtgtactccaagcagctcttgttatgagtgtttatggycttgcgattgcttacccagttcatgtgggtgacaatcatgctattcatgcagatgccctaacgatggcctttgcaacccttggtttgattcagctcttccatgcctacaatgtcaagtctgtctaccaatccatcttgacagttggcccattcaagtctaagacctttaactggtccatsktggtatcctttatccttctcatggcracaatcgttgtagaaccgcttgaaggaatyttccacgtaaccaaactagacttgtcacaatggggaattgttatggctggaagcttytcaatgattatcatcgtcgaaatcgytaagtttattcaacgcaaactcggttttgacaaraatgcgatttaactaat

SEQ ID NO: 1358 - DNA, 1739 bp, Streptococcus pneumoniae
  misc_feature (1)..(1739): tiling:Spneumo1:WAN024G43; Cluster includes WAN0243ZW spr1 062|ptsI|15903106|NP_358656.1|1059635..1061368|-|1734 bp|P TS enzyme I|S.pneumoniae|R6|NC_003098.1|ORF|141
atgacagaaatgcttaaaggaatcgcagcatctgacggtgttgcagttgcaaaagcatatctactcgttcagccggatttgtcatttgagactattacagtcgaagatacaaacgcagaagaagctcgccttgatgccgctctacaggcatcacaagacgagctttctgttattcgcgagaaagcagtaggtacgctcggtgaagaagcagctcaagtttttgatgctcacttaatggttcttgctgacccagaaatgatcagccaaatcaaggaaactatccgtgcgaagaaagtgaatgcagaagcaggtctgaaagaagttacagatatgtttatcactatctttgaaggcatggaagacaacccatacatgcaagaacgcgcagcggatwtccgcgacgtracwaawcgtgtattggcaaaccttcttggtaaaaaattrccaaacccagcttctatcaatgaagaagtgattgtgattgcrcatgacttgacwccwtcwgatacagctcaattggacaaaaactttgtaaaagcttttgtaaccaacatyggtggacgtacaagccactcagctatcatggcacgtacacttgaaattgcwgctgtattaggtacaaayaacatcactgaaatcgttaaagacggtgacatccttgctgttaackggatcactggwgargtkattatcaacccaacwgatgaacaagcggcagaatttaaagcagctggtgaagcytatgcgaaacaaaaagctgaatgggcrctyttgaaagatgctcaaacagtgactgctgacggtaaacacttcgagttggctgcyaatatyggtactccaaaagacgttgaaggtgttaacaacaacggtgcagaagctgttggactttaccgtacagagttcttgtacatggattctcaagacttcccaactgaagatgagcagtatgaagcatacaaggctgttcttgaaggaatgaacggtaaacctgttgtcgttcgtacaatggatatcggtggagataaggaacttccttacttcgatatgcctcacgaaatgaacccattccttggattccgtgctcttcgtatctctatctctgagactggagaygctatgttccgcacacaaatccgtgctcttcttcgtgcgtctgttcacggtcaattgcgtatcatgttcccaatggttgcgctcttgaaagaattccgtgcagcgaaagcagtctttratgaagaaaaagcaaaccttcttgctgaaggtgttgcagttgcggataacatycaagttggtatcatgatygagattcctgcagcggctatgcttgcagaccaatttgctaaagaagttgacttcttctcaattggtacaaacgacttgatccaatatacaatggcagcagaccgtatgaacgaacaagtttcatacctttaccaaccatacaacccatcaatcctwcgcttgattaacaaygtkatyaargcagctcackctgaaggtaaatgggctggtatgtgtggtgagatggctggtgaccaammagctgttccacttcttgtcggaatgggcttggatgagttctctatgtcagcaacatctgtmcttcgtacacgyagcttgatgaagaaaytmgayacwgctaagatggaagagtacgcwaaccgtgcccttacagartgytcaacaatggaagaagtycttgaacttcaaaaagaatacgttaattttgattaactaat

SEQ ID NO: 1359 - DNA, 734 bp, Streptococcus pneumoniae
  misc_feature (1)..(734): tiling:Spneumo1:WAN024CXX; Cluster includes WAN02439V spr2 002|ABC-NBD|15904043|NP_359593.1|1995972..1996700|-|729 bp |ABC transporter ATP-binding protein - anion transport|S.p neumoniae|R6|NC_003098.1|ORF|111
atgacagaaattagactagagcacgtcagttatgcctatggtcaggagaggattttagaggatatcaacctacaggtgacttcaggcgaagtggtttccatcctaggcccaagtggtgttggaaagaccaccctctttaatctaatcgctgggattttagaagttcagtcagggagaattgtccttgatggtgaagaaaatcccaaggggcgcgtgagttatatgttgcaaaaggatctgctcttggagcacaagacggtgcttggaaatatcattctgcccctcttgattcaaaaggtggataaggcagaagctatttcccgagcggataaaattcttgcgaccttccagctgacagctgtaagagacaagtatcctcatgaacttagcggtgggatgcgccagcgtgtagccttactccggacctacctttttgggcacaagctctttctcttagatgaggcctttagcgccttggatgagatgacaaagatggaactccacgcttggtatcttgagattcacaarcagttgcagctaacaaccctgatcatcacgcatagtattgaggaggccctcaatctcagcgaccgyatctatatcttgaaaaatcgccctgggcagattgtttcagaaattaaactagattggtctgaagatgaggacaaggaagtccaaaagattgcctacaaacgtcaaatyttggcrgaattaggcttagataagtarctaat

SEQ ID NO: 1360 - DNA, 810 bp, Streptococcus pneumoniae
  misc_feature (1)..(810): tiling:Spneumo1:WAN024GI5; Cluster includes WAN023PJG pne3 2_17||||15143..15955|+|813 bp|Type 16F capsule operon, Gli mmer 2.02 orf prediction|S.pneumoniae||WAN01UCIC|ORF|000
atgacagaaayaaataaacagttacatgaaacattaatcgaaattttagactttgtaaaagaaatttgtgaaaaacatgaattaacttattttttgrtctwtggkacrgcwctyggwgcaaaacgccattgtggatttattccwtgggatgatgatgttgatattgctttrccrcgagagcactacaatatattwatcgaygyrttatctragayggawcaatctatatttagtcttcaaaatgaagataacgagccgaaytattttttaccatttgctaaattaagaaaaaacaatacgatttttattgaraagattcttgatgttgaatatgagaataacggyatttacattgatatttttccactagatttcgtagagaatccggactctttyaattttaagatkaggagaactayrtttaattatataaagcatattttaaaattttcaagttgcagaagtttttataaaaataaatacagtarygtrcgttatttgatkgaaaatattatgagtattcctaccctgtttttttcaaataggagattaytattcttagcgaatartttaatttcatcaacgamtaaagctrattttattggtcaatatgatgaaagtarcraaagagctatyatgccttcaarctattatttyccryctagrtccgctgtgtttgaaggaaagayytatagtgttcctgcgaaattagaagattatttaaaatrtttttatggytcggattatatggaattaccaccaatagaaaaaagagtcactcatcaaccaataamacttagattcraaaaa

SEQ ID NO: 1361 - DNA, 1952 bp, Streptococcus pneumoniae
  misc_feature (1)..(1952): tiling:Spneumo1:WAN024F27; Cluster includes WAN02449J spr0 715|gyrB|15902759|NP_358309.1|715818..717764|+|1947 bp|DNA gyrase|S.pneumoniae|R6|NC_003098.1|ORF|221
atgacagaagaaatcaaaaatctgcaggcacaggattatgatgccagtcaaattcaagttttagagggcttagaggctgttcgtatgcgtccagggatgtacattggatcaacctcaaaagaaggtcttcaccatctagtctgggaaattgttgataactcaattgacgaggccttggcaggatttgccagccatattcaagtttttattgagccagatgattcgattactgttgtggatgatgggcgtggtatcccagtcgrtattcaggaaaaaacaggycgtcctgctgttgagaccgtctttacagtccttcaykctggaggaaagttcggcggtggtggatacaaggtttcaggtggtcttcacggggtggggtygtcagtwgttaatgccctttccactcaattagacgttcatgtycayaaaaayggtaagattcattaccaagaataccgtcgtggtcatgttgtygcagaycttgarrtrgttggrgatacrgataraacwggaacaackgttcacttcacaccggacccaraaatyttcactgaaacaacaatctttgattttgataaattaaataaacggattcaagagttggcctttctaaatcgcggtcttcaaatttcwatyacwgataagcgysaaggtttggaacaaaccaagcattatcattatgaaggtgggattgctagttacgttgaatatatcaacgagaacaaggatgtaatctttgatacaccaatctatacagacggtgagatggatgatatcacagttgaggtagccatgcartacacaacdggttaccatgaaaatgtcatgagtttcgccaataatattcatacmcatgaaggtggaacrcatgaacaaggtttccgtacrgcmytgacwcgtgttatcaayrrttatgctcgtaaraataagttactgaaagacaatgaagayaayytaacaggggaagatgttcgcgaaggmttaactgcagttatctcagttaaacacccaaatccacagtttgaaggacaaacsaagaccaaattgggaaatagcgaagtggtcaagattaccaatcgcctcttcagtgaagcyttctccgatttcctcatggaaaatccacagattgccaaacgtatcgtrgaaaaaggrattttrgctgccaaggctcgtgtggctgccaagcgtgcgcgtgaagtcacacgtaaaaaatctggtttggaaatttccaaccttccagggaaactagcagactgttcttctaataaccctgctgaaacagaactcttcatcgtcgaaggagactcagctggtggatcagccaaatctggtcgtaaccgtgagtttcaggctatccttccaattcgcggtaagattttgaacgttgaaaaagcaagtatggataagattctagcyaacgaagaaattcgtagtcttttcacagccatgggaacaggatttggcgcagaatttgatgtttcgaaagcccgttaccaaaaactcgttttgatgaccgatgccgatgtcgatggagcccacattcgtacccttcttttaaccttgatttatcgttatatgaaaccaatcctagaagctggytatgtttatattgcccaaccaccaatctatggtgtcaaggttggaagcgagattaaagaatatatccagccgggtgcagatcaagaaatcaaactccaagaagctttagcccgttatagtgaaggtcgtaccaaaccgactattcagcgttataaggggctaggtgaaatggacgatcatcagctgtgggaaacaaccatggatcccgaacatcgcttgatggctagagtttctgtagatgatgctgcagaagcagataaaatctttgatatgttgatgggggatcgagtagagcctcgtcgtgagtttatcgaagaaaatgctgtctatagtacacttgatgtctaactaat

SEQ ID NO: 1362 - DNA, 1205 bp, Streptococcus pneumoniae
  misc_feature (1)..(1205): tiling:Spneumo1:WAN024EXI; Cluster includes WAN024453 spr0 875|pmrA|15902919|NP_358469.1|866211..867410|+|1200 bp|Maj or facilitator superfamily multi-drug resistance efflux pu mp|S.pneumoniae|R6|NC_003098.1|ORF|111
atgacagagattaactggaaggataatctgcgyattgcctggtttggtaattttctgacaggagccagtatttctttggttgtaccttttatgcccatcttcgtggaaaatctaggtgtagggagtsagcaagtcgctttttatgcaggcttagcaatttctgtctctgctatttccgcggcgctcttttctcctatttggggtattcttgctgacaaatacggccgaaaacccatgatgattcgggcaggtcttgctatgactatcactatgggaggcttggcctttgtcccaaatatctattggttaatctttcttcgtttactaaacggtgtatttgcaggttttgttcctaatgcaacggcactgatagccagtcaggttccaaaggagaaatcaggctctgccttaggtactttgtctacaggcgtagttgcaggtactctaacyggyccctttattggtggctttatcgcagaattatttggcattcgtacarttttcttactggttggtagttttctatttttagctgctattttgactatttgctttatcaaggaagattttcaaccagtagccaaggaaaaggcyattccaacaaaggaattatttacctcggttaaatatccctatcttttgctcaatctctttttaaccagttttgtcatccaattttcagcycaatcgatyggccctattttggctctttatgtacgcgacttagggcagacagagaatcttctttttgtctctggtttgattgtgtccagtatgggcttttccagyatgatgagtgcaggagtyatgggmaagctaggtgacaaggtgggcaatcatcgtctcttggttgtcgcccarttttattcagtcatcatctatctcctctgtgccaatgcctctagcccccttcaactaggactctatcgwttcctctttggmttgggaaccggtgccttgattccmggggttaatgccctactcagcaaaatgactcccaaagccggcatttcgagggtctttgccttcaatcaggtattcttttatctgggaggtgttgttggtcccatggcaggttctgcagtagcaggtcaatttggctaccawgctgtcttttatgcgacaagcctttgtgttgcctttagttgtctctttaacctgattcaatttcgaacattattaaaagtaaaggaaatctarctaat

SEQ ID NO: 1363 - DNA, 929 bp, Streptococcus pneumoniae
  misc_feature (1)..(929): tiling:Spneumo1:WAN024GAS; Cluster includes WAN024489 spr0 761||15902805|NP_358355.1|757384..758307|+|924 bp|Conserve d hypothetical protein|S.pneumoniae|R6|NC_003098.1|ORF|111
atgacagagttggcaaagcaactattagagttgacctatattgtgattggttgtcaatttctccatacagcctattgtagttataaagataaaacaaacccagttcgacttgggacatctgcattttggactctattgtctattacgtttataggtggttcctatatgccaaatatgagtattggtattattgtaatcctattatcgctgttaacattgtttaagcaagtccgtatcggaaccttgccatccttagatgaaatgaaagccaatattgaatctaacaggttgaaaaataaaatttttattccagttatgctgatggcaatacttgcgttggtcttagcgcaaatgattccagaatttagcaagatttcgattagccttgccgccttgtttgctacaatttctgttcttgtgattaccaatagtcaccctaagagtctgttatcagaaaataatcgaatgactcagcaagtttcaacaagtggkattgttcctcaattattaggggctttgggggctatttttactgtagcaggtgttggtgatgttatytctcatctgattagcggtattgttccttcagatagtcgctttataggagttttggcctatgttcttggaatggttctattcacaatgattatgggaaatgcttttgcagcattcaccgttattacagcaggtgttggagttcccttygtatttgctctgggagctaatccaattgtggctggtgctcttgccatgacagcaggttattgtgggaccttattgaccccaatggctgctaattttaacgctytaccagcagcattgatggatatgaaagatcagaatggcgttataaaggctcaagcaggtgttgctctagtaatgattgttattcacatattcttaatgtactttctcgcattttarctaat

SEQ ID NO: 1364 - DNA, 597 bp, Streptococcus pneumoniae
  misc_feature (1)..(597): tiling:Spneumo1:WAN024AW9; Cluster includes WAN02413U |orf 2||CAB05931.1|||597 bp|dTDP-4-dehydrorhamnose 3,5-epimeras e|S.pneumoniae||Z83335|ORF|001
  misc_feature (222)..(222): n is a, c, g, or t
atgacagataaktttttcggtaagacgcttgcggcacgcaaggttgaagctattccakgcatgttrgagtttgatatccccgttcatrgagataatcgtggctggtttaaagaaaatttccaaaaggaaaaartgcttccrcttggatttccagmgtctttctttrcagaaggaaaattgcaaaacaatgtatccttctcacgtaaaaatgtccttcgwggnctccacgcagagccttgggataagtacatctctgtdgcagatggagggaaagttcwgggttcttgggttgatctacgcgagggtgaaacctttgggaakacctatcagacagtrattgatgcragyaagggaatctttgttcctcgwggcgtagctaatggcttycaagttytatcagatacagyktcatatagctatctggtcaatgattactgggckctygarctcaaacccaagtatgcctttgtgaactacgctgatccaagcyttggtattgaatgggaaaatmtkgmagaagcagavgtwtcwgaagcagayaaahatcatycmctacttaaggaygtraarcctttgaaaaaagaagatttgkaataa

SEQ ID NO: 1365 - DNA, 594 bp, Streptococcus pneumoniae
  misc_feature (1)..(594): tiling:Spneumo1:WAN024AW8; Cluster includes WAN0244KH spr0 321|cps2M|15902365|NP_357915.1|321134..321727|+|594 bp|The type 2 capsule locus of Streptococcus pneumoniae|S.pneumo niae|R6|NC_003098.1|ORF|100
atgacagataattttttcggaaaaatacttgcggtgcgtaaaattgatgccattccaggtatgttagagtttgatatcccagttcatggtgacaatcgtggctggtttaaggaaaatttccagaaggaaaagatggagccacttggctttcctgaaagcttctttgctgaagggaaactacaaaataacgtcagcttttctcgcaaaaatgtccttcgaggcctccacgcagagccttgggataagtacatctctgtagcagatggagggaaagttctgggttcttgggttgatctacgcgagggtgaaacctttgggaatacctatcagacaataattgatgcaagcaagggaatctttgttcctcgaggcgtagctaatggcttccaagttttatcagatacagtgtcatatagctatctggtcaatgattattgggctcttgaactcaaacccaagtatgcctttgtgaactacgctgatccaagccttggtattgaatgggaaaatattgcagaagcagaggtttcagaagcagataaacatcatcccctacttaaggatgtaaaacctttgaaaaaagaagatttgtaa

SEQ ID NO: 1366 - DNA, 335 bp, Streptococcus pneumoniae
  misc_feature (1)..(335): tiling:Spneumo1:WAN024BF7; Cluster includes WAN0244GL spr0 461|blpT|15902505|NP_358055.1|468814..469143|-|330 bp|Hypo thetical protein|S.pneumoniae|R6|NC_003098.1|ORF|111
atgacagatacagaccccatcaaaagagctcatactttgattactgacttaaacaaagcctaccaagcatgcaaacaggcaagcgctgacgacgtccgctttcaggagcaattaaactctattcttggttttctagccaaggctgaaacagtggataatcgattcttgattgaactagaamaattttaccagayttccagtcttctcatgggactcagcgctcttgatccagatgctccaactcgcgccgcttggcgggcctatgaccgcttccactttgaccaagtcaagaccaagttaatactcaatgaaaatcaaagagcaaactarctaat

SEQ ID NO: 1367 - DNA, 819 bp, Streptococcus pneumoniae
  misc_feature (1)..(819): tiling:Spneumo1:WAN024FOJ; Cluster includes WAN023PIX pne3 3_12||||6580..7398|+|819 bp|Type 16A capsule operon, Glimm er 2.02 orf prediction|S.pneumoniae||WAN01UCI4|ORF|000
atgacagatgaattagaacggttacataacttagaacttttgttagcttcagaagtgttaaaaatatgtggaaaatataatttaaaaatcgtgatgctagcaggaacttttctaggggctatacgccataatggattcatcccgtgggacgatgatatggattttggtatgccaagagaggattttgaaagatttaaagaattatgtgtttcggatttggacagggaaaaatattttctacagacagatcaaacagatttgaattatccatttaattttgtgaaactacgtctcaataatacacatgtttctgaggaattttctttagatgcaaatgttcatgatggaatttatattgatatttttccgattgataatatctgtcccaagccttttagacgattcattcaacttaaaggattttggttattccgaaatctattatggataaaatgtggatatggggacaacgatagaaaaaaacgattagcgtataaactagctaagcttgccacacatgtgttctcaatatcttttttgaaaaagatgaaggagaagtgtatattactagggcagagtaccaatgctgataatgtagtggttagtgatggtagttatggaataaagaaagaaacttttccaaaagtgtggttagacgaagttgaaagttattcctttgatgatataaaattatggggaatgaagaattatagagcatacttaaaacatatgtatggtgactatatgcagcttccacctgagaatcaacgaaatcatcacaaacgaattaaaattgattttggcccatacgtggaaaaa

SEQ ID NO: 1368 - DNA, 765 bp, Streptococcus pneumoniae
  misc_feature (1)..(765): tiling:Spneumo1:WAN024CS6; Cluster includes WAN0243UM spr1 253|pstB|15903296|NP_358846.1|1252252..1253010|-|759 bp|AB C transporter ATP-binding protein - phosphate transport|S. pneumoniae|R6|NC_003098.1|ORF|111
atgacagatgcgattttacaggtatcagacctgtccgtttattataataaaaagaaggctttgaatagtgtttccctatctttccaacctaaggaaattacagccttgattggtccatctggatcagggaagtcaaccctcctcaagtctctcaaccgcatgggagatctcaatccagaggtgaccacaactggatccgtggtgtacaatggycacaacatctacagtccgcgtacagatacggttgaattacgtaaggaaatcggaatggttttccaacaacctaatcctttccctatgactatctatgagaatgttgtctacgggcttcgtatcaatggaattaaggataagcaggttctggatgaagccgtagaaaaagccttgcaaggtgcctctatctgggatgaggtcaaggatcgtctatatgattcagctattggattgtcaggtggtcaacagcagcgtgtctgcgtggcccgtgtcttggcaactagtcctaaaatcatcctcttggatgagccaacttcggctttggakccgatttcagctggtaarattgaggaaaccttgtatggtctaaaagacaagtacaccatgcttctggtaacccgttccatgcagcaagcttcacgtatctctgataagacaggatttttcctagatggagatttgattgaatttaatgataccaagcagatgttccttratccccmacacaaggaaacggaagactatattacaggaaaatttggataaskagat

SEQ ID NO: 1369 - DNA, 734 bp, Streptococcus pneumoniae
  misc_feature (1)..(734): tiling:Spneumo1:WAN024G39; Cluster includes WAN0243ZC spr1 083|pphA|15903126|NP_358676.1|1079271..1079999|-|729 bp|Se rine/threonine protein phosphatase|S.pneumoniae|R6|NC_0030 98.1|ORF|231
atgacagattattatgtaattggagatgttcacggaaaagctgggatgctggaagaccttctyaaaacctgggatggtcagmcccagttgctctttctaggtgatttgattgacagaggtgaggatagtcaccgtgttcttgaaatggtcaaggacttggtggacaatcaaggggctatctgtttgtcyggaaaccacgagtatatgtttttgacttggctagatkacccagaagaaagttatgaccattatmgtcgcaatggtggagatacaaccattaactctatcctaggtcgtcccttggatgcaccagttgatggagtagaagatgccaagcgggttgccgctgaagcgkcagacttggtcgaattcattcgtcaaatgccatttgtastarwgacagacaagtatatmtttgttcacgcaggtattgatttgaccttggaygactggcatgaaacaacagattataaaaaagtatggcttagaaaaccattccacggagctgaaaatcatactggaaaaaccattgtcttcggtcatacaccggtctatggtttgttacagcaagaacgcggtacatctgagctttggactacagaagatggcaagattggaatggatggaggagctgtttatggtggtgtccttcacgggattgtctttacagaccaaggaatgacagaacaccactttatcgaaaatgacggctttgtcgctgaagattarctaat

SEQ ID NO: 1370 - DNA, 452 bp, Streptococcus pneumoniae
  misc_feature (1)..(452): tiling:Spneumo1:WAN024DAR; Cluster includes WAN02440N spr1 035||15903079|NP_358629.1|1017712..1018158|-|447 bp|Hypoth etical protein|S.pneumoniae|R6|NC_003098.1|ORF|111
atgacagatttatcaaaacaattacttgaaaaagctcatggtgggttaaaaataaatccggatgagcaaagacgctatcttggtacttttgaggaaagagttcttggatatgtagatattgacacagcaaatagccctcagttagaaaaaggctttttatttattttagaaaaccttcaggaaaaagcaragccactatttgtgaagatttcaccaactatcgaatttgataagcaagttttctacttaaaagaagcaaaagaaactgatagtcaagccaccatagtatctgaagagcatattacttctccttttggcctggttattcatagcaatgcaccagttcaagtagaagaaaaagaccttcgacttgcttttccaaaactttgggaagttaaaaaggaagaaccagccaaaacatccttatggaagaaatggtttagctaactaat

SEQ ID NO: 1371 - DNA, 683 bp, Streptococcus pneumoniae
  misc_feature (1)..(683): tiling:Spneumo1:WAN024DH3; Cluster includes WAN0244EL spr0 533|glnP|15902577|NP_358127.1|532771..533448|-|678 bp|ABC transporter membrane-spanning permease - glutamine transpo rt|S.pneumoniae|R6|NC_003098.1|ORF|111
atgacagatttatcatcttggacagcctattttcaggattttggacaatttttcaatggtttcctcttyacycttgccctagcgrttggwtyctttatcctcgcyatggtyttrggmatcttctttggtgccatgtcaaccagtaaacgtccaattttacgcattttagctcrcatcttygtkgaattttaccaaaayactcccctcttggtgcagtttgttattgttttttatggcctacctcttatcagtgaccayayyatcatgattccaatttattggacagcygttctctgcgtgggactctatcacggcgcttatatcgctgaggttattcgttcagggattcagtctattcctagtggtcagatggaggccgccttgtcgcaaggttttacctatatcagtgccatgcgcttgattaycttgcctcagrccttccgcatcattctccctccattgaccaaccaaattgttaacctcatcaagaacacmtctactgtagctatcatctctggagtagacttgatgtttgtgactaagtcttggtcggctctmaacggaaactatatmccagcctttttaggtgctgctcttctctactttgcyctatgcttccctgttgcccagtttggtcgcaagatggagcaagccaayaaaaaagcctattcactttarctaat

SEQ ID NO: 1372 - DNA, 764 bp, Streptococcus pneumoniae
  misc_feature (1)..(764): tiling:Spneumo1:WAN024G6K; Cluster includes WAN024429 spr0 977|ABC-NBD|15903021|NP_358571.1|962670..963428|+|759 bp|A BC transporter ATP-binding protein - unknown substrate|S.p neumoniae|R6|NC_003098.1|ORF|111
atgacagcaattgtagaattaaaaaatgcaaccaaaatcgttaaaaatggctttgatgaagaaaagattattttaaatgatgtttccttagaaatttttgaacrggactttatcacgattttgggyggaaatggtgctggwaaatcaacyctctttaacactatwgcaggraccwtatcactaacyagtggaactatccgtattttaggtgargawstyacyaagttttcaccmgagaagcgygcyaagtayctgtctcgwgtcttccaagatccaaagatggggacagctccycgtatgacrgtsgcwgaraatctyytratygccaagtttcgtggtgaaaagcgtggaytrttwccrmgacgyytgrctagctataaggatrartttcaggcraccattgaaaaagtrggaaayggtcttgagaaacacttgaatacaccgattgagttcttatcwggtggacaaagacaggctttgagtctcttgatggcaaccttgaagcgacctgaattactcytgttagaygagcatactgctgccctggatccaaagactagtgttgctttgatggrattgacagatgaatttgttaagaaagatcarytracagcccttatgattacycatcatatggaagatgctctcaaatayggcaatcgcttgattgtcatgaaagaaggacgrrttatccaagatttraamcaagaagaaaaagcaaaaatgaaaatctctgattattatcaactctttgaataactaat

SEQ ID NO: 1373 - DNA, 717 bp, Streptococcus pneumoniae
  misc_feature (1)..(717): tiling:Spneumo1:WAN024FD3; Cluster includes WAN0243JV spr1 641|mgtC|15903683|NP_359233.1|1613561..1614271|-|711 bp|Mg (2+) transport ATPase/permease|S.pneumoniae|R6|NC_003098.1 |ORF|111
atgacagccactagtcttgggttatcaaatattgaaatagttgtcaggattgttttatcagtagtcattggtagtataattggtttagagagagggagcaaatcccagcctgcaggcatccgaacttatagtattgtttgtctagctgcatgtttgattatgatgacgaatgaatacgtatcttataaatttgggacaggagatcctacacgattaggagctcaagttatatcaggtgtgggttttctaggcgctggaacgattcttattacagataaaaagaaaattacaggtctgacaactgcagcaggcatttgggcttcggcaggaattggattagctattggagtaggtttttatgagggagctcttttagtagccatttctgtttggggtgtgatatccatgttccarccactaaaaaaatatctgcaaaatcgttctaaaatgattgaattgtatwtagtrgttaaatctacagaagyctataatcgtgtattggtttattgtgcagaaaatggtatcagaatgaccgattcaagaacagcgtttggagatgttaattctgacagaattgaatactttgatgttccrgayaaaaaaatagcgtcatttattactctggaattatcaggtagatttgaacatcttcgactgatggaagaaattgctaatattgtaggtgttatttatgtcgaagaaattagcykaactaat

SEQ ID NO: 1374 - DNA, 237 bp, Streptococcus pneumoniae
  misc_feature (1)..(237): tiling:Spneumo1:WAN024CAG; Cluster includes WAN023MA1 3126 80_322||||170569..170805|+|237 bp|EGAD orf prediction|S.pn eumoniae|R6|NC_003098.1|ORF|110
atgacagctcccaagcagataattgcatcatattttttactttttgccatttttgatgcaatcagtggtatttcaaaagctcctggaacccaggctacctckatatctttctcgtttacattctctcttttgagattatctagtgctccagataataattttgaagttataaattcattaaatctcgctacaacaatacctattttaatattgtttgctactaaattaccttcataa

SEQ ID NO: 1375 - DNA, 191 bp, Streptococcus pneumoniae
  misc_feature (1)..(191): tiling:Spneumo1:WAN024ETY; Cluster includes WAN0244IM spr0 388||15902432|NP_357982.1|386472..386657|+|186 bp|Hypothet ical protein|S.pneumoniae|R6|NC_003098.1|ORF|121
atgacaggtacarawacatttacagttmtttcaactgaggacttggagcaaacttcaggtggtcttgctgtttgggaagatggatatagtagatggttatattatagagaatttgctccctatatgaggcaaggggcacttaattcttatatagatgcttggaagtacggcttccgarcagggtaactaat

SEQ ID NO: 1376 - DNA, 1028 bp, Streptococcus pneumoniae
  misc_feature (1)..(1028): tiling:Spneumo1:WAN024GAW; Cluster includes WAN02448C spr0 758|ilvE|15902802|NP_358352.1|754851..755873|+|1023 bp|Bra nched-chain-amino-acid transaminase|S.pneumoniae|R6|NC_003 098.1|ORF|111
atgacagtaacgattgattgggaaaacctcggtttttcctatatgaaattaccttatcgctatcttgctcatttcaaaaatggacaatgggatcaaggagagcttacagaggatgcaactttgcatatttcagagtcttctccaagtcttcactatggacaacaagcatttgaaggtttgaaagcttatcgtactaaggatggcagtgttcaactgttccgtcctgatgaaaatgctaaacgyctgcaacgtacatgtgaccgtctcttgatgccacaagttccgacagacatgtttgtagaagcttgtaaagcagttgtccgtgcgaatgaagaatacgtaccacyatacggaayaggtggaaccttatatcttcgccctcttttgattggtgtcggagatattatcggggtaaaaccggcagaagagtacattttcaccatctttgctatgccagttggaaattactttaaaggyggtttggtcccaaccaacttcttgattcaggatgagtacgaccgtgcagcaccaaatggtacaggtgcggctaaggttggtggaaactatgctgcaagtctcttaccaggaaaaatggccaagtcacgycatttctcagatgttatctatctggacccatcaactcatacaaagattgaagaagtcggatcagctaayttctttggaattacagctgataatgaatttgtaacaccattgagtccatctatcttgccatctattaccaagtattccttgctttatttggcagaacatcgcttgggattaactcctattgagggtgatgttccaattgataatcttgaccgttttgtagaggcaggtgcctgtggtacagcagcggttatttctccaattggaggtattcaacatggtgatgatttccatgtattctatagtgaaacagaagtaggtcctgtgacgcgtaaattatataatgaattgacgggtattcagtttggcgatattgaagcgccagaaggttggattgtaaaagtagattaactaat

SEQ ID NO: 1377 - DNA, 171 bp, Streptococcus pneumoniae
  misc_feature (1)..(171): tiling:Spneumo1:WAN024BGS; Cluster includes WAN024476 spr0 800||15902844|NP_358394.1|804440..804604|+|165 bp|Hypothet ical protein|S.pneumoniae|R6|NC_003098.1|ORF|111
atgacagtaatcttaggatttttatttctatttttgatrasttggtgggttatttcaatcgttaatagccagaaaccackcaaaaatgaaacatttattggctatgtccaaagatacgatattgatgggaatggctatcaatcattaccgtgtcctcagarcykaactaat

SEQ ID NO: 1378 - DNA, 1196 bp, Streptococcus pneumoniae
  misc_feature (1)..(1196): tiling:Spneumo1:WAN024D8O; Cluster includes WAN0243TO spr1 287|spnIM|15903330|NP_358880.1|1280629..1281807|+|1179 bp| DNA modification methyltransferase|S.pneumoniae|R6|NC_0030 98.1|ORF|111
atgacagtattaaaaggagataacttagaaatattaaaaactattgaatcctcaagtattgatttaatctatatggaccctcctttctttacacagaaaacccaaaaattatctaataacaaaaatattatgtattcattcgaagatacgtggacttcgattgaggattacaaagaatttttgtctgtaagattagaagaatgcaaaagagtgctaaaaaatagtggcagtattttcgttcattgtgataaaattgcaaatcatcatattagattaattttagataatatctttggagyagatatgtttcaaagcgaaattatatggaactataarcgrtggtctaattcaaaaaagggattattgaacaatcatcaaaacatttacttttattcaaagtcaaaagattttaaatttaatacaatttttacagagtattcttctactacaaatatcgaccaaatactagtggaacgaaaacgagatggaaactctaaaactatatataargttgataataatggtaactatattctagcaaaagagaaaaatggagttcccctttcagatgtttggaatataccatttcttaatccaaaagctaaagaaagagtaggttatcctacacaaaaacctattctgttattagaacaaattataaagattgctactgataaaaatgatatagttttagacccgttctgtggaagtggaactactttagtagcctccaagattttgaatagaaattatatggggattgatttatctgaggaagctatcaatataactcagcaacgtctggaaaatgttataaaaacaagttcaaatttattgaataaaggaatcgaagcatatagaaccaaaactgaggaagaggaaaacattcttaaattattacaggcaaaaattgttcaaagaaataaaggaattgatggttttttacctaaacattttcaaaaaaaaccgatacctataaaaattcaaaaaaataatgaatgtctgaatgagagtatctctttattacagaatgctataaactccaaaaaacttgattttggagtagttataaaaactcattcagataatttattatttgattttgatacgatycctgaaaatataatagtagttgaccattttgaacttacaatcgaaaaatggttaagtaaaagtyaacagttactatarctaat

SEQ ID NO: 1379 - DNA, 277 bp, Streptococcus pneumoniae
  misc_feature (1)..(277): tiling:Spneumo1:WAN024GLA; Cluster includes WAN023M0Z 3144 80_831||||445026..445283|-|258 bp|EGAD orf prediction|S.pn eumoniae|R6|NC_003098.1|ORF|210
atgacagtcttctctttatttgagaagtgtacttcaacacctgttttactatcagaaaagactgctgrcttgtcttctttcaataaagcaaccagatcttttagactctgtttcgctgttgyaagctcttctggactcaaatctactttttcaaccaaggccttgtttttctcaagaagcggagctagggcagaacctgaaggatggtttggtttggcagccaagagttcttgagcctcacctgttaagcgatcaagctctgtcttttcttccgtaa

SEQ ID NO: 1380 - DNA, 240 bp, Streptococcus pneumoniae
  misc_feature (1)..(240): tiling:Spneumo1:WAN024FSK; Cluster includes WAN023L6D 3151 48_2340||||1254835..1255074|+|240 bp|EGAD orf prediction|S .pneumoniae|R6|NC_003098.1|ORF|110
atgacagtgttcccaattcccatagttaatatagaagttaaagttgcagctggtgtggtcaaggaagttgggataacagctgagtttccgacaaccatctggatagctaragcctcaccaaaggcacgcgccatcccaaagaccactgcagtgaaaataccagaacgggccgccttcaagatcacacgccagatagtctgccagcgagtggctcccatagcgaaactggcttcacgataa

SEQ ID NO: 1381 - DNA, 1028 bp, Streptococcus pneumoniae
  misc_feature (1)..(1028): tiling:Spneumo1:WAN024GMU; Cluster includes WAN0244I7 spr0 403|ilvC|15902447|NP_357997.1|399592..400614|+|1023 bp|Ket ol-acid reductoisomerase|S.pneumoniae|R6|NC_003098.1|ORF|1 11
atgacagttcaaatggaatatgaaaaagatgttaaagtagcagcacttgacggtaaaaaaatcgccgttatcggttatggttcacaagggcatgcgcatgctcaaaacttgcgtgattcaggtcgtgacgttattatcggtgtacgtccaggtaaatcttttgataaagcaaaagaagatggatttgatacttacacagtagcagaagctactaagttggctgatgttatcatgatcttggcgccagacgaaattcaacaagaattgtacgaagcagaaatcgctccaarcttggaagctggaaacgcagttggatttgcccatggtttcaacatccactttgaatttatcaaagttcctgcggatgtagatgtcttcatgtgtgctcctaaaggaccaggacacttggtacgtcgtacttacgaagaaggatttggtgttccagctctttatgcagtataccmagatgcaacaggaaatgctaaaaacattgstatggactggtgtaaaggtgttggagcggctcgtgtaggtcttcttgaaacaacttacaaagaagaaactgaagaagatttgtttggtgaacaagctgtactttgtggtggtttgactgcccttatcgaagcaggtttcgaagtcttgacagaagcaggttacgctccagaattggcttactttgaagttcttcacgaaatgaaattgatcgttgacttgatctacgaaggtggattcaagaaaatgcgtcaatctatttcaaacactgctgaatacggtgactatgtatcaggtccacgtgtaatcactgaacaagttaaagaaaatatgaaggctgtcttggcagacatccaaaatggtaaatttgcaaatgactttgtaaatgactataaagctggacgtccaaaattgactgcttaccgtgaacaagcagctaaccttgaaattgaaaaagttggtgcagaattgcgtaaagcaatgccattygttggtaaaaacgacgatgatgcattcaaaatctataactaactaat

SEQ ID NO: 1382 - DNA, 1448 bp, Streptococcus pneumoniae
  misc_feature (1)..(1448): tiling:Spneumo1:WAN024CH6; Cluster includes WAN0244S3 spr0 047|purF|15902091|NP_357641.1|50314..51756|+|1443 bp|Amido phosphoribosyl transferase|S.pneumoniae|R6|NC_003098.1|ORF |111
atgacatacgaagtaaaatctcttaatgaagaatgtggtgttttcggtatttggggacatccagatgctgctaagttgacctattttggactccacagtcttcarcaccgtggtcargagggggcaggaatcctctccaaygaycaaggamaactraagcgscatcgygayatgggdcttytatcagaagtyttcagaaatccwgcyaayttrgataaattgacrggrrctggtgcgattgggcatgtgcgttaygcgactgctggcgaagcttctgtwgataayatccagcccttcctcttccgttttcacgatatgcagtttggyttggctcataatggraatctgaccaatgcagcctctctcaagaaagaaytggaasawagaggagcaattttcagygcgacttcggaytckgaaatcttggctcayctcattcgtcgcagtcataatcctagcctgatgggyaaaatcaaggaagcgctcagccttgtcaaaggtggttttgcctatatcttgctgtttgaggacaagttgattgcggctcttgaccchaatgghttycgwccgctttckatyggkaaaatggcyaayggagcrgtkgttgtwtcytctgaaacctgtgcttttgaggtyattggtgccgagtggattcgtgatttgaagccaggtgagattgtgatcattgatgacgagggcattcagtatgacagctatacagatgatacycagttggcgrtttgttctatggagtatatctactttgcycgccctgattctaatatccacggtgtcaatgtccatacggcacgtaagagaatgggagcgcaattggcgcgagaatttaagcatgaggcagatattgtagttggtgtgcccaattcttccctaagcgcggctatgggatttgcggaagaakcaggcttaccaaatgaaatgggtctgatcaaaaaccaatacacccagcgaacttttatccaaccgactcaagaattgcgggagcaaggagtgcggatgaaactgtctgctgtttcgggtgttgtcaaaggcaaacgtgtggtcatggtggatgattccattgtacgtggaacaacctctcgtcgtatcgttcagctcttgaaagaagcgggtgcgactgaggttcacgttgccattggaagtcctgcactagcgtatccatgtttctacgggattgatatccagacccgtcaggagctgattgcagccaatcatacggtcgaagaaactcgccaaatcattggtgcggacagtmtgacttatctttcaattgatrgcttgattgagtcgattggtatcgaaacagatgcgccgaacggtggtctctgtgtcgcttactttgacggtgactacccaacgcctctytatgactacgaagaagactatcrtagaagtttggaagaaaagaccagtttttacaagtarctaat

SEQ ID NO: 1383 - DNA, 683 bp, Streptococcus pneumoniae
  misc_feature (1)..(683): tiling:Spneumo1:WAN024FIW; Cluster includes WAN0243PM spr1 433||15903476|NP_359026.1|1416910..1417587|-|678 bp|Conser ved hypothetical protein|S.pneumoniae|R6|NC_003098.1|ORF|1 11
atgacatattwagacgcttttaaatcaggtacyttggttttaccgagtgccctgctcttgcattttaaggaactctttccttctagcgacgattttctggtttggcaatttttctatttgcaaaatacgacaggcttagaagaaatrtcgccaagccagattgctgaaaggattggcaaggaaatttcggaygtcaaccagtccatttctaatctgacggaaaggggactgctccagtatcgtactatcgaattaaatggcgaaattgaattgctctttgatgctagtttggccttggaacgtttggatgacctgtttggagcagttcattcaagttcagaccagctaacaycwcaaaaccagctcaaggatttggtggaaaccttccagcaggagttgggacgattgttgacgccttttgagattgaggatttgaccaagacactaaaggaagatggaaccagtgctgacttgattaaggaggctcttcgtgaagctgttttgaayggaaaaccaaactggaagtacattcaggcgattttgagaaactggcgccatgaaggaatcaagagtgtggctcaaattgaggccaagagagcagaaagagaagcaagcaatcctcagttgayacaggtatctgcagatttcakaaatgccatggatctctggaaggattaactaat

SEQ ID NO: 1384 - DNA, 890 bp, Streptococcus pneumoniae
  misc_feature (1)..(890): tiling:Spneumo1:WAN024D63; Cluster includes WAN0243N8 spr1 519|glk|15903562|NP_359112.1|1497340..1498224|-|885 bp|Glu cokinase|S.pneumoniae|R6|NC_003098.1|ORF|111
atgacataytacgttgcaattgatatcggtggaacyaacatcaagtatggtttggttgatcaagaggggcaacttcttgaatcrcatgaaatgccaacwgaggcgcataagggtggacctcatatcttacaaaagaccaaagatatcgtagctagttatttagaaaaaggcccagtagcaggtgttgccatatcttctgctgggatggtggatccggataagggtgagattttctatgctgggcckcaaatccctaactacgcaggcacccagttcaaaaargraatcsragaaagctttrctattccttgtgagatkgaaaatgatgtcaactgtgcaggtctkgctgaggcagtatctggttcaggyaagggagcaagtgtsacmctttgcttgaccattggaacmggtatyggtggttgyttgattatggatrggaaagtcttccatggwtttagyaattcagcctgtgaagtyggktatatgcatatgcaggatggagcktttcargayytsgcttctacaacagcyttrgtgrartatgtagcwgmagcycatggagawsmwgttgaycagtggaatggycgwmgwatyttyaargaagcyackgaaggmaayaaawtctgcayggaaggtattgaccgyatggtwgactatctaggaaaaggtctggcaaatatttgytaygtkgccaatccagargtrgwyattctyggtggyggtatcatgggrcaagaggckatyctcaaacckaaratccgyacagccttgaaagaggcwttggtaccaagtttrgcwgaraaaacamgattagaattygccmakcaccaaaatacmgcaggsatgttgggtgcwtattatcattttaaracaaaacaatcctarctaat

SEQ ID NO: 1385 - DNA, 900 bp, Streptococcus pneumoniae
  misc_feature (1)..(900): tiling:Spneumo1:WAN024DYD; Cluster includes WAN0240O9 |gal U||CAA06172.1|||900 bp|UTP-glucose-1-phosphate uridylyltra nsferase|S.pneumoniae||AJ004869|ORF|000
atgacatcaaaagttagaaaggcagtcatccctgctgctggactaggaactcgatttttaccagcaaccaaggcccttgccaaagaaatgttgccaatcgtagacaaaccaactatccagtttatcgtggaagaagctctcaaatcaggtattgaagatattctrgttgtcactggtaaatcaaaacgttctattgaggaccactttgattcaaactttgagcttgaatacaatcttaaggaaaaaggcaaaacrgatttgttaaaattggtagakgaarcaactggyatgcgcctycatttcatccgccaaactcayccwcgyggtctyggagaygctrtyttrcaagccaargctttygtvggraatgarccyttygtygttatgctkggygatgacytkatggayatcacagaygagaakgccgttcctttgacaaaacaactgatgaatgattacgarmrgacacacgcatcaaccattgctgtcatgcccgtaccacaygaagacgtttcatcatatggagtcattgctcctcaagrcgaaggaadmratggwctytayagygttgaaacyttygttgaaaaaccagctcccgargakrcwccaagtgatttrgcratyatcggtcgytatctwctsacaccwgaratttttgakatyctcgaaaakcaagctcctggtgctggaaatgaaatccaacttactgatgcaatcgatactctyaataaaacacarcgtgtctttgcccgtgaatttacaggaactcgttacgacgttggggataagtttggctttatgaaaacatctattgactacgccctcaaacatccacaagtcaaagatgatttgaagaattacctcatccaacttggaaaagaattgactgagaaggaataa

SEQ ID NO: 1386 - DNA, 905 bp, Streptococcus pneumoniae
  misc_feature (1)..(905): tiling:Spneumo1:WAN024DYE; Cluster includes WAN0243CM spr1 903|galU|15903944|NP_359494.1|1880756..1881655|+|900 bp|UT P-glucose-1-phosphate uridylyltransferase|S.pneumoniae|R6| NC_003098.1|ORF|221
atgacatcaaaagttagaaaggcagtyatccctgctgctggactaggaactcgatttttaccagcaaccaaggcccttgccaaagaaatgttgccaatcgtagacaaaccaactatccagtttatcgtggaagargctctcaaatcaggtattgaagatattctagttgtcactggtaaatcaaaacgttctattgaggaycacttygattcaaacttygaattggaatataayctcaaagaaaaagggaaaayagatcttytgaakctagttgatraaacaactgrcatgcgbctgcattttatccgccaaackcatccacgyggtctcggmgatgctgttttgcaagcyaaggctttcgtyggaaatgaaccttttgtygttatgctkggtgatgacttgatggatatcacagacgaaaagrctgttccacttaccaaacaactcatrgatgactacragcgtacccacgcgtctactatcgctgtcatgccagtccctcatgacgaagtatctgcttacggggttattgctccgcaaggcgaaggaaaagatggtctttacagtgttgaaacctttgttgaaaaaccagctccagaggacgctcctagcgaccttgctattatcggacgctacctyctcacgcctgaaattttysaratyctcgaaaascaagctycwggtgcwggaaatgaaatycarctkacwgatgcaatcgayacyctyaataaaacacarcgtgtwtttgcycgtgarttyamwggrgctcgttacgaygtyggrgayaagtttggcttyatgaaaacatcyatygactacgccctcaaacayccacaagtcaaagatgatttgaagaattacctcatccaacttggaaaagaattgactgagaaggaataactaat

SEQ ID NO: 1387 - DNA, 1352 bp, Streptococcus pneumoniae
  misc_feature (1)..(1352): tiling:Spneumo1:WAN024FXN; Cluster includes WAN0243WM spr1 181|gdhA|15903224|NP_358774.1|1179472..1180818|+|1347 bp|N ADP-specific glutamate dehydrogenase|S.pneumoniae|R6|NC_00 3098.1|ORF|221
atgacatctgctaaagaatatatccaaagcgtgtttgaaactgtraaagctcgtaacgggcacgaggctgaattcctccaagctgttgaagaatttttcaacactttrgaacctgtatttgaaaaacaccctgagtatatcgaagaaaatatcttggcacgtattactgagcctgagcgcgtgrtttctttccgtgttccttgggttgaccgtgatggaaaarttcaagtaaaccgyggytaccgtgttcaattcaactcagctgttggaccatayaaaggyggacttcgtttccacccaactgtaaaccaagggatyttgaaattcctcggatttgaacaaatctttaaaaaygtcttgactggacttcctatcggtggaggtaaaggtggatcagacttcgatcctaaaggtaaaacagatgctgaagtgatgcgcttctgccaaagcttcatgactgaattgcaaaaacacatyggaccatcacttgacgtacctgctggtgatatcggtgttggtggacgtgarattggttacctttacggtcaatacaarcgtcttaaccaatttgatgctggtgtcttgactggtaaacctcttggatttggtggtagcttgattcgtccagaagcaactggttacggtttggtttactatactgaagaaatgctcaaagctaacggtaacagctttgctggtaagaaagtsgttatttcaggttctggtaacgttgctcaataygctcttcaaaaagcaacygaactyggtgcaacwgttatytctgtttctgactcaaayggytatgtyatcgatgaaaayggtatcgacttcgatcttttggttgatgttaaagaaaaacgtcgygctcgtttgactgagtatgcagctgaraaagcaactgcwacytaycaygaaggtwctgtatggacttacgctggaaactatgacattgckcttccatgtgcyactcaaaacgaaatcaacggtgaagcagctaaacgtttggttgctcaaggcgttatctgtgtatctgaaggtgccaacatgccragcraccttgatgccatcaaagtttacaaagaaaatggtatcttctacggacctgcmaaagctgccaacgctggtggtgtagccgtttcagcycttgaaatgagccaaaacagycttcgcctctcatggactcgtgaagaagttgatggmcrtctcaaagacatcatgacmaacatcttyaacacagctaaaacracttcagaaacatayggtcttgataaagactaccttgcaggagctaacattgctgcctttgaaaatgtagcaaaygcyatgattgcacaaggtattgtttaactaat

SEQ ID NO: 1388 - DNA, 1490 bp, Streptococcus pneumoniae
  misc_feature (1)..(1490): tiling:Spneumo1:WAN024CTO; Cluster includes WAN0243DB spr1 878|thrC|15903919|NP_359469.1|1847798..1849282|-|1485 bp|T hreonine synthase|S.pneumoniae|R6|NC_003098.1|ORF|111
atgacattagtttatcaatcaacgcgtgatgccaacaatacagtaactgcyagccaagcaattttgcaaggtttggcgacggacggcggtttgtttacaccggwtacttatccaaaggtagatttgractttracaaattgaaagatrcttcttaccaggaagttgctaagctagttttgtcagcatttttagatgactttacagytgaggagttggactactgtatcaacaatgcctacgatagcaaatttgatactccagctattgcaccattagtgaaattagatgggcaatacaatttggaacttttccatggttcaacgattgcctttaaggatatggccttgtctattttgccatactttatgacgactgctgctaaraaacatggtttggagaacaagattgttatcttgacagcgacatctggtgacacggggaaagctgctatggcggggtttgcgratgtgcctggtactgagattatcgtcttttatccaaaggrtggtgtcagcaagrtwcaagagttrcaaatgaccactcadamtggygacaatactcatgttatygctatwgatggtaactttgacgatgcgcaaacmaaygtgaagcacatgtttaacgacgtggctcttcgtgaaarattrrckrccaacaagttgcaattttcatcwgctaactctatgaacattggtcgtykggtgccacarattgtttattatgtttatgcytasgctcarttggtyaagactggtgaratygtrgctggtgawaagrttaacttcacagtaccaacaggaaactttggaaatatcttggctgccttttatgccaaacaaatyggtytsccagttggtaaattratctgtgcttcaaatgayaacaatgttttgacagacttcttyaaracacgtgtytaygacaaraaacgtgagtttaaggtaacaaccagcccatctatggatatcttggtatcttcaaacttggagcgyttgattttccatcttttgggraatratgckgwwaagacrrctgaactyatgaatrcyttgaayasvcaaggwcaatatrarytgacwraytttgatgyagagattytggasctctttgcagctgaatatgcgactgaggaagaaacdgcrgcagaratcaagcgtgtttrtgagtyagattcttatatygaggayccwcatacrgckgttgcytcagcagtktataraaaataccarkcgryyactgrwgatgyractaagacagtgattgcttcaacagctagtccmtacaagttcccagtagttgcagtagaagckstaacwggraaagywggyttracwgaytttgaagcyttggctcaattacatgaaatctcaggcgttgcagtgccaccagcagttgatgggcttgarayagctccwrttcgtcacaagacaayagtggcagctgctgacatgcaagyagcggttgaggcttatttaggactttaactaat

SEQ ID NO: 1389 - DNA, 1054 bp, Streptococcus pneumoniae
  misc_feature (1)..(1054): tiling:Spneumo1:WAN024FOA; Cluster includes WAN023PI4 pne3 4_12||||9327..10379|+|1053 bp|Type 17F capsule operon, Gli mmer 2.02 orf prediction|S.pneumoniae||WAN01UCHZ|ORF|000
atgacattattattaaataaaatatatagacaagatgtagaatcttctctagaaacaatcgtcaatattaatgayttgaatggcaagtcaattttaattactggagcttctggtttgattggttcaagtgtcattgaccagttattattgctaaatgaaataaggaattttaacattaaaattwtttgttgyggaagaaagtttgaatcattagaaaaacgatttggtagacaaacagagtatttacrctttgtgttctatgatgcgactaaagyacctcactttgmttttgcagtggactacattattcatgctgctagtcctgctagtcctgaattatatgttaatcagcctgtagaaacaatggctagtaaytttctgggcatgtataatctactgrmatacgcmaaaaatgctaaagtttcaaatctagtttatatctcatctagtgaagtttatggaattrgcacyagtaataatcctttggasgararttatattggaactgttgatcatcttagcgtacgktcttcktatgcyagttcwaaragagctactgaaacactttgtgctagttttgcttccgagtayggratcaaaatmatgatagtaagrccaggacayatmtatggycctagtgccaagramwstgataatcgtgtatcatcattttttatgayagaagcgattgctggkcgtgatatyrtyatgaaaagtacaggkagtcagttragatcstattgttatagtttggattgtgcyagtgcwattytaagtgttctcctttcgggtgrrtcaggrcaagcttataatgtttccaatccaaattcaattattactataaaacagatggctgaaaytatttcwcgagttggcaatgtgaaactyaccatggmtattcctagtraycaagatattaarcagacyaatcctatgcagaaygccrgtctwagsagtgataagytagaagrattrggatggmaaggaywktttwcwgctgarraargtwtwsaamatacattymawattttgaaagsagttawsmagyrawaag

SEQ ID NO: 1390 - DNA, 1265 bp, Streptococcus pneumoniae
  misc_feature (1)..(1265): tiling:Spneumo1:WAN024FGZ; Cluster includes WAN0243NH spr1 510|ftsZ|15903553|NP_359103.1|1486672..1487931|-|1260 bp|C ell division protein FtsZ|S.pneumoniae|R6|NC_003098.1|ORF| 321
atgacattttcatttgatacagctgctgctcaaggggcagtgattaaagtaattggtgtcggtggaggtggtggcaatgccatcaaccgtatggtcgacgaaggtgttacaggcgtagaatttatcgcagcaaacacagatgtacaagcattgagtagtacaaaagctgagactgttattcagttgggacctaaattgactcgtggtttgggtgcaggaggtcaacctgaggttggtcgtaaagccgctgaagaaagcgaagaaacactgacggaagctattagtggtgccgatatggtcttcatcactgctggtatgggaggrrgctctggaactggagctgctcctgttattgctcgtatygccaaagatttaggtgcgcttacagttggtgttgtaacacgtccctttggttttgaaggaagtaagcgtggacaatttgctgtagaaggaatcaatcaacttcgtgagcatgtagacactctattgattatctcaaacaacaatttgcttgaaattgttgataagaaaacaccgcttttggaggctcttagcgaassggataacgttcttcgtcaaggtgttcaagggattaccgatttgattaccaatccaggattgattaaccttgactttgccgatgtgaaaacggtaatggcaaacaaagggaatgctcttatgggtattggtatcggtagtggagaagaacgtgtggtagaagcggcacgtaaggcaatctattcaccacttcttgaaacaactattgacggtgctgaggatgttatcgtcaacgttactggtggtcttgacttaaccttgattgaggcagaagaggcttcacaaattgtgaaccaggcagcaggtcaaggagtgaacatctggctcggtacttcaattgatgaaagtatgcgtgatgaaattcgtgtaacagttgtygcaacgggtgttcgtcaagaccgcgtagaaaaggttgtggctccacaagctagawctgctactaactaccgtgagacagtgaaaccagctcattcacatggctttgatcgtcattttgatatggcagaaacagytgaattgccaaaacaaaatccacgtcgtttggaaccaactcaggcatctgcttttggtgattgggatcttcgccgtgaatcgattgttcgtacaacagattcagtcgtttctccagtcgagcgctttgaagccccaatttcacaagatgaagatgaattggatacacctccatttttcaaaaatcgttaastaat

SEQ ID NO: 1391 - DNA, 815 bp, Streptococcus pneumoniae
  misc_feature (1)..(815): tiling:Spneumo1:WAN024GBP; Cluster includes WAN024490 spr0 734|pnp|15902778|NP_358328.1|733045..733854|+|810 bp|Purin e nucleoside phosphorylase (inosine phosphorylase)|S.pneum oniae|R6|NC_003098.1|ORF|221
atgacatttttaaacaaaatccatgaaactgctactttcctgaaagaaaagggaattgcagcccctgagttcggtctaatccttggrtcaggacttggagaattggcagaagaaatcgaaaatccagttgtagtagactatgctgagattccaaactggggccgttcaacagtagtcggtcatgctggtaaattggtatatggtgaactggcaggtcgcaaggtcttggctcttcaaggkcgtttccatttctatgaagggaatcctctggaagtggtgactttcccagttcgtgtgatgaaagttcttggatgtgaaggtgttattgtaaccaatgcagctggcggtatcrgatttggtcctggtaccttgatggctatctcagaccatatcaacatgacggggcaaaatccattgatgggkgaaaacttggatgactttggcccacgtttcccagatatgtctagggcctacacaccagaataycgtgccactgcccatgaagtggctaaaaaacttaatatcaagmttgatgaaggtgtctatatcggagttactggtccgacttatgaaacaccagcagaaattygttcctataagacactgggagcagatgcagttggtatgtctacggttcctgaagttatcgtggcagcccactctggcttgaaagttctgggaatttcatgtatcactaactttgcggcyggtttccaagaagaactcaatcacgaagaagttgtagaagtgactgaacgtgttaaaggtgatttcaaaggcttgcttaaagcgattcttgctgaattgtaactaat

SEQ ID NO: 1392 - DNA, 707 bp, Streptococcus pneumoniae
  misc_feature (1)..(707): tiling:Spneumo1:WAN024D46; Cluster includes WAN0243IP spr1 683|galE-truncation|15903725|NP_359275.1|1654914..1655615| +|702 bp|UDP-galactose 4-epimerase, truncation|S.pneumonia e|R6|NC_003098.1|ORF|111
atgaccaaaacaattcttgttacaggtgggactagctacattggctcccataccgttaaagctcttttaaatgctggytatmaggtgcatrtcctygataatctctccacaggaaatcgagcgrctgtggatartcgtgctagctttaaagaactggatgtttatgatgctagcgccttaaaggcttacttaraagaaaatcagattgatgctgtcctccattrtrcaggtgaaattgttgtgagcgaaagtattgaaaatccaagtaaatacttcactgccaacgttgctggtakgaaccaagttctcaaagtcttatctgaagttggcaytcaaaaaatcatgttctcttcgactgcttctctctatggaaataactgtattgacaagccggygactgaagataccctgmtcgaccctgtcaacccttatrcagagacaaaactgatgggcgaacgaatgatttactggatggccaatcgctacgactggaaatatgttattttccgttactttaatgttgctggggctgaaatggatgcttcaaacggtctgcgtgtgaaaaatccaactcacatcattccaaatatcaacaagaccgcattgggacaamatgatagcttaaaaatatttggagatgactacgatacacgtgacggttcatgtattcgagattacatttatgtcttggaccttgcatarctaat

SEQ ID NO: 1393 - DNA, 635 bp, Streptococcus pneumoniae
  misc_feature (1)..(635): tiling:Spneumo1:WAN024DJT; Cluster includes WAN0244LF spr0 287|kdgA|15902331|NP_357881.1|289483..290112|-|630 bp|2-ke to-3-deoxy-6-phosphogluconate aldolase|S.pneumoniae|R6|NC_ 003098.1|ORF|111
atgaccaaatcagatacgattattgaactaaaaaaacaraaaattgtcgctgtyattcgaggaaatacaaaggaagaaggactacaagcctcgattgcttgtatcaagggcggtatcaaagctattgaaatcgcctataccaatcagtatgcaggacaaatcatcaaggaacttgtagacttgtatcaggacgatcagagtgtttgtatcggtgcaggtactgtgcttgatgccgtaactgctagagatgccattctagctggagcaaattacgttgtttctccatctttccatgctgaaactgcgaaaatgtgcaatctctacagcacaccgtacattccaggctgtattaccctcacagagatcacgactgcacttgaagccggtagtgaaatcatcaaactcttcccaggtagtrctctcagtccagcatatatctctgcagtyaaggcaccgatcccacaagtttccgtaatggtaaccggaggagtcgrcctaaacaacatccctcaatggttcgctgctggtgcagatgccgttggaattggtggcgaactcaataaactcgcttcccaaggcaactttgaccgcatcagcgagattgcccaacagtatrttacactcagataactaat

SEQ ID NO: 1394 - DNA, 575 bp, Streptococcus pneumoniae
  misc_feature (1)..(575): tiling:Spneumo1:WAN024EV7; Cluster includes WAN0244T9 spr0 005|pth|15902049|NP_357599.1|4186..4755|+|570 bp|Peptidyl- tRNA hydrolase|S.pneumoniae|R6|NC_003098.1|ORF|111
atgaccaaattacttgtaggyttgggaaatccaggggataaatattttgaaacaaaacacaatgttggttttatgttgattgatcaactagcgaagaaacagaatgtcacttttacacacgataagatatttcaagctgacctagcatcctttttcctaaatggagaaaaaatttatctggttaaaccaacgacctttatgaatgaaagtggaaaagcagttcatgctttattaacttactatggtttggatattgacgatttacttatcatttacgatgatcttgacatggaagttgggaaaattcgtttaagagcaaaaggctcagcaggtggtcataatggtatcaagtctattattcaacatataggaactcaggtctttaaccgtgttaagattggaattggaagacctaaaaatggtatgtcagttgttcatcatgttttgagtaagtttgacagggatgaktatatcggtattttacagtctrttgacaaagttgacgattctgtaaactactatttacaagagaaaaawtttgagaaaacaatgcagaggtataacggataactaat

SEQ ID NO: 1395 - DNA, 230 bp, Streptococcus pneumoniae
  misc_feature (1)..(230): tiling:Spneumo1:WAN024D2S; Cluster includes WAN0243GF spr1 765||15903807|NP_359357.1|1732032..1732256|+|225 bp|Hypoth etical protein|S.pneumoniae|R6|NC_003098.1|ORF|111
atgaccaactttaattcaaacgaaaaattttgtggaaaaagtttaaaatcattgtctgctgatgaaatgagtttaatttatggtgcatctgatggtgcagagccacgttggacgcctactcctattattttgaaatcagctgcagctagctcgaaagtatgcattagtgcagctgtttctggtattggggggctagttagctacaataatgattgtttggggtaactaat

SEQ ID NO: 1396 - DNA, 246 bp, Streptococcus pneumoniae
  misc_feature (1)..(246): tiling:Spneumo1:WAN024FAM; Cluster includes WAN023KNU 3138 87_3161||||1684458..1684703|+|246 bp|EGAD orf prediction|S .pneumoniae|R6|NC_003098.1|ORF|110
atgaccacaaaagcccatgcccaatatttttgtaatacttttttcatagtctctctactcctaatccacatccgctttcatcgggttaaagaaggcattcaaatcattgaccatgccttstttatcaccggtcaagacatagttcatggtcaaggtatggaagtctgcttcactggtccagtattgttgcaaccagaccaagtgacgatccgtaaaggcatattcggtcataccagcaagcggtga

SEQ ID NO: 1397 - DNA, 357 bp, Streptococcus pneumoniae
  misc_feature (1)..(357): tiling:Spneumo1:WAN024DZS; Cluster includes WAN023KIA 3126 62_3432||||1838977..1839333|+|357 bp|EGAD orf prediction|S .pneumoniae|R6|NC_003098.1|ORF|110
atgaccaccgtcttaggtaaaaatttattctggctattatttagcatgatttcatttgcggtcttggttgttacgctgacctgcgcgttaatctgtgctccaggaagagctgtctgtagtgctgtatttgcccttaaagccactgagtcaccaattaacatagtgccatcagcaattcccaaactgtttgcatctgcccgttctgccatcaccttggtctggccaatatttgttgcagcttgcttcaagccattgacagtcaagtctgtctcaaacgctcccacttgtggtgccaacaaggtcaccgtgcagacaatgatggtcaagattcctgtacctgctgcaagaattgcgtga

SEQ ID NO: 1398 - DNA, 234 bp, Streptococcus pneumoniae
  misc_feature (1)..(234): tiling:Spneumo1:WAN024FRO; Cluster includes WAN023L5K 3141 23_2372||||1267879..1268112|-|234 bp|EGAD orf prediction|S .pneumoniae|R6|NC_003098.1|ORF|110
atgaccagagttgattttggcaggtggaagttggttgagaaggcatccacgaccttccactcatacccaggtttgataaagatattggtccaaccagaatctgcttggatttgcccatcaaacttggaaccaatagtttccaaggtrcggatagaagtggttccgacagcgatgacacgaccaccattttytttgacagagcgaagggtggcmgcagcttcctcagaaagttga

SEQ ID NO: 1399 - DNA, 1248 bp, Streptococcus pneumoniae
  misc_feature (1)..(1248): tiling:Spneumo1:WAN024C44; Cluster includes WAN023Q19 cont ig_1213_1||||796..2043|+|1248 bp|Glimmer 2.02 orf predicti on|S.pneumoniae|670|WAN01UEL9|ORF|000
atgaccagttgttttgtagttatggggtttaatactaaaaaaattcctaatacaaatatagaagtggacttgaatcaagtctataataatctaattaagccaacaattttagaaaaagaattagtttctgttcatggtaaaaaccactttagagctgatgaagttttcagtacacagagtataacgaaaacatttatcgaaggtatattaaaagcagatattgtaattgcagatattactactttaaaccaaaatgctatctatgagttaggtctacgtcatgctatgaaacccaaatcaaccattatactgtgtgatcatcacacagctaagattagcttttttgatattgcacacttacctcaaatcagatatgattctgataagttaaacgaagtggatgaagttaacaaggtgaaaaaactgctttctgaatatattgattccgctataaagtcagatgagacatttactgatagtccagcctttgaatctgctctataccgtgtaataattaacgatttaatcgataaaactgaaattcaaagtgaagaagcattagacaagtcaatagctgaactttatgatcaagccacggaactcaagaattcagaaaagtatcctgaggcagaagaaatatttcagcaaattttagaaagtggatatattgatgaagaaattttggcaggctatttactatcatcctataagaaaaatgaatcttcgctagcaaatttaaaaatggcacagcaaaatattagtaaatatatagatataaacaccacaacatatcataagttattaggtatttatggagctattttcttacgtatattttatattacaaagaataggagtgacttaatgtctgcaattaattactataggttaggcatgaattttgaagatagaaatatttattgtgcaaggaattactgtgctaacctgttaaaaatagccttagttgagaaagatgttgaagttttaaaggagttctactatacatctgtttatacagcaaaaactattttaggatctttagaaaaaatacatcgtaaatctagtgaatatgacgacatttggtttctttccaatcaagaggatctaatgctgatttcaggccttctttcaaaacctattaatgatattgagggtttaactgaacgacagaaaaaaacaattaatgaaggtagtattatgttaagtgaggatctccagaggattaaaactgcaattgtaaatggtaat

SEQ ID NO: 1400 - DNA, 150 bp, Streptococcus pneumoniae
  misc_feature (1)..(150): tiling:Spneumo1:WAN024DOU; Cluster includes WAN0242C9 SP12 54||15901115|NP_345719.1|1188514..1188657|-|144 bp|hypothe tical protein|S.pneumoniae|TIGR4|NC_003028.1|ORF|121
atgaccagyrayaaggcaggacttgagcgtaagttcgcagccaaagaacgtaagcgtaacaaaccaggtgttgttctctgcggtagcatggatgaacttygcgctttagcgcaactcaacccagaaattgaagcattctacctaactaat

SEQ ID NO: 1401 - DNA, 300 bp, Streptococcus pneumoniae
  misc_feature (1)..(300): tiling:Spneumo1:WAN024CJS; Cluster includes WAN023KBW 3130 96_3704||||1999966..2000265|+|300 bp|EGAD orf prediction|S .pneumoniae|R6|NC_003098.1|ORF|110
atgaccataagttcctgcagtagaccaagtaatggaaccaatcgtcggtgtattatctacacgataaccttcccgacgagcacgatgtccccattcattcgcatttccataagctgccggaatttcaaaaccattgacattactcaaacgaaaggctacaaaagaagtacactgacgagaatacatgcgccactgatcaatctcctggctcccatttttataataagcaggataatcatccccacgcgcaatcgatccatttcctctggaataggcatagacactatcaccagctgctag

SEQ ID NO: 1402 - DNA, 1103 bp, Streptococcus pneumoniae
  misc_feature (1)..(1103): tiling:Spneumo1:WAN024FEA; Cluster includes WAN0243LD spr1 587||15903629|NP_359179.1|1567200..1568297|-|1098 bp|Conse rved hypothetical protein|S.pneumoniae|R6|NC_003098.1|ORF| 121
atgaccatmacaggtattatcgcrgagttcaatccttttcataatggccataaatacctgctggatcaggcagagggactgaaaaytgttgccatgtcagggaatttcatgcagcgtggagagccygctattgtggataagtggacaaggrcccagatggcgctggaaaatggcgcagacttggtagtggaattgccctttttagtcagtgttcaggcrgcwgatttyttyggtcaaggakctrtggatatcttggatcgcttgggcatwgatagyctmgyttttgggacagargaagttckagattatcaraaaatygctgacttatacacagagaaaggtrctgagatggagaaatttgtgraaaatctgcctgattccctttcctatccccagaaaacccaarctatgtggmaggaatttgctggtcttgatttttcaggtaatacccccaatcatgttcttgctctggcctatgcmaaggcggttgcaggacgraatatcaagctgcatccgattcagcgtcagggggcaggttaccattctgtgaataaagatgtggactttgcctcggcgacagccctccgtcaacatcagaaggaccaagatttcttagaacgttttatgccttctgttgccctatttgagcaggccagtaaggtgatctgggaagactattttcccttgctccgctatcaaatcttgtcaaatcccgacytaaccaccatctatcaggtcaatcaagaaatggctgtgcgcattaaagaagctattaaaacagcccagtctgtggaagaattggtcgagttagtgacyaccaaacgttacaccaaggcgcgtgtcagacgcctmttgwcctatatyttgrygcaggctagagaaartgwcttgccagaagssattcatgtccttggmtttacygaaaaaggyaggcaacatctyaartmtytgaaaggkcaggtcagtctagtcagcmgaattggcaargaaccttgggatgyyatgacycaaaargywgaccagatttaccaaytrggraakcyaagtatagcasarcaraattttggmagagtgccrattagaatagaaacaaactaactaat

SEQ ID NO: 1403 - DNA, 758 bp, Streptococcus pneumoniae
  misc_feature (1)..(758): tiling:Spneumo1:WAN024FT5; Cluster includes WAN0243UR spr1 248||15903291|NP_358841.1|1247689..1248441|-|753 bp|Conser ved hypothetical protein|S.pneumoniae|R6|NC_003098.1|ORF|1 11
atgaccattcatatcattattaccatgttgctgttgctagcttttctgataggaagcatttggtttgccaaaaagaaataccagattaatctagctgtcttgggcttgggtgcagtcgctttctttgtctcttcgcagattttggaaaaactggtgcatatcttgattttgcaycctcaaaaagacggtagtattgccctcttgcaagatcayccgcttrtctatattatctatggcctagcyatggcagcattttttgaggaaacggctcgtcttgttttcttcaaatggttggagaaaaagagaagtttggaaaaggcagaygccttggcctatggmctrgggcatggtggcttggagttgatttttctaggccttaytagtttactcaatctttacatygttctttcggcagttcaaactcagaatccacaggttatgcaattactgtctgaaaatatgttaaaaaccattcagtcactttcggtctggcagatttatttgcttggttttgagcgaatcttggcgcttggtttccaattacttttgacagtttgggtttaccaagctgttcgccagaagaaatggatttatctcctagcwgcctatggcttgcatgccttctttgatctgkcaccatctctttyccaagtaggctggttgacaaatccagtcttggttgaagtgattctagcactggagctcgttctggtcgcctatggaaccaaggaaatcttttgtaaaaaatcataactaat

SEQ ID NO: 1404 - DNA, 1421 bp, Streptococcus pneumoniae
  misc_feature (1)..(1421): tiling:Spneumo1:WAN024DHG; Cluster includes WAN0244FC spr0 506|bglH|15902550|NP_358100.1|503580..504995|+|1416 bp|6-p hospho-beta-glucosidase|S.pneumoniae|R6|NC_003098.1|ORF|11 1
atgaccatttttccagatgattttctttggggtggagckgttgcagctaatcaagtagarggagcatataatgaagatggtaagggmttatcagttcaggatgtgttacccaaaggtggattaggagaagcaacagaaaatcctacagaagataacttaaaattgwtaggtattgatttttatcataaatataaggaagatatwtccttgttttctgaaatgggctttaatgtttttcgtacttctattgcatggagtagaatttttccaaaaggagatgarraagaacctaacgaagctggkttgaaatattatgatgaattrtttgatgaactacatgctcacgggatagarccacttgtaactctttcacactatgagactccattatatttagcaagaaaatatcatggatggrttgataggagaatgattcatttttatgaaaaatttgctcgaacagttttagaaaggtataaagataaagttaaatattggcttacatttaacgaagtaaactctgttttggaattaccrtttactagtggaggaatagatatacctaaggagaatctttcgaaacaagaattatatcaagctatacatcatgaattagtcgcctcragtttggttacaaaaattgctcgtgagattaattcagagtttaaggtgggrtgtatggtattagctatgccagcttatccaatgactccaaatccaaaagatgtatgggcgactcatgagtatgagaatctaaattatctattttcagatgtgcatgttagaggttattatccgaattatgcaaaaagatattttaaggaamatgacattaacatagagtttgcagctgaagatgcagagttattaaaaaattatacygtagattttttatcctttagctattacatgagtgtgactcaatctgctcttccaacacagtataattcaggagaagggaatattattggtggyttagtaaatccttatttagagtcttcwgagtggggatggcaaattgatccaattggactacgtataattttaaatagatattatgaccgttatcaaatyccattatttatagtrgaaaayggattaggtgctaaagatcaactaataaaagatgaayttaataacttaacmgtccaagatgattatagaattcagtatatgaaagaacatttattgcaagtwgctgaagctctacargatggtgtkgaaattatgggctatacrtcttggggatgtattgactgygtttctatgtccactgcacarctttctaaraggtacggtctcatttatgttgatcgaaaygatgatggaartggyacattmaatcgatataagaaaatgtcytttacttggtataaagragtgattgaatcaaatggagaatccttattcaaatarctaat

SEQ ID NO: 1405 - DNA, 231 bp, Streptococcus pneumoniae
  misc_feature (1)..(231): tiling:Spneumo1:WAN024CFQ; Cluster includes WAN023RX1 cont ig_1609_2||||295..525|-|231 bp|Glimmer 2.02 orf prediction |S.pneumoniae|670|WAN01UDCD|ORF|001
atgaccatwatygarcgcttagaagaaaaggtcactaggcaagaaagyaaggtagcaagagagacagaaaaactmgctgcttacaaagarcaactggagacagcgatgtttgcgacgttcaaaaggcgtcaaagcatyagtcacatgagttttgaagaagctcttgaccatgcmtttggyaaagaaagacaattcgatgattctgaatttagaaaggatgaaatragtgaa

SEQ ID NO: 1406 - DNA, 809 bp, Streptococcus pneumoniae
  misc_feature (1)..(809): tiling:Spneumo1:WAN024C7K; Cluster includes WAN0244MP spr0 241|cdsA|15902285|NP_357835.1|234677..235480|+|804 bp|Phos phatidate cytidylyltransferase|S.pneumoniae|R6|NC_003098.1 |ORF|111
atgacccaggatttacagaaaagaaccttgtttgcagggattgccctggctattttcctaccaattttaatgattgggggcctcttgcttcagatagcaatcggaatcrtagccatgctagccatgcatgaacttttgaagatragaggtctagmgaccatgacgatggagggcctcttgacyctctttgcaacctttgcattraccattcccttggagaattacctgacttttttgccagttgatgggaatgtggttgcctatagtgttttgatttcaatcatgttaggaacgaccgtttttagcaagtcttatacgattgaggatgcggttttccctcttgctatgagcttctacgtgggctttggatttaatgctttactagatgctcgtgttgcaggtttggacaaggytctcttagccttgtgtatcgtctgggcgacagacagtggtgcctatcttgttgggatgaactatgggaaacgaaagttagcaccaagggtatcgcctaataaaacccttgagggtgccttgggtggtattttaggagcaattttagtaaccattatcyttatgatagttgacagtacagttgctcttccatatggaatttacaagatgtcagtctttgctattttctttagcattgctggacaatttggtgatttactagaaagttcgatcaaacgtcattttggtgttaaggattctgggaaatttatccctggacatggtggtgttttggatcgtttcgatagtatgttgcttgtatttccaatcatgcacttatttggactcttttaactaat

SEQ ID NO: 1407 - DNA, 656 bp, Streptococcus pneumoniae
  misc_feature (1)..(656): tiling:Spneumo1:WAN024D6M; Cluster includes WAN0243OB spr1 480|marR|15903523|NP_359073.1|1458673..1459323|+|651 bp|Me talloregulator|S.pneumoniae|R6|NC_003098.1|ORF|111
atgaccccaaacaaagaagactatctaaaatgtatttatgaaattggcatagacctgcataagattaccaacaaggaaattgcggctcgcatgcaagtctctccccctgccgtaactgaaatgatcaaacgaatgaaaagtgaaaatctcatcctaaaggacaaggaatgtggctatctactgactgacctcggtctcaaactggtctctgagctctatcgtaagcaccgcttgattgaagtttttctagttcatcatttagactatacaagtgaccagattcacgaggaagctgaggtcttggaacacactgtctctgacctgttcgtggaaagactagataaactgctaggtttccctaaaacctgcccccacggrggaactattcctgccaagggagaactmctcgttgaaatcaataacctcccactagctgatatcaaggaagctggcgcctaccgcctgactcgggtgcacgatarttttgacattctccattatctggacaagcactcacttcacatcggtgaccagctccaagtcaagcagtttgatggcttcagcaataccttcactatcctcagtaacgacgaggatttacaagtgaatatrgacattgcaaaacaactctatgtcgagaaaatcaactaactaat

SEQ ID NO: 1408 - DNA, 1170 bp, Streptococcus pneumoniae
  misc_feature (1)..(1170): tiling:Spneumo1:WAN024CKX; Cluster includes WAN0241YQ SP17 72||15901602|NP_346206.1|1678222..1692552|-|14331 bp|cell wall surface anchor family protein|S.pneumoniae|TIGR4|NC_0 03028.1|ORF|010
atgaccgaaacggtagaagataaagtaagtcattcaattactgggcttgatatcctcaaggggatagttgctgcgggagctgtcataagtggaaccgttgcaactcaaacgaaggtatttacaaatgagtcagcagtacttgaaaaaactgtagagaaaacggatgctttggcaacaaatgatacagtagttctaggtacgatatctacaagtaattcagcgagttcaactagtttgtcagcttcagagtcggcaagtacatctgcatctgagtcagcctcaaccagcgcttcgacctcagcaagtacaagtgcatcagaatcagcaagtacatcggcttcgacaagtatttctgcatcatctactgtggtaggttcacaaacagctgccgctacagaagcaactgctaagaaggtcgaagaagatcgtaagaaaccagctagtgattatgtagcatcagttacaaatgtcaatctccaatcttatgctaagcgacgcaagcgttcagtggattccatcgagcaattgctggcttctataaaaaatgctgctgttttttctggcaatacgattgtaaatggcgcccctgcaattaatgcaagtctaaacattgctaaaagtgagacaaaagtttatacaggtgaaggtgtagattcggtatatcgtgttccaatttactataaattgaaagtgacaaatgatggttcaaaattgacctttacctatacggttacgtatgtgaatcctaaaacaaatgatcttggtaatatatcaagtatgcgtcctggatattctatctataattcaggtacttcaacacaaacaatgttaacccttggcagtgatcttggtaaaccttcaggtgtaaagaactacattactgacaaaaatggtagacaggttctatcctataatacatctacaatgacgacgcagggtagtgggtatacttggggaaatggtgcccaaatgaatggtttctttgctaagaaaggatatggattaacatcatcttggactgtaccaattactggaacggatacatcctttacatttaccccttacgctgctagaacagatagaattggaattaactacttcaatggtggaggaaaggtagttgaatctagcacgaccagtcagtcactttcacagtctaagtcactctca

SEQ ID NO: 1409 - DNA, 295 bp, Streptococcus pneumoniae
  misc_feature (1)..(295): tiling:Spneumo1:WAN024G38; Cluster includes WAN023LEQ 3139 25_2000||||1079457..1079711|+|255 bp|EGAD orf prediction|S .pneumoniae|R6|NC_003098.1|ORF|110
atgaccgaagacaatggtttttccagtatgattttcagctccgtggaatggttttctaagccatacttttttataatctgttgtttcatgccagtcrtccaaggtcaaatcaatacctgcgtgaacaaagatatacttgtctgtctctactacaaatggcatttgacgaatgaattcgaccaagtctgccgcttcagcggcaacccgcttggcatcttctactccatcaactggtgcatccaagggacgacctaggatagagttaatggttgtatctccaccattgcgactataa

SEQ ID NO: 1410 - DNA, 231 bp, Streptococcus pneumoniae
  misc_feature (1)..(231): tiling:Spneumo1:WAN024GNV; Cluster includes WAN023M3H 3145 52_699a||||366990..367220|-|231 bp|EGAD orf prediction|S.p neumoniae|R6|NC_003098.1|ORF|110
atgaccgataatccaagcrtcattagcaatctcagccgcatgagggcggacacgctcagaaatttcttggagaatgcgaagcatttcatagcgctcatctgctcgcagactagcaatttcttcgctcagtttgactacctcacgkggttcgatatagacggtgtttccactagcagaaatatcatgaacgacacctgcaatcttattgcggtaggtgtttttgactggtaa

SEQ ID NO: 1411 - DNA, 234 bp, Streptococcus pneumoniae
  misc_feature (1)..(234): tiling:Spneumo1:WAN024F63; Cluster includes WAN023M7N 3142 97_462||||237881..238114|-|234 bp|EGAD orf prediction|S.pn eumoniae|R6|NC_003098.1|ORF|110
atgaccgatctcaataccacgcgcaaagttaaggacaccttgtccatctggggaaatttcaccctcacgaacttcacggatatccacatattctgcagtaaaatcacggcctgggttcacaccagtcaagtggtagycatcttcgttagcaccgacaactgcattgcgaacatcttgtaccttacgatctgcaataattttaatattctctggcaaaccaactggtccaagtga

SEQ ID NO: 1412 - DNA, 639 bp, Streptococcus pneumoniae
  misc_feature (1)..(639): tiling:Spneumo1:WAN024CCT; Cluster includes WAN0244QT spr0 093|gph|15902137|NP_357687.1|101463..102095|-|633 bp|Phosp hoglycolate phosphatase|S.pneumoniae|R6|NC_003098.1|ORF|23 1
atgacctctatcacagcgatttttttcgatttggatggaaccctcgttgatagttctatcgggattcacaatgcctttacctatacctttaaagagctgggggtgcctagccctgatgccaaaactattcgtggttttatgggaccacctctcgaaagtagttttgcgacctgcctgtccaaagaccaaatttctgaagccgtgcagatatatcgttcttactataaggcaaaaggcatctatgaagctcaactctttcctcagattatagacttgcttgaggagttatcgagcagttatccactctacatcaccacgacaaagratacatctactgctcaagacatggcaaaaaacttggaaatccatcatttctttgatggcatttatggttctagccctgaagcaccccataaggcagatgtcattcaccaagccttgcagacacatcaactagymccwsaacaagccatcatcatcggagataccaagtttgatatgctgggagctcgagaaacaggtattcagaaattggccrtcacttggggatttggagagcaagcagatctactaaactatcaacctgattatatcgctcacaaacccttagargttttggcgtattttcaactarctaat

SEQ ID NO: 1413 - DNA, 246 bp, Streptococcus pneumoniae
  misc_feature (1)..(246): tiling:Spneumo1:WAN024FKY; Cluster includes WAN023L2E 3151 63_2529||||1347520..1347765|+|246 bp|EGAD orf prediction|S .pneumoniae|R6|NC_003098.1|ORF|110
atgacctctcctgcaaagatattcccaaaaatccgcaaagccaaagataagaagtttgtaaattcttccaagatattcatcggtatgacaaaaacaggactcataaaagattttatactttttttaaatccacgacgacgaacgctttctatatgtgtcaacaaaatgacaagaaaagataaggttaagtcatactgtaaattagcggttggcgaactccaccagttagtcccatcgatcgtttga

SEQ ID NO: 1414 - DNA, 291 bp, Streptococcus pneumoniae
  misc_feature (1)..(291): tiling:Spneumo1:WAN024FU4; Cluster includes WAN023L7P 3148 93_2292||||1230008..1230298|+|291 bp|EGAD orf prediction|S .pneumoniae|R6|NC_003098.1|ORF|110
atgacctgggcgaggatgagtaattttccgcttgcttttaaggcggtcttcaatgtcctccgcagacatgatgtccagccatttctggtggtccttattgatgacatccatagtaataggcgcccctgtcgtcttcccgtggcgaacgcccgaagtaaagacaacctggtcattctcaatcttcatacgaccaccacgaccgtagccaccctgacggcgtctaaggtcctcattgatatcctcagctgtcaatggaagtccagctggaattccctcaataatagctgttag

SEQ ID NO: 1415 - DNA, 677 bp, Streptococcus pneumoniae
  misc_feature (1)..(677): tiling:Spneumo1:WAN024EZ5; Cluster includes WAN02441I spr1 004||15903048|NP_358598.1|987053..987724|+|672 bp|Similar to GTP pyrophosphokinase|S.pneumoniae|R6|NC_003098.1|ORF|1 11
atgaccttagaatgggaagaatttctagatccttacattcaagctgttggtgagttaaagattaaacttcgtggtattcgtaagcaatatcgtaagcaaaataagcattctccaattgagtttgtgaccggtcgagtyaagccaattgagagcatcaaagaaaaaatggctcgtcgtrgcattacttatgcgaccttggaacacgatttgcaggatattgctggcttacgtgtgatggttcagtttgtagatgacgtcaaggaagtagtggatattttgcacaagcgtcaggatatgcgaatcatacaggagcgagattacattactcatagaaaagcatcaggctatcgttcctatcatgtggtagtagaatatacggttgataccatcaatggagytaagactattttggcagaaattcaaattcgtactttggccatgaatttctgggcaacgatagaacattctctcaactacaagtaccaaggggatttcccagatgagattaagaagcgactggaaattacagctagaatcgcccatcagttggatgaagaaatgggtgaaattcgtgatgatatccaagaagcycaggcactttttgatcctttgagtagaaaattaaatgacggtgtaggaaacagtgacgatwcagatgaagaatacaggtaactaat

SEQ ID NO: 1416 - DNA, 102 bp, Streptococcus pneumoniae
  misc_feature (1)..(102): tiling:Spneumo1:WAN024CNT; Cluster includes WAN0246SM 5613 45-60-6||||||102 bp|DNA Streptococcus pneumoniae phage Dp- 1 open reading frame 256|S.pneumoniae||WAN0246SM|ORF|000
atgaccttccagtcactaatgcggccgctgaaattggataccactatacatgggttcaccaacttcgagacaaagcagttgaaacacttgaagaaattttag

SEQ ID NO: 1417 - DNA, 234 bp, Streptococcus pneumoniae
  misc_feature (1)..(234): tiling:Spneumo1:WAN024C7H; Cluster includes WAN023M7I 3142 95_467a||||239672..239905|-|234 bp|EGAD orf prediction|S.p neumoniae|R6|NC_003098.1|ORF|110
atgaccttttacaaagtcaatacggtaatcatcttgaatcattccatcttgacggaatttttcttccccttcaacacccataccattctcagtcaacatccactcaatattgccataattttccttgatattttgggcgatgtcataaatcccttgctcataaatctcccaaccacgrtgagaattgattttacgtccaggcatcacataaggctcgtaaaaatgttctggtaa

SEQ ID NO: 1418 - DNA, 818 bp, Streptococcus pneumoniae
  misc_feature (1)..(818): tiling:Spneumo1:WAN024C6Q; Cluster includes WAN0244M3 spr0 263||15902307|NP_357857.1|264716..265528|-|813 bp|Conserve d hypothetical protein|S.pneumoniae|R6|NC_003098.1|ORF|111
atgacgaaaaaaattattgcagttgacctggatggaaccctgctcaactcagacagtcaaatttctgactttaccaaaaraaccatcaaaaaagttgctgaaaaaggmcatcaggttattattacgacaggtcgcccttaccgtatgtcaaaagatttttaccgtgaactgggcttagacactcctatgattaacttcaacggatcccttactcatttaccagaccaagtttgggattttgaaaagtgtttgactgtagacaaaaaatatctgctagatatggttcaacgttcagaggacattcaagccgattttatcgctggrraatatcgtaaaaaatyctacattacaaatcccaatgaaraaattgccaatcccaaactatttggtgtaraagctttccagcctgaagatcaattccagcctgaattggtgaccaagraccctaactgtatcctcttgcagacyagagccagtgacaaatatkccttggcaaaagamatgaacgccttctaccagcatcaactttctatcaatacctggggaggtccgctcaatatccttgaatgtaccccaaaaggtgtcaacaaggcctttgctttggactacttgctcaagataatgaatcgtgacaaaaaagatttgattgcctttggagatgaacayaatgataccgaaatgctcgcttttgctgggaarggttatgccatgaaaaatgccaatccagagctactcccttatgcagatgagcaaatttcccttaccaacgaccaagatggggttgccaaaaccctacaagacttattcttataactaat

SEQ ID NO: 1419 - DNA, 1007 bp, Streptococcus pneumoniae
  misc_feature (1)..(1007): tiling:Spneumo1:WAN024CVN; Cluster includes WAN0244LE spr0 288|kdgK|15902332|NP_357882.1|290122..291123|-|1002 bp|2-k eto-3-deoxygluconate kinase|S.pneumoniae|R6|NC_003098.1|OR F|111
atgacgaaaatattactgtttggcgaaccattaattcgaatytcaccattagatgccaccagtatcggcgatcatgttgccagttcgacttattttggcggatcagaaattaacatcgcttgtaatttgcaagcyctgggtatctcaacgaaagtytttaccgcactccctgccaacgagattggagatcgttttctcacattcttgaaacagcaccaaatcgataccagttcaatctgtcggcttggcgatcgaatcggcctctactatttggagaacggctttggttgtcgtcaaagtgaagttttctacgatcgtaagcatacgagtatcagccagattcggccaaacatgctagatatggattctctctttcaggggattagccattttcattttagtggaatcaccrtagctatcggtcaagaggtccgtrcgatccttctcctactcttgraagaagcyaarcgccgaggaattgtcgtttcaatggatctcaatctgagaacaaagatgatttcagtcctagaagccaagtatgaattttctaagtttgcacgttttactgactattgcttcggtattgatcctctcatgattgatgaccaaaatctagagatgttyccaagagacagtgctagcctagaagaggtggaaaatcgcatgcgacttttaaaagaagcctatggtttcaaggccattttccataccctccgmtctagtgatgagcaagacaaaaatgtctatcaagcctatgctctrgaagaackatttgaagagtctgtccaactaaaaactgcagtctatcaacgaattggtagcggggatgcctttatatctggtgccctttaccaactactccatcattcctccctaaaaactaccattgactttgcagttgcgagcgcaactctcaaatgcactcttccaggagaccatctctccacttcckcaactagtattgaaaatttactggcaaatgcacaagatatcattcgttarctaat

SEQ ID NO: 1420 - DNA, 1016 bp, Streptococcus pneumoniae
  misc_feature (1)..(1016): tiling:Spneumo1:WAN024C3T; Cluster includes WAN0244JX spr0 341|fni|15902385|NP_357935.1|345885..346895|+|1011 bp|Isop entenyl diphosphate isomerase|S.pneumoniae|R6|NC_003098.1| ORF|221
atgacgacaaatcgtaaggacgagcatatcctctatgcccttgagcagaaaagttcctataatagctttgatgaggtggagctgattcattcttccttgcctctttacaatctggatgaaatcgatctttcgacagagtttkctggtcgaaagtgggactttcctttttatatyaatgccatgactggtggaagtaataagggaagagaaatcaatcaaaagctggctcaggtggcggaawcctgtggtattttatttgtaacgggttcttatagcgcagccctcaaaaatccaacggatgattctttttctgtcaagtctagtcatcccaatctcctccttggaaccaatattggattggacaagcctgtcgagttaggayttcagactgtagaagagatgaatcctgttctattgcaagtgcatgtcaatgtcatgcaggaattactcatgcccgagggagaaaggaagtttagaagctggcaatcgcatytagcagattatakcaagcaaattcccgttcctattgtcctcaaggaagtgggctttggaatggatgccaagacaatcgaaagagcctatgaattcggtgttcgtacagtggacctatcgggtygtggtggcaccagctttgcctatatcgaaaaccgtcgtagtggccagcgtgattacctcaatcaatggggtcagtytaccatgcaggcccttctcaatgcccaagaatggaaagataaggtcgaactyttggttagtggaggggttcggaatccgctggatatgattaagtgcttggtttttggtgctaaggctgtgggattgtcacgaaccgttctggaattggttgaaacctacacagttgaagaagtgattggcattgtccaaggctggaaagcagayctacgcttgattatgtgttcccttaactgtgccaccatagcagatctacaaaaagtagactatcttctttatggaaaattaaaagaagcaaakgatcagatgaaaaaggcgtaactaat

SEQ ID NO: 1421 - DNA, 755 bp, Streptococcus pneumoniae
  misc_feature (1)..(755): tiling:Spneumo1:WAN024FI6; Cluster includes WAN0243P4 spr1 451|truA|15903494|NP_359044.1|1434742..1435491|-|750 bp|tR NA pseudouridine synthase A|S.pneumoniae|R6|NC_003098.1|OR F|111
atgacgagatataaagcaactatttcctatgatggttatgcctttgctggctttcagcgccagyctcatgcgcgtagcgttcaggaagaaattgaaaaaaccttgaccagattaaataaagggcaarccattactgttcacggtgctggtaggacagatagtggggttcatgccctgggacaggtsattcattttgacctgccttatcagatggatgaggagaaactccgttttgccttggatacccagtctcctgaagatattgatgtgatttcgattgagcttgtggcagatgattttcattgccgttatgccaarcatagcaagacctatgagtttaytktggatagaggacgtcccaaaaatcckatgcgccgtcactatgccacccactttccctacccactcgatgtggaacgaatgcagattgcaatcaaaaagctagagggaacccatgattttaccggttttacagcctctgggactagtgtagaggataaggttcgcaccatcacagaagctagtttaatagtcgatgagacaggacaatttttgacctttaccttttcaggaaatggtttcttgtataaacagattcgcaatatggtggggactcttctcaaaatcggtaacaaccgcatgccagtagagcagattgatctcatcttggagaagaaggacaggcaacttgcaggtcccactgcagcaccaaatggtttgtatttaaaggagattcgttatgaagaataactaat

SEQ ID NO: 1422 - DNA, 540 bp, Streptococcus pneumoniae
  misc_feature (1)..(540): tiling:Spneumo1:WAN024DO8; Cluster includes WAN0243RY spr1 349|transposase B|15903392|NP_358942.1|1332570..1332869|-| 300 bp|Degenerate transposase|S.pneumoniae|R6|NC_003098.1| ORF|111
atgacgakctttaaggaacaagagycagagaaagtcgctgagtttcttgatattttggataacctaaaagatttaccaatcgtatatattgaygaaacaggaatcgaccgctacctctatcgtccttatgcasgggctcctagaggggagaaagtctatgaaaagattagcggacgtcgttttgagcgaacttcaattgttgcaggacaagtagacggagagtttatagctcccatgatttacaagaaaagcatgacaagcgatttctttgtggagtggttcaaaacgcaactcctacctgctttgaagacacctcatgttattgtcatgggcaatgctrgttttcatcccaagaacattttggatgaactctgcatccaagataaacactttttcttacctctaccaccttattcaccggatttgaatcctattgagcaagcttgggctatcttgaaaaagaaagtgacggatktattaagggaagttccaactatttttgaatgtttggaaygcttttttaaaactagaykaactaat

SEQ ID NO: 1423 - DNA, 2214 bp, Streptococcus pneumoniae
  misc_feature (1)..(2214): tiling:Spneumo1:WAN024C4E; Cluster includes WAN023Q1G cont ig_1216_10||||9280..11490|+|2211 bp|Glimmer 2.02 orf predi ction|S.pneumoniae|670|WAN01UEKW|ORF|000
atgacgatttatattaataaggacgagaccgtttttcatttggcaatgaaagatagtagttatatttttagaattttagaaaatggggaacttcaacatctacattttgggaaaaggattcatgtcaaggaaaattataaccaattgatggcctatgaaaaaagaggatttgaagtatctttttctgaagaatttgaggatattcaacagtctatgatacaaaatgaatattcttcatatgggaaaggagattttcggcatccagcctttcaagttcaaggaatgaatggtagtaggataacgacactaaaatatcaagrttttgaacttgaaaaagggaaaaatcgtcttaactctctaccttcaacatttgatgatattggtcagtgtgcggaaacattaacgattattttaacagattccatattagatttaactgttagactaaattayacaatttttccggaatacaatgtcttagttagaaatacggaatttttaaataatagcaataataagttgactcttttgaaagcaatgagcttacagctagatctacctgatagtcaatatgactttattcaattttctggagcatggctgagggaacgtcagttatatagaacttcgcttagaccaggtattcaagcaatagatagcttgagatactcatcaagtcctcagcaaaatcctttctttatgctatcaaggagggaaactacagagcatagtggtgaggtttatggttttaactttatctattctggaaattttcaaaatatgattgaagttgaccattttgacaccgctagagtaacggtaggaataaatccagtagaatttcgttttttattaaatcctgccgaaagttttgtgacaccagaagcaattgtgatctattctgatcaagggatgaatcagatgagccaacaactatcagatttttatcgacatcatttagttaatcctaatttttctcaagctagtcgtcctataatactcaatagttgggaaacattttattttgacttgggtacagaaaaaattttagatttagcaaaggctgctaaagatttagggatagaattatttgtactggatgatggttggtttggtcataggaaagatgacaaaagttctctgggkgattgggtaacagatagaagtcgccttcctgaaggtattggatttcttgcagatgaaattcacaaaataggtttacaatttggtttgtggtttgagcctgaaatgatttctattgatagtgatttgtacaagaatcatrycrattggactatccatttgttagacagagagaagtcagtaggaagaaatcaatatgtgttggatttgacgagacaggaagttgttgattacctttttgattctatttctaaaatcataatcaaaacaaatctggattatatcaaatgggatatgaatcgtcatataacagatatttatagtattgaacttgattctgaacagcagatggaatttggtcatcgatatatcttaggtctttatcagttattagatcgtttaataactaagttcccttcagttctatttgaatcttgttcttcaggtggtggacgttttgatttaggacttatgtattatgcaccgcaagcgtggacgagtgatgatacggacccgatagaaagattgaaaattcagcatggaacttcttatggatattctccatcaatgatgacagcccatgtttctatttctccaaatgaacaaagtrgaagacaaacgagtttggacactaggacaaatgtagcttattttagttctttcggttatgaattagatgttacgagattgtcggtagaagaaaaagaacaagtgagagaacaaattcagttttataaaaaatatcgttcattgtttcaatatggggatttctataggataaacagtccttttagttgtgattctgctagttggcaagttgtttcaaaagataaatgccaatcgattttattgtatgctcaattgaatagtaagttgaatccaggttatacaagagtttattttagtggtttagataaagataaatgctattccgtctctrgatttgatgagttcttttatggagatgaattaatgaatgctggaataaaagtcagtttaagtaatttagcactwtgtgttccagaatatcttacaaaattatttgttattgargaagttgtatgtaaatat

SEQ ID NO: 1424 - DNA, 549 bp, Streptococcus pneumoniae
  misc_feature (1)..(549): tiling:Spneumo1:WAN024DPX; Cluster includes WAN024491 spr0 733||15902777|NP_358327.1|732487..732897|+|411 bp|Hypothet ical protein|S.pneumoniae|R6|NC_003098.1|ORF|211
atgacgcgctatgctttgctggtgagaggtatcaatgttggtrgtaagaataaggtcgtcatggcggarcttcrtcaagaattgacaaacttgggactggaaaaggttgagagctacatcaayagtggcaatattttctttrcttcgatagattccaaagcccaattggttgaaaagctagagactttctttgcagtccattatccatttattcagagcttttctktactgagtctagaggactttgaggcggaacttgaaaatctaccagcttggtggagcagagacttggcacgaaaagattttctcttttacactgagggtttggatgtggaccaagtcatcgcgacagttgaaagtttagagctgaaagatgaagtgctttattttggaaaacttgggattttctrggggaaattttctgaagaatcctattctaagactgcctatcakaagtacttgctgaaggtgcctttctaccgccacattactattcgtaatgctaaaacctttgacaaaattggtcaaatgctaaaaaaactaactaat

SEQ ID NO: 1425 - DNA, 312 bp, Streptococcus pneumoniae
  misc_feature (1)..(312): tiling:Spneumo1:WAN024FT6; Cluster includes WAN023L6T 3151 47_2323||||1247236..1247547|+|312 bp|EGAD orf prediction|S .pneumoniae|R6|NC_003098.1|ORF|110
atgacggagggcaatgcgagttgtttcaatcaagttagccccagcttctgcttcaatggtatagccatcaacagaaacgttattgagcttgtcacacaagatgacaaatccacgaatcccaccatcacgaacgatgatattgcttgcattgccaagaaccatccaagggatattttcttggttggcaaatttcacaacgcgagccaactcaaaacgatttcgtggaaagaccaaataatcagcctctccacctacttttgtataactatagctatgcaagggttccttaaaacggatatcaattccttctaa

SEQ ID NO: 1426 - DNA, 255 bp, Streptococcus pneumoniae
  misc_feature (1)..(255): tiling:Spneumo1:WAN024CDZ; Cluster includes WAN023MD1 3131 94_157a||||72155..72409|-|255 bp|EGAD orf prediction|S.pne umoniae|R6|NC_003098.1|ORF|110
atgacggtcaatcgtctgcgtgaaatcaccagacaagttgaaatagctgtggttggttggattgaccagcgtatcctgatcggtcgtyaccttgtagctgatttcataggcaccagtttcttccaagtgataactgatccaaatcttgagatttccagggaaccctcctgtcccatctgtacgctctgtgtagagagtcaagccatgatcgcttacttcttcaacttcaaacaagctggaatcccaaccagttga

SEQ ID NO: 1427 - DNA, 494 bp, Streptococcus pneumoniae
  misc_feature (1)..(494): tiling:Spneumo1:WAN024D9Y; Cluster includes WAN0243YF spr1 116||15903159|NP_358709.1|1115440..1115928|-|489 bp|Conser ved hypothetical protein|S.pneumoniae|R6|NC_003098.1|ORF|1 11
atgacggttattatcaaatcaatggaaactcctraagagatagaaggyaaatccytygttcactggcaaacgtggagagagkcttatgatgaccttttgcctgcggaatttcaggakacaatgacattagaaagatgtcgaytctttagtcaaaagtatccagaaaatacattgattgcgatggatggygtgaagrtrgttggttttatmagttatggcaaytktcgtgatgagactattcaagctggtgaaattattgctttatatgttttaaaagactattatggaaaaggwatcgcacaaaagttartgaaagcagctttgactgmtcttaatcatttttctgaaattttcttatgggtattgaaagatrwcaagcgcgccattgctttctatcaaaaaatgggttttacttttgatggacaagaaaaaatacttgaacttggaaagcctataaaggaaamacgratggtrttctattctaaataactaat

SEQ ID NO: 1428 - DNA, 330 bp, Streptococcus pneumoniae
  misc_feature (1)..(330): tiling:Spneumo1:WAN024FFT; Cluster includes WAN023KUG 3138 59_2859||||1527363..1527692|+|330 bp|EGAD orf prediction|S .pneumoniae|R6|NC_003098.1|ORF|110
atgacgttctgtaccaataacacaaagtcctccaagttcacgaacaccttcaccaagcttgatgtcggtaccacgacccgccatgttggttgcgatggtaacggcaccacgttgaccagcattcatgatgatttgggcttctctatagtggtttttggcattcaagacttcgtgaggaacaccagctgcaaccaatttcttagaaatgtagtcactagtttcaaccgctactgtaccaaccaagacaggttgacccttttggtaacgagccttaacgtcttcgacaaccgctttaaacttagattcgatacttgcataaagaaggtctga

SEQ ID NO: 1429 - DNA, 240 bp, Streptococcus pneumoniae
  misc_feature (1)..(240): tiling:Spneumo1:WAN024F5O; Cluster includes WAN023LYE 3143 45_944a||||492331..492570|-|240 bp|EGAD orf prediction|S.p neumoniae|R6|NC_003098.1|ORF|110
atgacgttggccaaccaagaagtcatttggatcgtgggcaggtgtgattttcacgacaccagtaccaarctcaggatctgcgtgctcatctccaacgattgggatgagtttattagcgattggaaggatgacgtttttaccaatcaagtccttgtagcgcgggtcttctggattaaccgcaaycgcaacgtccccaaacatagtctcaggacgagttgtagcaacttcaagggcgcgtga

SEQ ID NO: 1430 - DNA, 885 bp, Streptococcus pneumoniae
  misc_feature (1)..(885): tiling:Spneumo1:WAN024ES3; Cluster includes WAN0243EZ spr1 817|ABC-NBD|15903859|NP_359409.1|1787199..1788083|-|885 bp |ABC transporter ATP binding protein - unknown substrate|S .pneumoniae|R6|NC_003098.1|ORF|100
atgackgtggttaaagttgaraaattgagtaagaaaataaaagacaaggaaattttgcggaayatctcctttgaaatcaacgatggtgaatgtgttgccttaattggtccaaatggtgccggaaagacaacactcttagattgtttgcttggagataaactggtcacaagcggtcaagtatctattcaaggtttaccagtgacgagttctaagttagactatactagggcttacctccctcaagaaaatrtaatcgttcagaaattaaaagttaaagagttgattgctttctttcaacgtatctatccaaatcctttgagcaatcaggaaattgatcaactattgcagtttgtcaagcaacaaaaagaacagttggcagaaaaattatcaggcggtcaaaagcgtctcttttctttcrtcttgaccttaattgggcgaccaaagattgtttttttagatgagcctactgcgtccatggatacctcaactcgtcaacgtttttgggaaattgtccaggagttaaaagcgcaaggagtcaccattctctattcgtcccattatattgaggaagtggaacacactgcagaccgcattttgctcttaaataagggagagttgattcgagatacgacgcctctagctatgcgtagcgaggaaatagaaaagcactttatccttcctatagcttacaaggaagtcgtagagcagtcaaatttggttgaaaactggaccctaaagcaagattctttacaagtagtcactcgagaagcagatgctttctgggaactattagcccaagcaggatgtaggatgcaagaaatcgaagttaataatcgtagtttgttgaatacaatctttgaagagacgcagaagggagataactaa

SEQ ID NO: 1431 - DNA, 861 bp, Streptococcus pneumoniae
  misc_feature (1)..(861): tiling:Spneumo1:WAN024CDW; Cluster includes WAN0244RK spr0 066||15902110|NP_357660.1|73075..73929|+|855 bp|Conserved hypothetical protein|S.pneumoniae|R6|NC_003098.1|ORF|110
atgacmtatgaataymagagycacatttatttrgcagagrcagytttaaatgtraaggatttggycagtcaaacagyyttttatcagcarrttattggtttagaaatcytatctcaaackgakacagagkycrttctrggmcttggwggaaaagycttggtacasytgattcaagcacaagagrgyggagaagtragggaacattatggtctttaccatytggcyattctyttgccsacacgmaaggctttggckgatgtcttgaarcacctgacrgatttrcarattcctcttgtyggcggtgcagaycayggttacagtgargcymtttacttrgargayttggagggaaatggcattgaactctatcgagataagccagtttccacatgggatattcgagaagatggacgyattatcggrgtgackgargyycttgcggckcaggayatytatgagttgggggaaagagtagagccytttatcctrgcagarggtacragaatggggcatattcatctttcygtcaaggatagtcgaaagtccagmcagttttatcaaamggtgttagggctmgagrataaattcagtgtgcctrgygctagttggatygcrgctggrgaytaccatcatcatttagcagtyaacgaatggrgaggaaaaggtctggmtycgcgtaarcaagkcytaccaggtttagcctactatgtcatcgaagtcgcacataaaraagaactgttaacgattgcccaacgagcacaagaagttgacgcaccaatcaaatggatgacatcgakcmaattggaaatcacagactcagatggcatcgtgacccgtattcgtttagcwagastarctaat

SEQ ID NO: 1432 - DNA, 1461 bp, Streptococcus pneumoniae
  misc_feature (1)..(1461): tiling:Spneumo1:WAN024FUY; Cluster includes WAN0240H5 |cap 8I||CAB43612.1|||1461 bp|oligosaccharide repeat unit trans porter|S.pneumoniae||AJ239004|ORF|000
atgactaaaaaatctattactagaaattttattttcaatacaattctaactatgtccagttttatttttccactcatcagtttcccatatgtttcaagggttctgatggcagatgggttgggacgagtaacgttcgcttcttcaattattgattatgccctaacatttgcaatgttagggatgccattatatggtgttaaagtctgtgcaggatatattaaaaataaggagaagctaagtcagactgtcagagaattgttagtcattaatttattagtaggatttcttgtgatgcttcttttagcaactatggtaataataattcctcgttttagacaggaatggcagcttattattatcacgtcatctacaattcctctcaatattataggaatagagtggttatacaaagcattggaagactattcgtatatttcaattagaacattgacttttaaaatattaggtttccttttgatgtttttagtcgtccgaacaaaagatgactatatggtatatgcggcaattacagttttagctagtcatggttcttttattttgaatttttttagatctagaactttcctactagaaaatatctctcaaagattgaatttaaagcaacatataaagccgttattaattttattttttttatctgtatcatggactatttataagaatacagatgtcgttatgatgggatttctaactagtgatacagaaattggttactattcaacagcattaaaaattcgttctatagtgctcagtgtagtaacttctttagggacagttgtactacctcgtttagtcaaatattataaagaaggaaagtataatgaagcaaagaaaatactaaacaaaagttcttcatttattatgctaagttctttatattttattggctatattgtaattaatgccagagaaattattctttttattgcgggtaggaattacttaggggctatcccgacacttcaagtatctatttttagtgcaatatttgttggctactctattatgtatggaaccaatatcctagtatctataggtaaagaaaatgtaaccattcaggcaagtattattggtgttgttttaaatatttgtttgaattttattatgatacccaaatttgctgcactaggggcaggtattgcaacttctataggagaagctgttatggtattatatgaaataatatacttgggaaaggatggttggagctattttgaaagattaaatattttaaagattattgtagtatttatatttagtacgtttatgttatatattatgaaagatttttttgttggctatcctttatttatttatattgtaatttcaggggttatttatagtattatatatatatttggtcttatgatactaagagaaaatttgctttcaagttggaaaatatcaatactaaatcggtttaatattattaaagaatga

SEQ ID NO: 1433 - DNA, 926 bp, Streptococcus pneumoniae
  misc_feature (1)..(926): tiling:Spneumo1:WAN024F48; Cluster includes WAN0244IU spr0 380|fabD|15902424|NP_357974.1|379418..380338|+|921 bp|Malo nyl acyl carrier protein transacylase|S.pneumoniae|R6|NC_0 03098.1|ORF|111
atgactaaaacagcctttttatttgctggtcaaggtgcccagtatctagggatgggacgggatttctatgatcagtatccgattgtyaaagaaacgattgatcgagcgagycaggtgctmggttatgatttrcgttatctcatcgatacggaagargacaaactcaatcagacccgctatacgcaaccagccattctagcgacttcggttgctatctaccgtttattgcaagaaaagggctatcagcctgatatggtygctggtttgtctcttggagaatactctgccttggtggcaagyggcgccttggattttgaagatgcggttgccttggtagctaagcgtggagcctatatggaagaagcggctcctgctgactctggcaagatggtagcagttctcaatacgccagtagaggtcattgaagaagcctgtcaaaaagcttctgaacttggagtggttactccagccaactataacacacctgcacaaatcgtcattgctggagaagtggttgcagttgatcgagcggttgaacttttgcaagaagcaggtgccaaacgcttgattcctcttaaggtgtcaggtccctttcacacckctctccttgarccwgctagccagaaactagctgaaactctrgctcaggtaagtttttcagattttacttgtcccctagtcggcaatacagaagctgctgtgatgcaaaaagaggacattgctcagctcttgacgcgtcaggtcaaggaacccgttcgtttctatgaaagtattggggtcatgcaagaagcaggcataagcaactttatcgagattggaccggggaaagtyttgtcaggttttgttaaaaaaattgatcraactgctcacttagctcatgtggaagatcaagcgagtttagtagcacttttagaaaaatarctaat

SEQ ID NO: 1434 - DNA, 1031 bp, Streptococcus pneumoniae
  misc_feature (1)..(1031): tiling:Spneumo1:WAN024CXA; Cluster includes WAN02438Z spr2 034|trpS|15904075|NP_359625.1|2025178..2026203|-|1026 bp|T ryptophanyl-tRNA synthetase|S.pneumoniae|R6|NC_003098.1|OR F|111
atgactaaacccattattttaacaggagaccgtccaacaggaaaattgcatattggacattatgttggaagtctcaaaaatcgagtattattacaggaagaggataagtatgatatgtttgtgttcttggctgaccaacaagccttgacagatcatgccaaagatcctcaaaccattgtagagtctatcggaaatgtggctttggattatcttgcagttggattggatccaaataagtcaactatttttattcaaagccagattccagagttggctgagttgtctatgtattatatgaatctagtttcgttagcacgtttggagcgaaatccaacagtcaagacagagatttctcagaaaggatttggagaaagcattccgacaggattcttggtctatccaatcgctcaagcagctgatatcacagctttcaaggctaattatgttcctgttgggacagatcagaaaccaatgattgagcaaactcgtgaaattgttcgttcttttaacaatgcatataactgtgatgtcttggtagagccggaaggtatttatccagamaatgagagagcagggcgtttgcctggtttagatggaaatgctaaaatgtctaaatcactaaataatggtatttatttagctgatgatgcggatactttgcgtaaaaaagtaatgagtatgtatacagatccagatcatatccgcgttgaggatccaggtaagattgagggaaatatggttttccattatctagatgtttttggtcgtccagaagatgctcaagaaattgctgatatgaaagaacgttatcaacgaggtggtcttggtgatgtgaagaccaagcgttatctacttgaaatattagaacgtgaactgggtcctattcgtgagcgccgtattgaatttgctaaggatatgggagaagtttataatatgattcaaaaaggtagtgaaagagcgcgtgaagttgcgggtcaaaccctatctgaggtaaaaggggcaatgggacttcattactttaactaactaat

SEQ ID NO: 1435 - DNA, 704 bp, Streptococcus pneumoniae
  misc_feature (1)..(704): tiling:Spneumo1:WAN024DEZ; Cluster includes WAN02449X spr0 701|fabG|15902745|NP_358295.1|701264..701962|+|699 bp|3-Ke toacyl-ACP reductase|S.pneumoniae|R6|NC_003098.1|ORF|111
atgactaaacgtgtactcattacaggagtgagttcaggkatyggattggctcargctcgcctctttttagagaagggctatcaagtttatggagttgaccaaggtgaaaagccactcttagagggtgattttcrctttttacagagagatttgaccttggacttggaacctatttttgactggtgccctcaggtggatgttttgtgtaatactgcyggagttttggatgmttacaaaccactgttggaacaaacggcgcaggacattcaagagatttttgaaatcaactacattattccagtagagttgactcggtattatttgacacaaatgctggaaaataaaaagggaatcatcatcaatatgtgttccattgcttctagcctagcaggtggaggtggtcacgcctatacttcatccaagcatgccttggctggcttcaccaagcagttggctctagactatgctgaagctgggattcaggtctttggtatcgctccaggagcagtcaagacagctatgaccgctgcggattttgaaccaggtggyttrgctgactgggtggctagtgaaacmccaatcaagcgctggattgarccagaggaaatagcagagcttagtctttttttagcaagtggaaaagcgagcgccatgcaaggacaaatcttgacaatagatggtggctggtctttgaagtarctaat

SEQ ID NO: 1436 - DNA, 410 bp, Streptococcus pneumoniae
  misc_feature (1)..(410): tiling:Spneumo1:WAN024DMG; Cluster includes WAN0244RN spr0 063|PTS-EII|15902107|NP_357657.1|69847..70251|+|405 bp|Pho sphotransferase system sugar-specific EII component|S.pneu moniae|R6|NC_003098.1|ORF|111
atgactaaatcattaattttggtgagccatggtcgcttctgtgaggagcttagaggtagcacagaaatgattatgggccyacaagacaacatttacacagtagctcttcttccagaagatggcccagaagaatttactgctaaatttgaagctgttattgaaggrttggatgatttcctagtytttgcggatcttctcggtgggacaccttgtaatgtggtgagtcgcttgatcatggaaggtcgtgatattgacctttacgcagggatgaatcttccaatggtgattgaatttatcaatgcgagccttacaggcgcagatgcggactacaagagccgtgctgcagaaagcattgtgaaagttaatgacctgttagcgggcttcgatgatgacgaagatgaataactaat

SEQ ID NO: 1437 - DNA, 543 bp, Streptococcus pneumoniae
  misc_feature (1)..(543): tiling:Spneumo1:WAN024G9C; Cluster includes WAN0243IZ spr1 673||15903715|NP_359265.1|1645644..1646180|+|537 bp|Conser ved hypothetical protein|S.pneumoniae|R6|NC_003098.1|ORF|2 21
atgactaacattgaccgccgtatcagcaaaaccaaaaaagccatctatcaagcttttatacaacttttgaatgctaagggctacgaggccactactgttcaggatatcattgatctcgcagatgtgggamgatccaccttttactgtcactatgaragtaaggagcttcttctggaccagctctgccgctacctcttccatcatctttttgaaagagagcaagccatttcaaccgaggactacctcgcccacctctttctscattttcataaaaaccaagaccatatcaccagtytgctattttccaaaaatgactacttcctccgtcaactccataaagagctagaacaccatgtctattccgtgctagctgataatttaaaagaagcccaccctaatmtgcytacttcttacctccaacacttggtyrtgtccaactttatcgagacattgacctggtggctcaaaaaaggtcaagatttcacagaccaggaagttgtccaattttatctagaccttctcattcctaaaaatykaactaat

SEQ ID NO: 1438 - DNA, 330 bp, Streptococcus pneumoniae
  misc_feature (1)..(330): tiling:Spneumo1:WAN024CIX; Cluster includes WAN0242AJ SP13 23||15901177|NP_345781.1|1246860..1247183|-|324 bp|hypothe tical protein|S.pneumoniae|TIGR4|NC_003028.1|ORF|011
atgactaactctgtattttcgacaatgcaagatattgagaatgttgcaaccgatattataaaatcatatgataatgagatttatacktataaagctgtytcccaagaagaattggaaaaactagaaaaaagttatgatgaaaaaagtcacgaagaattartttcaatagaaagcaatttagaaatgaaacaacagaacctyattgatgaggttaataaaacaatcaaggaaaatgatgcaaakattcagtatatttcatcaagtaggagaggagaatttgtagaaaaaattattggtagggtggtagaaaaatatggcyatctarctaat

SEQ ID NO: 1439 - DNA, 507 bp, Streptococcus pneumoniae
  misc_feature (1)..(507): tiling:Spneumo1:WAN024AUS; Cluster includes WAN0240LU |dfr ||CAB06420.1|||507 bp|dihydrofolate reductase|S.pneumoniae ||Z84380|ORF|000
atgactaagaaaatcgtagctatttgggcccaggatgaagagggtgtgattggtaaggamaatcgtctgccttggcatttgccagcagaattgcagcactttaaagaaacaactctgaatcatgctatcttgatggggcgggtaacctttgatggaatggggcgtcgcttgcttccacaacgggagaccctgattttgacgcgtaattctgaagaaaagatagacggggttgctacttttcacgatgtccagtctgtcttggactggtatcaggctcaagaaaagaatctctacattctcggtgggaagcagatttttcaggcttttgagtcctatttggatgaagtgattgtcactcacattcatgctcgggtggagggggatacctattttcctgaggagtttgacttatctctttttgasacagtttcaagcaaattttacgccaaagatgagaaaaatccttatgattttaccatccaataccgcaagagaaaggaagtctaa

SEQ ID NO: 1440 - DNA, 512 bp, Streptococcus pneumoniae
  misc_feature (1)..(512): tiling:Spneumo1:WAN024AUV; Cluster includes WAN0243PQ spr1 429|dfr|15903472|NP_359022.1|1412861..1413367|-|507 bp|Dih ydrofolate reductase|S.pneumoniae|R6|NC_003098.1|ORF|110
atgactaagaaaatcgtagctatttgggcccaggatgaagagggtktgwttggtaaggamaatcgtctgccttggcatttgccagcagaattkcagcactttaaagaaacaactctgaatcatgcyatcttgatggggcgkgtracctttgatggrwtggggcgtcgcttgcttccaaaacgggaraccytgrttttracgcgtaatccggaagaaamgatagatggggttgctacttttcaggacgtccagtctrttctkgactggtatcaggmtcaagaaaagaatctctacattmtyggtgggaagcaratttttcaggcttttgaascytaccttgatgaagtgattgtsactcamattcatgctcgkgtggarggagatacctatttccctraararyttgacttgtctctttttgagacagtttcaagcaaattttacgccaaagatgagaaraatccttatgattttaccatccaataccgcaagagaaaggaagtctaactaat

SEQ ID NO: 1441 - DNA, 507 bp, Streptococcus pneumoniae
  misc_feature (1)..(507): tiling:Spneumo1:WAN024AUT; Cluster includes WAN0240U7 |dhf r||AAG22524.1|||507 bp|dihydrofolate reductase|S.pneumonia e||AF288415|ORF|000
atgactaagaaaatcgtagctatttgggcccaggatgaagatggtgtgattggtaaggacaatcgtctgccttggcatttaccagcagaattgcaacactttaaagaaacaactctgaatcatgctatcttgatggggcgtgtgacctttgatggaatgggacgtcgtctgcttccaaaacgggagaccttgattttgacacgtaattcggaagaaaagctagacggagttgctacttttcatgatgtccagtctgtcttggactggtatcatgctcaagacaagaatctctatattcttggtgggaagcaaatttttcaggcttttgaaccctaccttgatgaagtgattgtgactcacattcatgctcgggtggagggagatacctatttccctgaagagtttgacttgtccctttttgagacggtttcaagcaaatcttataccaaagatgagaaaaatccttatgattttaccatccaataccgcragagaaaggaagtctaa

SEQ ID NO: 1442 - DNA, 507 bp, Streptococcus pneumoniae
  misc_feature (1)..(507): tiling:Spneumo1:WAN024AUU; Cluster includes WAN0240UA |dhf r||AAG22527.1|||507 bp|dihydrofolate reductase|S.pneumonia e||AF288418|ORF|000
atgactaagaaaatygtagctatttgggcccaggatgaagagggtgtgattggtaaggacaatcgtctgccttggyatttrccagcagaactgcaacacttcaaagaaacaactctgaatcatgctatcttratgggrcgygtgacctttgatggratrgggcgtcgcttgcttccamaacgggaaacyytgattttgacgcgtaattctgaagaaaagatagacggggttrctacttttcasgatrtccagtctgtcttrgaytggtatcaggctcaagamaagaatctttatattctcggtgggaagcaaatttttcaggcttttgaaccctaccttgacgaagtgattgtgactcaaatycatgctcgggtggagggagatacctatttycctgaggagtttgayttgtctctttttgagacagtttcaagcaaatcctataccaaagatgagaaaaatccttatgattttaccatccaataccgcaagagaaaggaagtctaa

SEQ ID NO: 1443 - DNA, 855 bp, Streptococcus pneumoniae
  misc_feature (1)..(855): tiling:Spneumo1:WAN024D4T; Cluster includes WAN0243KI spr1 618|ABC-MSP|15903660|NP_359210.1|1592150..1593004|-|855 bp |ABC transporter membrane-spanning permease - sugar transp ort|S.pneumoniae|R6|NC_003098.1|ORF|100
atgactaagatgaaacgatttaaaccaacaacaatcttagaatatattctgttaactttattggcaggactcttcctttttcctatggtttggatggtagtttcagctatgaagccagaagcggatgtttataaaaatttgactagttggcaagccttcttaccaagtttaaatcccgctgattggtttaaaccttatcaggaagtatttgagcgctttagtatttttacatatctagggaacagcattttttatgctggaacgtttgctattggttctattattgtcaatgcactggccggtttcgcttttgcaaaagtcaatttttcaggtaagaaaattttatttggtttcttacttgctttacttattattccagtggaaactgtgttaattccacaatttaccattatcaattccttaggtttggtcaataatcgtcttgcagttattattccaggattggcgagtgtatttaatatttacttatttaggaatttctttattgcaattccagaagagattcttgagtctgcaaagatggacggagcaagtatcgttagaattttctttagaattatgcttccaatgtctaaacctgcagttgctacagttggtgttttatcatttatttcaagctggaatgattatatctggccattgatggttttgacagattcttctaaattttcaatgcaggttgcaattacaactattaatacaactcaaccagtttatatcaatcaggtaatggctgtattaactatttcaacgattccgttgattttggtctatgtagtcgctcagaaatatattgttcaaggtctgggtggttccggaactggaataaaatag

SEQ ID NO: 1444 - DNA, 1219 bp, Streptococcus pneumoniae
  misc_feature (1)..(1219): tiling:Spneumo1:WAN024CIB; Cluster includes WAN0241YY SP17 63||15901594|NP_346198.1|1665547..1666764|-|1218 bp|prepro tein translocase SecY family protein|S.pneumoniae|TIGR4|NC _003028.1|ORF|011
atgactaagatttattcgtcwatarcagtaaaaaaaggaytatttacctyatttctactgtttatctatgtattgggaagtcgtattaytctcccttttgttgayytraatwcyaaagatttyttaggwggttcaacagcctayctagcyttytcagcmgccctwacaggtggraatctaagaagtttrtcaattttttctgttggattatccccttggatgtcmgcyatgattttrtggcagatgttttcwtwttctaaamrrttgggkytaaswtctacrkckatwgaaatwcaagatcgycgwaraatgtayctgaccttgctaattgctgtgattcaatccttggcagttagcttgagmytgccagtacaatcctcctaytckgyaatwttggttgttctaatgaatacmwtrttgctgatagcaggaacawtttttctkgtttggttgtcagatttaaatgckagyatgggrattggrggttctattgtaatcctcctatccagyatkgttttaaatatycctcaggatgttwtkgaaacwtttmagactrgtwcayatyccwacagggattrttststtrcttgytttwwtraccmttrtmttttcttayttrcttgcccttatgtatcgagctcgctatttggttcctgttaataaaattggcttacacaatcgatttaaacgctattcttatctcgaaatcatgttgaatcctgcaggtgggatgccttatatgtatgtgatgagttttcttagtgtaccagcttatttgttcaycttgttgggatttattttccctaatcattcagggytagcggctttatcaaaggaatttatggttggwaagcctttgtgggtctatgtttatatttcggtcttatttttatttagtatcatttttgcttttgttacgatgaatggagaagagattgcagaccgtatgaaaaaatctggagaatacatttatggtatttatccaggtgcggatactagtcgatttattaatcgattggtccttcgtttctcagtcataggtggtctctttaatgtgrttatggcaggtggtcccatgctttttgttttgtttgatgaaaagttattacgattggcaatgattccaggcttatttatgatgttcgggggcatgatttttacgattagagacgaggtcaaggctttaaggctaaatgakacctatagaccyttgatttag

SEQ ID NO: 1445 - DNA, 653 bp, Streptococcus pneumoniae
  misc_feature (1)..(653): tiling:Spneumo1:WAN024DAL; Cluster includes WAN024402 spr1 056||15903100|NP_358650.1|1051604..1052251|-|648 bp|Hypoth etical protein|S.pneumoniae|R6|NC_003098.1|ORF|111
atgactacaaaaaaagctaatattactattgaagagtacattgaaatgtctgaagttgattttaatgaagctgttaattatgaatttacatctgacacttgtcaattagcaaatagtatttatcaatctctttttaagttttttgataagaaaaatttctctggcgatttaatttttacttggaaatctccatcattagtcaaagaargggattatattgggaraagggattcacaagtagataatcttagagtamtaggaaatatatttcygaattatcttactaatcgaaaatatagcctcaatatgaatcgtaatggctgtatrggagawtttcctcatgacttttttgatayatacctagatcatgtagcaaaatatgcctacgaacaaaaagttaataatattaaagagtattatcctttaaaaagagcgattttacaccaagagaatgcattgtattttcgattkttttctaattttgaygactttttagaaaaaaattatttaaagactatatggcaagtttctaaagaaactcctttttctgaratggattttaatatgtttaaaaatatttcagaaaagataatcttcgaaagaggtagtaaaatgcttaatgatttaaaaagtaattataaaaaatarctaat

SEQ ID NO: 1446 - DNA, 1442 bp, Streptococcus pneumoniae
  misc_feature (1)..(1442): tiling:Spneumo1:WAN024DK3; Cluster includes WAN0244LQ spr0 276|bglA|15902320|NP_357870.1|274499..275935|+|1437 bp|6-p hospho-beta-glucosidase|S.pneumoniae|R6|NC_003098.1|ORF|11 0
atgactacttttaaagatggatttttatggggtggtgctgttgctgctcatcaacttgaaggtggatggcaagaaggtggcaagggaattagtgttgctgatgttatgactgctggtcgtcatggagtagctcgtgaaattactttgggagttttagagggtaaatattatccaaatcatgaggcgatagatttttatcaycgttataaagaagayatagcactttttgctgaaatgggattcaagtgcttccgtacctctattgcatggacacgtatctttccaaaaggtgatgagttagagccgaatgaagaaggattacagttttatgataatctttttgatgaatgcttaaagaatggtattgaacctgtcatcactctatctcattttgaaatgccttatcacttagtgaccgaatatggtggttggaaaaataggaaattgattgatttctttgctcgttttgcagaagtcrtatttaaacgttacaaagataaggttaaatattggatgactttcaatgaaatcaataatcaagcgaattatcaggaagattttgcaccatttactaactcaggtattgtatatgaggaaggtgataatagagargcaattatgtatcaagcagcacattacgaattagttgcttctgcacgagctgtaaaaattggtcatgagattaatccagattttcaaataggttgtatgattgcgatgtgtccaatttatccagytacttgcaatcctaaggatatcttaatggcaatgaaagctatgcaraagcgttattattttgctgatgtgcatgttttaggtaaatatcctgagcatattttcaagtattgggaacgaaaaggtatttcagttgattttactgmccaggataaagaagatttacttggtgggactgtagattacattggtttcagttactatatgtcctttgctatmgactctcatcgtgaaaataatccttattttgattatcttgaaacagaagatttagtgaaaaataattatgttaaggcttctgaatgggagtggcaaattgatccagaaggtttrcgttatgcgttaaattggtttacagaccactatcacttaccactctttattgttgaaaatggttttggagctatagatmaagttgcagcagatggtatggtacatgatgattatagaattgaatatctaggtgcccatattcgtgaaatgaaaaaggctgtagttgaagatggtgttgatttaatgggttatactccatggggatgtattgatttrgtttcagctggtaccggtgaaatgcggaaacgttatggctttatttatgtagataaagatgayaatgggaagggaagttataatcgttccccgaaaaaatcttttggctggtataaggaagttatttcatctaacggtgaatcagtagaatarctaat

SEQ ID NO: 1447 - DNA, 1268 bp, Streptococcus pneumoniae
  misc_feature (1)..(1268): tiling:Spneumo1:WAN024CSI; Cluster includes WAN02447Y spr0 772||15902816|NP_358366.1|765917..767179|+|1263 bp|Conserv ed hypothetical protein|S.pneumoniae|R6|NC_003098.1|ORF|11 1
atgactagagaaaatattaaacttttttcagaaatgcacgctgaaccaagctggttggctgatctccgtcaaaaagcttttgacaagattgagactttggaattaccagytattgagygtgtcaaattccaccgttggaatctgggtgatggaacgattacagaaaatgagccatcagcaaatgttccagatttcacagctttagatcatcacttgaagttggtgcaagtaggaactcaaactgttttcgaacaaactccagttgagttagctgaacagggtgttgtcttcacagactttcactcagctttagaagaaattccagagctgatcgaagaattcttcatgtcatctgttaagtatgatgatgacaagttggcggcttaccacacagcttactttaacagtggtgctgtactctatattccagataacgtagaaatcacagagccaattgaaggaattttctaccaagatagcgatagcaatgtgccgtttaacaagcatattatgattatcgytggtaaaaattctaagattagttatctggagcgtttagagtcacgcggtgaaggaagtgacaaagyaactgccaatatcacagtggaagtgattgcacgttctggtgcgcaagtcaagtttgctgctatygaccgtctaggtgaaaacgtcactgcctacattagccgtcgtggtaaattaggcaacgatgcaagtattgactgggctatcggtgtcatgaacgaaggaaatgtcgttgctgattttgatagtgacttgattggtaatggtagccatgctgacctcaaggttgtagctctttcaagtggtcgtcaggtacaagggattgatactcgtgtaactaactatggctgcaactcwatcggaaayatyctacaacatggggttatccttgaaaaagcaactttgactttcaatggtatcggccacatcatcaagggtgctaagggagcagatgcscaacaagagagccgtgttctcatgctttcagaccaagcgcgttcagatgctaacccaattcttttgattgatgaaaatgaygtmactgcaggmcaygcagcstctatyggwcargtwgatccagaagayatgtaytacctcatgagtcgtggmttggataaggcaactgcagagcgtttggttgttcgtggtttccttggatctgttatcgtggagattccagtcaaggaagttcgtgatgaaatgattgcaactatcgaagagaaattgtcaaaacgctaactaat

SEQ ID NO: 1448 - DNA, 564 bp, Streptococcus pneumoniae
  misc_feature (1)..(564): tiling:Spneumo1:WAN024CN7; Cluster includes WAN02436P SP00 74||15900019|NP_344623.1|80647..81204|+|558 bp|acetyltrans ferase, CysE/LacA/LpxA/NodL family|S.pneumoniae|TIGR4|NC_0 03028.1|ORF|010
atgactagcgaataccagaaaatgatagcaggagagttttmccgtccatcagacccagaactgagagccttagctcaggcttctcgccaaaaacaggccgcctttaacaaggaagagaaccccttgaagggagccgaaatcatcaagacttggtttgcctcaaccgggaaaaatctttacatcaacactcgcttgatggtggactacggtgtcaacatccatctaggggaaaatttttattctaattggaacttgaccatgctggatatctgtcccattcgtatcggggacaatgctatgattggtcctaattgtcagtttttgacacccctccatccactagatccacaggaacgcaattcaggtatcgagtacggaaagcctatcacaatcggagataatttctggactggtggtggcgtcattgtccttcctggagtgacactgggaaataatgtcgttgcaggagcaggggcagtaattaccaaatcttttggcgacaacgttgtcctagctggcaatcctgcgcgcgtgattaaggaaatacctgttaaactarctaat

SEQ ID NO: 1449 - DNA, 1781 bp, Streptococcus pneumoniae
  misc_feature (1)..(1781): tiling:Spneumo1:WAN024GDS; Cluster includes WAN0244BK spr0 642|spxB|15902686|NP_358236.1|649445..651220|+|1776 bp|Pyr uvate oxidase|S.pneumoniae|R6|NC_003098.1|ORF|221
atgactcaagggaaaattactgcatctgcagcaatgcttaacgtattgaaaacatggggcgtagatacaatctacggtatcccatcaggaacactcagctcattgatggaygctttggctgaagacaaagatatccgyttcttacaagttcgccacgaagagacaggtgctcttgcagcggttatgcaagctaaattcggcggctcaatcggggttgcagttggttcaggtggtccaggtgcgactcacttgattaacggtgtttacgatgcagctatggatracactccattcctagcgatccttggatcacgtccagttaacgaattgaacatggatgctttccaagagcttaaycaaaacccaatgtacaacggtatcgctgtttacaacaaacgtgtagcttacgctgagcaattgccaaaagtaattgacgaagcctgccgtgctgcartttctaaaaaaggtccagctgttgttgaaattccagtaaacttcggtttccaagaaatcgaygaaaactcatactacggttcaggttcatacgaacgctcattcatcgctcctgctttgaacgaagttgaaatcgacaaagctgttgaaatcttgaacaatgctgaacgcccagttatctatgctggatttggtggtgttaaagctggtgaagtgattactgaattgtcacgtaaaatcaaagcaccaatcatcacaactggtaaaaactttgaagctttcgaatggaactatgaaggtttgacaggttctgcttaycgtgttggttggaaaccagccaacgaagtggtctttgaagcagacacagttcttttccttggttcaaacttcscattygctgaagtttacgaagcattcaagaacactgaaaaattcatmcaagtygatatcgacccttacaaacttggtaaacgtcatgcycttgacgcttcaatccttggtgatgctggtcaagcagctaaagctatccttgacaaagtaaacccagttgaatcaactccatggtggcgtgcaaacgttaagaacaaccaaaactggcgtgattacatgaacaaactcgaaggtaaaactgagggtgaattgcaattgtatcaagtttacaatgcaatcaacaaacatgctgatcaagacgctatctactcamtcgacgtmggtarcactactcaaacatctactcgtcacctycacatgacacctaagaayatgtggcgtacatctccrctctttgcgacaatgggtattgcccttcctggtggtatcgctgctaagaaagacamtccagatcgccaagtatggaacatcatgggtgayggagcattcaacatgtgctacccagacgttatcacaaacgttcaatacgaccttccagttatcaaccttgtcttctcaaatgctgagtacggcttcatcaagaacaaatacgaagatacaaacaaacacttgtttggtgtagacttcacaaacgctgactacgstaaaattgcggaagctcaaggagctgttggattcacagttgaccgtatcgaagacatcgatgcagttgttgcagaagctgttaaattgaacaaagraggtaaaactgttgtcatcgatgctcgcatcactcaacaccgtccacttccagtagaagtacttgaattggatccaaaacttcactcagaagaagctatcaaagccttcaaggaaaaatacgaagcagaagaactcgtaccattccgtctcttcttggaagaagaaggattgcaatcacgcgcaattaaataactaat

SEQ ID NO: 1450 - DNA, 162 bp, Streptococcus pneumoniae
  misc_feature (1)..(162): tiling:Spneumo1:WAN024AZQ; Cluster includes WAN023WBT AX56 9884.1_2||||1..162|+|162 bp|Glimmer 2.02 orf prediction|S. pneumoniae||AX569884.1|ORF|000
atgactcccaaagaagtcgcattcatcgaaaagtggattaacaactatcctaaaaaatgcttggactacaagtcacccagagaagacttctggatggctaacttgaacttgaaatttagcaaaatggaaataatttttattaaacgcttccaactaactaat

SEQ ID NO: 1451 - DNA, 102 bp, Streptococcus pneumoniae
  misc_feature (1)..(102): tiling:Spneumo1:WAN024CNQ; Cluster includes WAN0246SJ 5613 45-63-9||||||102 bp|DNA Streptococcus pneumoniae phage Dp- 1 open reading frame 259|S.pneumoniae||WAN0246SJ|ORF|000
atgactcgactacgaagcataaagacaagtggatggaaagagtattcgaagttattcgaaacagttctaatccagacgttaagactcacgcatttgggatga

SEQ ID NO: 1452 - DNA, 198 bp, Streptococcus pneumoniae
  misc_feature (1)..(198): tiling:Spneumo1:WAN024DKK; Cluster includes WAN0244N5 spr0 225||15902269|NP_357819.1|217339..217536|-|198 bp|Hypothet ical protein|S.pneumoniae|R6|NC_003098.1|ORF|101
atgactctaaatgaatatatcttacaatatcgcctgaaacaagctatagataagatggctgaatctcccaactcccctttaagcgctatctctgaccaagttggattttcagactataaatattttgccaaagtatttaaaaagtatctccatatttccccaaagaaattgaaatcactcggaagaatagtmaaatag

SEQ ID NO: 1453 - DNA, 473 bp, Streptococcus pneumoniae
  misc_feature (1)..(473): tiling:Spneumo1:WAN024GDL; Cluster includes WAN0244B8 spr0 654|comEB|15902698|NP_358248.1|660077..660544|+|468 bp|dCM P deaminase|S.pneumoniae|R6|NC_003098.1|ORF|111
atgactgaaaaaagactggcctgggatgagtattttgcagcccaagcyctactaattgcgaatcgttccacttgtaaacgtgctaaagtgggcgcgattctggtaaaagataataaggttatttccactggttacaatggttcggtgtcagggactgagcattgtattgatcacgaatgtttggtcattgaaggccactgygttcgcacccttcacgctgaggtcaatgctatccttcaaggtgctgagcgtggtgttcccaaaggytttacagcctatgtaacccattttccttgtctcaactgtacaaaacaattgcttcaggtcggctgcaagcgygtggtttatatcaaccagtaccgaatggacgactacgcccaatacctttatcaagaaaaagggacagaattgacccatttaccacttgagacagtacagacagctcttaaagaggctgatctaatgtaactaat

SEQ ID NO: 1454 - DNA, 1013 bp, Streptococcus pneumoniae
  misc_feature (1)..(1013): tiling:Spneumo1:WAN024D6P; Cluster includes WAN0243BK spr1 941||15903982|NP_359532.1|1923594..1924601|+|1008 bp|Hypot hetical protein|S.pneumoniae|R6|NC_003098.1|ORF|221
atgactgaaaaactaatcaattcaaaaccaaatggtgtattcgcattgattctcattgarttgacrmtcgtacttggtrtctttatatttataatgggggttggttcggaaaacatttttggaattattatcggacctttactaatcgtaattgcagskctarctcatgctggtttaaaagttgtcaaacctcargargctctggttctgacactctttggtaaytatacaggtaccatsaaagaacctggyttttactttgtcaatcccttcagcgtagcagtcaaccctgcaaaccacaytcgacttggacaaagtggtgatgttagcacaaaatctccttttttaggagctaaatcatcaaatgrcaatgatgtaaatcttgaaattggcaagaaacasatttccctcaaagtcatgaccttgagcaattctcgtcaaaaaatcaatgattgcttaggaaaccctgtagaaatcggtatcgcggtaacttggagagttgtcgataccgctaaggcagtcttcaacgttgataactacaaagaatatctttcaytgcaatgtgatagcgccctccgtaatattgtccgcatctatccttacgatgtgtctcctaatgtggatactmcgggtgayggrcamgcagatgaaggtagtctccgtggctctagcgaaattgttgctamccgtattcgtgargaaatycaaagtcgygtwgargatgctggcttggaaatccttgaagcacgtatcacttacctagcttatgctccagaaattgctgccgttatgcttcaacgccaacaagcatctgccattattgatgcacgkaagatgattgtagatggtgctgtaggaatggttgaaatggcactagaacggctcaatgaaggggaattggtagaacttgacgaagaacgaaaagctgccatgrtttcaaatctccttgtcgttctttgtggcaatcatgatgcacaaccaattgtcaacacaggaagyctttactaactaat

SEQ ID NO: 1455 - DNA, 917 bp, Streptococcus pneumoniae
  misc_feature (1)..(917): tiling:Spneumo1:WAN024C6U; Cluster includes WAN0244M7 spr0 259|manN|15902303|NP_357853.1|260419..261330|-|912 bp|Phos photransferase system, mannose-specific EIID|S.pneumoniae| R6|NC_003098.1|ORF|111
atgactgaaaaacttcaattaactaaatcagatcgtaaaaaagtttggtggcgttcaaccttcttacaagggtcttggaactttgaacggatgcaaaacttgggctgggcttatacactcattccagctatcaaaaaactctatactaaaaaagaagatcaaatcgctgctcttgagcgtcaccttgagttcttcaacactcatccatacgtagctgctccagtcatgggggttactcttgcgcttgaarragaacgtgctaacggtgtggaaatcgatgacgctgctatccaaggggtyaaaatcggtatgatgggwmctcttgctggtatcggtgacccagtattctggtttacagtacgcccaatccttggatctctcggtgcttcacttgcccttactggcaatatcttgggkccactcctcttctttgttgcatggaacttgattcgtatgtcattcttgtggtatgttcaagagattggatacaaggctggatcagaaatcactaaagatatgtctggtggtatccttcaagatatcactaaaggagcttctatccttgggatgttcattcttgctgtccttgttcaacgctgggtaaatattaaatttgctttcgatgtttctaaagttcaactagatgaaaaggcttatatccattgggataaattgccagaagggtctaaaggtatccaagaagcattcgcacaagtaggacaaggattgtctcaaactcctgaaaaagttactactttccaacaaaacttggatatgttgattcctggattatcaggactactccttactttactttgcatgtacttacttaagaaaaaagtatctccaatcactattatccttgccctcttcgcagtgggtattgtggcacatgttcttcacatcatgtaactaat

SEQ ID NO: 1456 - DNA, 657 bp, Streptococcus pneumoniae
  misc_feature (1)..(657): tiling:Spneumo1:WAN024CAU; Cluster includes WAN0242FB SP11 39||15901005|NP_345609.1|1069213..1069863|+|651 bp|hypothe tical protein|S.pneumoniae|TIGR4|NC_003028.1|ORF|010
atgactgaaaacaaggatgataaattattaaaaatgatggagaaaggctttgttttatactcaaaaaatggtataattaagtatattgaaattccagagcatgggagtattaagctaaaagctcaagatgggcaattagtttataaggaagtgattatcgggaaagtgtatgcagagcaagaacttttaaaatataaaaaagagggcgaaaactattcccaaaatactgctcagctattgtatcagcaactagaaaaagagaaaaatgctgaactagcaaaccatgaatcaaaagaagagcctattacagcagatgatgcagctgaactaagtttattatctagtatcaaattaacagtggcagaaatgagagaatacctagaaaaatataaaaataaacctctagctcttagaaaattagaagatattatggataatgatactacccttgcttatatcgaaattgacatggagcaattcagccaacagcaacgccttgaaaagctagtacatttccttgatagaaaaattgattatttccacggtggtttacttattaacggagataagattgatttagtacagcatgaaatgattgttgagggcaattcagaggcaatggatgcagaattgcagaattatctagcactarctaat

SEQ ID NO: 1457 - DNA, 305 bp, Streptococcus pneumoniae
  misc_feature (1)..(305): tiling:Spneumo1:WAN024DCL; Cluster includes WAN02444C spr0 902||15902946|NP_358496.1|887626..888030|+|405 bp|Hypothet ical protein|S.pneumoniae|R6|NC_003098.1|ORF|112
atgactgaaacaaactcagttccrgcaggagtgattgtggtcagtctacttgccctcctaggcgtgattgccttctggctrattcgccrtaagaaagagtcagaaatccagcaattaagcacggaattraycaaggttytaggacagctagatgcagaaaaagcggataaaaaagtccttgccaaagcccaaaaccttctccaagaaacccttgatttcgtgaaagaagaaaatggctcagcagagacagaaactaaactagtagaggagcttaaagcaatccttgacaaactcaagtaactaat

SEQ ID NO: 1458 - DNA, 1050 bp, Streptococcus pneumoniae
  misc_feature (1)..(1050): tiling:Spneumo1:WAN024F8Z-5; Cluster includes WAN0244KG sp r0322|cpsN|15902366|NP_357916.1|321740..322789|+|1050 bp|d TDP-glucose-4,6-dehydratase|S.pneumoniae|R6|NC_003098.1|OR F|302
atgactgaatacaaaaatattatcgtgacaggtggagctggctttatcggttctaactttgtccattatgtttacgagaactttccagrtgttcaygtgacagtcctagataagttgacttatgcwggwaaycgygcsaatattgaggaarttttaggyaatcgtgttgagttagttrttggtgrcattgctgatgcggagttggtagacaagttggytrctcaagcagatgctatcgttcattatgcagcggaaagccacaatgataattcrctcaatgatccatcgccatttattcatactaacttcatyggaayctatactcttttagaagctgctcgtaagtaygatattcgcttccaccatgtatcgacagatgaagtttatggrgatctccctttacgmgaagatttgcyaggtcatggwgaargvccrggtgagaaatttackgctgaaacmaartacaayccwagctckccktactcatcaaccaaggcmgcmtcagayttgattgtcaaagcytgggtscgttcttttggagtyaargcaacgatttccaactgttcaaataactacggtccttaycarcatatygaraarttyatyccacgwcaratyacyaayatcytragyggwatyaagccaaaactttayggtgaaggtaaraaygttcgtgaytggatycataccaatgaccattcttcaggagtttggayaatcttgacaaaagggcaaatyggtgaaacctacttgattggggctgatggtgaraagaacaataaggaagttttggarcttatccttaaggaaatgggacaagctryggatgcctatgatcatgtgactgaccgtgcaggacatgaccttcgctatgcgattgatgcyagcaagctccgtgakgagttgggrtggaaacctgaatttacyaactttgaagctgggctcaaggcaacaatcaagtggtatacagataaccaagaatggtggaaagcagaraaagaagctgttgaagccaattatgctaaractcaggagattattacagtrtaa

SEQ ID NO: 1459 - DNA, 1709 bp, Streptococcus pneumoniae
  misc_feature (1)..(1709): tiling:Spneumo1:WAN024DWZ; Cluster includes WAN0243BQ spr1 935|ilvD|15903976|NP_359526.1|1916000..1917703|-|1704 bp|D ihydroxyacid dehydratase|S.pneumoniae|R6|NC_003098.1|ORF|2 21
atgactgaattagataaacgtcaccgcagtagcatytatgacagcatggttaaatcacctaaccgtgctatgcttcgtgcgactggtatgacagataaggactttgaaacatcgattgtgggagtgatttcgacttgggcggaaaatacaccatgtaacattcacttgcatgatttcgggaaactggctaaagaaggtgtcaaatctgcaggcgcttggcctgtacagtttggaaccattaccgtagcggacgggatcgctatgggaacgcctggtatgcgtttctctctaacatctcgtgacatcatcgcggactccatcgaggcggctatgagtggtcacaacgtggatgccttygtcgctatcggtggctgtgacaagaacatgcctggatctatgattgctattgctaatatggatatcccagctattttcgcctatggtggaactattgcaccgggaaatcttgatggtaaagatatcgacttggtttctgtctttgaaggtatcggaaaatggaaccacggtgacatgacagctgaggacgtgaaacgtcttgaatgtaatgcctgccctggccctggtggytgtggtggtatgtatactgctaataccatggcaactgctatcgaagttctagggatgagtttgccagggtcatcctctcacccagctgaatcagctgataagaaagaagatatcgaagcagcaggmcgtgctgttgttaagatgttggaacttggtctcaaaccatcagatatcttgactcgtgaagcctttgaagatgctatyactgtaacgatggctctcggtggttctacaaacgccactcttcacttgctcgccattgcccatgccgcaaatgttgacttgtcacttgaggacttcaatacgattcaagaacgtgtgcctcacttggccgacttgaaaccatctggtcagtatgtcttccaagacctctacgaagtcggtggtgtccctgcggttatgaagtayttgttggcaaatggtttccttcacggagatcgcatcacatgtactggtaagactgtagctgaaaacttggctgactttgcagacttgactccaggccaaamagttatcatgccacttgaaaatccaaaacgtgcggatggtccgcttatcatcttgaacgggaaccttgctcctgacggtgcagttgccaaggtatcaggtgttaaagtgcgtcgtcacgttggrccagctaaggtctttgactcagaagaagatgcgattcaggccgttctgacagatgaaatcgttgatggcgatgtagtcgttgttcgttttgttggacctaaaggtggtcctggtatgcctgagatgctrtcactttcttcaatgattgttggtaaaggtcagggagataaggtggccctcttgacggacggmcgtttctctggtggtacttatggtctggttgttggacatatcgctcctgaagctcaggatggtggaccaattgcctatctccgtaccggcgatatcgttacggttgaccaagataccaaagaaatttcyatggcygtatccgaagaagaacttgaaaaacgcaaggcagaaacaaccttgccaccactttacagccgtggtgtcctcggtaaatatgcccayatcgtatcatctgcttcacgcggagccgtgacagacttctggaatatggacaagtcaggtaaaaaataactaat

SEQ ID NO: 1460 - DNA, 429 bp, Streptococcus pneumoniae
  misc_feature (1)..(429): tiling:Spneumo1:WAN024EXD; Cluster includes WAN023KTC 3151 95_2909||||1551457..1551885|+|429 bp|EGAD orf prediction|S .pneumoniae|R6|NC_003098.1|ORF|110
atgactgagarctacacgtgggttgaggccgatagagccacccttagtcgctacaggcatgggcagggtcatctcaccgaccaattcttctctttcaaggtccagcgtccagcagctaagaccttgatagcgtccatctcgactggcaaaggcatgggccccagcttcgatggcacgccagtcattaccagtggcaatcaaaatcgcatcaataccattaaaaattcctttattatgagtagcagctcggtaaggatcagcctgcgcaaactgactagccaacgcaattttctccgcaatctctcgtccttgatccttttggcggctcaagtagcgaaaggcgatgcgacagcttgcagtcaccagagaatcrgtcgcgtagttggacaggattcccatgagactctgtccctgactgagttcttctaa

SEQ ID NO: 1461 - DNA, 366 bp, Streptococcus pneumoniae
  misc_feature (1)..(366): tiling:Spneumo1:WAN024GCX; Cluster includes WAN023LRY 3146 94_1276||||676215..676580|-|366 bp|EGAD orf prediction|S.p neumoniae|R6|NC_003098.1|ORF|110
atgactgagtgcaattggcaatggcataagctcttctgtttcatctactgcaaatccaaacatgagcccttggtcacctgctccaatcaagtccagtggatcttgatcagcatttccrcgaacctccaaggcttcgttaacaccttgagcgatgtcaggagattgttccaccaaagatgggtgtactcccaccgtctcagcagaaaatccatattctgtattggtataaccaatctctgcaatggtatcacgaaccacacggttaatatccacataggcatttgtagaaatttcaccaaaaacgtggacagaaccagtatatacagctgtttcagcagcaacgtgcgcctctggatcctttgctaa

SEQ ID NO: 1462 - DNA, 576 bp, Streptococcus pneumoniae
  misc_feature (1)..(576): tiling:Spneumo1:WAN024F4B; Cluster includes WAN0244JL spr0 353|IS861-truncation|15902397|NP_357947.1|352538..352891|- |354 bp|Degenerate transposase (orf2)|S.pneumoniae|R6|NC_0 03098.1|ORF|210
atgactgagttttcgttagatcttcttctagaagccattaaactagctcgttggacctactactatcacttgaaacagctagacaaaacagataaagaccaagagcttaaaactgaaattcaatccatctttatcgaacacaagggaaattatgcttatcgccgggttcatttagaactaagaaatcgtggttatctggtaaatcataaaagagttcaaggcttgatraaagtactcaatttacaagctaaaatgcgamagaaacgaaaatattcttctcataaaggagacgttggyaagaaggcagagaatctcattcaagsccaatttgaaggctctaaaacaatggaaaagtgctacacagatgtgacwgaatttgccattccagcaagtactcaaaagctttacttatcaccagttttagatggctttaacagygaaattatygcytwtaatctttcwwsttcrccyaayttagaayaagtacaaacaatgttggaacaggcattcacagagaarcactatggtggagtccttctttgggattctgaaatcggaaatgttttatggctatga

SEQ ID NO: 1463 - DNA, 734 bp, Streptococcus pneumoniae
  misc_feature (1)..(734): tiling:Spneumo1:WAN024B2N; Cluster includes WAN0244FM spr0 496|IS861-truncation|15902540|NP_358090.1|496468..496857|- |390 bp|Degenerate transposase (orf2)|S.pneumoniae|R6|NC_0 03098.1|ORF|400
atgactgagttttcgttagatmttcttctaaaagccattaaactagctcgttcgacctactactatcacttgaaacagctagayaaamcagataaggaccaagagcttaaagctgaaattcaatccatytttatcgaacacaagggaaattatgcttatcgycgrrttyatttagaactaagaaatcgtgsttatctggtaaatcataaaagagttcaasrcttgatgaagtactcaatttacaagctaaaaygygacagaaacgaaaatattcttctcataaaggagacgttggyaagaargcagagaatctcattcaaggccaatttgaaggctctaaaacaatggaamagtgctacacagatrtgacagaatttgccattccagcaagtactcaaaagctttacttatcaccagttttagatggctttaacagcgaaattatcgcctataatctttcaacttcacccaacttagaacaagtrmaraswatgttrgaacaggcmttyacagagaartactaygagaatacgattctccatagtgaycaaggctggcaatatcaacacgattcttatcatcggttcttagagagtaagggaattcaagcatccatgtcacgcaagggaaacagccaagacaacggtatgatggagtccttctttgggattctgaaatttatggctatgagaaaacatttaaatcacttaatcaattggaacaagctattgtag

SEQ ID NO: 1464 - DNA, 840 bp, Streptococcus pneumoniae
  misc_feature (1)..(840): tiling:Spneumo1:WAN024B2R; Cluster includes WAN0244JK spr0 354|IS861-truncation|15902398|NP_357948.1|353009..353113|- |105 bp|Degenerate transposase (orf2)|S.pneumoniae|R6|NC_0 03098.1|ORF|362
atgactgagttttcgttagatmttcttytaraagycattaaactagctcgttbgacctactactatcacttgaaacagctagayaaamcagataaggaccaakagcttaaagctgaaattcaatccatytttatcgaacacaarggarattatgsttatcgyygdrttyatttagaactaagaaatcgtgsttatctggtaaatyataaaagarttcaaggcttgatraaagtactcaatttacaagctaraaygcgacagaaacgaaaatawtcttctcataaaggagacgttggyaagaargcagagaatctcattcaaggmcaatttgaaggctctaaaacaatggaamagtgctacacagatgtgacwgaatttgccattccagyaagtactyaaaarctttacttatcaccagttttagatggytttaayagygaaattatygcytwtaatctttcwwsttcrccyaayttagaayaagtacaaacaatgttggaacaggcattcamagagaagcactacgagaatacgattctccatagtgaccaaggctggcaataycaacacgattcttatcatcgsttcctagagagtaagggaattcaagcatcyatgtcacgyaarggmaacagccaagacaacggtakgatggaatctttctttggcattttaaaatccgaaatgttttatggctatgagmaaacatttaaatcacttaaycaattggaayragcyattrtagactatattgattaytacaacaayaarmraattaagrtaaaactaaaaggacttagyyctgtgcartacagaactaaatccttyggactaactaat

SEQ ID NO: 1465 - DNA, 629 bp, Streptococcus pneumoniae
  misc_feature (1)..(629): tiling:Spneumo1:WAN024DGH; Cluster includes WAN0244D0 spr0 590||15902634|NP_358184.1|604493..605116|+|624 bp|Hypothet ical protein|S.pneumoniae|R6|NC_003098.1|ORF|111
atgactgatattaaaactttggctctaaagtatggaggttatacaagtctggacaaggtctatctggatcagcttctagctggtaaaacagakcaggagcagttaacacttattacacctccgccaagtgttgttaatgcctactttgcagaactctatcagaaaaagagtcctcaggctgcgacggattattttgcagaactcagtcaggaactgaatctttacaatactgagccaagtttcacyctagaaaataagccttttattcggcttaatctgtctggtaaatcctttggtttttgttatgagagtgacggccttggtcggattttctytgaaaatgaggagaaaatctcggatgacttgctctttgaaattgcgcaaattttcccccatcaattagtctttgaagagtctggtaagatttacatgaagcytgtcgaggacgaggaagttrtcagcctagaaagtctcacagctttgactgatttggaaagattggctgatggtcgaaaacgtctcaaaggctacagccaagaggatttattgcaagaagctgctgctttttctggcaaacgctatttccgatcggaaaaccgcacagccatgttatatattgattaactaat

SEQ ID NO: 1466 - DNA, 321 bp, Streptococcus pneumoniae
  misc_feature (1)..(321): tiling:Spneumo1:WAN024GCP; Cluster includes WAN023LRS 3143 21_1285||||681157..681477|-|321 bp|EGAD orf prediction|S.p neumoniae|R6|NC_003098.1|ORF|110
atgactgcacacgtttacggtagagccattcccagatttgatctgcacggaatttcttttctccctgctccaatacccattcctgcatggtttgatgtrccaaactatgaattgagggtttcatttcttctccttattctctactcacttctgacgaatgacaaaatgacgttgttccttgtcctctttctgagaatgctggtctttctgacgacgtctatttttcttatctgcattcgactttcgtttagtttgagtcggtttctttccttttctagaaggtgtttcttcttccgtcttacgcattttcttgtcaaatga

SEQ ID NO: 1467 - DNA, 704 bp, Streptococcus pneumoniae
  misc_feature (1)..(704): tiling:Spneumo1:WAN024DXU; Cluster includes WAN0243CI spr1 907|dapD|15903948|NP_359498.1|1884132..1884830|-|699 bp|2, 3,4,5-tetrahydropyridine-2-carboxylate N-succinyltransfera se-related protein|S.pneumoniae|R6|NC_003098.1|ORF|112
atgactgctacaaaaatgaacgctcaagaaattatccaatttatcgccaatgctgaaaagaaaaccagtgtcaaagtaacctttgaggggcaactcgcaactgctgtgcctagctctgttgtcaaactaggaaatgtcctattcggagactggaaggaygtggctccgcttcttgaaggtttggtagaaaatcaagattatgttgtcgagcaagatgctcgtaattctgcagttcctttgctagataagcgtgctatcaacgctcgtatcgagccaggtgckattatccgtgaccaggtggaaattggtgacaatgctgttatcatgatgggakctgttatcaatatcggtgctgaaatcggtgctggaaccatgattgacatgggtgccatccttggtggccgtgcyatcgttggaaaaaatagccacgttggtgcaggtgcagttttggcaggtgtgattgagccagctagtgctgaaccagtccgtgtcggagacaatgttctyatcggkgctaatgcagtggttatcgaaggagtccaaatcggtagtggttcagttgtcgcwgcaggagctatygttacccaagatgtcccagaaaacgtggtagtagcaggtgttccagctcgtatyatcaaagaaattgatgcycaaacycaacaaaaaacagcgctagaggatgcgcttcgtaccttgtaactaat

SEQ ID NO: 1468 - DNA, 203 bp, Streptococcus pneumoniae
  misc_feature (1)..(203): tiling:Spneumo1:WAN024G9S; Cluster includes WAN024417 spr1 015||15903059|NP_358609.1|995115..995285|-|171 bp|Hypothet ical protein|S.pneumoniae|R6|NC_003098.1|ORF|121
atgactgctttccaacaactyccatytagtgtgcttcagactgggctatttttctctccatctgttagcttggattctcagaccgtttcagctaaagaatatcttttcccttatcagaaggaacggctcaarccaytcagacaagtgaagggacgacaagccaatattykaaacyagatagcagtttttatagtcaattgaaa

SEQ ID NO: 1469 - DNA, 912 bp, Streptococcus pneumoniae
  misc_feature (1)..(912): tiling:Spneumo1:WAN024G9P; Cluster includes WAN024471 spr0 805||15902849|NP_358399.1|807033..807938|-|906 bp|Conserve d hypothetical protein|S.pneumoniae|R6|NC_003098.1|ORF|221
atgactgcttttcaacaactcccatctagtgtacttcaaactggagccatttttctctccattatcattgaagcccttcccttcgttctgataggaagyattgtctcagggctgattgaagtttatatcacacctgacaaggtttatcattttctccctcgaaatcgttgggggagaatcttttttgggaccttygtcggtatryttttcccttcytgtgaatgtggaatcgtccccatcatcaatcgttttctggaaaaaaaggttccaagttacackrmcgttccttttcttgtgacagcacctgttatcaatcccattgttctttttgcgacctattctgcctttggcaactccttccatgtcgccctattacgagctctgggttccatysttgtggctgtaatactaggaatttttctaggatttttctggcaagaaccgattcaraaagaaaatcgtctrgcytgtcatgagcatgatttttctyacttragtyctgcaaaaaaagtttttcargtctttgtgcargccattgatgarttttttgatacgggrcgttatttggtatttggctgyctctttgcytctrtwatacaggtytaygttccgactcggattctgacctctatcagtgcgacycctctttttgcyatcctgctcttgatgmttttrgcctttcttctttcgctctgtagtgaggcggatgcctttatmggkgcttctctwctctcgagtttcggtttggcwccagttctggcytttctcgtcattggyccaatgctggatatcaaaaatattctyatgatgaaaaattacttgaaagcacgatttatyagtcacttcatwacrattgtractctkgtcgtyttagyctattctctcttgattggagtyatcctaykaactaat

SEQ ID NO: 1470 - DNA, 824 bp, Streptococcus pneumoniae
  misc_feature (1)..(824): tiling:Spneumo1:WAN024C5R; Cluster includes WAN0244L7 spr0 295|PTS-EII|15902339|NP_357889.1|295819..296637|+|819 bp|P hosphotransferase system sugar-specific EII component|S.pn eumoniae|R6|NC_003098.1|ORF|111
atgactggatctaacaaattaacaaaacgtgattatcttaaaacgtctttgcgggcattcttttgtcaaaatggatttaactatagtaactatcaagggttgggatatgccaatgtgatgtatcctgctttgaaaaaacactatggagaggatcaggaaggtttctaccaagccttggaagaaaactgtgaattytataataccaacccacacttcctgccttttattaccagcttgcaycttgtaatgttggaaaatggccgwccrrcaaaagaaacacgtagyatcaagatggccttgatgggaccattggcaggtattggggattctctttctcaattctgtttagctccattgttctcaaccatcgcagcttcgtttgctcaagaaggcttggttgtcggtccaatcttgttcttccttgcgatgaatacgattttaacagcgattaaattgtcaactggtctgtatggatacaaactaggaacaactgtgattgataaactaagcgaacagatggcaacgatttctcgtattgccaatattatcggtgtaaccgtaattgctggtttggcagcgacatctgttaagattatggtgccgattacctttgctgcaggggaagttaaagcagacgctaaacaaagtatcgtaagtattcagggaatgcttgataaggttgctccagctcttctaccagccctatttacacttttagtttactacttgatcaaagaaaagaaatggacaacatataaactcgttattttaacagttatcatcggaattatcggaagctggcttaagattatagcttaactaat

SEQ ID NO: 1471 - DNA, 234 bp, Streptococcus pneumoniae
  misc_feature (1)..(234): tiling:Spneumo1:WAN024FLR; Cluster includes WAN023L2M 3149 08_2517||||1340582..1340815|+|234 bp|EGAD orf prediction|S .pneumoniae|R6|NC_003098.1|ORF|110
atgactggcaacatcacaactgctaaaaagtctaaaacaggtgaaaatagaaaactaatcttacttaaaataaaaagattcagtcccaataataaggttactaaaaataccgtaattgccttgttatctaaaaaccacttgaaaaaccaagataggctaaaatgtttctctttttgctccataaatacttcctttctattgttctctcattataccatttttgaaacaaaataa

SEQ ID NO: 1472 - DNA, 510 bp, Streptococcus pneumoniae
  misc_feature (1)..(510): tiling:Spneumo1:WAN024FQF; Cluster includes WAN023PPV pne1 9_15||||10041..10550|+|510 bp|Type 10C capsule operon, Gli mmer 2.02 orf prediction|S.pneumoniae||WAN01UCJ7|ORF|000
atgactgggttatccccatcagaaattgaaaagttcttagatgctcttgaaactgttgatgtggatatggtgattacagattttacagagcagcatgtcaataacgatactacagtacgaartgactttattgacaagtatgaaattkgtagaatctataaggggattcctgatgtaagrattcccatgcattcagttacatataaaacatctatcttgtcggcgaataaaattcgtttaagtgaaaaaacattttatgttgacattcagtacacactctttcctttggagtatgttcatagtttcagttattggaattatgatatttatcaatactacataggtagaccagagcaaagtatgaatattgagagtatgaagcgaaatgtaagtcatcatctaaaggtaacgaattctgtactagattatttttcaaaaattgaaaatgaacccgttttaaaccgagtagtttctgaaaccttagtttatctcatcagtttgcaggttgtc

SEQ ID NO: 1473 - DNA, 371 bp, Streptococcus pneumoniae
  misc_feature (1)..(371): tiling:Spneumo1:WAN024DIK; Cluster includes WAN0244IB spr0 399|asp23|15902443|NP_357993.1|395121..395486|+|366 bp|Alk aline shock protein|S.pneumoniae|R6|NC_003098.1|ORF|111
atgactgtaaaaattwatacaaaagatggtcaaatmgaactaacagatgaagtgattgcaaccgtcgtaggtggagcagcaactgagatttttggtgtggtcggtatggctagtaaaaatgccctcaaagataatttccaagccctgctaggtaaggaaaattattctaaagrtgtcgtcgtaaaggcagccgaagatggcagtattgcagttgatgtatataccgtgttaagctacggaacaaagattagtgaagtgtcaaaaaacattcaagagcgtgttgcctttagcttggaaaaccagcttggaattactgctcagactgtaaatgtctacattcaaaatatcaaagttgtaggagaataactaat

SEQ ID NO: 1474 - DNA, 1242 bp, Streptococcus pneumoniae
  misc_feature (1)..(1242): tiling:Spneumo1:WAN024FLQ; Cluster includes WAN023OW1 pne6 9_14||||10187..11428|+|1242 bp|Type 31(1) capsule operon, Glimmer 2.02 orf prediction|S.pneumoniae||WAN01UCDA|ORF|00 0
atgactmtcaaaaaygaarttaaamaywtaaaacgaamaatagawaaaaatttttttcawaargatttyacwtcyatmtctgatattaagaaytatcagattgmamyttctwwgaatcywagrccacgtcttaatttattaattacttcaatgaaytctcaggatgtatatgctggcatcaaatcagcmgtggatttttttatgaagttcaaaaaatttgatatagatttaagaatcattgtaatgggraaaaaaatcgatgaaycgtctctttatcaagttcctggttttgaatttattaaagactattcaattgakaatgatagtgagtctaggattatttgcgatttatctaagaatcgttctccattrtttattagggagcgtgattattttctatcaacaatgtggtacacygcttataatgctaacaatgtgytggatgagcaaaaaagaatttttgggaaacggatgcccatggtttatctagttcaagactatgaaccaggtttctatccatggtcctcagagtatcttttggctgagagcacatatcatctagataaccagcttgttgtctttaattctaagtatttaaaagaattttttgatgcaaatggttatagatttgaaaatagttattattttgatccagttttaaatgaaaaattgggggagattcttaattyagcagagctttctaatattgaaaggaaaaatcgtattttattttatggaaggcctagtaaagctagaaatgcttttcagttaatctgtatggcattggaaaaatggagcsttttrgacgaacrtagttcaaattgggaaattttttctgcaggagaagatttaaaagatattaaattgaataatarcatagtaataaaatcgttagggaagatgtcagttgaagaatacgcaaaatttatgttggaatctaaaatcggaatctctctaatggcytcaccgcatcckagctatcctccgttagaaatggctacrtttggtatgaaagtcataacgaattctttcgttacaaaagatatttctgattttaatgaaaacataatttctattgaacatattaatattaataaattrgcgraagaattacattttttaacaacatctgatatagaatataaaatttcgaaaaacgatgattatataaatggtattagccagcttgatacaattgtagatraaattgsrggacatttacaatttcrgcatagcgaggtg

SEQ ID NO: 1475 - DNA, 633 bp, Streptococcus pneumoniae
  misc_feature (1)..(633): tiling:Spneumo1:WAN024CEB; Cluster includes WAN023RV8 cont ig_1609_72||||59193..59813|-|621 bp|Glimmer 2.02 orf predi ction|S.pneumoniae|670|WAN01UDCD|ORF|000
atgacttatactttggaatggctaaagacttttgatggagagattgatattctcaatrttaagatgrattgcttggccaatactattgagaaaaatgtttctcagtacaaatatatttatcagacaaatatggagaactgtcctgaaattattctatcagtcccaaaytcctccattcctcatctwttaggattatctagagaacatcatgttaatttaccaactaataatgcagggagtatttttgaaggattaaaagatgattggacattggaamgyctkaataaagctgataatggttggttcaacgaaaataaattcaaaatagttggaaccttgttgctttatcaaatgttacatgtaatggagtgtaaattctatacaactgatggcattttgaatagaaragtyggtmgccgatttaraagagatmatatttattttgtagtctttaaattaagtaatggtatyagttatacagtagaaytatcacrtgaamaaggtaatcaatactttccaagaagccttaaaatcaatgatacctccgttacagattgtagagaaatagakcttagactcattaataagattmgatttaarccagttaagrcaagaaaggtraaatggscatca

SEQ ID NO: 1476 - DNA, 1230 bp, Streptococcus pneumoniae
  misc_feature (1)..(1230): tiling:Spneumo1:WAN024DCC; Cluster includes WAN024441 spr0 913|pepT|15902957|NP_358507.1|900731..901951|-|1221 bp|Ami notripeptidase; tripeptidase|S.pneumoniae|R6|NC_003098.1|O RF|111
atgacttatccaaatctcttggaccgcttcttaacctaygttaaggtcaacacgcgctctgatgaacactctactactactccaagtacacagagtcaggttgacttcgcaacaaatgtcctaattcctgaaatgaaacgtgttggactgcaaaatgtttactatctaccgaatggttttgctattggaaccttgccagccaacgatccgtctttaacacgtaagattggttttatatcgcacatggatactgctgattttaatgctgaaggagtcaatccacaggtaattgaaaactacgatggtkgtgtgattgaactagggaattctggtttcaaactcgatccagcygacttcaagagtcttgaaaaatatccaggacaaacgctcatcacaacagatggaacaascttrctaggtgctgatgacaagtcaggaattgctgaaattatgacagccattgaatatctaactgctcatcctgaaattaagcactgtgagattcgtgttggttttggtccagatgaagaaatcggtgttggtgccaataaatttgatgcagaagattttgatgtggattttgcctacactgttgatggtggtccactargtgaacttcagtacgagactttctcagccgctggtgctgaattgcatttccaaggycgtaatgtccaccctggtactgccaaagrgcagatggtcaatgcccttcagctagcaattgattttcataatcaacttccaraaaatgaccgacctgagttaactgaaggttaccaaggtttttaccatctaatggatgtgacaggtagtgttgaggaggygcgtgcaagctacatcattcgtgattttgaaaaagatgcctttgaagcgcgtaaagcatccatgcaatctatcgctgataagatgaatgmagaacttgggagcdaccgtgtcactctcaacttgacagaccagtactacaatatgaaagaagtcattgaaaaagatatgactccaattaccattgctaaarccgttatggaagatctaggtatcacgcctattatcgaaccaatccgrggtggaacagacggctctaagatttcctttatgggaatcccaactccgaatatctttgcaggtggcgaaaatatgcacggacgttttgaatacgttagccttcagactatggaacgtgcagttgataccatcattggcatcgtagcttataaaggcctaactaat

SEQ ID NO: 1477 - DNA, 797 bp, Streptococcus pneumoniae
  misc_feature (1)..(797): tiling:Spneumo1:WAN024DFT; Cluster includes WAN0244BO spr0 638|thiD|15902682|NP_358232.1|645051..645842|-|792 bp|Phos phomethylpyrimidine kinase|S.pneumoniae|R6|NC_003098.1|ORF |111
atgacttatttacccgttgctttgaccattgcagggactgaccctagtggtggtgctggcattatggcagatttaaagtcattccaagcgagagatgtctatggaatggctgttgtaaccagtcttgtcgctcaaaataccagaggtgttcagctaatcgagcacgtttctcctcaaatgttgaaagcccaattggagagtrtcttttctgatattccacctcaggctgtaaaaactggaatgttggctactactgaaatcatggaaatcatccamccctatcttaaaaaactggattgtccctatgtccttgatcctgttatggttgctacaagtggagatgccttgattgrctcaartgctagagactatctcaaaacaaacttactacctctagcaactattattacgccaaatcttcctgaagcagaagagattgttggtttttcaatccatgaccccgaagacatgcagcgtgctggtcgcctgattttaaaagaatttggtcctcagtctgtggttatcaaaggcggacatctcaaaggyggtgctaaagatttcctctttaccaagaatgaacaatttgtctgggaaagcccacgaattcaaacctgtcacacccatggtactggatgtacctttgctgcagtgattactgctgaactagccaagggcaagagtctttaccaggcagttgataaggccaaggcctttatcacaaaagctattcaagatgcccctcaactcggtcatggttctggtccagtcaaccatacaacttttaaagattaactaat

SEQ ID NO: 1478 - DNA, 282 bp, Streptococcus pneumoniae
  misc_feature (1)..(282): tiling:Spneumo1:WAN024EZ7; Cluster includes WAN023LKC 3144 98_1712||||910456..910737|-|282 bp|EGAD orf prediction|S.p neumoniae|R6|NC_003098.1|ORF|110
atgacttcaaagcgccaaccttgggcttccgcatacttttggtacatagttagcaaatctccagcgaaaagtgccgcttcgtctccaccagctgctccacggatttcaaggatgatattcttgtcatcgtttggatcctttggaaggagcaaaattttcagtttttcttcatattcttctttttcagccttggcatctttgagttcttgcttggccawttcttccaagtccgcatctccgcctgattccttaatcatctcttcggcatcgacgatattttga

SEQ ID NO: 1479 - DNA, 992 bp, Streptococcus pneumoniae
  misc_feature (1)..(992): tiling:Spneumo1:WAN024DAA; Cluster includes WAN0243YV spr1 100|ldh|15903143|NP_358693.1|1098125..1099111|+|987 bp|L-l actate dehydrogenase|S.pneumoniae|R6|NC_003098.1|ORF|111
atgacttcaactaaacaacacaaaaaagttatccttgtcggtgatggtgctgtaggttcatcttacgcttttgcacttgttaaccaaggaattgcacaagagcttggaattatcgaaattccacaattgcatgaaaaagctgttggtgatgcgcttgaccttagtcacgcccttgccttcacttcacctaaaaaaatctatgcagctcaatactctgactgtgcagacgctgaccttgttgtratcactgcaggtgcwcctcaaaaaccaggtgaaactcgtcttgaccttgtaggtaaaaaccttgctatcaacaratcaatcgtaactcaagttgttgaatcwggtttcaaaggtatcttccttgttgctgctaayccagttgacgttttgacttactcaacttggaaattctctggtttccctaaagaacgcgttatcggttcaggtacttcwctwgactcagctcgtttccgtcaagcacttgctgaaaaattggaygtrgatgctcgttcagtbcacgcctayatcatgggtgaacacggtgactctgagttcgctgtttggtcrcacgcwaacatcgctggtgtaaaycttgaagaattycttaaagayactcaaaatgttcaagaagctgaattgattgaattgttcgaaggtgttcgtgatgcagcctacacaatcatcaayaaaaaaggtgcaacatactacggtatcgcwgtagcccttgctcgtatcactaaagcaatccttgacgatgaaaaygcagtacttccactttcagtattccaagaaggtcaatacggagttgagaaygtctttatcggtcaaccagctgttgttggtgcacatggtatygttcgtccagtaaayatyccattgaacgaygcagaaactcaaaaaatgcaagcatctgctaaagaattrcaagctatyattgacgaagcatggaaaaayccagaattccaagaagcttctaaaaactaactaat

SEQ ID NO: 1480 - DNA, 318 bp, Streptococcus pneumoniae
  misc_feature (1)..(318): tiling:Spneumo1:WAN024FE6; Cluster includes WAN023KSI 3151 98_2952||||1572469..1572786|+|318 bp|EGAD orf prediction|S .pneumoniae|R6|NC_003098.1|ORF|110
atgacttccttaatggcatrtttattttgtgctgaagttaggaccacatcgactggacgaagaccttcttcatgggcacgtttcatgagccactggctaatcttaccagacttaactgacttaggaaggatatcttttttatttcctaccaagaggacatcattgcccgagacgaaacgtggtaaacctgggatgacagatccattaaaatcaaagatatcaatracattgaccactaaagcatcactgtctcccacctcgtgcaagagcttgaggaaatcatcgtycgtcaactggacatctgtgatttcattgtag

SEQ ID NO: 1481 - DNA, 327 bp, Streptococcus pneumoniae
  misc_feature (1)..(327): tiling:Spneumo1:WAN024C8M; Cluster includes WAN023M8S 3153 63_399||||205266..205592|-|327 bp|EGAD orf prediction|S.pn eumoniae|R6|NC_003098.1|ORF|110
atgacttctactgaaccacctttagcagtgatagcttcttcagctgatttagagaatttagctgctttcacagtcaatttcttagtcaactcaccgttaccaagaattttaatacctgacttttcagctttaacaattcctgcttcgataagaacaactggagttacttcagcaccatcttcaaagacgttcaattggtcaaggttcacaattgcgtattctttagcgttgatgttagtgaatccacgttttggaagacgacggaacaatggagtttgtccaccttcaaaaccaaggcgaactccgccaccgctacgagctttttga

SEQ ID NO: 1482 - DNA, 416 bp, Streptococcus pneumoniae
  misc_feature (1)..(416): tiling:Spneumo1:WAN024FAP; Cluster includes WAN023KNT 3152 09_3162||||1684771..1685019|+|249 bp|EGAD orf prediction|S .pneumoniae|R6|NC_003098.1|ORF|220
atgacttctggacgggtcatatattccacaaaggcattggcttcttttggatgtttggtggtggctgagatagaccatgccaagtctcccgcaccaacggttaagctttgtcctttttcttttcctggaatcatgaaggtcccaatcttaaagttcggtttttgttcattaatcgctgtgatcgcccaagacccatttggtgtcatgaggacatccccacgtgcgaaggctccgataacatcggtatagccagcaccttcccagttcttttgcttagakccattgatgcgaaggatgtccatgaccttgatatcatctttcataatcggatccgacaatttaatggcatttggttgagaataacgaaggtattgatttgcttcttttcctccacctgttgctgtcgcaaaggctaa

SEQ ID NO: 1483 - DNA, 300 bp, Streptococcus pneumoniae
  misc_feature (1)..(300): tiling:Spneumo1:WAN024B68; Cluster includes WAN023M6Q 3131 93_504a||||259073..259372|-|300 bp|EGAD orf prediction|S.p neumoniae|R6|NC_003098.1|ORF|110
atgacttgctccaagaaccagtttgatttctcatacttatcccagaagaaagtgtgggcttgtgacaactcaaagttctccaatttgtattgcgagatgagtttgtggcggaaggtgttgagagccgcaaacatccagcaacgaccagacgctttctggttagtgaccttgtccttggttaaatccaatgagaaaacaggtgtgttgtctacatggctttggcgacgttccagagctgcaaaaattccgttgtggctggcagcattttcaatcgcttggtattttacatttgcttcatag

SEQ ID NO: 1484 - DNA, 851 bp, Streptococcus pneumoniae
  misc_feature (1)..(851): tiling:Spneumo1:WAN024DFL; Cluster includes WAN0244BA spr0 652||15902696|NP_358246.1|658531..659376|-|846 bp|Conserve d hypothetical protein|S.pneumoniae|R6|NC_003098.1|ORF|111
atgacttggaarattattgctgactctggttgtgattatcgtcaactgccaacaccagctattaacacaacctttgtaagygtccccttaaccattcaagtagctgatcaggtctttgttgatgacgccagtctcgatattgaccaaatgatggaaaccatgtatgcaactgcagaagcttcaaaatcrgcttgtccaagcccagatgactatttgcgagcatttgaaggtgccaaaaacattttcctagtaaccatcacaggtaccctttctggcagtcacaatagtgctcaactagcaaagaatatttatctggaagaccatcctgacactaagattcatgtgattgatagtttatctgctggtggtgaagttgacctactcgtagaaaaattgaatgacttgattgaccagggcttgtcttttgaagaagtggttgaagctatcaccgcctatcaagaaaaaactaagttgctctttgtcctagccaaagtcgataacttggtgaagaacggccgtttgagcaagcttatcggtacggtcgttggccttctcaacattcgtatggtcggaaaagctagtgaaactggractctcgaattgctacaaaaagcaaggggatcaaagaaatcagttcaagctgcctatgatgagttagtaaaagctggatatgctggtggccgtattgtcatggcccaacgcaataacgaaaaatgttgtcaacarctctcagagcgaatccgtgaaaccttcccacaagcggatattaaaattctaccaacctctggtctctgcagtttctatgcagaagakggcggtttgctgatgggctatgaaattgattaactaat

SEQ ID NO: 1485 - DNA, 285 bp, Streptococcus pneumoniae
  misc_feature (1)..(285): tiling:Spneumo1:WAN024FD5; Cluster includes WAN023KR3 3152 00_3023||||1608688..1608972|+|285 bp|EGAD orf prediction|S .pneumoniae|R6|NC_003098.1|ORF|110
atgacttgggcaatggctgtgcgttcttcaggtgtttcccccttcatcttaagagctaagaggagagaagcaatctgcgcttcagttacacgcccagttacgatacgctcaatgacatccgtcatttccacacctgataaattttcaaattttgctagtttttcaataatctctttcatcctagtttcctcactttacaacctcctcgataaaattccgaatagaagacaagccgtctggcgttccaatgctctctggatggtactggaagccataaatcggtag

SEQ ID NO: 1486 - DNA, 237 bp, Streptococcus pneumoniae
  misc_feature (1)..(237): tiling:Spneumo1:WAN024G6O; Cluster includes WAN023LJF 3144 95_1787a||||961495..961731|-|237 bp|EGAD orf prediction|S. pneumoniae|R6|NC_003098.1|ORF|110
atgacttgtcctgcttctttgagaacagactcaggaatagtaatacctagttcttgtgctatttttttattgatgactgacttaccarttgaaaagacattgactggggtatcggctggttttgcacctttcaagacttgcacaatcattttacctgttgccacaccaaggtcatgttggtcaattacaactgatgccaaaccacctacttctaccatagctgtcgcactgggataa

SEQ ID NO: 1487 - DNA, 653 bp, Streptococcus pneumoniae
  misc_feature (1)..(653): tiling:Spneumo1:WAN024DH8; Cluster includes WAN0244ET spr0 525|vex2|15902569|NP_358119.1|524940..525587|+|648 bp|ABC transporter ATP-binding protein - Pep export|S.pneumoniae| R6|NC_003098.1|ORF|111
atgactttattacaattacaagatgttacctaccgttataagaatactgctgaagcagtcctatatcagatcrattataattttgaacccggaaaattttacagtattattggggartcaggagcaggaaaatccacactcttgtccctacttgctggtctagatagtcctgttgaaggttctatcctttttcaaggagaggatattcgtaagaagggctattcttaccatcgcatgcaccatatttccctggtctttcaaaattataacttgatagattatctttctccgctggaaaatatccrmttggtcaacaaaaaggcaagcaagratacacttcttgagcttggtttggatgaaagycagatcaagcggaatgttctccagttatcaggtggtcaacagcaacgtgttgccattgctcgcagtttggtctcagaagctccagttattctagctgatgagccaacaggaaatctggatcctaaaactgctggagatattgtcgaactactcaaatcacttgcccagaaaacaggtaaatgtgtgattgtcgtaactcacagtaaagaagtggcacaagcgtcagatattacacttgaattaaaggataagaaactgactgaaacgcgcaatactagtaaataactaat

SEQ ID NO: 1488 - DNA, 731 bp, Streptococcus pneumoniae
  misc_feature (1)..(731): tiling:Spneumo1:WAN024GMM; Cluster includes WAN023M1T 3149 64_781||||405221..405580|+|360 bp|EGAD orf prediction|S.pn eumoniae|R6|NC_003098.1|ORF|220
atgactttgttttcagagagaggagcagtacggaagacaccaatggcaagtccaataatgagacctatgatggttccgacgatagagattaaaagagtgataccagcaccacgcaagagttgttgccagttttcagaaagaattttagcaacttggctaaagaaactactgctagtctcttcagttgttgtagcttcggcaggttgttccttgatcatacgatccatcaaggcaacttggtcatcttttgaaatggtttcaatgctggcattgatttggctaatacgattgtcatttttacgaagcccgatagcgatagctgtatcttcttccccagttttgaaaccaggttctacttgaatcatcttgaacttagagttcgcagcttcagcagtcagtgcttctggacgttcagaaacataagcatcaatgacaccagcctcaagagcttgtcgcatttgagcgaagtctcccatggctgtttcttttttagcacctgggatttgtgcaatcaagttataaaggtagaccccttgttgagaagtgatttttgcaccgttaaagtcatccaaagatttagcacttgcgtaggcagaatcttttttgacaagcaaaactggttcgctagtatagtaactgctcgaaaaggcaatttcttgtttgcgttctgcagttggactcatacctgcgataatcatgtcaatcttaccagaagtaagggcagggactag

SEQ ID NO: 1489 - DNA, 905 bp, Streptococcus pneumoniae
  misc_feature (1)..(905): tiling:Spneumo1:WAN024G8I; Cluster includes WAN024457 spr0 871|era|15902915|NP_358465.1|863847..864746|+|900 bp|GTPas e/GTP-binding protein|S.pneumoniae|R6|NC_003098.1|ORF|111
atgacttttaaatcaggctttgtagccattttaggacgtcccaatgttgggaagtcaacctttttaaatcacgttatggggcaaaarattgccatcatgaktgacaaggcgcaracaacgcgcaataaaatcatgggaatttacacgactgataaggagcaaattgtctttatcgacacaccagggattcacaarcctaaaacagctctcggagatttcatggttgagtctgcctacagtacccttcgcgaagtggacacygttcttttcatggtgcctgctgatgaagcgcgtggtaagggggacgatatgattatcgagcgtctcaaggctgccaaggttcctgtgattttggtggtgaataaaatcgataaggtccatccagaccagctcttgtctcagattgatgacttccgtaatcaaatggactttaasgaaattgttccaatmtcagcccttcagggaaataacgtgtctcgtctagtggatattttgagtgaaaatctggatgaaggtttccaatatttcccgtctgatcaaatcacagaycatccagaacgtttcttrgtttcagaaatggttcgcgagaaagtcttgcayctaactcgtgaagagattccgcattctgtagcagtagttgttgactctatgaaacgagacgaagagacagacaaggttcacatccgtgcaaccatcatggtcgagcgcgatagccaaaaagggattatcatcggtaaaggtggcgctatgcttaagaaaatcggtagyatggcccgtcgtgatatcgaactcatgctaggagacaaggtcttcctagaaacctgggtcaaggtcaagaaaaactggcgcgataaaaagctagatttggctgacttkggctataatgaaaragaatactaactaat

SEQ ID NO: 1490 - DNA, 176 bp, Streptococcus pneumoniae
  misc_feature (1)..(176): tiling:Spneumo1:WAN024D2U; Cluster includes WAN0243GG spr1 764||15903806|NP_359356.1|1731759..1731929|+|171 bp|Hypoth etical protein|S.pneumoniae|R6|NC_003098.1|ORF|121
atgagaaaaaaacgtggaattaaaaaattagttacatttgcattgctaggtgtttttatgtttagtaatacaattccttaccaacagtttattcagaagaataaacaattggagattcgagtgcaatcgcaaaagaagtccaatggtcttgatgttgggaaggcggattaactaat

SEQ ID NO: 1491 - DNA, 996 bp, Streptococcus pneumoniae
  misc_feature (1)..(996): tiling:Spneumo1:WAN024ATB; Cluster includes WAN023PBS pne4 3_18||||14945..15940|+|996 bp|Type 20 capsule operon, Glim mer 2.02 orf prediction|S.pneumoniae||WAN01UCHC|ORF|000
atgagaaaaaatcgaaatatyaacctagatttactaaaagtgcttgcatgtgttggagttgttttacttcatacaacaatgggcggatttaaagagacaggytcatggaatcttttggcatatttatattatttaggtacttactctattcccytgttttttatgrtcaatggttatttrttgttaggcaagagggagataacttatctttacatactccmgaaagtaaaatggattttaataacagtgtcatcatggtcrtttatcgtatggctttttaagcgtgattttacaactaatcctattaaaaaaattgtaggttctttgatacaaagaggttatttctttcagttttggtttttcggtgcactmatacttatctatttatgtttgccaattttgagacaatttctaaattcaaaaagaagctatttatacagtttatctttattgatgactattggtttgatttttgagttatcaaatatcctacttcaaatgccaatacaaacatatgtaatacaaacttttagattatggacgtggtttttttactatcttttaggtggttatatagcgcaattcactatagaagaaatygaatcaaggtttaagaattggatgaaaatagttagcatacttttgttattgatttcaccaataatattatttttcatagcgaagactatataccataatctatttgctgaatacttttatgatactttatttgtaaaagtcagtactttaggaatttttctaactatcctcatgcttactttgaatgaaarccgaagagaatcgattgtttccctttctaatcaaacaatgggggttttcataatacatacttatattatgaaagtgtgggaaaaagtgcttggttttaattttgtaggagcatatttaytttttgctctatttactttaagtgttagttttattattgttgggatgttaatgaagattccttacttcaatcgaatcgtcaaatta

SEQ ID NO: 1492 - DNA, 452 bp, Streptococcus pneumoniae
  misc_feature (1)..(452): tiling:Spneumo1:WAN024CZB; Cluster includes WAN0243D0 spr1 889|argR|15903930|NP_359480.1|1868457..1868903|-|447 bp|Ar ginine repressor|S.pneumoniae|R6|NC_003098.1|ORF|111
atgagaaaaagagatcgtcatcagttaataaaaaaaatgattactgaggagaaattaagtacacaaaaagaaattcaagatcggttggaggcgcacaatgtttgtgtgacgcagacaaccttgtctcgtgatttgcgcgaaatcggcttgaccaaggtcaagaaaaatgatatggtgtattatgtactagtaawtgagacagaaaagattgatttggtggaatttttgtctcatcatttagaaggtgttgcaagagcagagtttaccttggtgcttcataccaaattgggagaagcctctgttttggcaaatattgtagatgtaaayaaggatgaatggattttaggaacagttgctggtgccaataccttattggttatttgtcgagatcagcacgttgccaaactcatggaagatcgtttgctagatttgatgaaagataagtaactaat

SEQ ID NO: 1493 - DNA, 969 bp, Streptococcus pneumoniae
  misc_feature (1)..(969): tiling:Spneumo1:WAN024FTQ; Cluster includes WAN0240HV |cap 37I||CAB59292.1|||969 bp||S.pneumoniae||AJ131984|ORF|000
atgagaaaaataggaaaagtaataaacgagtattttgtattaagaaaatcatttactcctgctattgctcggaataaattatttgaaaagttttggggacggatagggaattataaaattttcaataatatagctagtaatttttatcaatacaaacatgaaacaatcataaattttttggaaaaagattttagccaatttttaaaatcctataactttaaagaggtatcgcacaaggagatagaacaaagaaaaatcttctctatgtggatacaaggatacgaaagtgctcctaagttggttcagaagacgattgatagccaaaggaaatatgcagaaaaatacggatataaatttgtttttttggatgaaaacaatatccgtgaatatgtgacacttccatcagagatagtagaaaaatatgagaatggaactatagattttataaaatattcggatgttgtaaggggaayattgctttcaaaatatggaggagtgtggttagattcgactatttatgttgattcttcacgagaactgaattatttaaaaaaagatttttatactattcgagcaaagacacatgagagagtgcccaaatatatcgcaaatggtaggtggtctgcattttgtttgtcaggggaaaagcaaaacatagtatttgattttttagagaaatttcatgtagcatattttatgaaatacgatatagtgctagattattttttrattgactatattatagaattaggttataggacaaatgacttgattagaaactatattgataaagtcgaagaaaataatcaggagttgttctttttggcagacaatttttctaaccagtatgatgaaaaagagtgggcaggagttttatcaacaactgcattgtttaagtgtagttataagtgtccgataaatgaagcgacaggaacctattttgatagattgatgaagggtgaactgtag

SEQ ID NO: 1494 - DNA, 996 bp, Streptococcus pneumoniae
  misc_feature (1)..(996): tiling:Spneumo1:WAN024ATA; Cluster includes WAN023P1A pne6 1_20||||15137..16132|+|996 bp|Type 33B capsule operon, Gli mmer 2.02 orf prediction|S.pneumoniae||WAN01UCGA|ORF|000
atgagaaaaattcgaaatatcaacctagatttactaaaagtgcttgcatgtgttggagttgttttacttcatacaacaatgggcggatttaaagagacaggctcatggaatcttttggcatatttatattatttaggtacttactctattcccctgttttttatgatcaatggttatttattgttaggcaagagggaaataacttatctttacatactccagaaagtaaaatggattttaataacagtgtcatcatggacatttatcgtatggytttttyatcgtgattttacaactaatcctattaaaaaaattgtaggttctttgatacaaagaggttatttctctcagttttggtttttcggtgcactaatacttatctatttatgtctgccaattgtgagacaatttctaaattcaaaaagaagctatttatacagtttatctttattgatgactattggtttgatttttgagttattaaatatcctacttcagatgccaatacaaacatatgtaatacagacttttagattatggacgtggtttttttactatcttttaggtggttatatagcgcaattcactaaagaagaaatcraatcaagatttaagaattggatgaaaatagctagcatacttttgttattgatttcaccaataatattatttttcatagcaaagaccacttaccataatttttttgctgaatatttttatgatattttattagtaaaagttgtaagcgtagggatttttctaactattttctcacttgtattgaatgaaaatagcaacaaatggattatttttctttctaatcaaactatgggtatctttataatacacacttatattatgaaggtatgggaaaaactatttggttttarttttataggttcatatttactttttgctatatttactttaagtgttagttttatcattgttggaatgttaatgaaaattccgtattttaatcgaatcgtcaaatta

SEQ ID NO: 1495 - DNA, 1265 bp, Streptococcus pneumoniae
  misc_feature (1)..(1265): tiling:Spneumo1:WAN024F5Q; Cluster includes WAN02441X spr0 989|murZ|15903033|NP_358583.1|973796..975055|+|1260 bp|UDP -N-acetylglucosamine1-carboxyvinyltransferase|S.pneumoniae |R6|NC_003098.1|ORF|111
atgagaaaaattgttatcaatggtggattaccactgcaaggtgaaatyactattagtggtgctaaaaatagtgtygtkgccttaattccagctattatmttggctgatgatgtggtgactttggattgygtyccagatatytcggatgtagccagtcttgtcgaaatcatggaattratgggagctactgttaagcgttatgacgatgtmttggagattgayccaagaggtgttcaaaatattccaatgccttatggtaaaattaacagtcttcgtgcatcttactatttttatgggagcctcttaggccgttttggtgaagcgacagttggtctaccgggaggatgtgatcttggtcctcgtccgattgacttacaccttaaggcgtttgaagctatgggtgccactgctagctacgagggagataacatgaagttatctgctaaagatacaggacttcatggtgcaagtatttacatggatacggttagtgtgggagcaacgattaatacgatgattgctgcrgttaaagcaaatggtcgtactattattgaaaatgcagcccgtgaacctgagattattgatgtagctactctcttgaataatatgggtgcccatatccgtggggcaggaactaatatcatcattattgatggtgttgaaagattacatgggacacgtcatcaggtgattccagaccgcattgaagctggaacatatatatctttagctgctgcagttggtaaaggaattcgtataaataatgttctttacgaacacctggaagggtttrttgctaagttggaagaaatgggagtgagaatgactgtatctgaagacagcatttttgtcgaggaacagtctaatttgaaagcaatcaatattaagacagctccttacccaggctttgcaactgatttgcaacaaccgcttacccctcttttactaagagcgaatggtcgtggtacaattgtcgatacgatttacgaaaaacgtgtaaatcatgtttttgaactagcaaagatggatgcggatatttcgacaacaaatggtcatattttgtacacgggtggacgtgatttacgtggggccagtgttaaagcgaccgacttaagagctggggctgcactagtcattgctgggcttatggctgaaggyaaaactgaaattaccaatatygagtttatcttacgtggttattctgatattatcgaaaaattacgtaatttaggagcggatattagacttgttgaggattaactaat

SEQ ID NO: 1496 - DNA, 806 bp, Streptococcus pneumoniae
  misc_feature (1)..(806): tiling:Spneumo1:WAN024DCQ; Cluster includes WAN02444O spr0 890||15902934|NP_358484.1|879422..880222|-|801 bp|Hypothet ical protein|S.pneumoniae|R6|NC_003098.1|ORF|111
atgagaaaacaaattcatccacttattttatttagtttttttgggattatgatgttcattttaatcatcaatcgcccacttaatgacagccaatcgtttaaaacaaaatccaatatagcacagattgaagcacaggctttgaaacacttagacaaaccgattattgacctctctggctggcagcgtcctgaggaaatcaactacgatgccctctcacaaaatatttcaggtgctattgttcgtgttcacagtggtrctcaaacracaaaagaaaatgatgcttcatttatcaatggaatagacaagrcctataagagtcatatcactgaacttcaaaagcggaatgtcccagttgctgtmtacgcttatgtagctggaaaaagtgtccaagaaatggaaaaggctgccgaagttttctacaatgctgcctctccttacagccctagttactattggcttgacgtggaagacaaaaccatgtctaatatgaacgaaggtgtcgaaaactttcgagcaaaactagcatcactrggtgctaaaaacatcggcatctacgttggtgtctacttcatggaagaacacagtattgatacaggcaagtttacctctgtttggattccrtcctacggctcagactcaggatttttggagagcagtcctaaaactgatttagattatgatattcaccaatacacatctaaaggaaaaattgccggctttgaccacgatttagatatcaacgttatctctcccttaaaaaataaagaagaaacctttcgaaaactttttttaaaaccttaactaat

SEQ ID NO: 1497 - DNA, 267 bp, Streptococcus pneumoniae
  misc_feature (1)..(267): tiling:Spneumo1:WAN024BDA; Cluster includes WAN023LQR 3154 35_1353b||||719530..719808|+|279 bp|EGAD orf prediction|S. pneumoniae|R6|NC_003098.1|ORF|110
atgagaaaacacgtgaaacgattcgtttttaataaaagaaaaagattttattgtgtgaggagcagaatcaaatctttttctatagttgtggggagatttacttcattttctcctgagattgagtttttgcccagccgatttatccacyacctcaaaacagtgttttatactcttcgaaaatctyttcaaatcacgtcagcgtcgccttaccgtactcaagtacagcctgaggctagcttcttagtttgctttttgattttcatttag

SEQ ID NO: 1498 - DNA, 984 bp, Streptococcus pneumoniae
  misc_feature (1)..(984): tiling:Spneumo1:WAN024FJ9; Cluster includes WAN0243PW spr1 423||15903466|NP_359016.1|1408524..1409501|-|978 bp|Conser ved hypothetical protein|S.pneumoniae|R6|NC_003098.1|ORF|1 11
atgagaaaaccaaagataacggtgattggtggagggactggaaktcccgtcattctaaaaagtctgcgggaaaaagatgtggaaatcgcagctatcgtgacggtggcagatgatggtggttcttcaggtgaactccgaaaaaatatgcaacagttgacaccgccaggtgatcttcgtaatgtccttgtggccatgtcggatatgcctaagttttatgagaaggtctttcagtatcggttctctgaggatgccggagcctttgctggccatccattgggaaatctcatcattgctggcttgtcagaaatgcagggttcaacctataatgccatgcagttattgagcaaatttttccatacaacagggaaaatttatccttccagtgaccatcctttgacccttcatgcagtctttcaggatgggacagaagtgrctggagagagtcatattgtagaccatcgaggcataattgacaatgtctatgtgaccaatgccctaaacgatgatacgcctctggccagccgtcgagtagtgcagaccatccttgaaagtgacatgattgtcctagggccaggttccctctttacctctattttgcccaatatcgtgattaaggaaattgggcgggctcttttggaaacyaaggcagaaattgcctatgtctgcaatatcatgacccaacgtggggagacggaacactttacagatagcraccacgtggaagtcttgcatcgtcaccttggtcgcccttttatcgacactgtcttggtgaatattgaaaaagtgcctcaggaatacatgaattccaaccgttttgatgaatacttrgtgcaagtggaacacgattttgtaggtctttgtaagcaagtttcgcgcgtgatttcatctaacttccttcgtctggaaaatggcggtgccttccacgatggagatttgattgtggacgagttgatgcgcattatacaggtgaaaaaaykaactaat

SEQ ID NO: 1499 - DNA, 1203 bp, Streptococcus pneumoniae
  misc_feature (1)..(1203): tiling:Spneumo1:WAN024CI8; Cluster includes WAN0241YW SP17 65||15901596|NP_346200.1|1667726..1668922|-|1197 bp|glycos yl transferase, family 8|S.pneumoniae|TIGR4|NC_003028.1|OR F|011
atgagaaaatcaatagtattagcggcagataatgyctatcttattcctttagagacgactataaagtctgtattgtatcacaatagagatgttgatttttatattctcaacagtgatatagctcctgaatggtttaaattattggggagaaaaatggaagttgtgaattctacaattcgcagtgtacacattgataaagaactttttgaaagctataaaacaggacctcatataaattatgcttcttactttagattttttgcgacagaagtggttgaatctgatagggtattgtatctggattccgatatcattgtaactggggaactagctactttgtttgagatagatctcaaaggatattcaattggtgctgttgatgatgtctatgcctatgaaggacgaaaatctggatttaatwctggwrtkttaytaatggatgttgcaaartggaaagaacaytctattgtcaatagtttattggaattagcggccgagcaraatcaagttgttcatcttggggatcagagtattttaaatatttattttgaggataattggctagccttagataaaacatataattatatggtrggtrttgatatttatcaccttgctcaagaatgtgaacgtctagatgacaatccacctacaattgttcactatgctagtcatgataaaccttggaatacatatagtatatctagactacgtgaattatggtgggtttatagagatttggattggtcagagattgcttttcaacgttccgatttaaattattttgaaagaagcaatcagtctaaaaaacaagtgatgcttgtgacatggagtgcagatataaaacatttagagtatttagtacaacggttacctgattggcattttcatttggctgcaccgtgtgattgttctgaggagctgacctctctatcacagtatacgaatgtaacagtatatcaaaatgtattacatagtagaattgattggctattggacgattctatagtttatttagatattaatacaggtggagaggtttttaatgtagttacaagggcacaagaaagtggcaagaaaatcttcgcttttgatatcacacgtaaaagtatggatgatggactctatgacggtattttttctgtggagagaccagatgatttagtggatagaatgaagaatatagagatagagctaactaat

SEQ ID NO: 1500 - DNA, 221 bp, Streptococcus pneumoniae
  misc_feature (1)..(221): tiling:Spneumo1:WAN024DD5; Cluster includes WAN02445U spr0 848||15902892|NP_358442.1|845449..845664|+|216 bp|Conserve d hypothetical protein|S.pneumoniae|R6|NC_003098.1|ORF|121
atgagaaaatcattttacacttggctcatgaccgagcgcaatcctaaaagtaacagtcccaaagcaattttggcagacctcgcttttgaagagkcagcytttccaaaacayacagatgattttgatgaggtcagtcgctttttggaggagcatgccagtttctcttttaacctaggagattttgacagcatttggcaggaatatctagaacactarctaat

SEQ ID NO: 1501 - DNA, 138 bp, Streptococcus pneumoniae
  misc_feature (1)..(138): tiling:Spneumo1:WAN024FZS; Cluster includes WAN023Y7U AL44 9932.1_23||||19894..20031|-|138 bp|Glimmer 2.02 orf predic tion|S.pneumoniae||AL449932.1|ORF|001
atgagaaaattgggaataaaattagcaaaaatgctagaaattttttcttcatttttagtctccttttccgaatattctctcattatatcagaaaaagtaaaaaaaggcaaattkttatatttttygtgtcagaaaata

SEQ ID NO: 1502 - DNA, 705 bp, Streptococcus pneumoniae
  misc_feature (1)..(705): tiling:Spneumo1:WAN024DJ6; Cluster includes WAN0244JW spr0 342||15902386|NP_357936.1|346973..347671|+|699 bp|Conserve d hypothetical protein|S.pneumoniae|R6|NC_003098.1|ORF|111
atgagaaaatttaaaatctttttatttatcgaagcctgtcttctgacaggagctctgattttgatggtatcagagcatttttcgcgttttctgctgatactattcctctttttgcttttgattcgctactacactggtaaagagggaaataatcttcttttagtagcggcaaccattctcttctttttcatcgttatgctcaatccttttgtgattctagctatttttgttgcggttatctatagcctctttcttctttacccgatgatgaaccaggaaaaagagcagaccaatttggtttttgaagaggtcgtgacggttaagaaggagaaaaatcgttggtttggaaatcttcatcatttttcaagctaccagacttgccaattygatgatatcaatctctttcgcttcatgggcaaggacactattcatctggagagggtcatcttaaccaatcatgacaatgtcattatcctcagaaagatrgtaggaacgaccaaaatcatcgtacctgtagatgtggaagtcagtctcagcgttaactgtctctatggggatttgayttttttcaaccagcccaagcgagccctccgcaatgaacactatcatcaagaaacaaaagactatctcaagagtaacaagagtgtcaagattttcttgaccactatgattggtgatgtggaggtggttagaggaykaactaat

SEQ ID NO: 1503 - DNA, 527 bp, Streptococcus pneumoniae
  misc_feature (1)..(527): tiling:Spneumo1:WAN024DUL; Cluster includes WAN02439W spr2 001|ctsR|15904042|NP_359592.1|1995395..1995916|-|522 bp|Tr anscriptional regulator CtsR|S.pneumoniae|R6|NC_003098.1|O RF|121
atgagaaaatttcggtataatagtcaaacaaggtcaaggtttaaagagagaggtgggtttgttatgagatttaaaaatacatcggatcatattgaggcctacatcaaggcgattttagatcaatctggtatcgtggagttgcaacggagtcagttggcagatacctttcaggttgttcctagtcagattaactacgtgatcaagacacgctttacggaaagtagaggctacttggttgaaagtaagcgtggtggcggaggctacattcgtataggacggattgagttttctagtcatcatgaaatgctccgggagctgctttactcgattggtgagcgagtcagtcaagaaatttatgaggatattctccagcttttggttgagcagraattgatgaccaagcaggagatgaatttgctagwatcagtagctttggatcgcgttttaggagaagaagctccagttgttcgagcaaacatgctacgtcagrtcatacaagaggtagatagaaaagggaagtaactaat

SEQ ID NO: 1504 - DNA, 980 bp, Streptococcus pneumoniae
  misc_feature (1)..(980): tiling:Spneumo1:WAN024G7R; Cluster includes WAN02443J spr0 931||15902975|NP_358525.1|916211..917185|+|975 bp|Conserve d hypothetical protein|S.pneumoniae|R6|NC_003098.1|ORF|111
atgagaaagaaactctttctgactagygctgcgrtcttgtgggcagtaacagctatgaatagcgtccatgcagcaacagatgttcaaaaagttatcgatgaaacctatgtccaacctgaatatgtcctaggttcytccctatctgaagaccaaaaaaatcaaactcttaaaaaactgggctacaatgcctcaacagataccaaagaactcaagaccatgacacctgatgtttattctaaaatcatgaatgtggccaatgactctagcttacagttgtattcatcagccaagattcaaaagctaggtgacaaatcgccacttgaggtcaagattgaaacaccwgaaaayatcactaaggtractcaggatatgtaccgaaaygcagcmgtaackytgggtrtggaacaygccaaaatcactgtagcagcmccyattccagttacaggwgaragtgctttrgcwgggatytactattcgctagargctaatggagccaaggtgccrcaagcyaataaagatttggctcaagaagagctaaargctttgtcagatatcaatgctgaaaacaaggacaaatcaggctatgatgctaayaaattaaacgttgccctagctgatatcaagtcaggactcgccaaagctaaagaaagyaagggaaatctgacagaagaagatrtmcgcaagattgttgaagataccttaaaaaattacaaacttgatcaggtcataacaggaaaccagatcaatatcatcatcaattttgccttgaatctctcaaagagtgatatcctcagcaatgcagatttcactaaaaccytaaatgaccttaaacaaagcatcgtatcacaagctggcgacagttttaaaaatatcaaccttaactttgatkcggataaggcgctagaggacggtggtaacttcttaagctccctctggcaagcccttgtcaacttcttcaagagttttggttcttaactaat

SEQ ID NO: 1505 - DNA, 75 bp, Streptococcus pneumoniae
  misc_feature (1)..(75): tiling:Spneumo1:WAN024GFE; Cluster includes WAN023QQ1 cont ig_1337_8||||2949..3023|-|75 bp|Glimmer 2.02 orf predictio n|S.pneumoniae|670|WAN01UE6Z|ORF|000
atgagaaagaccagaaagatggaaataaccattctaactaaaagagaagaacgcttcatcggtcttctcccttct

SEQ ID NO: 1506 - DNA, 84 bp, Streptococcus pneumoniae
  misc_feature (1)..(84): tiling:Spneumo1:WAN024DH6; Cluster includes WAN0244ER spr0 527|pep27|15902571|NP_358121.1|527198..527281|+|84 bp|A se creted peptide which is the signal sensed by VncR/S|S.pneu moniae|R6|NC_003098.1|ORF|120
atgagaaaggaatttcacaacgttttatctagtgrtcagttrcttrcagacaaaaggccagcaagagactataatagaaaatag

SEQ ID NO: 1507 - DNA, 1130 bp, Streptococcus pneumoniae
  misc_feature (1)..(1130): tiling:Spneumo1:WAN024EV8; Cluster includes WAN0244TA spr0 004||15902048|NP_357598.1|3000..4115|+|1116 bp|Conserved h ypothetical protein|S.pneumoniae|R6|NC_003098.1|ORF|111
atgagaaatatggctttgacagcaggtatcgttggtttgccaaacgttggtaaatcaacaytatttaatgcaattacaaaagcaggagcagaggcagcaaactacccatttgcgackattgatccaaatgttggaatggtggaagwtccagatgaacgcctacaaaaactaactgaaatgataactcctaaaaagacagttcccacaacatttgaatttacrgatattgcagggattgtaaaaggagcttcaaaaggagargggctagggaataaattcttggccaatattcgtgaagtagatgcgattgttcacgtagttcgtgcttttgatgatgaaaatgtratgcgcgagcaaggacgtgaagacgcctttgtagatccacttgcagatattgatacmattaatctggaattrattcttgctgacttagaatcagtgaacaaacgatatgcgcgtgtagaaaagatggcacgtacgcaaaaagataaagaatcagtagcagaattcaatgttcttcaaaagattaaaccagtcctagaagacgggaaatcagctcgtaccattgaattwacagatgaggaacaaaaggttgtcaaaggtcttttccttttgacgactaaaccagttctttatgtagctaatgtggacgaggatgtggtttcagaacctgactctatcgactatgtcaaacaaattcgtgaatttgcagcgacagaaaatgctgaagtagtcgttatttctgcgcgtgctgaggaagaaatttctgaattgratgatgaagataaaaaagagtttcttgaagccattggtttgacagaatcaggtgtagataagttgacgcgtgcagcttaccacttgcttggattgggaacttacttcacagctggtgaaaaagaagttcgcgcttggactttcaaacgtggtatgaaggctcctcaagcagctggtattatccactcagactttgaaaaaggctttattcgtgcagtaaccatgtcatatgaagatctagtgaaatayggatctgaaaaggccgtaaaagaagctggacgcttgcgtgaagaaggaaaagaatatatcgttcaagatggcgatatcatggaattccgctttaatgtctaactaat

SEQ ID NO: 1508 - DNA, 656 bp, Streptococcus pneumoniae
  misc_feature (1)..(656): tiling:Spneumo1:WAN024CZ7; Cluster includes WAN0243CQ spr1 899|phoU|15903940|NP_359490.1|1877809..1878459|+|651 bp|Ne gative regulator of pho regulon for phosphate transport|S. pneumoniae|R6|NC_003098.1|ORF|111
atgagaaatcaatttgacttagaattgcatgaattagaacaatcctttttaggactagggcaacttgtccttgaaacagcttcaaaarccttactggccttagcctccaaagacaaggagatggcagagctaattatcaataaggatcatgctatmaaccaaggtcaaagcgctatcgaattgrcctgtgcccgtttgttrgccttgcagcagccacaagtgtctgaccttcgatttgtrattagcatcatgtcttcttgttcagaccttgaacgtatgggagaccatatggcaggcattgcyaaagctgttttgcaactaaaagaaaatcaactagcccctgacgaagaacagttacaccaaatgggtaaattatccctcagcatgctakccgatttattggttgcctttcctttgcaccaagcctcaaaagctattagtattgctcaaaaagatgaacagattgaccaatattattatgccttatcaaaggaaatcattggacttatgaaagaccaagaaacctcaattcccaatggaacwcaatacctttatatcatagggcatctggaacgcttcgctgattacattgctaacatttgtgaacgcctagtctacctagaaacaggagaactrgtggatttgaattaactaat

SEQ ID NO: 1509 - DNA, 1205 bp, Streptococcus pneumoniae
  misc_feature (1)..(1205): tiling:Spneumo1:WAN024CV5; Cluster includes WAN0243M2 spr1 561|natB|15903604|NP_359154.1|1541133..1542332|-|1200 bp|A BC transporter membrane-spanning permease - Na+ export|S.p neumoniae|R6|NC_003098.1|ORF|211
atgagaaawatstgggttgtaatcaaggaaacctatcttcracatgtcgagtcatggagtttcttctttatggtgatttcsccgttcctctttttaggaatctctgtaggaattgggcatmtccaaggttcttctatgrctaaaaataataaagtggcagtastgacaacagtgccatctgtagcagaaggactgaagaatgtaaatggtgttaacttcgactataaagaygaagcaagtgccamagaagcaattaaagaagraaaattaaaaggttatttgaccattgatcaagaagatagtgttctaaaggcagtttatcatggcgamacatcgcttgaaaatggaattaaatttgaggttacaggtacactcaatgaactgcaaaatcagcttaatcgttcaactgcttccttgtctcaagagcaggaaaaacgcttagcgcagacaattcaattcacagaaaagattgatgaagccaaggaaaataaaaagtttattcaaacaattgcagcaggtgccttaggattctttctttatatgattctgattacctatgcgggtgtaacagctcaggaagttgccagtgaaaaaggcaccaaaattatggaagtcgtyttttctagcataagggcaagtcactatttctatgcgcggatgatggctctgtttctagtgattttaacgcatattgggatctatgttgtaggtggtctggctgccgttttgctctttaaaratttgccattcttggctcagtctggtattttggatcacttgggagatgctatctcactgaataccttgctctttattttgatcagtcttttcatgtaygtagtyttggcagccttcctaggatctatggtttctcgtcctgargactcagggaaagccttgtcgcctttgatgattttgattatgggtggtttttttggagtgacagctctaggtgcagctggtgacaatctcctcttgaagawtggttcttatattccctttatttcgrmcttctttatgcygtttcgaacgattaatgrctatgcggrgggagcrgaagcatggatttcacttgctattacagtgatttttgcggtggtagcaacaggatttatcggacgcatgtatgctagtctcgttcttcaaacggatgatttagggatttggaaaacctttaaacgtgccttatcttataaatarctaat

SEQ ID NO: 1510 - DNA, 183 bp, Streptococcus pneumoniae
  misc_feature (1)..(183): tiling:Spneumo1:WAN024DBA; Cluster includes WAN024423 spr0 983||15903027|NP_358577.1|969263..969439|+|177 bp|Hypothet ical protein|S.pneumoniae|R6|NC_003098.1|ORF|121
atgagaagcggtcgtgataaaaagattgcgggtgtttgtgctrgggtggcccattatctggatatggatccgactatcgttcragtcatttggggtgttcttacttgctgttacggagctggaattgtagcttacattattttatggattatcgcaccagtagcaactgactatykaactaat

SEQ ID NO: 1511 - DNA, 135 bp, Streptococcus pneumoniae
  misc_feature (1)..(135): tiling:Spneumo1:WAN024CMV; Cluster includes WAN02434E SP01 64||15900102|NP_344706.1|160211..160339|+|129 bp|hypotheti cal protein|S.pneumoniae|TIGR4|NC_003028.1|ORF|020
atgagaagtttgtttaagaaaatagttgctgtattagttattggcttaattctgttaggaattgcgagaacacctcaagttcataagatggctagagggattgatcctggtcctgcgaattttattctarctaat

SEQ ID NO: 1512 - DNA, 141 bp, Streptococcus pneumoniae
  misc_feature (1)..(141): tiling:Spneumo1:WAN024CMU; Cluster includes WAN0242HG SP10 58||15900928|NP_345532.1|994970..995104|+|135 bp|hypotheti cal protein|S.pneumoniae|TIGR4|NC_003028.1|ORF|020
atgagaagtttgtttaggaaaattgttgctttgttagtcataggattaatcctattagggactgctggaggaactcaagttcataagatggctagagggattgatccaggtcctgcgaatggtatttatagactarctaat

SEQ ID NO: 1513 - DNA, 1065 bp, Streptococcus pneumoniae
  misc_feature (1)..(1065): tiling:Spneumo1:WAN024FR9; Cluster includes WAN023PVV pne0 8_19||||13313..14377|+|1065 bp|Type 7A capsule operon, Gli mmer 2.02 orf prediction|S.pneumoniae||WAN01UCKE|ORF|000
atgagaataactttttgtctacctgagataagcactgttcctacgggaggatataaaattatttttgagtacgcaaataggttgtctgaacgaggtcatgagataacccttgtttttttaaccaataatgtatggaacagagttactaagaattgtaaaatcaaatcaattgtaggcaatatacgtggcaaaaaaaatccaagttggtttaaactgaaaccaactattcgtaaaataatgactccttatttagatgggagagattttcctgaagcagattttatatttgctactgcggttacaactgctaatattgtaaaagaaatgccagaaaaatatgggaaaaaatgttacctaatccaaggttttgaaacatggcttcttccagaaagtaaagttattgaaacttataattatggattccttaatattacagtatctaagtggttatgtgacatagtccaatcttatacagagactccagttttttgtgtatctaatccgattgatacagaaattttttatttgctaaatcctatagagaaacgaaacccatttcatctaggtatgttatatcatgaaggagagcataaaggaatctcttatgcgatagatgcaattaagaaagttaagaaaatttatccggaaatagaggttaatatttttggagttcctagtagaccagtatttttaccagaatattttaattatactcaacaagctacacaacaggaattacaaaagatatacaacgatacgtctatttttttgtgtgcaacaattgatgaaggctttggtttgacaggagcagagagtatggcttgtggctgtgcgttagtctcaacagcctatagtggtgtatttgaatatgcaattgatggcgagaatgcacttttatctccgataaaagatagtgttagtttggcaacaaacataataaaattgattagaaatcatgatttgcgcttatccatagcaacgcaagcaactaaagatatgaaaaagagaggatgggagaaaactactttaaaattagaaaatattttaagtgaatttactaatttt

SEQ ID NO: 1514 - DNA, 1170 bp, Streptococcus pneumoniae
  misc_feature (1)..(1170): tiling:Spneumo1:WAN024FPP; Cluster includes WAN023PP7 pne2 0_15||||11178..12347|+|1170 bp|Type 11A capsule operon, Gl immer 2.02 orf prediction|S.pneumoniae||WAN01UCJ5|ORF|000
atgagaatatcaccwtcgaagctgatatttgcattttttagcagyttttatattcttgtaatccttttcccragaggaattttyctaggrcattctactttagcttctcgwttatggattatttacaawgraagtttatatytatcaataytacttggttyaatatatgttattttaaaaatattatctcgaaatatcgccattcatcagcatgcttttttyatcttacaatattattttattgtaatkattttaactttyatgktaagtgggtcaatcggtgwtgggstacaatcgattttctatccaatattcatctatttrttttttaatgaagttcgagataagaaatcaatagtgttaatttttgatatmtttctttatatacttacysctttattcgttatcaatacgattgatrtttttctgaatttcacaaatatttttcatrttacttttttaggacatgttcaggtgatttcccaatatagtrttmtcggatttctcgtatcagcwtattayytattagaagaaaagagraatatattagtsgcacagttgctgttgattttaacgattatcaattgttttttttcagatgtctctctctctaaasytattgctttgtttatgattrtttatattatktcatacaagttaagaaaactattytggaaaagaggaaggaagatatctgtyrtaacttttattgcatctgttgtgatgttagcattagtratttttgratattttttaccatatcttagatattttgattttacttttaatggtcgataccaaatttggcgcattgtgtatgctaccattcytcaagtgaaatggtttggatatggtktgtttggctttcaatttaaacttccgtggcagraattgggagaarttggaataaattayactcataatcaagttttacagttagcacttgatagtggwattgttgggattatctcattcyttaytatgattttttatatgatcttttcaactaaaaatattcaaaatyccacaataagctcyctatttatttttgcctatttttgtctatttattataatgtttatagagagtgtyacttattayccatactattttattataatagttcttcaractttgtacttaaaattggaaagagaaagaaatgttaaa

SEQ ID NO: 1515 - DNA, 738 bp, Streptococcus pneumoniae
  misc_feature (1)..(738): tiling:Spneumo1:WAN024AW6; Cluster includes WAN0244GJ spr0 463|rr13|15902507|NP_358057.1|469762..470499|+|738 bp|Resp onse regulator|S.pneumoniae|R6|NC_003098.1|ORF|100
atgagaatatttgttttagaagatgatttttcccaacagactagaattgaaacgacgattgagaaactcttgaaggaacatcatatcactctgagttcttttgaagtttttggtaagccagatcaattgctggcagaggtgcatgagaagggggcccatcagctattctttttggatattgagattcgaaatgaggagatgaagggtctggaagtggctagaaagattcgggawcrrgayccktatgccctratygtctttgtgacgactcactcggagtttatgccyctgtcctttcgctaccaagtgtcwgctytggaytayattgataaggccctttcggcagaggagtttgaatctcgtatcgagacagccctcctctatgccaatrgtcaagayagtaaaagtctrgcggaagattgcttttactttaaatcaaaatttgcycaattycartatcctttyaaagaggtttactatctcgaaacrtccmcaagmccccatcgtgttattctctataccaagacrgacaggctrgaatttacrgcgagtytagaggaggtyytyaagcaggarccycgtytcttgcagtgccatcgctcttttctcatcaatcctgcmaatgtggtgcatttrgataagaaagaaaaactscttttctttcccaatggtggaagytgtctratcgcgcgttataaggtcagggaagtgtctgaggctattaataacttacactga

SEQ ID NO: 1516 - DNA, 744 bp, Streptococcus pneumoniae
  misc_feature (1)..(744): tiling:Spneumo1:WAN024AW7; Cluster includes WAN0242V0 SP05 26||15900440|NP_345044.1|505560..506297|+|738 bp|response regulator BlpR|S.pneumoniae|TIGR4|NC_003028.1|ORF|021
atgagaatatttgttttagaggatgatttttcccaacagactagaattgaaacgacgatkgagaaacttttgaaagcacatcatatcattcctagctcttttgaggtatttggcaagccggaccaactgctggctgaagtgcatgagaagggggcccatcagctattctttttggatattgagattcgaaatgaagagatgaagggactggaagtggctagaaagattcgggatcgggatccttatgccctgattgtctttgtgacgactcactcggagtttatgcccctgtcttttcgctaccaagtgtctgctttggactacattgataaggccttgtcagcagaggagtttgaatctcggatcgagacagccctcctctatgccaatagtcaagatagtaaaagtctggcggaagattgcttttactttaaatcaaaatttgcccaatttcagtatccttttaaagaggtttactatctcgaaacgtcgcccagagcccatcgtgttattctctataccaagacagacaggctggaatttacagcgagtttagaggaggttttcaagcaggagccccgtctcttgcagtgccaccgctcttttctcatcaatcctgcaaatgtggtgcatttggataagaaagaaaaactgctyttctytcccaatggtggaagttgtctaatcgcccgttataaggtcagggaagtgtctgaggccatcaataaattacacykaactaat

SEQ ID NO: 1517 - DNA, 884 bp, Streptococcus pneumoniae
  misc_feature (1)..(884): tiling:Spneumo1:WAN024FRM; Cluster includes WAN0243TU spr1 281|ABC-NBD|15903324|NP_358874.1|1275624..1276346|-|723 bp |ABC transporter ATP-binding protein - multidrug efflux|S. pneumoniae|R6|NC_003098.1|ORF|232
  misc_feature (21)..(21): n is a, c, g, or t
  misc_feature (107)..(107): n is a, c, g, or t
atgagaatcaaagagaaaacnaataatattaatggaggaatwawaaatgtaagtaagcattatggtcattcaatcattctcaawgatataaattttgcacttaacangggtgaaattgttggtctagyagggagaaatggagttggtaagagtacgttgatgaaaattcttgttcaraataatcaaccgacttcaggtaatattataarcagtgataatrttgggtatttaatcgaagaaccaaaattatttttatctaaaacaggtttagagaatttaaaatatttgtcaaatttatatggtgttgactacaatcaagaaakatttagawgtttgatccaagagttagatttgactcagtctattaataaaaaagtaaagacctattctttgggtacaaaacaaaaattagctttgcttctaactctcgttacgraacctgatatattgattttagatgaaccgactaatggtttagatattgaatcatcacaaatagttttakcggttctaaaaaawttagctttamatgaaaaygtgggaattttaatatcgagtcataaattagaagayattgaagaaatttgtgagagrgttcttttcttggagarcgggcttttgacatttcaaaaagtaggaaaagatagtcataatttcttgtttgagatagctttttcatcagctacagatagagacattttcattaccaaacaagaatttkgrgatattgttcarsaakagggaytgagmattactatgtctgggaatattcaaartagtgagctttttaaattttttaacgaaaactctattaaagtagttgattttgaaactaaaaaagagacgcttaaagatatttayytaaatcgttcaaaataactaat

SEQ ID NO: 1518 - DNA, 728 bp, Streptococcus pneumoniae
  misc_feature (1)..(728): tiling:Spneumo1:WAN024CYS; Cluster includes WAN0243IJ spr1 689|rluB|15903731|NP_359281.1|1660220..1660942|-|723 bp|Ri bosomal large subunit pseudouridine synthase B|S.pneumonia e|R6|NC_003098.1|ORF|111
atgagaatcaataagtatattgcccacgcaggtgtggccagtaggagaaaagcagaagagctgatyaagcaaggyttggtgacrgttaacggmcaagtggtgcgtgaactagcaaccactatcaagtcaggcgacaaggtcgaagttgaaggtcaacctatctacaacgaagaaaaggtctaytatctgcttaacaaaccacgcggtgtsatttccagtgtracagatgayaagggtcgcaagacggttgtcgacctcttgcccaatgtcaaagarcgyatttaccctgtgggtcgtttggactgggatacatcrggwgtcttgattttgaccaatgatggggactttacagacgagatgattcaccctcgtaatgagattgacaaggtttatgtcgcgcgtgttaaaggtgtggccaataaggacaatctycgccccttgacccgtggtcttgagattgatggtaagaaaaccaagccagctgtttatgaaattctcaaagtggacccagtmaaaaatcgctctgtggtgcagttgaccatccatgaagggcgtaaccatcaggttaaaaagatgtttgaagctgttggtctccaagtagataagttgtctcggactcgtttcggacacctagacttgacaggactccgtccaggagaatcccgtcgtcttaataaaaaagaaatcagccaactacacaccatggctgtaactaagaaataactaat

SEQ ID NO: 1519 - DNA, 468 bp, Streptococcus pneumoniae
  misc_feature (1)..(468): tiling:Spneumo1:WAN024BH7; Cluster includes WAN023LOM 3146 64_1471||||779007..779474|-|468 bp|EGAD orf prediction|S.p neumoniae|R6|NC_003098.1|ORF|110
atgagaatgctagcaataatgccgttaactgctactgacttccctgaacccgttgaacctgcaactagcaagtggggcattttagaaaggtcaaaagctcttgcggttccattaacagccttccctaaaggaatttccaagaaattttctgctttcgtttgcgattgttcccatagttctcggaaagatacagtggcaatatcggagttgggcacttcaattccgattagggatttcccagggattggtgcttcaatccggacatctttggcagccaaggctagagcgaggtcatctgatagattggaaatgcggttgacccttacaccaacagccggcttgacttcatacttggtcactgatggcccaatttcggcccgttcaactgttaccttaataccaaagctagcaaaggttgcttctaagattttgatattttctctgacaattttcttctctttagactga

SEQ ID NO: 1520 - DNA, 426 bp, Streptococcus pneumoniae
  misc_feature (1)..(426): tiling:Spneumo1:WAN024EUD; Cluster includes WAN0244OI spr0 176||15902220|NP_357770.1|184622..185041|+|420 bp|Conserve d hypothetical protein|S.pneumoniae|R6|NC_003098.1|ORF|122
atgagaattatgggattggacgtcggttcaaaaacggtaggggtggcgattagcgatccgcttggttttacagctcaagggyttgaaatcatccagataaatgaagaacaaggccaatttggttytgaccgcgttaaggaattggttgatacttacaaggtggaacgatttgtagtgggcttgcctaaaaacatgaacaatacmagtggaccgcgcgtagaagctagtcaagcmtacggagcaaagctagamkarttttttggtttaccagtagactatcaggatgaacgcttgacaacagtggctgctgagcgcatgttgattgaacaagcagatatcagtcgcaataagcgcaagaaagtcattgataagttagcagctcagctgattttacaaaattatttagatagaaaatttctaactaat

SEQ ID NO: 1521 - DNA, 261 bp, Streptococcus pneumoniae
  misc_feature (1)..(261): tiling:Spneumo1:WAN024FPV; Cluster includes WAN023L4K 3138 26_2423||||1295796..1296056|+|261 bp|EGAD orf prediction|S .pneumoniae|R6|NC_003098.1|ORF|110
atgagaattccaccagcgattaaaagacgcaagttrgtcaagaccagagccgaaattccgtgtgccattaggtattggccactcgttcctgacaacccccaagcaataccagccacaactgttagtaaagtcccttttaaactatttgacatgtctctccttactcttctttgcgaatcaagttcatcacttgattgcggtctaatatccattgagctctctcgtcctttttttcataggtacgattcgataggaaaatag

SEQ ID NO: 1522 - DNA, 521 bp, Streptococcus pneumoniae
  misc_feature (1)..(521): tiling:Spneumo1:WAN024D2A; Cluster includes WAN0243ZK spr1 075|lacB|15903118|NP_358668.1|1073688..1074203|-|516 bp|Ga lactose-6-phosphate isomerase LacB subunit|S.pneumoniae|R6 |NC_003098.1|ORF|113
atgagaattgcaattggatgygaccacatcgtaacwgatgaaaaaatggcggtttcagaatttttgaaatcaaaaggatatgaagtcattgactttggtacmtatgaccatacacgkactcactacccaatctttggtaaaaaagtaggggaagctgtaactagcggycaagctgatcttggrgtatgtatctgtggtactggtgttggtatcaacaacgctgtaaataaagttccaggtgttcgttctgccttggttcgtgatatgacaacagccctttatgctaaagaacaattgaacgctaacgttatyggytttggtggtaarattactggtgaattgcttatgtgtgatatcatcgaagctttcatycatgctgaatacaaaccawctgaagaaaacaaraaattgattgcgaaaattgaacaysttgaaagtcacaatgctcaacaaacagacgcaaacttcttyacwgaattccttgaraaatgggatcgyggagaataccacgactaactaat

SEQ ID NO: 1523 - DNA, 878 bp, Streptococcus pneumoniae
  misc_feature (1)..(878): tiling:Spneumo1:WAN024ESX; Cluster includes WAN0243FH spr1 799|ksgA|15903841|NP_359391.1|1770284..1771156|-|873 bp|Di methyladenosine transferase|S.pneumoniae|R6|NC_003098.1|OR F|121
atgagaattgcagattatagcgtgaccaaggcagtgctggagcgtcacggttttacctttaaaaagtccttygggcaaaatttyytgacggataccaatatccttcaaaaaattgtggatacggctgaaattgatgaycaggtcaatgtcatcgaaatcgggccaggtattggtgccttgacrgartttytggctgagcgtgcagcccaagtcatggcttttgagattgaccaccgtttggtgccaattttggyagataccctgcgtgattttgataatgtgacygtagttaacgaagatattctcaaggttgatttggcgcaacatatccaraattttaaaaatcctracctgccaatcaaggtagtggctaatttgccttactacatcacgacgcctattctcatgcacttgattgagagtggcattccttttwgtgagtttgtggtcatgatgcagaaagaagtagcggaccgcatttcagcccagcctaacaccaaggcttacggtagcttgtctatcgccgtgcagtattacatgacagccaaggttgcctttatcgtgcctcgtacggtctttgtgccagcgccaaatgtggattcagccatcttgaaaatggtgcgtcgtccagagccagccgtagcagtagaagatgagaactttttctttaaggtttccaaggctagttttacccatcgccgcaagaccttgtggaataacttgacaggttactttggtaagactgaagaggtcaaggacaagctgaccaaggctttggaccaggcaggcttgtcaccaagtgtgcgtggggaagctctcagcttggcagaatttgccggtctagcagacgcacttaaagggcaaggactctaactaat

SEQ ID NO: 1524 - DNA, 123 bp, Streptococcus pneumoniae
  misc_feature (1)..(123): tiling:Spneumo1:WAN024CM5; Cluster includes WAN0242QQ SP06 93||15900594|NP_345198.1|663496..663612|+|117 bp|hypotheti cal protein|S.pneumoniae|TIGR4|NC_003028.1|ORF|020
atgagaattgttgataagattaagatattacctactccttatgagggacactatcatttatatataccatccagtaagaaacatgtattagttgggaaacaggaaaaaaatggtctarctaat

SEQ ID NO: 1525 - DNA, 1094 bp, Streptococcus pneumoniae
  misc_feature (1)..(1094): tiling:Spneumo1:WAN024F4W; Cluster includes WAN0244MW spr0 234|gldA|15902278|NP_357828.1|225726..226814|+|1089 bp|Gly cerol dehydrogenase, NAD+ dependent|S.pneumoniae|R6|NC_003 098.1|ORF|221
atgagaatttttgctagtccttctagatatattcagggggaaaatgccttgtttgaaaatgccaaatcaattttggatttgggaaattrccckattctattatgcgatcagttggtttatgatattgttggaaaacgatttgaagattayctacataggtatggtttccatattgttctggcgctatttaatggtgaagcttctgacaatgaaatcaatcgagttgttgccttggctgagaaagaaaattgtgatagtattatcggtcttggtgggggaaagacgattgatagcgcaaaagctattgcagatttgattgaaaagcctgttattattgctccaacaattgcatcgaccgacgcacctgtatctgctttatctgttatttatacagatgaaggtgcatttgatcattatctattttattctaaaaatccagatttagttttggttgatacaaaagttatttcacaagcccctaagcgtttattagcgtctggtattgcagatggtttagcaacttgggttgaggcgcgtgcggttatgcaggcaaatggaaaaactatgttgggacaacagcaaacattggctggagttgcaattgcgaagaaatgtgaagaaacgctgtttgcagatggtttacaggctatggcagcttgtgaagctaaagtggtgacaccagcattagaaaatattgttgaagctaatactttattgagtggtctaggttttgaaagtggaggattagctgcggcgcatgcaattcataatggttttactgcattgacaggtgacattcatcatttaacacatggtgaaaaagtagcttatggaactttagtacaactattattggaaaatagacctaaagaagaacttgataagtatattgagttttacaaaaaaattggtatgccaacaactctaaaagaaatgcatttggatcaagttggatatgatgatttaataaaagttggtaaacaagcaactatggagggtgagacaattcatcagatgccgtttaagatttcgccttcagatgttgctcaagctattatcgctgtagatgcctatgtaaattcaaaataactaat

SEQ ID NO: 1526 - DNA, 915 bp, Streptococcus pneumoniae
  misc_feature (1)..(915): tiling:Spneumo1:WAN024FO8; Cluster includes WAN023PHF pne3 5_10||||7537..8451|+|915 bp|Type 17A capsule operon, Glimm er 2.02 orf prediction|S.pneumoniae||WAN01UCHX|ORF|000
atgagacagttarcattaraattagtyagtatcatttataaagtaacaaarcgaatacctatatcttttatttctaatttaggygagargatttattcaytmaaggatycctatgtttttracgtattaagtamattgggagtsgataaagagagcrcctatgatttgatrccwccaratttatttttgaataaaatttggatttgctggtttcagggtgaggataaagcaccagatttagtaaaaaagtgyatyratagtgttmgaaaacatgcctcaggctacgatgtcattatyttaacrgaagrtaatatagaagaatatgttacacttccaaatattgttttaayaaaatataaaaatggrttatttagccgractcatttttcggatatagttcgawtgaatcttcttgcacaacagggrggrctttggattgatgcaacgatttttrtgactagggatttagatttgtctatatttttcaaaaatgattttgtaagcttgagaacyacaatraaatctagtcctctttttattacgggrtactggacgacataytttgtatataygccctctaattttaaattggttcaatatactgctttattattaaataaatacaytgagaaatatgatcgctttatagattatttcttacaagattatataattactaargcaattaaagatttgaattatgaatcatacatggaagaacggcctgtattgggaaatcaacgwtggcttttagcagatttrgctaataaagttrtgacytcrgawcttcttcaacaatttaarcaagatacrgtrggaatttataaaktgacatataaatccaagtayattagaraaaaaaatggtagggaaacggtttataaaaaaattgtagaggatggagaatrycttgaa

SEQ ID NO: 1527 - DNA, 500 bp, Streptococcus pneumoniae
  misc_feature (1)..(500): tiling:Spneumo1:WAN024CXJ; Cluster includes WAN02439B spr2 022|mreD|15904063|NP_359613.1|2014115..2014609|-|495 bp|Ce ll-shape determining protein MreD|S.pneumoniae|R6|NC_00309 8.1|ORF|110
atgagacagttgaagcgagttggagtatttttattgcttcctttctttgttctaattgacgcccatattagccagcttctgggctcatttttcccccatgtacatttggctagtcattttctttttctatttctcttatttgagacgatagaagtatcagagtatctctacctagtctattgttttgttataggcttggtttatgatgtttactttttccatctaatagggattacaactctcttatttatcttattgggagccttccttcataaattgaatagtgttattttgttgaatcgttggacaagaatgctagctatgattgtgctgacattcctgtttgaaatgggtagttatcttttggcttttatggtagggttgacagtagatagcatgtcgatttttatagtctatagcttggtaccgacgatgattttaaattttttatggattactgtttttcaatttatttttgaaaaatattatctataactaat

SEQ ID NO: 1528 - DNA, 327 bp, Streptococcus pneumoniae
  misc_feature (1)..(327): tiling:Spneumo1:WAN024DF7; Cluster includes WAN0244A9 spr0 689||15902733|NP_358283.1|690017..690337|-|321 bp|Hypothet ical protein|S.pneumoniae|R6|NC_003098.1|ORF|111
atgagacataaattccagcaagttctarataaaatacatgattttttaaatggayatgaycaacctgaccagactgaaaccaactcccttacagccactattgaagaggctatccagaaacaaaccgctgttcaccttatcttgtctgagacaagytttacaggtgayatcatcaaatatgatcagcaaggccagcaaattatcgtgaaaaattttkccaaaaatgtgagccggattatccgtataagcgatattcaacgcctgcgatttgtcccctcaactgtccaaacagcccaaaaaaatagatttaagaaagagykaactaat

SEQ ID NO: 1529 - DNA, 144 bp, Streptococcus pneumoniae
  misc_feature (1)..(144): tiling:Spneumo1:WAN024CMH; Cluster includes WAN023QVG cont ig_1358_2||||512..655|-|144 bp|Glimmer 2.02 orf prediction |S.pneumoniae|670|WAN01UE4S|ORF|001
atgagactagaaaggtctcattttttatggaaaaatgcaattcaggttgaaaamttgacagttgaggagatrgrctataaaatagacaaaaaagatgtatactgtagatgtaagcttacaaaaatttatagtgtattgaatcta

SEQ ID NO: 1530 - DNA, 114 bp, Streptococcus pneumoniae
  misc_feature (1)..(114): tiling:Spneumo1:WAN024CMI; Cluster includes WAN0242XL SP04 28||15900347|NP_344951.1|404907..405014|+|108 bp|hypotheti cal protein|S.pneumoniae|TIGR4|NC_003028.1|ORF|020
atgagactagaaaggtctcattttttatggaaaaatgtaattcaggtcgaaaaattgccagttgaggagatgggctataaaatagacaaaaaaagaaatatactactaactaat

SEQ ID NO: 1531 - DNA, 611 bp, Streptococcus pneumoniae
  misc_feature (1)..(611): tiling:Spneumo1:WAN024EWZ; Cluster includes WAN0243L3 spr1 597||15903639|NP_359189.1|1574427..1575032|-|606 bp|Hypoth etical protein|S.pneumoniae|R6|NC_003098.1|ORF|211
atgagactgatgaaaatatggtataatgaaataaaggagttttatatgcaaaaatttattcaggcttatattgaaaagctagatgtgacaaccattatcgagaatattctaaccaaggtcatttctcttttactgcttttrattgtattttatattgctaaaaaaatgcttcataccatggtgcagagaattgtcaaaccttctctaaaaatgtctcgtcatgatgtyggacgccaaaaaaccatctcacgtttactagaaaatgtgtttaattatacgctatatttctttttactctactgcattttgtcgattttaggtttgccagtttctagtttgctggctggagctggtattgctggggtagcgattggtatgggagcccaaggctttctgtctgatgtcatcaatggctttttcatcctctttgaacgtcaactggatgtgggagatgaggtcgttctgacaaatggaccgattactgtatcgggtaaggttgtcagtgtgggaattcgtacgacacagcttcgtagcgaggagcaagyccttcactttgtccctaaccgaaatatcacagttgttagcaatttctcacgcacagactarctaat

SEQ ID NO: 1532 - DNA, 2064 bp, Streptococcus pneumoniae
  misc_feature (1)..(2064): tiling:Spneumo1:WAN024FGR; Cluster includes WAN0243NA spr1 517|pbp2b|15903560|NP_359110.1|1494216..1496273|-|2058 bp| Penicillin-binding protein 2B|S.pneumoniae|R6|NC_003098.1| ORF|231
  misc_feature (1011)..(1011): n is a, c, g, or t
  misc_feature (1185)..(1185): n is a, c, g, or t
  misc_feature (1251)..(1251): n is a, c, g, or t
  misc_feature (1378)..(1378): n is a, c, g, or t
  misc_feature (1807)..(1807): n is a, c, g, or t
  misc_feature (1819)..(1819): n is a, c, g, or t
  misc_feature (1841)..(1841): n is a, c, g, or t
  misc_feature (1843)..(1843): n is a, c, g, or t
  misc_feature (1864)..(1864): n is a, c, g, or t
  misc_feature (1870)..(1870): n is a, c, g, or t
  misc_feature (1951)..(1951): n is a, c, g, or t
  misc_feature (1972)..(1972): n is a, c, g, or t
  misc_feature (1999)..(1999): n is a, c, g, or t
atgagactgatttgtatgagaaaatttaacagccattcgattccgattcggcttaatttattgttttcaatcgtcattttactctttatgaccattattggtcgtttgttgtatatgcaggttttgaacaaggatttttaygaaaaaaagctagcytcagctagtcagaccaagrtyacaascagttcwgcycgtggggaaatytatgatgctagtggaaaacctttggtagaaaatacrttaaarcaggttgtttcctttacgcgtagyaataaaatgackgctamagayytraaagaaaymgctarwmagttrctgrswtatgtgagyatyagytckccaaatttgacagaacgccagctggckgattactatttggctgatcctgaaatctataaaaaaayagtggaagctctcccragygagaaacgmttggattcagatggcaatcgyctatccgaatcagaactgtataacaatgykgtcgatagtgtmcmaacragtcwactaaaytatacagaggatgaaaagaaagaaatctatctytttagtcagttaaatgctgttggaaactttgcgacaggaaccattgykacagatcctctaaatgattctcagrtggctgttattgcmtctatttcaaaggagmtgmctggcatyagtatttcwacytcktgggatmgaaagrttttrgaracytchctttcktctatagtwggdagtgtatccagtgaaaaagcyggtctycmagckgaagaagyrgawdcytatmtyaaaaarggbtattctytaaatgaycgtgtwggracytcbtayytggaaaarcaataygargaraccttrcaaggdaarcgmtcggtaaaagaaatccatctggayaaatatggmaayatggaaagygtggayacaawtgaggaaggtagtaagggaaacaatatcaarctgacyattgatttgkcyttycaagatagygtrgayrmyytdytkaaragttayytyaattchgarytnrvaaatggdggdscyaartaytcwgarggygtbtatgcagthgcyytdamycchaaracasgtgckgtdttrkchatgtcagrrmthaaacayrayytrramacrggarabttracdcmdgaytccttggkwacdgtramcaatgtcttyrthccvggdtcdgthgtyaargcngckaccatcagytcwggytgggaraayggdgtbttrtcaggraaycaraccttrrcagaycarycnatygtyttycaaggttcakctccvatywattcttggtaymmhbhskywtmyrrwycwwtbcckatyacrgcdgtbsargcyytrgagtattcwtchaatrsytayatggtymwaacvgcyyydrggnhtyatgggbcaracytaycaacchmmtatstttstyggmacyagcaabytrgarwmwgctatggrdaaaytkygtkcdacctttggygaatatggytkgggbdctgcgachggrattgayctaccagatgaatytactggatttrttcccaaagastatarctttgcyaattwcatyacyaatkchtttggscagtttgatwactayacvccvwtgcarttrgcycaktaygtdgcractattgcwaayrmtggtgktcgtgtggctcctcgtattgtkgraggyatttatgghaataatgayaagggagghytrggygacttgaytcagcaactgcaaccgacagagatgaayaaggtcaatatwtcygamtchgatatgrshrtyttgcaycaagghttttaycargtwkcbcatsgdamtmgysvnytkacvachggncgkgcbktttymratsghgcmnbngtdtcbatyagyggdaarwcnggtacngsygaaagytatgtdgmdgrwgkhcarvaagchrmyaayacyaaygcbgtrgcytatgchccawchgawaatccycaaatngcwgthgchgtdgtcttyccncataayaccaayytdacmaawrrtgtnggvccddchattgcdcgygayattmtcaayhtvtatmammaayaycatcyvaksaaytarctaat

SEQ ID NO: 1533 - DNA, 2058 bp, Streptococcus pneumoniae
  misc_feature (1)..(2058): tiling:Spneumo1:WAN024FGP; Cluster includes WAN02401J |PBP 2B||CAA80195.1|||1212 bp|penicillin-binding protein 2b|S. pneumoniae||Z22185|ORF|000
atgagactgatttgtatgagaaaatttaacagccattcgattccgattcggcttaatttattgttttcaatcgtcattttactctttatggccattattggtcgtttgttgtatatgcaggttttgaacaaggatttttacgaaaaaaagctagcctcagctagtcagaccaagattacaagcagttcagcccgtggggaaatttatgatgctagtggaaaacctttggtagaaaatacgttaaagcaggttgtttcctttacgcgtagcaataaaatgacggctacagacttaaaagaaacagctaaaaagttactgacttatgtgagcatcagttctccaaatttgacagaacgccagctggcggattactatttggctgatcctgaaatctataaaaaaacagtggaagctctcccaagcgagaaacgcttggattcagatggcaatcgtctatccgaatcagaactgtataacaatgcggtcgatagtgtacaaacgagtcaactaaactatacagaggatgaaaagaaagaaatctatctttttagtcagttaaatgctgttggaaactttgcgacaggaaccattgcgacagatcctctaaatgattctcaggtggctgttattgcctctatttcaaaggagatgcctggcattagtatttctacttcttgggatagaaaggttttggaaacttccctttcttctatagttgggagtgtatccagtgaaaaagctggtctyccagcggaagaagcagaagcctatcttaaaaaaggctattctctaaatgaycgtgtaggaacctcctatttggaaaagcaatatgaagagaccttacaaggaaaacgmtcggtaaaagaaatccatctggataaatatggcaatatggaaagcgtggatacaattgaggaaggtagtaagggaaacaatatcaaactgaccattgatttggcyttccaagatagcgtggatgctttrctgaaaagttatttcaattcygagctagaaaatggtggagccaagtattctgaaggtgtctatgcagtcgcmcttaacccaaaaacaggtgckgttttgtctatgtcagggattaaacakgacttgaaaacrggagagttgacgcckgattccttgggaacggtaaccaatgtctttgtbccrggttckgttgtcaaggckgcgaccatcagctchggytgggaraatggagtcttrtcaggraaycagaccttgacrgaycarycsattgtyttycaaggytcrgctccvatyaattcttggtayactcargcytaygrttcattcccgattacagctgtggargccttggagtattcttctaatgcctatatggttcaaacggcyttkggcattatgggtcagacctatcaacccaatatgtttgttytaactaacaatttagaatccgcyatggggaaacttcgytcgacatttgckgaatatggtcttggwrcytcaacaggcattgaccttccagatgagtcaactggttttatwccaaaagagtataattttgctaattayattacyaatgcmtttggbcagtttgataactayackccbatgcarttrgcycagtaygtdgsaacyattgcmaayrayggkgttcgkrtkgcwcctcryattgtygarggsatttatggwaayaatgawmarggmggmytrggbracttratycartcwrytgaaycsamrgaratgaataarrtyaatatwtcygastcygatrtkwsyrtcytscamcaaggyttttatcargtkkcwcatggkrstagygshttgacaacyggwcgtgccttttcaaatggygcmwksgtatcsattagyggwaaaacdggtacwgccgaaaghtatgtkgmrgrtggwcarsaagcwamcaatacyaatgckgtggcctatgcmccatcwgataatccycaaatcgctgthgcwgtkgtcttycctcataayaccaayctwacaaatggtgtmggrccttccattgcgcgygayattatcaayctstatmammaayaycatcyaatgaaytag

SEQ ID NO: 1534 - DNA, 437 bp, Streptococcus pneumoniae
  misc_feature (1)..(437): tiling:Spneumo1:WAN024G8Q; Cluster includes WAN02445E spr0 864|lguL|15902908|NP_358458.1|856499..856930|+|432 bp|Lact oylglutathione lyase|S.pneumoniae|R6|NC_003098.1|ORF|110
atgagactggaacaggattgtccagtctttttaaaaataaaggagaaagatatggcttcaaaaatgctacacacttgcttacgagtagaaaatcttgaaaaatcaatcgcattttatcaagatgcttttggttttaaagaattgcgtcgcagagattttccagaccatgccttcacgattgtctatctaggtcttgagggygatgaytatgagttggagttgacttataactacgatcacggtccgtatgtggttggtgatgggtttgcccatatcgcyctcagtacacctgatcttgaggcacttcatcaagaacacagtgcaaaaggctatgaagtgactgagccaaatggtctaccaggaactacaccaaactattactttgtyaaagaccctgatggatataaggtcgaagtcattcgtgaaaaataactaat

SEQ ID NO: 1535 - DNA, 242 bp, Streptococcus pneumoniae
  misc_feature (1)..(242): tiling:Spneumo1:WAN024D8J; Cluster includes WAN0243SY spr1 313||15903356|NP_358906.1|1303163..1303399|-|237 bp|Hypoth etical protein|S.pneumoniae|R6|NC_003098.1|ORF|111
atgagagaaatcatgctactgcaactattttctttatatttcgagagtttgatmttgaccaccatccttgttctgatttttttagggatttggattggtctgagagccatgtcgggagttgataagacagccarggctcgccaagcccatctctatgatatgattatgattggagtcttggttgtcccagtattatcctttgcggttatgagtttaattcttgttttcaaggcataactaat

SEQ ID NO: 1536 - DNA, 177 bp, Streptococcus pneumoniae
  misc_feature (1)..(177): tiling:Spneumo1:WAN024C5E; Cluster includes WAN023Q7U cont ig_1255_6||||2509..2685|-|177 bp|Glimmer 2.02 orf predicti on|S.pneumoniae|670|WAN01UEGK|ORF|001
atgagagaagttattcaagaattgttagacagttcgatgtctacatctgctatttcccaaggtgctggagttccatggactactgtttctgacctcagaaaaggaaaaacaagcatggacaaaatggcacttctcacagcagaaaaactttatgaatttgctacaactgataagcag

SEQ ID NO: 1537 - DNA, 1352 bp, Streptococcus pneumoniae
  misc_feature (1)..(1352): tiling:Spneumo1:WAN024CU8; Cluster includes WAN0244A6 spr0 692|gor|15902736|NP_358286.1|691587..692933|-|1347 bp|Glut athione oxidoreductase|S.pneumoniae|R6|NC_003098.1|ORF|111
atgagagaatatgatatcattgctatcggtggaggtagcggaggaatcgctaccatgaaccgtgctggtgaacatggagccmaagcagccgttattgaggaaaagaaattaggtggaacctgtgtcaacgtcggttgtgttcctaaaaraatcatgtggtacggggcrcaaatcgctgagactttccatcaatttggagragactacggctttragactactgatcttaactttractttgcaaccctacgtcgcaatcgtgaakcctacattgatcgcgctcgttcttcttatgatggyagttttaaacgcaacggtgtagacttgattgaaggtcatgctgaatttgtagattctcatactgtaagcgtaaatggtgaactgattcgtgctaaacatatcgtgattgctacaggtgcccatccaagtattcctaatattcctggtgctgagctaggtggctcttctgatgatgtatttgcctgggaagaacttccagagtcarttgccattctaggcgctggttatatcgccgttgaattagctggcgtactccacacttttggtgtcaagacagatctctttgttcgccgcgatcgtcctttacgtggttttgattcctacatcgttgaaggtttggtcaaggaaatggaaagaacaaacttaccacttcacactcacaaagtccctgtcaagttagaaaaaactactgacggcattaccattcatttcgaagatggtactagtcacacagctagccaagttatctgggctacaggycgccgtccaaacgttaagggcttgcaacttgaaaaagctggagtgactctgaacgaacgtggctttatccaagtggatgaataccaaaatactgttgttgagggaatctatgctctaggtgatgtaacgggcgagaaagaactgactccagttgcaatcaaggccggacgtaccctatctgaacgtctctttaacggaaaaactactgcaaaaatggattactcaactattccaactgttgtcttttcacaccctgctatcggaactgttggtttgacagaagagcaagctattaaagaatacggtcaagaccaaatcaaggtttayaaatcaagctttgcatctatgtactctgcttgcactygcaaccgtcaagaatcccgtttcaaactcataacagctggttcagaagaaaaagttgtcggacttcatggaattggctacggcgttgatgaaatgattcarggatttgccgttgctatcaaaatgggagcaaccaaggctgactttgaygcaactgtrgcrattcacccaactkcatctgaagaatttgtaaccatgcgttaactaat

SEQ ID NO: 1538 - DNA, 358 bp, Streptococcus pneumoniae
  misc_feature (1)..(358): tiling:Spneumo1:WAN024CYP; Cluster includes WAN0243BR spr1 934||15903975|NP_359525.1|1915450..1915791|+|342 bp|Conser ved hypothetical protein|S.pneumoniae|R6|NC_003098.1|ORF|1 11
atgagagacgatatcaaaatcaatgaccgtgctttggccttgcaagaccaaatyatcgaaaaactagagaaagtttttgatacagatgtggaattggatgtttacaatctaggtctgatttatgaaatcaatctggatgaaacggggctctgcaagattgtcatgaccttcaccgatactgcctgtgattgcgccgaaagcctrcctattgaaatcgtggcaggtctgaaacaaatcgagggtatcraagatatcaaggttgaagttacctggtcgcctgcttggaaaatcacacgaatcagtcgctatggccgtattgcccttggaytaccacctcgttaasyarkccaatcacttt

SEQ ID NO: 1539 - DNA, 474 bp, Streptococcus pneumoniae
  misc_feature (1)..(474): tiling:Spneumo1:WAN024CSY; Cluster includes WAN0242HA SP10 64||15900934|NP_345538.1|999419..999892|+|474 bp|transposa se, IS200 family|S.pneumoniae|TIGR4|NC_003028.1|ORF|020
atgagagaggataatcaaagtttatcacataccacatggaattgtaaatatcatattgtttttgcacccaaatatcgtcgtcaaatcatttatggcagatacaaagctagtatcggaagaatcatacgtgacttatgtgagcgtaagggtgtaataatccatgaagcgaatgcttgttcagaccatattcacatgcttatcagtattcctccgaaacttagtgtttcgtcctttatgggctatttaaagggcaagagcagtttgatgatttttgataagcatgcgaatttaaaatacaaatatggcaatcgcaagttttggtgtagaggctattatgtagatacggtaggccgtaatcagaaagtgatagctgaatatattcagaatcaattacaagaagacagagtagcagaccagctcacgttattcgagtcagtagatccgtttactggcgaaataaataagaggaagtaa

SEQ ID NO: 1540 - DNA, 1283 bp, Streptococcus pneumoniae
  misc_feature (1)..(1283): tiling:Spneumo1:WAN024GBJ; Cluster includes WAN02448Q spr0 744|pdp|15902788|NP_358338.1|740471..741748|+|1278 bp|Pyri midine nucleoside phosphorylase|S.pneumoniae|R6|NC_003098. 1|ORF|221
atgagagcagttgatttaatmcaaaaaaaacgagacggtcaagaactgacttcaagtgaaattgaatggctgrtagaaggctatgtrtcaggaactgttcctgattatcagatgtctgcctttgctatggctgtttattttaaaggaatgacgactcgagaaatctctgatttaacgatgaatatggttaagactgggcaagagtttgacctgtcagccattgatggtgtgaaagttracaagcattctactggtggtgtcggcgataaggtaaccttgattttagytcctcttgttgctagcttcggtgtgcctgtagcaaaaatgagtggtcgtrgtcttggccatacaggcggaacaattgataaattggagtccattargggctatcaagtagaacgtagtcaaraggattttattcgtcaggttcaggatattggagtatctgtcattgggcaatcagaccagctggtcaaagcagataagcttctctatgcccttcgtgatgtgaccgcaactgtcgacacgattcctttgattgcgagttcggtgatgagcaagaaaattgcggcaggggcggatgctattttgctagacgtgactgtcggtgagggtgccttcatgaagacggttgatgaggcgcgtgagttggctcaaactatggtagatcttggtaaggttgttggacggaagacagtagcagtgattacggatatgagccagcctttgggacgagcgattggaaatcgtctggaaatccttgaagcattggagattttgcaaggtcaaggacgtcaggatattacccactttatttgtgaattggctcaaattatgcttggtttggcaaatgttaacaaractgttgaagaagttcrccaacatcttgaraatggtcaagcactggctaagtttgargaaatggtgcaagcccaaggtggagacttggaagacctctatcgtcctgtaaatgtagctcatgtggtggaaatccctgctcakgaaacgggtgtcatttcagctcttccagctatggactttggtctttatgccatgaggctgggtgctggtcgtgcagttaagtctgatgycttggactatgaarcaggaattgtttttgaaaagaagattggagactccgttcaaaagggtgaaattgttgcaaaagtatacacaaatgaaaaaattccacctcaactagttacagatttccaaaaatgtgttaaaataagtgatgaagtraaaaaaatccgtgaaattgtagaaatcatctcctaactaat

SEQ ID NO: 1541 - DNA, 782 bp, Streptococcus pneumoniae
  misc_feature (1)..(782): tiling:Spneumo1:WAN024DBL; Cluster includes WAN02442X spr0 953||15902997|NP_358547.1|936148..936924|+|777 bp|Hypothet ical protein|S.pneumoniae|R6|NC_003098.1|ORF|111
atgagagggtttaataacaagataaagtctgtttatcaagaactaacaaattccaaagagaaattcggtagctttcacaagactttaattcatttgcatacacctgtttcttatgattacaagctattttctaattggactgcaacgaaatatagaaaaattactgaagatgaactatatgatatattttttgaaaataagaaaataaaagttgataagacaattttttttagtaattttgataaggttgttttttctagttcaaaagaatatattagttttcttatgttagcagaggcaatcataaaaaatggaatagaaatagttgtagtaactgatcataatactaccaaaggtattaaaaagttacaaatggcagtctcaatcataatgaaaaattatccgatttatgatatacatcctcatattttacatggagtagaaattagtgcagcagataaattgcatattgtatgtatatatgattatgaacaagaatcatgggttaatcaatggttaagtgaaaatattataagtgagaaagatggaagttatcaacattcactgactataatgaaggatttcaataatcaaaaaatagttaactatattgctcatttcaatagttatgacattttgaaaaaaggttctcacttatcaggtgcatataaacgaaaaattttttctaaagaaaatacacgattttggagtttaatattaactcgaaagaatyttcgcaacaacttgatattctctataaagaagttggtgtattaactaat

SEQ ID NO: 1542 - DNA, 1083 bp, Streptococcus pneumoniae
  misc_feature (1)..(1083): tiling:Spneumo1:WAN024CKH; Cluster includes WAN0242ZF SP03 52||15900281|NP_344885.1|325867..326943|+|1077 bp|capsular polysaccharide biosynthesis protein Cps4G|S.pneumoniae|TI GR4|NC_003028.1|ORF|010
atgagagtactgtttatactatctgataatatatatctaactccttacttcaatttttataaagaattattgaagaaactgtctattagttacgatgttatatattgggataagaatattaacgagattattacaaaacaaaactactatcgtatttctttttctggtaaaggaaaattaagtaagatattaggttatgtaaaattcagaaaagaaattaaaaagaagctaaaagaaaatgattatgatatgatattgccgttacatagtattgtgtctttcattttagtagattttcttctcttttcatttaaaaatagatatatttatgatattcgtgattacagttatgaaaaatttttggtttatcgtttggttcagaaacaattggtgaaaaattctttaatgaatatcgtttcttcagacggctataaattttttttaccaatgggagagtattttactacccataacctacccaatatgatagaattaaacgaggtaaagcagttaaaaaataatagtacgtttccaattcaactttcctacattggtttaattcgttttcaagaacaaaataaaaaaataatcgatttttttgcaaatgacagtcgatttcagttgaattttataggtactaatgcaggagaattaagggaattttgtcaagaaaaaaatatcagcaatgttaacttggtggacacattccagcctaaagataccatgtctttttataagaatacagatgttgttttgaatttatacgggaatcacactcccttactagactatgctttgtctaataaactctactttgctgcattgttgtataaacctattttagtttgtgaagatacttatatggaaaaagtgtcaatagagaatggttttggtttcgttttacctatgaaggatgaatcggaaaaagattgtttggctttgtatattcaaaaccttgacaggaaacagctaattaagaattgtgataacttcatggacagaattagtttagaaaaacaaaaaacagaaatagaattagagaagcgaatcttaagcttaaggaagaagaatgatctaactaat

SEQ ID NO: 1543 - DNA, 641 bp, Streptococcus pneumoniae
  misc_feature (1)..(641): tiling:Spneumo1:WAN024DHN; Cluster includes WAN0244G6 spr0 476||15902520|NP_358070.1|478869..479504|+|636 bp|Conserve d hypothetical protein|S.pneumoniae|R6|NC_003098.1|ORF|111
atgagagttagaaatcgtaaaggggcaacagaattactagaggcaaatccccagtatgtggtcctcaatcccttggaagccaaggcaaaatggcgggacttgtttggcaatgataatcccattcatgtggaagttggaagtggaaagggtgcctttgtttcaggtatggccaagcaaamccctgacatcaactatatcgggattgatattcaaaartctgttttgagctacgctttggacaaggtgcttgaagytggagtgyctaacatcaagctcttgtgggtagatggttctgacttractgactaytttgaagacggtgagattgatcgcttgtatctgaacttttcagatccatggccgaaaaaacgccatgaaaagcgtcgtttgacctacaagaccttyttggayaccttcaaacgtatcttgcctgaaaatggrgaaattcatttcaarmcggataaccgtggcttgtttgagtacagtttagtgagcttttctcaatatggcatgaaactcaatggtgtctggytagatttgcatgccagtgattttgaaggcaatgtcatgacagaatacgagcaaaaattctcaaacaaggggcaagttatctaccgagttgaggcagaattttaactaat

SEQ ID NO: 1544 - DNA, 77 bp, Streptococcus pneumoniae
  misc_feature (1)..(77): tiling:Spneumo1:WAN0249H8; Cluster includes WAN024E4Y-rc R 6.IG_2117||||1889900..1889976|-|77 bp|Between spr1910 (tyr S) (+ strand) and spr1911 (ctpC) (- strand)|S.pneumoniae|R 6|NC_003098.1|IG-rc|110
atgagagttattaacagcaaaaaggagttacctttctcgaggttaactcctttgtttatagataaatgttgaatagt

SEQ ID NO: 1545 - DNA, 710 bp, Streptococcus pneumoniae
  misc_feature (1)..(710): tiling:Spneumo1:WAN024DV9; Cluster includes WAN0243AK spr1 977|adcC|15904018|NP_359568.1|1968412..1969116|-|705 bp|AB C transporter ATP-binding domain - Zinc (Zn2+) permease|S. pneumoniae|R6|NC_003098.1|ORF|110
atgagatatattacggtagaggatttgtccttctattatgataaggagcctgtycttgaacatatcaattatwgtgttgatagtggggaatttgttaccttgactggggaaaatggagcggctaaracgacgctcatcaaggctagtcttggaattctgcaaccacgcattggaaaggtggctatttcaaagacaaatacgcaaggtaagaaattgagaatagcctatcttcctcaacaaattgccagttttaatgctggttttccaagtacggtctatgaatttgtcaagtcgggtcgctatccgagaaaaggctggttccgtcgtttgaatgctcatgatgaggagcatatcaaggctagtctggactcagttggcatgtgggaacatcgagacaaacgcttggggtctctatctgggggacaaaagcagcgagcggtrattgcgcgtatgtttgcttctgaccctgatgtgtttatcctagacgagccgacaacggggatggatgcaggaagtaaaaatgaattttacgaactcatgcaccacagcgcccatcatcatggcaaggctgttttgatgattacccatgaccctgaagaagttaaggattatgcggatcgcaatattcatctagtccgtaaccaagactcgccatggcgttgtttcaatgttcatgagaatggccaggaggtgggccatgcttarctaat

SEQ ID NO: 1546 - DNA, 1172 bp, Streptococcus pneumoniae
  misc_feature (1)..(1172): tiling:Spneumo1:WAN024FU6; Cluster includes WAN0243V7 spr1 232|aroC|15903275|NP_358825.1|1229171..1230337|-|1167 bp|C horismate synthase|S.pneumoniae|R6|NC_003098.1|ORF|441
atgagatatttaactgcaggagaatcacacggyccccgtctracagctatyattgarggaattccagctggactwccwttgacagctgakgatatcaatgrsgaccttaracgccgtcagggtggctacggtcgtggyggtcgtatgaagattgagarygaccargttgtctttacttcrggygttcgccaygggaagacgacaggggckcctattacyatggatgtcrtcaataaggaccaccaraaatggctggryatcatgtctgcrgaggacattgaagaccgccttaaaagcaarcgraaaatyacycatcctcgcccaggwcatgccgatttggttgggggsatyaagtaccgttttgatgatttgcgaaattctttggagcgttcatcagctcgtgaaaccaccatgcgggtggcagttggtgcagtagccaaacgyctcttggctgagctggatatggagattgccaaccatgtcgtggtctttggtggyaaggaaatmgatgttcctgaaaatctgacagtcgctgaaattaagcaaagagctgcccagtctgaagtttctattgtyaaccaagaacgagaacaggaaatcaaggactatattgaccaaatcaaacgtgatggtgataccatcggtggggttgtggagacagtygtcggaggcgttccagttggtyttggttcctatgtccaatgggatagaaaattggatgcaagattggctcaagctgttgtctctatcaatgcctttaaaggggtggaatttggtcttggctttgaggctggttatcgtaaaggcagccaagttatggatgaaattctctggtctaaagaagacggttatactcgccgtaccaataatctaggtggttttgaaggtggtatgactaatgggcaacccatcgttgttcgtggggtyatgaaaccyattcctactctttataaacctcttatgagtgtggatatcgaaacccaygaaccttacaaggcaaccgtggagagaagygatccgactgctcttccagctgcaggaatggtcatggaagcagttgtagcaacggttctggcgcaagaaatcctcgaaaaattctcatcagataatcttgaggaactaaaagaagcggtagccaaayaccgagactatacaaagaactattaactaat

SEQ ID NO: 1547 - DNA, 852 bp, Streptococcus pneumoniae
  misc_feature (1)..(852): tiling:Spneumo1:WAN024FFL; Cluster includes WAN0243MD spr1 550||15903593|NP_359143.1|1532170..1533021|+|852 bp|Conser ved hypothetical protein|S.pneumoniae|R6|NC_003098.1|ORF|1 01
atgagatgggattatggacaratttttaaagaaattcgaaagtcaaaaggattgacccaacaagatgtatgtggacaagtcatacatcgracaactctaacaaatattgaacacggtaaagttattcccagttttgaaaacatggtatttcttcttgaacaaattgatatgagcttggcagaattcaagtatatatgcaacgaataccatcctagtaaaaggcgagatattattgtagagagccaaaatccgtctacttttcaagatactagaaaaatggttgaactcactgagaaatgtcaaaaatatcttaagacacatcacgatgttcctattcaaaatatctatcgtcatacaaaaattgtcacagarttacgaactaaaggattcaaaaacaaccacgtcttgaaagatttgtmtgaagaaatttgggactatcttgaacctatggatacatggtacattagtgatttgaaattgcttggaaccattctctttttctttccttctgaaaatcttccccttcttattgatagaattatgaaaaccatcgagaaatataaatacttccgagaaacaaaagyatttttatcatcttttttagccaatctctccactgtatattttcaacatcatttattcaaagaatgtgaaacaatcaccctacaacttttggtattagcagaagaattaaaaatatacgatattcttggattctctcaagtacgcttgggaatactacaacataactccgatttgattgataaaggaataactttattacgactaaccaaagaagaggcattagttaaaatactcgaaaaagaaattaatgatttttcaaacctataa

SEQ ID NO: 1548 - DNA, 506 bp, Streptococcus pneumoniae
  misc_feature (1)..(506): tiling:Spneumo1:WAN024GMW; Cluster includes WAN0244I8 spr0 402|ilvN|15902446|NP_357996.1|399026..399526|+|501 bp|Acet olactate synthase small subunit|S.pneumoniae|R6|NC_003098. 1|ORF|111
atgagatgttgggggtgcagttccatgcgtagaatgttaacagcaaaactacaaaatcgttcaggagtcctcaatcgctttacaggtgtcctatctcgtcgtcaggttaatattgaaagcatctctgttggagcaacagaagatccgaatgtatcgcgtatcactattattattgatgttgcttctcatgatgaagtggagcaaatcatcaaacagctcaatcgtcagattgatgtgattcgcattcgagatattacagacaagcctcatttggagcgcgaggtgattttggttaagatgtcagcgccagctgagaagagagctgagattttagcgattattcaacctttccgtgcaacagtrgtagacgtagcgccragctcgattaccattcagatgacgggaaatgcagaaaagagcgaagccctattgcgagtcattcgcccatacggtattcgcaatattgctcgaacgggtgcaactggatttacccgcgattaactaat

SEQ ID NO: 1549 - DNA, 1206 bp, Streptococcus pneumoniae
  misc_feature (1)..(1206): tiling:Spneumo1:WAN024BFJ; Cluster includes WAN0243Q6 spr1 413|cca|15903456|NP_359006.1|1399941..1401140|-|1200 bp|tR NA nucleotidyltransferase|S.pneumoniae|R6|NC_003098.1|ORF| 121
atgagattaaygcaaatgccttctgaatttcagaaggctttaccagtattagaaaaaattaaagaagcaggctttgaggcttattttgttgggggctctgttcgagatgcccttctccatarccctatccacgatgtggatattgcgacgtcttcttatccagaagagaccaagcagatttttccgcgaacagccgatatcggaatcgagcatggaaccgtmttggtcttagatggggatgaggagtatgaggtaacaacctttcggacagaggatgtctatgtggactatcgcagacccagtgcggtttcctttgtrcgmtcgctagaagaagacctcaaacgccgtgatttcacagtcaacgcctttgccttggatgagacaggagaaatcgttgacttgttccatggtttagaagatttggaaaagcaagtcttgcgagcagttggagtggctagtgagcgtttcaacgaagatgctttacggattatgcgtggtttccgttttcaggctagtcttggttttgcacttgarccagaaacatttaaagctatgaagaccttgacgccgcttttggagaamatttctgtagagcgtaccttcgtcgagtttgataaactcttgctggctccattttggagaaggggcttggcttccatgattgagagtcaagcttatgactatctccctgatatggcatctagccaggacaagctcaacagactgtttgatttggagactgattttacttttgaatcctctgaacaagcctgggcgrctttactatgggctttggagattgaaaatgcgcagtcatttttgaaatcttggaagacctcacgccagtttgccaagcaagttcaggatttgctgattattttggctctgcgtgaaaatggagaattgagyaagcgwgattgttatcgctttgacwtrgatttrcttttacaggctgaaaatcttcgtcaagctcrrggaaaagaagtcaacccacaagycatyamagaaammtaccaragcttgactatycatgayaagaaagaratycaratyaayggcgrtattttgatcaaggaatatggctatcagccaggcccagacttgggagagattttaacagagattgagtttgccattgtcgatggagaattggagaataatcgtgaagccatccatgcttacctgagggagaaaaaaykaactaat

SEQ ID NO: 1550 - DNA, 272 bp, Streptococcus pneumoniae
  misc_feature (1)..(272): tiling:Spneumo1:WAN024CWG; Cluster includes WAN0244T7 spr0 007||15902051|NP_357601.1|8323..8589|+|267 bp|Conserved hy pothetical protein|S.pneumoniae|R6|NC_003098.1|ORF|111
atgagattagataaatatttaaaagtatcgcgaattatcaagcgtcgtacagtcgcaaaggaagtagcagataaaggtagaatcaaggttaatggaatcttggccaaaagttcaamkgasyygawakttmatgaccaagttgaaattcgctttggcaataagttgctgcttgtaaaagtactagagatgaaagatagtacaaaaaaagaagatgcagcaggmatgtatgaaattatcagtgaaacacgggtagaagaaaatgtctaactaat

SEQ ID NO: 1551 - DNA, 728 bp, Streptococcus pneumoniae
  misc_feature (1)..(728): tiling:Spneumo1:WAN024C6Y; Cluster includes WAN0244MA spr0 256|rsuA|15902300|NP_357850.1|258090..258812|+|723 bp|Ribo somal small subunit pseudouridine synthase A|S.pneumoniae| R6|NC_003098.1|ORF|110
atgagattagataaatttttagttgcctgtgcggtgggaagtcggactgaggtcaaaaacttgctcaaggctgggcgcgtgactgtaaatggtaaaaaagaaaaatcagctaaattkcarawwrawgaaaaaatagatgagattcgctwwratgggcaagtgttggagtatgaagagtttgtctactacatgatgaacaagcccaaaggagttatmtcagcgactgaggatcccaagcacagaaccgttctggacttgttggatgacttggcgcggagtaaggaarttttyccagtaggacgcttggatattracacgcatggtcttttgctcttgaccaatratggtcagctggctcatgttcttctttcgcccaagcgtcatgtggacaagacttatcwggcwcargtcaagggaatyatgacccaagaagatgtggagayatttryyragggyattcckctcaaagactttacctgtcarcccgctakactggagmttstwtccayagatrcagaaaagaatcaragccaaatccgtgtgaccattgcagaagggaagtttcatcagatcaagcgtatggtgggctactgtggcaaggaagtggtggacttgcaacgattgactatgggaactttagtattagatgagaacctrgaacgaggggaatggcgtcgcttgaccaaggaagaattagaaattctccgcgctaatattatttaactaat

SEQ ID NO: 1552 - DNA, 128 bp, Streptococcus pneumoniae
  misc_feature (1)..(128): tiling:Spneumo1:WAN024A3I; Cluster includes WAN024EDE-rc R 6.IG_1318.2.2.1||||1269996..1270123|-|128 bp|Between spr12 74 (- strand) and spr1275 (- strand)|S.pneumoniae|R6|NC_00 3098.1|IG-rc|110
atgagattgattacgatatagttaaagtgttagttcaataatcaatatatcattctaagtctatttkatatataaagtataytgtttaacgtttgatagaaaagatgctatactagaagtaggatgta

SEQ ID NO: 1553 - DNA, 672 bp, Streptococcus pneumoniae
  misc_feature (1)..(672): tiling:Spneumo1:WAN024GGH; Cluster includes WAN023LWJ 3145 26_1039||||543819..544490|-|672 bp|EGAD orf prediction|S.p neumoniae|R6|NC_003098.1|ORF|110
atgagatttttcttgatagaattgtcctacataggtcaaaaaatcctcatctggatcattgaagtaggggaagagattgacatcgcgctcgatragcttaccctgacggacaaagaaaacctgcacacacatccagcccttatccacatagtagccaaagacatcgcgattttgcaaatctttcgccatgacccgttgcttggttcgaagcgttccaatagcctgaatcaggtcacggtattccgccgcacgttcaaactccatactttgtgctgctactgccattttactcttgagatcatcgatgattttgtcatcctgacctttcagaaaatcagacacctcctgrgccatagacttgaaataagcctcatccttcttacagatggtgtgggccatrcaytgrccgatatggtaataaaaacagaccttagagggcgggttggtacacttacgaaaagggaatatccgatccagcaaccgcttgatttcattggctgcccccacatcgggatagggtccaaaataaagacytccgtcctttttgacctgacgagtgataatcaagcgtggatagcgctcattggtgattttgatgaaaggataggacttgtcatccttgagcatgatattgtacttgggcttgttttccttgatcaggttgatttctag

SEQ ID NO: 1554 - DNA, 249 bp, Streptococcus pneumoniae
  misc_feature (1)..(249): tiling:Spneumo1:WAN024GA6; Cluster includes WAN023LO7 3140 35_1489||||785714..785962|-|249 bp|EGAD orf prediction|S.p neumoniae|R6|NC_003098.1|ORF|110
atgagcaaagttataaacatcaatggtaaaaccacctgcagggcggttattgtactcgatggtaatataatcgtccccctcacggaagaactcaatatggaaaaaccgttctttcataccaaattctttgacaattgcttccccatacttgcgcagtttaggatccatatccttgagcacataataagaattgtccatcttataaatcatgaggtcaagcggtgtataggcgtagtcaaaggttgttga

SEQ ID NO: 1555 - DNA, 999 bp, Streptococcus pneumoniae
  misc_feature (1)..(999): tiling:Spneumo1:WAN024AT9; Cluster includes WAN0240C3 |cap 33fM||CAA07406.1|||999 bp|transmembrane protein|S.pneumoni ae||AJ006986|ORF|000
atgagcaaatttcgaaatattaacttagatttactaaaagtgcttgcatgtgttggagtcgttctacttcatacaactatgggtgggtttaaagagacaggtgcatggaattttttgacatatttatattacttaggaacctattctatccctctattttttatggtcaatggttatttattgttggggaagagagaaattacctattcctacatattgcaaaaaataaaatggctcctaataacagtgtcgtcatggacttttatcgtttggctgtttaaaagagactttacagagaacttaattaaaaaaattataggttctttgatacaaaaggggtatttcttccagttttggtttttcggtgcactcatacttatctatttatgtttgccaattttgagacaatttctaaattcaaaaagaagctatttatacagtttatctttattgatgactattggtttgatttttgagttatcaaatatcctacttcaaatgccaatacaaacatatgtaatacaaacttttagattatggacgtggtttttttactatcttttaggtggttatatagcgcaattcactatagaagaaatcgaatcaaggtttaagaattggatgaaaatagttagcatacttttgttattgatttcaccaataatattatttttcatagcgaagactatataccataatctatttgctgaatacttttatgatactttatttgtaaaagtcagtactttaggaatttttctaactatcctcatgcttactttgaatgaaaaccgaagagaatcgattgtttccctttctaatcaaacaatgggggttttcataatacatacttatattatgaaagtgtgggaaaaagtgcttggttttaattttgtaggagcatatttactttttgctctatttactttaagtgttagttttattattgttgggatgttaatgaagattccttacttcaatcgaatcgtcaaattataa

SEQ ID NO: 1556 - DNA, 1569 bp, Streptococcus pneumoniae
  misc_feature (1)..(1569): tiling:Spneumo1:WAN024FQQ; Cluster includes WAN0243TB spr1 300|guaA|15903343|NP_358893.1|1292606..1294168|-|1563 bp|G lutamine amidotransferase|S.pneumoniae|R6|NC_003098.1|ORF| 331
atgagcaacatttcaactgatttgcaagatgtagaaaaaatcatcgtattggactatggtagccagtacaaccagctgatttcacgccgtatccgtgagattggtgttttttcagaactaaaaagccataaaatttcagctgctgaagttcgtgaagtcaatcctgtaggaattattctatcaggtggtccaaattctgtatatgaagatggttcatttgatattgacccagaaatcttcgaactcggaattccaattttgggaatctgttatggtatgcagttattgacccataaacttggaggaaaagttgttcctgcaggtgatgctggaaatcgtgaatacggtcaatcaaccctaactcacacaccatcagcgctttttgaatcaacacctgatgaacagactgttttgatgagccatggtgatgcggttactgagattcctgctgactttgttcgtacaggtacatcagctgactgccyatacgcagccatcgaaaacccagataaacacatttacggtatccaattccacccagaagttcgtcattctgtatacggaaatgatatccttcgtaactttgcccttaacatttgtaaggctaaaggtgactggtcaatggataatttcattgacatgcagatcaaaaaaattcgtgaaaccgtcggtgataaacgtgtccttcttggtctatcaggtggtgttgactcatctgtcgttggggttcttctccaaaaagcgattggcgatcaattgatctgtatcttcgtagaccacggtcttcttcgtaaaggcgaagctgatcaagttatggacatgctcggtggtaagtttggtttgaatatcgtcaaagcagacgctgctaaacgtttccttgacaaacttgctggcgtttctgaycctgaacaaaaacgtaaaatcatyggtaacgagtttgtctatgtattcgatgacgaagcaagcaagctcaaagatgtgaaattccttgctcaaggtactttatatacagatgttatcgagtctggtacggatacagctcaaactatcaagtcacaccacaacgtrggtggtcttccagaagatatgcagtttgaattgattgaaccactcaatactctttacaaggatgaagttcgtgctcttggtacagagcttggtatgccagaccatatcgtatggcgccaaccattcccaggaccaggacttgctatccgtgtcatgggtgaaatcactgaagagaaacttgaaaccgttcgtgaatcagacgctattcttcgtgaagaaatcgctaaagctggacttgaccgcgatatttggcaatacttcactgttaacacaggcgttcgttcagtcggtgttatgggtgacggtcgtacgtatgactacacgattgcaatccgtgctatcacttctatcgatggtatgactgctgattttgccaaaattccatgggaagtacttcaaaaaatctcagtacgtatcgtaaatgaagtggatcatgttaaccgtatcgtctacgatattacaagtaaaccacctgcaacagttgagtgggarstaactaat

SEQ ID NO: 1557 - DNA, 236 bp, Streptococcus pneumoniae
  misc_feature (1)..(236): tiling:Spneumo1:WAN024DEI; Cluster includes WAN024487 spr0 763||15902807|NP_358357.1|759134..759364|+|231 bp|Hypothet ical protein|S.pneumoniae|R6|NC_003098.1|ORF|111
atgagcaagaaagataaaaaaatcgaaattcaagtagcggatgccaaagttaatgttggtaaagacagttttgaaggttatacattgactatcggtaaaaaagttatcggagaaattgccgaattagacggacaatttgccattataaagaatgggaatgtcgatagtttttataaaaaattggaaaaagctgtggaaattttgattgaaaattataatttagcaaaataactaat

SEQ ID NO: 1558 - DNA, 367 bp, Streptococcus pneumoniae
  misc_feature (1)..(367): tiling:Spneumo1:WAN024FKJ-5; Cluster includes WAN0243R6 sp r1377|metB|15903420|NP_358970.1|1360403..1361497|-|1095 bp |Cystathionine gamma-synthase|S.pneumoniae|R6|NC_003098.1| ORF|111
atgagcaaggaattacacattaacacaattttrgcmcargcrggkatyaagtcwgatgargcracaggtgcwttggtgacaccrcttcatttttcaacgacctatcagcatccagagtttggtcgatctactgggtttgactatacgcgmactaaaaatccaactcgtagtaaggctgaggaagtcttggcgrctattgagtcagcagactatgccytagcgactagctcagggatgtcagctattgtactggcctttagcgkctttccagtaggaagtaaggtcttggcagtgcgtgatctttacggyggttcttttcgctggtttaaccaagtggagcaggaaggtcrtttccattttacctatg

SEQ ID NO: 1559 - DNA, 867 bp, Streptococcus pneumoniae
  misc_feature (1)..(867): tiling:Spneumo1:WAN024FWT; Cluster includes WAN023PSR pne1 4_14||||10869..11735|+|867 bp|Type 9L capsule operon, Glim mer 2.02 orf prediction|S.pneumoniae||WAN01UCJV|ORF|000
atgagcaagttacttaataccatctattatcgactatttagattatataaaaaaatttatctacaagtttttagtaaaaaaacggttgacatcttgggtgaaaaggctaatttagaaaatgaactaattgtttcgtttacaacaattccaagtcgtcttaattatttaccaagtatgattaaaagtattttcaatcagacaattatccctaaccgttttattatgtatgtttataaagatgaatttgaaggcattaatttggagagtattctagaacttgaaatcaaaaatggtttggaaattgtctatgtggatgagaatcttcgttcacacaaaaaatatttttatgctatgaargataatccgaacagtatagttgttctagttgatgacgatatcatttatcctcgaaatactataaagaaactgattgcatcctatagaatttatccacagtgtgtttcagcaatgcgatgtcatcgaattaagttgttttctgatggaagtttatatccatataatcaatgggaatatgaaatatcaggagctactataccatcgtattttaatttttttactagcggaggtgggacattatttcctccatgtactcgcaatgaggatctttttaataaaaaaaatatcagggaactcagttttctagctgatgatgtatggttgaattttttggtagtcaaaaatggaattaaaacagtaaaagcaacacgatataaagggacaccattaactatagatgacaatcctgaggagagtttggtatatttgaatrccgtatatgataacaacaatgataaatgtattagaaatatggttgaatattatcaaattaattttacagaggataaa

SEQ ID NO: 1560 - DNA, 870 bp, Streptococcus pneumoniae
  misc_feature (1)..(870): tiling:Spneumo1:WAN024FWU; Cluster includes WAN024170 |cps 9vJ||AAM62294.1|||870 bp|putative alpha-1,3-glucuronic aci d transferase Cps9vJ|S.pneumoniae||AF402095|ORF|000
atgagcaagttacttaatgcaatctattatcgactatttggattatataaaaaaatttatctacaagtttttagtaaaaaaacaattaatattttaggtgaaaaggctaatttagaaaatgaactaattgtttcgtttacaacaattccaagccgtcttaattatttaccaagtatgattaaaagtattttcaatcagacaattatccctaaccgttttattatgtatgtttataaagatraatttgaaggtattaatttggagagtatcctagaaactgaaatcaaaaatggtttggaaattgtctatgtggacgaaaatcttcgctcgcataaaaaatatttttatgctatgaaggataatccgaatagtattgtaattttggttgatgatgacactgtctattcatcgaataccatcgaaaagttagttgcttcttacaggaaatacccaagttgtatttcggcaatgcgatgtcatcgaattaaactgcttactgatggaagtctggcaccatacaatgagtgggaatatgaatttttcggtgatattaaaccatcttactttaatttctttacaggttgtggaggagtactttttcctcctactgctcgaacagatgaattttttaatatttctaatataatgaatctcagttatttagctgatgatgtatggttgaattttttagcaataaaaaatagaattaaaatagtaaaagcaacacgatgtaagggaacaccattaactatagatgacaaccctgaagagagtttggtgtatctgaatgctatatatgataataataatgataggtgtatcaagaatatggtagatttttatcatattgatttttcagaggttgattaa

SEQ ID NO: 1561 - DNA, 588 bp, Streptococcus pneumoniae
  misc_feature (1)..(588): tiling:Spneumo1:WAN024CIZ; Cluster includes WAN0242AM SP13 20||15901174|NP_345778.1|1243772..1244353|-|582 bp|v-type sodium ATP synthase, subunit E|S.pneumoniae|TIGR4|NC_00302 8.1|ORF|011
atgagcaatttagaaaacttacgagartctgttattgaacaagctcatgaaaaagggmgtatgaaattattggattccaaaaagaagattgatgatgaatttgaaatgcaaaagtcgstcattrtaaagaaaaaagaagctgaacatgaacgaaagttaaaagaattrcaacagaaatatcaaataatttttcaacaattaaaaaataaggaacgccaatcaacgttagtatcaaaacagaaaatattaaaagaactttttcaatctgctttamtagaaatggaatcttggagtgcagataaagaaatggagttcatctatcgaattctggaacgatattcacaacaagaggtcatagtaacytttggggarcggactttagctaaattcaatttggaacaattagagaaattgaaattctcttttccaaatyatttatttagtgaacarcctatctcaaatgaatcaggcttacttatttcaataggtaaaattgatgataactatttgtataaaacrttaattggatcgatttctaaggaagaaagttcaagtatcgcaaatcaaatttttatcaatctaactaat

SEQ ID NO: 1562 - DNA, 320 bp, Streptococcus pneumoniae
  misc_feature (1)..(320): tiling:Spneumo1:WAN024G62; Cluster includes WAN02441A spr1 012|rplU|15903056|NP_358606.1|993785..994099|+|315 bp|50S Ribosomal protein L21|S.pneumoniae|R6|NC_003098.1|ORF|111
atgagcacatacgcaattatcaaaactggcggaaaacaagttaaagttgaagttggtcaagcagtttacgttgaaaaattgaacgttgaagctggtcaagaagttacttttaacgaagttgttcttgttggtgsygaaaayactgttgtcggaactccacttgttgctggagctactgtagttggaactgttgaaaaacaaggaaaacaaaagaaagtggttacttacaagtacaaacctaaaaaaggtagccaccgtaaacaaggtcaccgtcaaccatatacaaaagttgtcatcaacgcaatcaacgcttaactaat

SEQ ID NO: 1563 - DNA, 387 bp, Streptococcus pneumoniae
  misc_feature (1)..(387): tiling:Spneumo1:WAN024CRW; Cluster includes WAN023KS9 3145 98_2961||||1575972..1576358|-|387 bp|EGAD orf prediction|S .pneumoniae|R6|NC_003098.1|ORF|110
atgagcagrcttgccttgatgagttattttttacgggttgctgcgtattcggcaacggcggtaaagaggacatctgtagaagagttaagggctgtttcacatgagtcttggatgacaccaatcacaaaaccaaccccaacaatttgtatggcaatatcgttagaaataccgaaaaggctacaagcaactgggataagaaggagggaacctccggcaatacctgaagcaycacaggmtgagatagctgctaccacactgaggacaaaggctgtggcaaagtcaacaggaattccaagagtgttaactgyarcaagggtcaaaaggttaatggtaatcgctactccagccatattgatagtagaaccgagtgggatagaaacagaatag

SEQ ID NO: 1564 - DNA, 1455 bp, Streptococcus pneumoniae
  misc_feature (1)..(1455): tiling:Spneumo1:WAN024FTG; Cluster includes WAN023PV4 pne1 0_17||||15182..16636|+|1455 bp|Type 7C capsule operon, Gli mmer 2.02 orf prediction|S.pneumoniae||WAN01UCKC|ORF|000
atgagcatgaaagaaaaatcaataartaaaaatgctattttgaatattattttaacactaacaaatattgtgtttccattaattacttttccttatatttctagaattctgaatccgtcaggaataggygcaatctcttttttttcatctattggttcttatggtgttttagttgcytcgcttggaatttcaacttatgggattcgggtgattgcaaagratcgttatcataaagataagataactaaaatattccaagaattgatagttattaatagtgtaatgtctattatagtgacgttcttccttgttttaatgagtttccgattagagcagttaagttcagaaaaaggtttattaataatcacatgtattactattttgtcctctccttttaatttgaattggttttatagtggaatagaagagtattcatatataacaaaacgttcaatattttttaaattagtttcrttgatattaacctttttatttgttaaaagtaaagacgattatattmtatatgctgtgataayattgttttcaacattggcttccaattttataaatattttggagagtagaaaatacatcaattttaatttgagaaggratttagaatttagatatcatctaaaaccaatgtggtatttatttgcttcgttacttgcagttaatatttatayaaatttggattctgtgatgttaggaattattaatggaaatgatgcggtaggtatttactcaatcgcatcaaaagtaaaatggattttattatcagtcgttacttcagtgagttyagttttattacccagattatcattttatagcaataartatgacgaaacgaagtttaataatattttgagaaagtcatctacaataatttttatgatttcaattcctctaacaattttttttatgataaaagcgaaagagagtatattattgttaggtggagagcagtatattcaggcagttttagcaatgcaaatattaatgccgatcttgrtaatatcaggtttttcyaatattayaggtaatcagatattgatccctactggtaatgagaaatattttatgagagcagtttctataggrgcaatagtaaatttatgtttaaatttgttgcttatgcctatttkgggaattatcggaggtgcratcgcaactctttgtgcagaatyagtccaaatgattattcaattttatttttctcgtaataaattaatgggtaatatttcattaaattcaatcaaaaaartagcctattcatcaatttttgcgggtatactgttaatagtaatacaaaatattatagagaattttaatagcttcttaaatttagctgcwtctagtttyctatattttggagtatattttttcttattggtattgtttaaagaaagtacaattaagaaatttctaaatcaaattttttataaggatatttca

SEQ ID NO: 1565 - DNA, 243 bp, Streptococcus pneumoniae
  misc_feature (1)..(243): tiling:Spneumo1:WAN024DVH; Cluster includes WAN023KDF 3132 13_3643||||1962218..1962460|+|243 bp|EGAD orf prediction|S .pneumoniae|R6|NC_003098.1|ORF|110
atgagcatggataattgcatcgatatcatcacgagtttgatattgaatcaaatgcatataccattcgctagatggcaagcgttctccctctacaacatttccattaatatccatcactacaatatcggattctttgatttcaaagaaatcaatacccgacggggtaattgccatcaattgtttttcacgatcgaaaacgctgagattcccacctgttcctttcgtcaaatctgtttctactag

SEQ ID NO: 1566 - DNA, 724 bp, Streptococcus pneumoniae
  misc_feature (1)..(724): tiling:Spneumo1:WAN024CIU; Cluster includes WAN0242AC SP13 30||15901184|NP_345788.1|1254616..1255317|-|702 bp|N-acety lmannosamine-6-P epimerase, putative|S.pneumoniae|TIGR4|NC _003028.1|ORF|010
atgagccaaatttggactaaagaaaaatttataagccaagttcaaggtggagtcattgtttcttgtcaagctttacctggtgaagccctttataatgaagaatttagcttgatgccttttatggctaaagcagctttagaggcaggagcagtgggcattcgcgcaaattctgtgcgtgatattaaagcaattcagaaagtagtagatttaccaataattggaattatcaaaagggattatccacctcaagaaccatatattactgctacgatgaaagaagtagatgaacttgtagaatgcggaacaacagtcattgcatttgatgcaactttaagaccaagatatgatggcttagttgtcagtgaatttatcaaaaaaataaaagaaaaatatccgaatcaattgctgatggcggatgtaagtaatttagatgaaggtctctatgcatttaaatcaggcgttgattttgttggtacaacattatcaggttacacaagtacaagtgtacaatcagatgagcctgattttgaactaatgaaaaaattggctgattttaatattccggtaattgccgaaggaaaaattcattatccagaacaattaaaaaaagcttatagtttaggtgttaccagtgtagtcattggtggagcgattacacgtccaaaagaaattgctcagcgatttattaatgtcatcaaataamwaayaatataaaggagaaatc

SEQ ID NO: 1567 - DNA, 726 bp, Streptococcus pneumoniae
  misc_feature (1)..(726): tiling:Spneumo1:WAN024FW4; Cluster includes WAN023QE4 cont ig_1279_1||||74..283|+|210 bp|Glimmer 2.02 orf prediction| S.pneumoniae|670|WAN01UEE9|ORF|000
atgagccctactgctaacaaatttataactctatatcctaagtcagaatctgaagctaagagtatgatttgtaatcttacgaataaactgtcagaatttaaggctccaaaaatactatctgactatcaatgtggaatgcattctccagttcattatagatatggggcttttttaaaaaaacaagcttatgatgaaaaaaataaaaaagtcatctatttattgctagatgaaaaaaggatttattttcaaaccacatgtgaagtttcaagtaaggactctgcaataaataaatacaaaatagaaaaaattattaagagatcaaataaaggaaatgtttatcgggcaattagaaaatcggacgggcaaaaagtaatcatcaagcagtcaagaccttttgtgaattatgatgctgaaggagaatggacagctcttgatgatataaaaaatgaggcttacatgctaaaaaagttagccgataaaagttatactactaatttaattgatgaattttatatagtggatgattattttcttgttcaggaacaagttgacgggttaaactttgaagaatttattcgagaaacagaatactccttaaatattagagaaaaatcactagacaacattgtgaatatagtaaatgacatccataaactgggatataaaattgtagatatagctcctacaaattttatatataccaaaaatgtactgaccccaaacagt

SEQ ID NO: 1568 - DNA, 1859 bp, Streptococcus pneumoniae
  misc_feature (1)..(1859): tiling:Spneumo1:WAN024CNB-5; Cluster includes WAN02436S SP 0071||15900016|NP_344620.1|73761..79331|+|5571 bp|immunogl obulin A1 protease|S.pneumoniae|TIGR4|NC_003028.1|ORF|010
atgagccgaaaaagcattggtgagaaacgccatagtttctcgatgagaaagttgtcagtgggattggtatcagttactgtatctagtttctttttgatgagtcaagggattcaatcggtatcggccgataatatggaaagtccaattcattataagtatatgaccgagggtaaattgacagacgaggaaaaatccttgctggtagaggcccttccacaactggctgaagaatcagatgatacttattacttggtttatagatctcaacagtttttaccgaatacaggttttaacccaactgttggtactttcctttttactgcaggattgagcttgttagttttattggtttctaaaagggaaaatggaaagaaacgacttgttcattttctgctgttgactagcatgggagttcaattgttgccggccagtgcttttgggttgaccagccagattttatctgcctataatagtcagctttctatcggagtcggggaacatttaccagagcctctgaaaatcgaaggttatcaatatattggttatatcaaaactaagaaacaggataatacagagctttcaaggacagttgatgggaaatactctgctcaaagagatagtcaaccaaactctacaaaaacatcagatgtagttcattcagctgatttagaatggaaccaaggacaggggaaggttagtttacaaggtgaagcatcaggggatgatggactttcagaaaaatcttctatagcagcagacaatctatcttctaatgattcattcgcaagtcaagttgagcagaatccggatcacaaaggagaatctgtagttcgaccaacagtgccagaacaaggaaatcctgtgtctgctacaacggtgcagagtgcggaagaggaagtattggcgacgacaaatgatcgaccagagtataaacttccattggaaaccaaaggcacgcaagaacccggtcatgagggtgaagccgcagtccgtgaagacttaccagtctacactaagccactagaaaccaaaggtacacaaggacccggacatgaaggtgaagctgcagttcgcgaggaagaaccagcttacacagaaccgttagcaacgaaaggcacgcaagagccaggtcatgagggcaaagctacagtccgcgaagagactctagagtacacggaaccggtagcgacaaaaggcacacaagaacccgaacatgagggcgaassgscagtagaagaagaacttccggctttagaggtcactacacgaaatagaacggaaatccagaatattccttatacaacagaagaaattcaggatccaacacttctgaaaaatcgtcgtaagattgaacgacaagggcaagcagggacacgtacaattcaatatgaagactacatcgtaaatggtaatgtcgtagaaactaaagaagtgtcacgaactgaagtagctccggtcaacgaagtcgttaaagtaggaacacttgtgaaagttaaacctacagtagaaattacaaacttaacaaaagttgagaacaaaaaatctataactgtaagttataacttaatagacactacctcagcatatgtttctgcaaaaacgcaagttttccatggagacaagctagttaaagaggtggatatagaaaatcctgccaaagagcaagtaatatcaggtttagattactacacaccgtatacagttaaaacacacctaacttataatttgggtgaaaataatgaggaaaatactgaaacatcaactcaagatttccaattagagtataagaaaatagagattaaagatattgattcagtagaattatacggtaaagaaaatgatcgttatcgtagatawyt

SEQ ID NO: 1569 - DNA, 96 bp, Streptococcus pneumoniae
  misc_feature (1)..(96): tiling:Spneumo1:WAN024DMU; Cluster includes WAN023SH3 NC_0 03098.1_2528||||1965747..1965842|+|96 bp|Glimmer 2.02 orf prediction|S.pneumoniae|R6|NC_003098.1|ORF|110
atgagccttataccagagcttgctcttactattatagcagatgttatagctggaattatcttgtatttcgtctgcaaatggctagatggtaagaag

SEQ ID NO: 1570 - DNA, 351 bp, Streptococcus pneumoniae
  misc_feature (1)..(351): tiling:Spneumo1:WAN024C72; Cluster includes WAN023M6W 3143 81_493||||253075..253425|-|351 bp|EGAD orf prediction|S.pn eumoniae|R6|NC_003098.1|ORF|110
atgagcctttggaagtggtgctggttgggcatgttcaccatgaccgatagttcgrttaatcatcgcaccctgtcccaaactacggacgataatttcacgataaatctcttcttccggttcgatatagtgaacatttcccgtagccaraacaggcttgccaaggcggtctccaacctctatcaaactcttgataatggtctggagttcctccatatccttgacctgctctttrgcaatcaagggygcatagatagccggtggcatgacctcgataaartcataatacttggccacctcaaccgccgcatccacaccttgagaaacgaccacgtcaaaaacttcaccctctga

SEQ ID NO: 1571 - DNA, 231 bp, Streptococcus pneumoniae
  misc_feature (1)..(231): tiling:Spneumo1:WAN024BDE; Cluster includes WAN0241X1 SP18 34||15901663|NP_346267.1|1745467..1745697|-|231 bp|hypothe tical protein|S.pneumoniae|TIGR4|NC_003028.1|ORF|110
atgagcgatattcaggtaaatatccctggcgaatgcttgtatgacaaggtatttgttctttcatttataatttacaacatatcaacaaatttaaatatagtaaatgggatattttatattcaagctaagaaagatagcatcacttttgaatggaaggctaaagagcaaactaggaagttggccatagatagctcaaaaccctgctttgaggttgtagatatagtaaaatga

SEQ ID NO: 1572 - DNA, 390 bp, Streptococcus pneumoniae
  misc_feature (1)..(390): tiling:Spneumo1:WAN024GBG; Cluster includes WAN023LPW 3140 43_1401||||741062..741451|-|390 bp|EGAD orf prediction|S.p neumoniae|R6|NC_003098.1|ORF|110
atgagctacatttacaggacgatagaggtcttccaagtctccaccttgggcttgcaccatttcctcaaacttagccagtgcttgaccattctcaagatgttggygaacttcttcaacagttttgttaacatttgccaaaccaagcataatttgagccaattcacaaataaagtgggtaatatcctgacgtccttgaccttgcaaaatctccaatgcttcaaggatttccagacgatttccaatcgctcgtcccaaaggctggctcatatccgtaatcactgctactgtcttccgtccaacaaccttaccaagatctaccatagtttgagccaactcacgcgcctcatcaaccgtcttcatgaaggcaccctcaccgacagtcacgtctag

SEQ ID NO: 1573 - DNA, 363 bp, Streptococcus pneumoniae
  misc_feature (1)..(363): tiling:Spneumo1:WAN024BE8; Cluster includes WAN023M6G 3137 93_515||||263679..264041|+|363 bp|EGAD orf prediction|S.pn eumoniae|R6|NC_003098.1|ORF|110
atgagctcctccatcagttttttctttaatgagtccagctacatcttcaacttcgaggccgttaatcacaatgtcagcgcctacttcttttgcaagggcaagtttgtcattgttgatatcgactgcgataacatgagcattgaatacttttttagcgtattgaacagcgaggttaccaagtccaccagcaccgtaaagaacaacccattggcctggttcaacttttgcttctttgatagctttataggttgttactccagcacatgtgatagaagaagcttgggctggatcaagtccgtcaggaactttgacagcatagtcagcagttacgatacattgttcagccataccaccgtctactga

SEQ ID NO: 1574 - DNA, 264 bp, Streptococcus pneumoniae
  misc_feature (1)..(264): tiling:Spneumo1:WAN024FQ6; Cluster includes WAN023L4O 3141 19_2419||||1294339..1294602|-|264 bp|EGAD orf prediction|S .pneumoniae|R6|NC_003098.1|ORF|110
atgagctggctagagggaactttaccttgggatttgacaatttcagtaaaactggttgtccctcgcatcttttcttgtactcgagtactggaaacaaaggtgccgcttcctacacggcgctctaagacgccttcttcgactaatagagatacggcttggcggagggtcatgcgactgaccgcaaactgctcagctaaatctctttcactgggaagcctctcaccaatagcccaacggtrctcgtcaatatccttttttatctga

SEQ ID NO: 1575 - DNA, 348 bp, Streptococcus pneumoniae
  misc_feature (1)..(348): tiling:Spneumo1:WAN024CSF; Cluster includes WAN023LP0 3146 67_1453a||||767745..768092|-|348 bp|EGAD orf prediction|S. pneumoniae|R6|NC_003098.1|ORF|110
atgagcttcaayggcatccataccaatcttttccagataatcaactgcagtcgcaagtccaatagctcctgccatatttggcgttccagcctcaaatttccaaggcaattccttccaactagcarattgctcgtagacaaaatcaatcatctcgccgccaaattctactggagacatttgctcaagatacttttctttgccgtaaaggacaccgataccagtcggaccagccatcttgtgasccgaaaaggcgaaaaagtccagatccaagtcctggacatcaatcttcatatgaggtgtagattgagcaccatccactaccatrattgccccaacttggtgggctaa

SEQ ID NO: 1576 - DNA, 270 bp, Streptococcus pneumoniae
  misc_feature (1)..(270): tiling:Spneumo1:WAN024DLP; Cluster includes WAN023M77 3131 26_479||||245408..245677|+|270 bp|EGAD orf prediction|S.pn eumoniae|R6|NC_003098.1|ORF|110
atgagcttcgtagataacggcgtcttcacgagtcttgaaattgtgaatcttaccataagtcaagtcttgaggtccgagtttagctggatctacaaaggcggctttagccactttatgggcatcgtcaatyttggmatcgtcgctattccaagcagcaagagatttagcgtaaggatcgagtgcaagaacagttttaccttgacgctcgatttggtattgataatagtagccagtgaaatctgtgattccgagtttgtttgtgctgtctag

SEQ ID NO: 1577 - DNA, 378 bp, Streptococcus pneumoniae
  misc_feature (1)..(378): tiling:Spneumo1:WAN024D76; Cluster includes WAN023L4B 3138 27_2433||||1299381..1299758|+|378 bp|EGAD orf prediction|S .pneumoniae|R6|NC_003098.1|ORF|110
atgagctttagctgttccgatagttgtttttccatccttcttcttgatggtgacatccatgagaacaccacgttcagtccacttagcattctcttcatctcccatagattcaattcgttgattggaaatgaagttccccatttaatagataatgagtttcttatctccatctttttcaaccgtttcagatggttcaacaacgtgaggatgccctccaaagataatatccgctcccaaatcgatcatcttgtgataaagagctttttgttcttcagttggttccaatcgatactcaacacccatctgaagcatgataatggtgatatctgcttccttctctgcccgttcaatttcaaccttcatcttatcttcgtttaa

SEQ ID NO: 1578 - DNA, 372 bp, Streptococcus pneumoniae
  misc_feature (1)..(372): tiling:Spneumo1:WAN024CP4; Cluster includes WAN023LKR 3146 49_1688a||||895383..895754|-|372 bp|EGAD orf prediction|S. pneumoniae|R6|NC_003098.1|ORF|110
atgaggaacgatataagcattacccgtatcttcgataatatcagctggattaaagacataaccatcatttgtcgtatatcgtccctgagaccttgctacagcaacattagagttaaccttctcattatctttgacatgttcttgtttttgacgattgatttcatctttagttcgaacattatcagcatgagctgcatctttcaggtagacataatattttccatcgaccttgatgatataaccacccttgacttcattgacaatatcagcgtctttaagttgatagtttggatccttcatcaagagttcttcactaaagagggcatcataaggaactttcccattatagtaatgatagtggtcaccgtgtga

SEQ ID NO: 1579 - DNA, 1029 bp, Streptococcus pneumoniae
  misc_feature (1)..(1029): tiling:Spneumo1:WAN024FLM; Cluster includes WAN023OVC pne7 0_13||||10640..11668|+|1029 bp|Type 32F1 capsule operon, G limmer 2.02 orf prediction|S.pneumoniae||WAN01UCC2|ORF|000
atgaggaagcgatatgataatttggatggattacgagtaatttcttgtctgggtataatagcgatgcatattaaagctaatgctgactatcaaatttatggttggatatttgaagtgttcgtaccgtctttaacgttgcttgtctatttattcttacttattagtgggtttggaatgttttgtggctattacgagcgatttaaagaaggaaaaattgatctaaataatttttataaaaaaaggtataaaaagattatcccattttttgcttttttgatttttatagatattttagtagaacgaagtttttcgcatttgattgaaggatttactgaagctacacttgtcttcggccttctgccgaataatcaaccggatgttattggtgttagctggacgattggggttattttccttttctatatgctttttcctttttttgtatggctatgctgggataaaaagagggcgtttattagttttataatttcagttatattgaatatattttgtgagatatattacttcactgataagtttgttatagattcgtttgcgtcgcgtcatagttttttatactgctccccgttctttcttggaggtggcctcatttatatgtacagaaaggaaataaaagattttgtttcgcaacgtaaattgttctgcttacttggttgtttaggtattacaggtttccattatctattcattcaaccttggtttaaaatggataatttaggatctttattgttacttctttaccttccatggctttgctatgctataagcgttgatagtatagttcttagtaacaaagtaatgaaatattttagtaaaattagcttagaactttatttagcgcatatggtactttttcgagttgttgagaaaatgaatttcttatatttttttggtaaaggctggcttagcttcatattagtttttgtagctgttcttattggattgattttattgattgaatttttgaaaaagatgacaagtttttctaggagattgctaataaaggag

SEQ ID NO: 1580 - DNA, 282 bp, Streptococcus pneumoniae
  misc_feature (1)..(282): tiling:Spneumo1:WAN024GLG; Cluster includes WAN023M19 3143 59_822||||437095..437376|-|282 bp|EGAD orf prediction|S.pn eumoniae|R6|NC_003098.1|ORF|110
atgaggaatgacttgaacagttgccccaaggtattctccacggcgttctttacgaagaacttcactgtaaattttcccagttgtcacgttggaatatttgttgagattgatatcgatgaaacgttcatagtgacccaagtccaaatctgtctcagctccgtcatctgtcacaaaaacttccccgtgctggtaaggactcatggttcccggatcaatattgatataagggtcaaacttttgaatggttactttgagaccacgatttttcaagagacggcctag

SEQ ID NO: 1581 - DNA, 255 bp, Streptococcus pneumoniae
  misc_feature (1)..(255): tiling:Spneumo1:WAN024B5P; Cluster includes WAN023LQQ 3140 48_1355a||||721028..721282|-|255 bp|EGAD orf prediction|S. pneumoniae|R6|NC_003098.1|ORF|131
atgaggactttctttttatactcatctgytttcaaaaagcaytctaktccatctccgattamcgatggactttatcacctccttctccartccttgtatracatcttgragttgattcatgacatcttccaaagttyraaaggctttattcttaaatccacrtttacgaatctctttccacacttgttcaatggggttcatctctggtgtgtatggaggaataaakgyaaarccaatattagtcggaatctttaa

SEQ ID NO: 1582 - DNA, 659 bp, Streptococcus pneumoniae
  misc_feature (1)..(659): tiling:Spneumo1:WAN024DVJ; Cluster includes WAN0243AP spr1 972|fucA|15904013|NP_359563.1|1961864..1962517|-|654 bp|L- fuculose phosphate aldolase|S.pneumoniae|R6|NC_003098.1|OR F|121
atgaggaggacaagratgtcagatgtaaaacaagaattaattaartatggyaagaagctagtagaaacagatttgacgaaaggaacaggtgggaatctcagygttttcgatcgtgaaaaacaattgatggcaattaccccgtcgggtattgatttctttgaaatcaaagaatccgatattgtagtgatggatattaatggaaatgttgtagagggagaacgcttgccatctagcgaatggtatatgcatttgattcaatatcaaactcgtgatgatatcgatgcaattatccatgctcatacaacttatgcaacagtattagcttgtctcagagaaccacttccrgckagtcattatatgattgcagtggcagggaaagatgttcgggtagctgagtatgcaacatatggyacgaaagaattggctgtgaatgcagctaaagcaatggaaggtcgtagagcagttttactagcgaatcatggaattttagcaggtgcacaaaatttattgaatgcatttaatattgttgaagaagttgaatattgtgcaaaaatttattgtttagctaagaattttggagagccagtagttcttcctgatgaggagatggawttratggcagaaaaatttaaaacatacggtcagagaaaatarctaat

SEQ ID NO: 1583 - DNA, 102 bp, Streptococcus pneumoniae
  misc_feature (1)..(102): tiling:Spneumo1:WAN024CNE; Cluster includes WAN0246S7 5613 45-75-3||||||102 bp|DNA Streptococcus pneumoniae phage Dp- 1 open reading frame 271|S.pneumoniae||WAN0246S7|ORF|000
atgaggctgctttgctttatcttcgttaccgtattgaccgacttcctactcgcgaaccttcctacaagaattcatacctcaaaggctttttgtcagccttag

SEQ ID NO: 1584 - DNA, 1283 bp, Streptococcus pneumoniae
  misc_feature (1)..(1283): tiling:Spneumo1:WAN024DMO; Cluster includes WAN0244T4 spr0 010||15902054|NP_357604.1|10335..11612|+|1278 bp|Conserved hypothetical protein|S.pneumoniae|R6|NC_003098.1|ORF|111
atgagggaacmagattttttaaatcattttctcaagaagggatatttcaaaaagcatgctaaggcggttctagctctttctggtggattagattcyatgtttctatttaaggtattgtctacttatcaaaaagagttagagattgaattgattctrgctcatgtgaatcataagcagagaattgaatcagattgggaagaaaaggaattaaggaagttggctgctgaagcagarcttcctatttatatcagcaatttttcaggagaattttcagaagcgcgtgcacgaaattttcgttatgatttttttcaagaggtyatgaaaaagacaggtgcgacagctttagtcactgcccaccatgctgatgatcaggtggaaacgattttkatgcgcttgattcgaggaactcgcttgcgctatctatcaggaattaaggagaagcaagtagtcggagagatagaaatcattcgtcccttcttgcattttcagaaaaaagactttccatcaatttttcactttgaagatacatcaaatcaggagratcattattttcgaaatcgtattcgaaaytcttacttaccagaattggaaaaagaaaatcctcgatttagggatgcaatcttaggcatyggcaatgaaattttagattatgatttggcaatagctgaattatctaacaataytratgtggaaratttacagcagttattttcttactctgagtctacacaaagagttttacttcaaacttatctgaatcgttttccagatttgaatcttacaaaagctcagtttgctgaagttcagcagattttaaaatytaaaagccagtatcgtcatccgattaaaaatggctatgaattgataaaagagtaccaacagtttcagatttgtaaaatcagtccgcaggctgatgaaraggaagatgaacttgtgttacactatcaaaatcaggtagcttatcaaggatatttattttcytttggacttccattagaaggtgaatyaattcaacaaatacctgtttcacgtgaaacatccatacacattcgtcatcgaaaaacaggagatgttttgattmaaaatgggcatagaaaaaaactcagacgtttatttattgatttgaaaatccctatggaaaagagaaactctgctcttattattgagcaatttggtgaaattgtctcaattttgggaattgcgaccaataatttgagtaaaaaaacgaaaaatgatataatgaacactgtactttatatagaaaaaatagataggtaactaat

SEQ ID NO: 1585 - DNA, 712 bp, Streptococcus pneumoniae
  misc_feature (1)..(712): tiling:Spneumo1:WAN024AW5; Cluster includes WAN0244GB spr0 471||15902515|NP_358065.1|476175..476354|+|180 bp|Hypothet ical protein|S.pneumoniae|R6|NC_003098.1|ORF|110
atgagggaggatttctatgaaaaagtatcaacttctattcaaaataagtgcagtcttctcttacttatttttcgtatttrgtctttctcagctgacgcttatcgtccaaaaytattggcaattttcttcycagatwggcaatttmktctggattcaaaatatcttgagtttactwtttaktggagtcatgattgtggttcttgttaagacaggccatggttatctcttccgcattccaagaaaaaaatggctttggtattcgattttgacagtattagtgstagtgttmcagatctcttttaacgttcagacagctaaacatgttcagtcaactgcggaaggttgggctgtattgattggttatagtgggactaactttgcagagctaggtatttatatagccctgttctttctggttccactgatggaagaattgatttatagaggattactgcaacatgctttctttaagcattcgcgatttggycttgatttgcttcttccttcyattttrtttgctctycctcatttttyragyctgcctagtctgttagatatcttcgtctttgcaacakttggaatcatctttgcyggtttgacccgctataccaagagyatttatccatcctatgcggtgcatgtgatcaataatattgtagcgaccttcccgtttttgctcacttttctacatagggtcttggggctaactaat

SEQ ID NO: 1586 - DNA, 744 bp, Streptococcus pneumoniae
  misc_feature (1)..(744): tiling:Spneumo1:WAN024GI8; Cluster includes WAN02402S |cps 19bF||AAB66517.1|||648 bp|putative UDP-N-acetyl-D-mannosam ine transferase|S.pneumoniae||AF004325|ORF|000
atgagggatagaatccaacttttaggtktaacaattgatytgcttacgatgaatgaaacgatagataktgtagaacaatatgtattagaaaaaagaccactacacttgatgggsgtgaatgctgataaaattaatcagtgycatacagatgagaaaatcaaaaaaatcgttaatgagtcaggaatcattaatgcggatggagcatcagttgttcttgcaagtaagtttttaggaacgcctgttcctgaacgagtagcgggtattgatttgatgcaatgtcttttagagttgtcaaataaaaaaggatattcagtttacttttttggagcaaaagaagaagttttgcaagatatgctcaaagtatttaagagagattatccaaatttgatagttattggacacagaaatggctatttttctgaagaggatgaacaagctattcaagaagatattcgtgaaaagaaccctgattttgtgtttattggaattacgtctcctaaaaaagaatatattattcaaaaatttatggatagtggcgtcaattcggtatttatgggagttggcggtagttttgatgtcttgtctggtcatatccaacgagcacctctatggatgcaaaagtcaaatttagagtggttattccgtgtagctaatgagcctaaacgtctctttaaacgttattttgtagggaatatttcattcataggaaaagttttaaaagcaaaaagaggtgtaaaatattga

SEQ ID NO: 1587 - DNA, 890 bp, Streptococcus pneumoniae
  misc_feature (1)..(890): tiling:Spneumo1:WAN024DHA; Cluster includes WAN0244EX spr0 521||15902565|NP_358115.1|521360..522244|+|885 bp|Conserve d hypothetical protein|S.pneumoniae|R6|NC_003098.1|ORF|111
atgagggmaaaagaactacaagactggtttcctgaggctcggatttcagaccaaccagtagagaaagagggctatctcacgctycctttagcttctcagcagtggattttgctggaggaagctgggctcagcgagcgtgaaaagcagttggttgcccttttgacccagcaggagcaggctcgttcgctaaacccttggtattcctatctggttgarggcaagggacaggcaccgcaagtttttaaaaagattcagttggtttattgccatctttcttattttcagcaggaaaatctgrcttcttggctagatatgatgcggactctttttccgaattgtcagacagtgctacaggtcggakctcaggattatgttttcgtgcttcaacaagacaaatacacttctgtaagagatattttragtgatacgattgaagcggttgagtatgactttggacttcgtctttctatcatgttgggtcaggtttggtctcagacrggacatcaagccctatcagacttaatcaaagctgagcgggatttgttcaagacatggtggcgtcagggtcaccaaggtgttcatactttttctcarctctatctttggagtatgggagaaagactcgtggacttgaagccaatyaargaatgtctacaccagatgattttggatcaagatcagattcaggaaatcattctctctctttgggaaaatagtgctgttctcactaaaacagcccagcaactctatctgcaccgcaattctctccaatacaagattgataaatgggaagagttgacagggcttcagttgaaagagttgaccgacctgaccttgtgttatcaattgattttaggttctttgtcaactatagttggtttgtaactaat

SEQ ID NO: 1588 - DNA, 435 bp, Streptococcus pneumoniae
  misc_feature (1)..(435): tiling:Spneumo1:WAN024GOC; Cluster includes WAN023LDW 3151 28_2035||||1097383..1097817|+|435 bp|EGAD orf prediction|S .pneumoniae|R6|NC_003098.1|ORF|110
atgaggtggaatattggttgccatcccaaccgcgataccagttgctccattaaccaaaaggtttggaaaacgcgctggcaagaccaagggttcccgttcattggcatcatagttatcaacgaaatcaactgtatttttgttgatatcacgaagcatttccagagcaatcttgctcatacgtgcctcggtataacgttgagcggcagcactatctccatccatggaaccaaaattcccatgaccatctacaagcatgtaacggtagctccaccattgagccatacggaccatggcttcataaatagaggaatccccgtgtgggtgrtatttacccatgacatcccctgtaatacgagcagattttttatggggtttgtctggggtcacacccaattcattcattccgtagagaatgcgacggtgaacaggttttaa

SEQ ID NO: 1589 - DNA, 758 bp, Streptococcus pneumoniae
  misc_feature (1)..(758): tiling:Spneumo1:WAN024FVH; Cluster includes WAN0243VJ spr1 220|mecA|15903263|NP_358813.1|1217153..1217890|-|738 bp|Ne gative regulator of genetic competence|S.pneumoniae|R6|NC_ 003098.1|ORF|231
atgaggttactagcaatgaaaatgaaacaaattagtgatacaactttaaaaatcackatrtctttagaggatttgatggatcgtggaatggagattgctgactttctcgttcctcaagaaaaaacagaagagttcttttatgctatcttggatgarctagagatgcctgatagctttctggatacaggcatgttgagcttccgtgtgactccaaaaymksataargtagawstcttygtgwcyaastmawagattgaccaaaatctagattttgaagacttatcggatttgccagatatggaagaattggctcaaatgtctccagatgaatttatcaaaaccctggaaaaaagcatcgcagacaaaaccaaggatgatatcgaagccattcaatctcttgagcaagttgaagycaaggaagaagagcaagagcaggctgaacaagaagctgagagtaagaaagaaccttacatctactacatcctttcttttgctaagttggctgacttggtagyttttgccaagacagtgacttttgaaatggaaacttctgaactctacaaaatgaacgagcgctattatttgaccattttagtggatattgaaaatcatccaagcccatatccagcttggctgttggcccgtatgcgcgagtttgcagacgatagtgatatcagtcgctcagtcttacaagagtatggtcaagtcttgatgagtcacgatgcagtgctcaatctgcaaaaaatcggctaactaat

SEQ ID NO: 1590 - DNA, 902 bp, Streptococcus pneumoniae
  misc_feature (1)..(902): tiling:Spneumo1:WAN024CW8; Cluster includes WAN02441G spr1 006|rluD|15903050|NP_358600.1|988523..989419|+|897 bp|23S rRNA pseudouridine synthase|S.pneumoniae|R6|NC_003098.1|OR F|111
atgaggtttgaatttatcgcagatgaacatgtcaaggttaagaccttyttaaaaaagcacgaggtttctaagggattgctggcyaagattaagtttcgaggtggagckattctggtcaataatcaaccgcaaaatgcaacgtatctattggacgttggagactacgttaccattkacattcccgctgagraaggctttgaaaccttggaggctattgagcwtccattagatattctctatgaggatgaccactttctagtcttgaataaaccctatggagtggcttctattcctagtgtyaatcactctaataccattgccaattttatcaagggttactatgtcaagcaaaattatgaaaatcagcaggttcacattgttaccagactagatagggayacttctggcttgatgctctttgccaagcacggttatgcccatgcacgattagacaagcagttgcagaagaaatctatcgagaaacgctactttgctttggttaagggagatggacatttggarccagaaggggaaattattgctccgattgcgcgtgatgaagattccattattaccagacgagtggctaaaggcggaaagtatgcccatacttcatacaagattgtagcttcttatggaaatattcacttggtctatattcacctgsacactggtcgaacccatcaaatccgagtccatttttctyatatcggtkttcctttgctgggagatgatttgtatggtggtagtctggaagatggtattcaacgtcaggctctgcattgccattacctatccttttatcatccatttttaragcamgacttgcagttagaaagtcccttgccggatgatttyagtaaccttattacccagttatcaactaatactctataactaat

SEQ ID NO: 1591 - DNA, 2666 bp, Streptococcus pneumoniae
  misc_feature (1)..(2666): tiling:Spneumo1:WAN024DWQ; Cluster includes WAN0243BA spr1 951||15903992|NP_359542.1|1932727..1935387|-|2661 bp|Conse rved hypothetical protein|S.pneumoniae|R6|NC_003098.1|ORF| 221
atgaggttttacttcatggaaaatrttgttgtacatattatctcacatagtcactgggaycgtgagtggtacttgccttttgaaagccatcgtatgcagttggtggaattgtttgacaatctctttgatctctttgaaaatgaccctgagttcaagagtttccacttggatggacaaactattgtccttgaygactacttacaaattcgccctgaaaatcgygacaaggtccaacgctacattgacgmgggcaaacktaaaattggtcccttttacatcttgcaggatgactacttgatctccagtgaagccaatgtccgcaataccttgattggtcaacaagaagctgccaaatggggtaaatcaacccagattggctactttccagatacctttggaaatatgggacaagcgcctcaaattcttcaaaaatcaggcattcacgtggcgrcctttggtcgtggtgtgaagccgattggatttgacaaccaagtccttgaagatgagcagtttacrtcycagttttcagaaatgtactggcagggtgtggatggtagtcgtgttttaggtattctctttgccaactggtacagtaaygggaatgaaatyccagttgacaaagatgaggccttgaccttctggaaacaaaaattgtcagatgtgcgtgcctacgcttcgaccaaccaatggttgatgatgaacggctgtgaccaccagcctgtacagaaaaatctgagcgaagccattcgtgtggcaaatgaactcttcccggatgtaatctttgttcatagttcttttgatgaatatgttcaagctgtagaaggtgcgcttcctgaacacttatcaactgttacaggcgagttgaccagtcaggaaacagatggctggtacacacttgccaacacttcttcatcccgyatttacctaaaacaagccttccaagaaaatagcaacctcctagagcaagtggtagaacccttgactattatcactggtggacacaaccacaaggaccagttgacctatgcttggaaaacacttttgcagaatgcgccacatgatagtatctgtggctgtagcgtggacgaagttcaccgcgagatggaaacgcgttttgccaaggtcaaccaagtaggaaactttgttaaaagtaayttgctcaacgagtggaagggtaaaattgctacggataaggctcaaagtgactatctctttactgtcattaacacaggcttgcatgataaggtcgatactgtcwgcacagtgattgatgtggcgacttgtgatttcaaggaattgcacccaacagaaggctacaaaaagatggctgctcttatcttrccaagttaccgtgtggaggacttggatggtcgtcctgtagaggytacaatcgaagacctcggagctaattttgartayratttaccaaaagayaagttccgccaagctcgtattgctcgwcaagtgcgcgtgaccattccagttcacctagcrccgctttcttggacaaccttccaattgctggaaggaraacaagaacaccgtgagggtatttaccaaaacggagtgattgatacaccattcgtaacggtgagtgtggatgacaayatcacagtmtatgayaagacaactcacgaagcctatgaagaytttatccgcttygaagaccgkggkgacatcggaaacgagtatatctatttccaaccaaaaggaacagagccaatctttgcagagcttaaggrccacgaggtcttggaaaacacagmtygctatgctaaaatcttgctcaaacatgaattgaccgtgcctgtcagtgcggatgaaaagctagaagaagagcaacaaggtatcatcgagtttatgaagcgtgaggctggacggtcagaagaattgacaaacattcctctggaaactgagttgaytgtcttygttgacaatccacaaatccgcttcaagactcgctttactaacactgccaaggatcaccgtatccgtctcttggtcaagactcataacacgcgtccaagcaatgattctgaaagtatctatgaggtggtgacacgaccaaacaaaccagctgcttcatgggaaaaycctgaaaatcctcaacaccaacaagcttttgtcagtctgtatgacgatgaaaaaggggtgactgtatccaayaagggattgaatgaatacgaaatccttggggataacaccattgccgtgaccattttgcgtgcatcaggtgagctaggtgactggggctacttcccaacgccagaagcacaatgcttgcgkgartttgaagtcgartttgcrmttgaatgccaccaagcccaagaacgcttytcagcytwycgtcgtgcsaaagccttgcagacaccgtttaccagccttcagcttgctagacaggaaggaagcgtggttgcgactggtagcctcttgagccattctgttctcagcataccgcaagtttgtccaacagcctttaargtrgckgaaaatgaagaaggctatgtsctycgttactayaatatgwgtmrwgaaaatgtrcryrtrycagaamrtcaacawmycwtycttgacytacttgarcgaccatayccagttcattcaggacyattggmtccacaagagattcgtacagaattcatcaaaaaagaagaaatttaactaat

SEQ ID NO: 1592 - DNA, 1571 bp, Streptococcus pneumoniae
  misc_feature (1)..(1571): tiling:Spneumo1:WAN024GMN; Cluster includes WAN0244I1 spr0 409|glnH|15902453|NP_358003.1|404650..405585|-|936 bp|ABC transporter substrate binding protein - glutamine transpor t|S.pneumoniae|R6|NC_003098.1|ORF|311
atgagmmamatrtacytatctattttcacaagtctcttgctgatgctaggacttgtcaatgttgctcaagccgatgaatatttacgcatcggkatggaagcagcatatgctccctttaactggacccaggatgatgatagcaacggagctgtcaaaatcgatgggaccaatcagtatgccaacggatacgatgttcaaatcgccaagaaaatcgctaaggacttaggtaaagaacctttggttgttaaaaccaagtgggaaggtctagtccctgcccttacttctggtaagattgacatgattatcgcaggtatgagtccaactgcagaacgcaaacaagaaattgccttttcgagcagttactayactagcgaaccagttttgcttgtcaaaaaagattctgcctacgcaagtgctaaatctttggatgactttaayggtgcraaaatcacttctcaacaaggkgtctacctytayracttgattgcacaaatcccaggtgctaaaaaagaaacagccatgggagacttcgctcaaatgcgmcaagctcttgaggctggtgtcattgatgcttatgtttctgaacgtccagaagcactgactgctgaagctgcgaactctaagttcaagatgattcaagtagaacctggtttcaaaactggggaagaagatacagctatcgctatcgggcttcgtaaaaatgacaatcgtattagccaaatcaatgccagcattgaaaccatttcaaaagatgaccaagttgccttgatggatcgtatgatcaaggaacaacctgccgaagctacaacaactgaagagactagcagtagtttctttagccaagtygctaaaattctttctgaaaactggcaacaactcttgcgtggtgctggtatcactcttttaatctctatcgtcggaaccatcataggtctcattattggacttgccattggtgtmttccgtactgctcctctctctgaaaacaaagycatttayggcctwcaaaaactagtcggctgggttctcaatgtctacattgaaattttccgtggtacgccaatgattgttcaatcgatggttatctactatggaactgcccaagctttcggkatcaaccttgaccgtacactrgctgctatcttcatcgtttcaatcaataccggtgcctacatgactgaaatygtccgtggtggtatcctrgcagttgacaagggacaatttgaagctgcgactgctcttggtatgacycataaccaraccatgygtaagattgtcctacctcaggtwgtccgyaayatcctaccwgcaactggtaatgaatttgtcatcaatatcaaagatacatctgtattgaacgttatctctgttgtcgaactttatttctcaggaaataccgtggcaacacaaacctatcaatacttccagacatttacaatcatcgccgtgatttactttgtcctcaccttcaccgtaacacgtatcctacgmtttatcgagcgcmgaatggacatggatacctayactacaggtgctaaccaaatgcaaacggaggatttgaaataactaat

SEQ ID NO: 1593 - DNA, 1400 bp, Streptococcus pneumoniae
  misc_feature (1)..(1400): tiling:Spneumo1:WAN024C4A; Cluster includes WAN0244K4 spr0 334||15902378|NP_357928.1|338263..339657|+|1395 bp|Conserv ed hypothetical protein|S.pneumoniae|R6|NC_003098.1|ORF|22 1
atgagtaaaaaaagacgaaatcgtcawaaaaaagaagstcaagaaccgcaatttgattttgatgaagcaaaagagctaacagttggtcaagctattcgtaaaaatgaagaagtggaakcaggagtcttgcctgaggattccattttggacaagtatgttaagcaacacagagatgaaattgaggcggataagtttgcgactcgtcaatacaaaaaagaggagttcgttgaaactcagagtctggatgatttaattcaagagatgcgtgaggctgtagagaagtcagaagcttcttcggaggaagttccatcttctgaagacatcttactacccttgcctctggacgatgaggagcaaggcttggatcctctattgctagatgatgaaaatccaacagaaatgactgaagaagtggaagaggagcaaaacctttctcgtctggatcaagaggactcagaaaagaaaagyaaaaaaggctttattttgacygttttggcgcttgtatcagtaattatttgtgtcagtgcttattatgtctaycgtcaagtggctcgttcgacyaaggaaattgaaacttctcaatcaactacagccaatcartcggatgtggatgattttaatacactttatgacgccttttacacaratagcaataaaacggctttgaaaaatagccagtttgataaactgartcaactcaagacyttacttgataagctggaaggtagtcgtgaacatacgcttgccaaatctaaatatgatagtctagyaacgcaaatcaaggyyattcaagatgtcaatgcwcaatttgaraaaccagctattgtggatggtgtgttggataccaatgccaaagccaaatcggatgctaaatttacrgatattaaaactggaaatacggagcttgataaagtgctagataaggctatcagtcttggtaagagccagcaaacaagtacttctagctcaagttcaagtcaaactagcagctcaagytcwagtcaagcaagytcaaatacgactagtgagccaaaaccaagtagttcaaatgagactagaagtagtcgcagtgaagtcaatatgggtctctcgagtgcaggggttgctgttcaaagaagtgccagtcgtgttgcctataatcagtctgctattgatgayagtaataactctgcctgggattttgcggatggtgtyttggaacaaattctagcracttcacgttcacgtggctatatcactggagaccaatatatccttgaacgtgtcaatatcgttaacggcaatggttattacaacctctayaagccagatggaacctatctctttacccttaactgtaagacaggmtaytttgtcggaamtrrcgctggtcatgcggatgacttrgaytactaactaat

SEQ ID NO: 1594 - DNA, 1385 bp, Streptococcus pneumoniae
  misc_feature (1)..(1385): tiling:Spneumo1:WAN024GKD; Cluster includes WAN0243SO spr1 323|nox|15903366|NP_358916.1|1309395..1310774|-|1380 bp|NA DH oxidase|S.pneumoniae|R6|NC_003098.1|ORF|112
atgagtaaaatcgttgtagtcggtgctaaccacgctggtacagcatgtatcaataccatgttggataattttggaaatgagaacgaaattgttgtatttgaccaaaactctaacatctctttcctaggatgtggaatggctctttggattggtgaacaaattgacggtgctgaaggcttgttctattctgataaagaaaaattggaagctaaaggtgctaaagtttacatgaactcacctgttctttcaatcgactatgatrmcaaagtagttacagcggaagttgaaggaaaagagcacaaagaatcatacgaaaaattgattttcgctacaggytctacaccaatcttgccaccaatcgaaggtgttgaaattgttaaaggaaaccgcgaatttaaagcaactcttgaaaacgtacaattcgtgaaattgtaccaaaatgctgaagragttatcaataaactttytgacragagccaacacctcgaccgtatcgccgttgttggtggtggttacatcggtgttgaacttgctgaagcctttgaacgtcttggaaaagaagttgtccttgttgatatcgttgatactgtcttgaacggttactatgacaaagacttcacacaaatgatggcgaagaacttggaagatcacaacatccgcttggctstaggtcaaactgttaaagcaatcgaaggtgacggtaaagttgaacgcttgattactgacaaagaaagctttgacgtggatatggttatccttgcagttggtttccgtccaaacacagcccttgcagrtggtaagatcgaactcttccgcaacggtgccttccttgtagacaagaaacaagaaacatctatcccagrcgtttacgctgttggtgactgtgcgactgtttatgacaatgctcgtaaagatacaagctatatcgctcttgcttcaaatgctgtkcgcactggtawcgttggtgcywacaaygcttgtggacatgaattggaaggaatcggtgttcaaggttcaaatggtatctcaatctacggtcttcacatggtttcaactggtttgactcttgaaaaagcgaaagctgctggttacaacgcaactgaaacaggctttaacgatcttcaaaaaccagaattcatgaaacatgacaaccatgaagtagcaattaagattgtctttgacaaagatagccgtgaaattcttggtgcccaaatggtttcacatgatattgcaattagcatgggaatccacatgttctcacttgctatccaagagcatgtgacaattgataaattggcattgacagacctcttcttcttgccacacttcaacaaaccatacaactacatcacaatggctgcccttacggctgaaaaataactaat

SEQ ID NO: 1595 - DNA, 597 bp, Streptococcus pneumoniae
  misc_feature (1)..(597): tiling:Spneumo1:WAN024AVL; Cluster includes WAN0242N0 SP08 41||15900728|NP_345332.1|788408..788998|+|591 bp|conserved hypothetical protein|S.pneumoniae|TIGR4|NC_003028.1|ORF|0 11
atgagtaaaatgtactatgcagaaaatcctgacgctgctcacgacattcatgagttgagagtggacttgttgggagaaaaaatgacttttttgacagatgcgggtgtttttagcaagaaaatggttgactttggaagtcaactcttgctcaagtgtctggatgtcaaccaaggagagacagtcctagatgtaggctgtggttatggtccattaggtttgtccttggtcaaggtttacggagttcaggcgaccatggttgatattaacactcgtgccctggatttagctcagagaaatgctgaaaaaaataatgcaaaagcgacgatatttcaatctaatatttatgcaagagttcaagggcgattkgaccatgtcatttccartcctcctatccgtgcgggcaagcaagtcgttcatgaaatcatcgagaaamgtaaagatttcttggaaattggtggagatttgaccatcgtcatccagaaaaaacaaggagctccaagtgccaartctaagatggaagatgtgtttggcaattgtgaaatccttaaaaaagacaagggatactatatccttagaagtgtgaaagaaykaactaat

SEQ ID NO: 1596 - DNA, 591 bp, Streptococcus pneumoniae
  misc_feature (1)..(591): tiling:Spneumo1:WAN024AVK; Cluster includes WAN02448R spr0 743||15902787|NP_358337.1|739884..740474|+|591 bp|Conserve d hypothetical protein|S.pneumoniae|R6|NC_003098.1|ORF|100
atgagtaaaatgtattatgcagaaaatcctgacgctgctcacgacattcatgagttgagagtrgasttgttgggacaaaaaatgacctttttaacggatgcgggtgtttttagcaagaaaatagttgactttggaagtcaactattgctcaagtgtcttgaggtcaaccaaggagaaactgtccttgatgtaggctgtggttacggacctttgggtttgtccttagctaaggcttatggagttcaggctactatggttgatatcaacactcgtgccttrgatttagctcggagaaatgctgaaaaaaataatgcaaaagcgacgattttccagtccaacatctatgaacaagttgaaggacattttgatcatgtcatttccaatcctcctatccgtgcgggcaagcaagtcgttcatgaaatcattgagaaaagtaaagatttcttggaaactrgtggggatttgacaatcgtcatccagaaaaaacaaggggctccaagtgctaagtccaagatggaggatgtgtttggtaattgtgaaatccttaaaaaagacaarggatactatatccttagaagtgtgaaagaatga

SEQ ID NO: 1597 - DNA, 1280 bp, Streptococcus pneumoniae
  misc_feature (1)..(1280): tiling:Spneumo1:WAN024FUS; Cluster includes WAN0243VD spr1 226||15903269|NP_358819.1|1223749..1225023|-|1275 bp|Conse rved hypothetical protein|S.pneumoniae|R6|NC_003098.1|ORF| 111
atgagtaaagaaaatcccttaagtcatcatgagcagttgcgttatgattatttgctaaaaaatattcactatctcaatgagagagaaaaaaatgagtttgyctatttgcaagaaaagctaactcttgctaggggaaatagtagctctagcttggaacaagaaagagaagagcaggttgacttaccaagctatgcgaaccggagtcgctcacaatccaaatcacaagcactctctttccctccaaaaaagaaaagacggaagctccgtcttaaacgaatttttatggtgattttttcacttttggtctgtgtggctttggccatggtattcatgtttttgcgtggttaccaagatgctagcgcaaagaaaactgctgatgcccgggcagctcaagtagaagtctttaatggtcaggacactagagatggagttaatattttaatcatgggtactgatggtcgaatcggccagaacagtgttgagacacgaactgactctattatggtattaaatgtcgggggctcagataagaaaatgaagctagtcagtttcatgcgtgataatttggtctatatagatggttatagtcaagtgattaayggtagaaaacagacagataacaagttaaacgtagcctacgagttaggagaacaagargggcaaaaaggggcagaaatggttcgccaagtcttgaaagataattttgacttggacattaagtactacgccttggttgatttccaggcctttgccacagcgattgacacgcttttccctgatggggtgacgattgatgctcaattttcaacattgaatgggcgtcccctaacagaagctacagtcggagatgatttatacgctaccgagactgagtctccaacccaaaccattaaagtcggaaaacagcagatgaatggctcgaccctgctcaattatgctcgtttccgtgatgatgatgaggcrgattacggccgtacaaaaagacagcaacaagttttaacagcaattttagagcaaattaaagatcccactaaacttttcactggttctgaagctcttggaaaggtttttgctatgacctcaaccaacgtaccctatactttcctcctaacaaacggtttatctgttttggatggagcaaaaaatggtattgaaaaattgacgattccagaactgggtgactgggtagatgcctatgatgtttatggrggcttgggcytgctggttgatcaaaacaaatatcaaaccaagctcgctcaaatgggcttragataactaat

SEQ ID NO: 1598 - DNA, 1142 bp, Streptococcus pneumoniae
  misc_feature (1)..(1142): tiling:Spneumo1:WAN024F3H; Cluster includes WAN0244G4 spr0 478|nusA|15902522|NP_358072.1|480153..481289|+|1137 bp|Tra nscription termination|S.pneumoniae|R6|NC_003098.1|ORF|111
atgagtaaagaaatgctagaggccttccgcattttggaagaagacaagrgaatcaaaaaagaagatatcatcgacgcagtagtagagtcgcttcgttccgcttatcgcagacgctatggtcagtcagacagcgtagctattgacttcaacgaaaaaacaggtgactttacagtttatactgtccgtgaagttgttgatgaagyatttgatagccgtttggaaatcagcttgaaagatgctcttgccattaattcagcttatgaacttggagacaaaatcaagtttgaagaagcaccagctgagtttggtcgtgtagcagcccartctgccaaacaaaccatcatggaaaaaatgcgcaagcaaacacgtgccatcacttacaatacttacaaagaacatgagcaagaaatcatgtctggtacagtagaacgctttgacaaccgctttatctatgtcaaccttggtagcatcgaagcccaattgtcaaaacaagaccaaattcctggagaagtttttgcttctcatgatcgtatcgaagtttatgtttacaaggttgaagacaaccctcgtggtgtgaacgtctttgttagccgtagycatccagaaatgatcaaacgtttratggagcaagaaattccagaagtttatgatggaactgttgaaatcatgagcgtggctcgtgaagcaggtgaccgtacgaaggttgctgttcgtagccacaatccaaacgtggatgctatcggtacaatcgttggacgtggtggtgctaatatcaagaagattactagcaaattccacccagctcgttacgatgctaaaaatgaccgcatggtaccaatcgaagaaaatatcgatgttatcgagtgggtagcagatccagctgaatttatctacaatgccatcgctcctgctgaggttgaccaagttatctttgatgaaarcgacagcaaacgtgccttggtggttgttccarataacaagctttctcttgccattggtcgtcgtggacaaaacgtgcgcttggcggctcacttgactggttaccgtatcgatatcaagtctgctagcgaatttgaagccatggaagacgctgcttcagtagagttggaagtagaaaacgatactgtagaagaataactaat

SEQ ID NO: 1599 - DNA, 821 bp, Streptococcus pneumoniae
  misc_feature (1)..(821): tiling:Spneumo1:WAN024DYL; Cluster includes WAN0243CS spr1 897|pstA|15903938|NP_359488.1|1876225..1877040|+|816 bp|AB C transporter membrane-spanning permease - phosphate trans port|S.pneumoniae|R6|NC_003098.1|ORF|111
atgagtaaatacctgctaaaacttctcgtttattgtttttcagctttaacctttggctctctctttttartcattggttttatcctcatcaaaggyttacctcatctaagtctatccctcttttcttggacttatacttctgagaacatttcccttatgccagcgattatttccaccgttattctggtctttggtgctcttcttttagccttgcccatagggatttttgctggtttttatcttgtggaatatacaaaaaaagattccctttgtgttaaaatcatgcgattggcctcagataccttrtctgggattccttccattgtttttggtctgtttggcatgctcttctttgtagtcttcttaggttttcaatactctctgttatcaggaatcttaacctcagtyatcatggtgttgccagtcattattcgctcaacagaagaagcccttttatctgttagtgatagcatgcgtcaagcaagttatggacttggggcaggtaagttacggactgtttttagaattgttctaccagttgccatgccaggtattttagctggagtgatactagctattggccgtatcgttggtgaracagctgccctcatgtatacattaggtacctctaccaatacgccaartagtctcatgtcttcaggycgttctctagccctrcatatgtatatgctgtcaagtgaggggctacatgtcaatgaagcctatgctaccggygtgattttgattattactgttttaatgataaatactctatcaagcttattatctcgraaacttgtgaaaggagcttcctarctaat

SEQ ID NO: 1600 - DNA, 1386 bp, Streptococcus pneumoniae
  misc_feature (1)..(1386): tiling:Spneumo1:WAN024FY8; Cluster includes WAN02405Y |cps 23FJ||AAC38752.1|||1386 bp|repeat unit transporter|S.pneum oniae||AF030373|ORF|001
atgagtaaatataaggaattagcaaaaaatacaggtatttttgctttggctaacttttcatcaaagattttaatttttttgttagtacctatatatacacgggtacttaccactacggaatatggtttttatgacttagtctatacaactattcagctttttgtaccaatcttgacattaaatatatctgaagccgttatgaggttcctaatgaaagatggtgtttctaaaaaatcagtcttttcaattgctgttttagatatatttattggatcaattgcttttgctttattgttgttagtaaataacctgttttctttatcagatttaatttctcaatacagtatttacatatttgtaatctttgttttctataccctaaataattttttgatacaattttctaagggaattgataaaattggtgttacagctatctctgggrtcataagtacagcagttatgcttgccatgaatgtcattcttctagtaktatttgattggggattgttaggtttctttattgctaatgtttgtggatatgttataccttgtatttatatagtttckarattaagattgtgggaattatttgaaattaarattgataaaaaattacaatgggaaatggtttactatgctttgccattagttttaaatatattaagctggtgggtaaataatacttcaratagatatattgtgactgcaatagtaggtatacaagctagtgcaattatttcagtcgcttataaaattccacagattttgtctacrattagtgcaatttttattcaatcatggcaaatctctgcaattaaaatacaagaagataagagcgrtactacatttgtatcaaacatgctcctatactataatgcacttctattgattatagcgagtggtatcatattatttgtcaaacctatttctaatatattgtttggtatttccttctattctgcgtgggagctggtaccatttttaataattagcagtctattcaatgcaatttcaggttgtataggagcaattatgggagctaaaatggatactcataacattgcaaagtcggctttagttgggatgattgcaaatattattttaaatatagtgttaacattcttaatgggtccacagggaattacaatttctaccctgatagctagttttcttattttttatatgcgaaaagatagtgtaaaagaaattaattcagaaacatatagagcaatttatttatcgtggatactattagttgtaraggcctgtctgctaatttatatggattttattattggtgctttaatagcaatggtaataaacttatttttactaaaagatgttatcaaacctttatatttaaaaattttcaaaagaaattag

SEQ ID NO: 1601 - DNA, 696 bp, Streptococcus pneumoniae
  misc_feature (1)..(696): tiling:Spneumo1:WAN024FU3; Cluster includes WAN023L7M 3138 16_2295||||1230786..1231016|+|231 bp|EGAD orf prediction|S .pneumoniae|R6|NC_003098.1|ORF|210
atgagtaagagcctgataaagcttgycaacttcccaattttcatagtcaacaggcaarccgaatttctgacacatctctgtgatagattgggtaatgccagctggcatgaggcctttttcctcagcaaycttggaaatctgtaccattcccatggcaacagcctctccatgcatgaccttgccataaccggcagtcgcttcgatggcatggccaatagtgtggccaaaattgaggtaaagacgaataccattgtccaactcatcttcaaccaccatcttgcgcttcacctgacaagaatgttcaatcaaggtctctgcatgttccaaaatrctctcaacagaaccattcagycccgtcaagagagcccacagttctggatcctcaatcaagccatacttgataacttcacccatcccttcaatcaactctctttttccgagggtttcaagaacaagtggatcaatcagaaccccatctggttgggcaaaggtccccaccatatttttagcaaatggtgtrttaacgcctgtctttccaccgatagaagaatcaacctgagctgtcaaactagtcggaatctgaacaaagtgaataccccgcatataggtagaggctacaaakccagccaggtccccaacaacgccaccaccaagagcaacgattccatcgctacgagtcagaccttgcttgactag

SEQ ID NO: 1602 - DNA, 1283 bp, Streptococcus pneumoniae
  misc_feature (1)..(1283): tiling:Spneumo1:WAN024DB7; Cluster includes WAN02441V spr0 991||15903035|NP_358585.1|975615..976892|+|1278 bp|Conserv ed hypothetical protein|S.pneumoniae|R6|NC_003098.1|ORF|11 2
atgagtaagcatcaggaaattctaagctatttggaggaattaccagtaggtaaaagggtcagtgttcgtagcatttcgaatcatctaggagttagtgatggaacagcctatcgrgctattaaagaagctgaaaaccgtggaattgtggagacccgtcctagaagtggaacaattcgtgttaaatcccagaaagttgctatagagagattaacgtttgctgaaattgcagaagtgacttcttctgaggttctggctgggcaagaaggtttagagagagartttagtaagttttcaattggtgccatgactgaacaaaatatcttgtcttaccttcatgatggggggctcttgattgtcggagaccgaacccgtattcagttgctagccttggaaaatgaaaatgcagttctggktacagggggatttcaggktcatgatgatgtgcttaaactggccaatcaaaaagggattcctgttctaagaagtaagcatgatacctttaccgtcgcgaccatgatcaataaagscttgtcaaatgtccaaatcaagactgatattctgacagttgagaaactttatcgccctagtcatgagtatggttttctgagagagacagatacagttaaagattatttggacttggttcgtaagaatcgtagcagccgtttccctgttatcaatcaacatcaggtcgttgttggygttgtaaccatgagagacgctggtgataaatcaccaagcacgacaattgataaggttatgtctcgtagtctattttkggttggrttatcgacaaatattgccaatgtgagtcaacggatgatcgcagaagactttgaaatggtaccagttgttcgaagcaatcaaactttgcttggcgttgtgacgcgacgagatgtcatggagaagatgagccgwtcccaagtttcrgctctaccaactttttctgagcagattggacmaaagctctcytatcaccatgatgaagtagtcattacagtggaaccctttatgctagaaaaaaatggagttttggctaatggtgtattggcagaaattctgacccacatgacccaagatttagttgttaatagtggtcgcaatctcattatcgagcagatgctgatctactttttgcaggctgttcagatagatgatatattgcgcattcaggcacggattattcatcatacgagacggtcagctataattgattacgatatttatcatggtcaccagattgtttcaaaagcaaatgtgactgttaaaattaattarctaat

SEQ ID NO: 1603 - DNA, 1464 bp, Streptococcus pneumoniae
  misc_feature (1)..(1464): tiling:Spneumo1:WAN024DVO; Cluster includes WAN0241AC |cps 15bL||AAP76297.1|||1464 bp|putative CPS repeating unit tra nsporter|S.pneumoniae||AY250187|ORF|000
atgagtaataaaattagtaaaaatttagcctacaatatggggtatcagttaattggkattgcagctcccttgataacttctccttatttatcacggatattaggtgctgaaaatttaggtattcattcttttactatgtcggttgcactttactttatgatgtttatgcttcttggaattgcaaattacggaaatagaacaattgcgactgttaaacgagaaggaaaggatattctatcaaaaacgttttggagtatctactctatccagttgataatgtctattctggtaactatagcttatcttgcttatctatatttgggggcagtacattacaaagttattgcaatattacaactctttttattgttatcaaatgctgttgatattacttggtttttctatggattagaaaattttaagcaaatcgtttttaggaatacattagtcaaacttttaggattatttttaatttttttatgtgtgcgtcaaggcacagatttatggaaatacacatttataaacggatcagtaactttagttggccaacttttactatggggacaattaaaaggaatattaacttggaaaaaaattcaattaaaggaattactacctcatatcaagccaattttaattctttttattcctgtactagccattagtatttttactaatatggataaatatatgcttggtttaatggttgatgtaaagcaggttggattttatgacaatgcaggtagaattattgaaattcctaaagctttgattgcagctttaggggccgttatgttrccaagaacttcctatttattagcggaaggacagaaagaaaagagtaaatactacatagaggtaacaattttatacgtgatgattatttctagtgtattgatgtttgggctaatatcggtatctgatattttttccattatattttggggagaagaatttcttgaatcaggtagattgatttctgctatgtctccggcttttgtcttctctgtattaggaaatatcattaggactcagtatttgattcctagagctaaggataaagattatgtagtgtctctaattgcgggggctgttgttaatctagtgctaaactatttttttataaaaccttttggtgctatgggagcaacarttagtacagttttggcagaatttgtattgtctggaatgcagttttggtcagtaagaagagacttagatttaaaaagatatttgaaaaacggtttgatattctacctatttggtctgattatgyacctyrttattatarcactcaaaactcagttaccatacaatataatgagtcttattttactaatagttttgggtggaatagtatatgttattttttgttgttgctatattttaatgtcaagaaatttacattttaagttattgaaggaaaagattatacgaaaggttgtacataaaaatacattataa

SEQ ID NO: 1604 - DNA, 1667 bp, Streptococcus pneumoniae
  misc_feature (1)..(1667): tiling:Spneumo1:WAN024GGO; Cluster includes WAN0244EG spr0 538||15902582|NP_358132.1|537698..539359|+|1662 bp|Conserv ed hypothetical protein|S.pneumoniae|R6|NC_003098.1|ORF|33 1
atgagtaatatcagtttaacaacacttggtggtgtgcgtgagaatggaaaaaatatgtacattgctgaaattggagagtccatttttgttttgaatgtagggttaaaatatcctgaaaatgaacaattaggggtcgatgtggtgattccaaacatggattaccttyttgaaaatagcgaccgtattgctggggttttcttgacccacgggcatgcggatgcbattggtgctctaccktatctcttggcagaggctaaagttcctgtatttgggtctgagttgaccattgagttggcaaagctctttgtcaaaggaaatgatgccgttaagaaatttaatgatttccatgtcattgatgagaatacggagattgattttggtgggacagtggtttccttcttccctacgacttactccgttccagagagtctgggaattgtcttgaagacatcggaaggaagyatcgtttatacaggtgacttcaaatttgaccaaacggctagtgaatcttatgcaactgattttgctcgtttggcagagattggtcgtgacggcgtcctggctctcctcagtgattcggccaatgcagacagcaatattcaggtggctagtgaaagtgaagttagggatgaaattacccaaactattgctgactgggaaggtcgtatcatcgttgcagctgtttccagtaatctttctcgtattcagcagatttttgacgctgcggataaaacaggtcgacgtatcgtcttgacaggatttgatatygaaaatatcgtccgcacagcgattcgtcttaagaagttgtctttagccaacgaaattctyttgattaagcctaaagatatgtctcgctttgaagaccatgagttgattattcttgagacaggtcgtatgggtgarcctatcaatggacttcgtaagatgtcgattggtcgccatcgttatgtagaaatcaaggatggggacctrgtctatattgctacggctccgtctattgctaaagaagcctttgttgcgcgtgtrgaaaatatgatttatcakgcaggtggggttgtcaaattgattacccaaagtttacatgtatcagggcacggaaatgtgcgtgatttgcagctgatgatcaatcttttgcaacctaagtacctcttccctgtccaaggggagtatcgtgarttggatgctcacgctaaggctgccatggcagttgggatgttgccagaacgcatyttcattcctaaaaaggggacgaccatggcttacgagaatggagactttgttccagctggatcggtttcagcaggagatatcttrattgatgggaatgccattggtgatgttggaaatgttgttcttcgtgaccgtaaggtcttgtcagaggatggaattttcatcgtggctattacagtyaaccgtcgtgagaagaaaattgtggctagrgctcgtgttcayacgcgyggatttgtttatctcaagaagagtcgcgatattctccgtgaaagttcagaattgattaaccaaacggtagaagaktatcttcaaggagatgactttgactgggcagatctyaaaggkaaggttcgwgayaatytgaccaagtayctctttgaycaaaccaagcgtcgyccagcyattttaccagtagtcatggaagcaaaataactaat

SEQ ID NO: 1605 - DNA, 781 bp, Streptococcus pneumoniae
  misc_feature (1)..(781): tiling:Spneumo1:WAN024CZU; Cluster includes WAN0243EK spr1 832||15903874|NP_359424.1|1806563..1807291|-|729 bp|Conser ved hypothetical protein|S.pneumoniae|R6|NC_003098.1|ORF|1 11
atgagtacaaaatatttatttatttacaatgagattcgtgaaaagattctttgtaataaatataccatgaacgaacaattgcctgatgaaatgacattagctaaacagtttgcctgtagtcgaatgacgatcaaaaaagctttagacttgttagtttctgagggcttaatttttagaaaacgtgggcagggaacctttgttctctctcgtggcagctcaaaaagaaaattaatcgttccagaaagagatatccggggaytgacaaaaatatctgaagatgctcattctacaattgactcgaggattattcacttcaaattagaatttgcaaatgaatttttagcagaaaaactacaggtcgctttgcagagtccagtttataatatttaccgcctgcgtattattgacggtaaaccttatgttctggaacaaacttatatgagtaccgatgttattccaggtattactgaagatattttacaaaaatcgatttacaattacattgaaggaaagttaggattgcatattgccagtgctacaaaaatcttrcgagcttcttctagttcagaaaatgagcaacattacttgcagctccttccaacggaaccggtatttgaagtagaacaagtggcttatttggataacggaactccgtttgagtactcgattagtcgtcatcgctatgatttatttgaatttaattcttttgcattacgacattcctcctarswrawaatgtgaaaatgaagccaatcttttacagactctagttctaactaat

SEQ ID NO: 1606 - DNA, 1276 bp, Streptococcus pneumoniae
  misc_feature (1)..(1276): tiling:Spneumo1:WAN024B4J; Cluster includes WAN0243JI spr1 654||15903696|NP_359246.1|1626356..1627609|-|1254 bp|Conse rved hypothetical protein|S.pneumoniae|R6|NC_003098.1|ORF| 231
atgagtacagataaaaggagcaaatcaatgccaaattacaatattccattttcaccgcctgatatcacagaagcagaaattrctgaagtagyggataccctgcgttctggttggatcacaacaggtcctaaaacaaaagaactggagcgccgcttgtctctttacacacagacacctaagactgtttgtctcaactctgcgacagccgctctggagttgattttacgcgttttggaagtgggacctggtgatgaagtcatcgttccagccatgacctatacggcttcatgtagtgtcattacgcacgtgggagcaacccctgtcatggtggatatccaagcagatacgtttgagatggactatgacctgcttgagcaagctatcactgagaaaactaaggtgattatyccagtagagctcgcagggattgtttgcgattatgaccgtttgttccaagtcgtggagaaaaaacgtgacttctttaccgcttcaagcwagtggcaaaakgcctttaaccgtattgycattgtctctgatartgcccacgctttgggatctayttataaaggacaaccttctggttctatcgctgaytttacttccttctcattccatgchgttaagaactttacaacggcagaaggtggaagtgcgacttggaaagccaatccagtgattgatgacgaagagatgtacaaggaattccaaatcctttcccttcacgggcaaactaaggatgctcttgccaagatgcaactggggtcatgggaatacgatatcgttacaccagcctataagtgcaacatgaccgatatcatggcttcacttggtttggtacaattggaccgctatccaagtttgttgcaacgccgtaaggacattgtggaccgctatgatagtggttttgcaggttctcgcatccatcctttggcacacaagactgaaactgtcgaatcttcacgccacctctacatcacccgtgtagaaggagyaagcctagaagaacgcarcctcatcatccaagaattggctaaagcaggaattgcaagtaatgttcactacaaaccgcttcctctcttgacagcctataagaatcttggatttgatatgacgaactatcctaaggcctatgccttctttgagaatgaaattaccctccctcttcatactaaattaagcgatgaagaagtagactatatcattgagactttcaaaacagtttctgaaaaagtgctaactttatcaaaaaaatrasyamyaccaccaccaccactgc

SEQ ID NO: 1607 - DNA, 471 bp, Streptococcus pneumoniae
  misc_feature (1)..(471): tiling:Spneumo1:WAN024CSS; Cluster includes WAN023L79 3125 56_2307||||1239545..1239775|+|231 bp|EGAD orf prediction|S .pneumoniae|R6|NC_003098.1|ORF|220
atgagtaccaccacaaagttcaatagagtagtcaccgatagtcacgacacgaacttccttgccgtatttctcaccaaagagggccatagctcccatttctttagcagtgtcaatatccgtttcaactgtcttcacttcaagtgcttcccaaattttctcgttaacttgctgttcaatcgcacgaagttcctcagcagttactgcttggaagtgggtaaagtcaaagcgaaggaattcaacttcgttaagagatcctgcctgtgttgcgtggtttccaaggatattgtgaagggcagcgtgaagcaaatgagtcgcagtgtggtttttcatgacacggtgacggcgattgctatcaattgccaaggtatattcttggttcaaggcaagcggtgcaaggacttcaactgtatgaagggcttgaccatttggggctttctgaacattggtcacagtagccacaaycttacctga

SEQ ID NO: 1608 - DNA, 79 bp, Streptococcus pneumoniae
  misc_feature (1)..(79): tiling:Spneumo1:WAN0249EL; Cluster includes WAN024E3J R6.I G_2218||||2005218..2005296|+|79 bp|Between spr2011 (- stra nd) and spr2012 (comFC) (- strand)|S.pneumoniae|R6|NC_0030 98.1|IG|110
atgagtaccttctttctaaacatttttgtttttatgattttattataacgctttcattctatttttgcaaattttttcc

SEQ ID NO: 1609 - DNA, 575 bp, Streptococcus pneumoniae
  misc_feature (1)..(575): tiling:Spneumo1:WAN024FBL; Cluster includes WAN0243II spr1 690||15903732|NP_359282.1|1660929..1661498|-|570 bp|Conser ved hypothetical protein|S.pneumoniae|R6|NC_003098.1|ORF|1 11
atgagtactttagcaaaaatagaagcgctcttgtttgtagcgggtgaagatgggattcgggtccgccagttagctgaactcctctctctgccaccgacaggyatccagcaragtttaggaaaattagcccagaagtatgaaaaggacccagattccagtttggctttgattgagacaagtggtgcttatagattggtgaccaagcctcaatttgcagarattttgaaggaatactctaaggcgcctatcaaccagagcttgtctcgggctgcccttgagaccttgtccattattgcctacaaacagccgattacgcggatagaaattgatgccatccgtggrgttaactcgagtggagccttggcaaagttgcargcttttgacctgataaaggaagacgggaaaaaggaagtattggggcgccccaacctctatgtgactacggattatttcctagattacatggggataaaccatttagaagaattaccagtgattgatgagcttgagattcaagcccaagaaagccaattatttggtgaaaggatagaagaagatgagaatcaataactaat

SEQ ID NO: 1610 - DNA, 1005 bp, Streptococcus pneumoniae
  misc_feature (1)..(1005): tiling:Spneumo1:WAN024EUB; Cluster includes WAN0244MS spr0 238|ruvB|15902282|NP_357832.1|232128..233126|+|999 bp|Bran ch migration of Holliday structures|S.pneumoniae|R6|NC_003 098.1|ORF|111
atgagtagaattttagataatgagatratgggkgatgaggagttagtagaacgcacgctccgtcctcagtatttacgtgaatatatyggwcaggataaggtyaaggaycarctwcaratctttatygaagcygcyaaaatgcgggatgaagcgctggatcatgtgctcttatttggscctccaggkctygggaaaacraccatggcytttgtyattgccaaygaactgggagtcaatctyaagcaracgtckggtccwgtyatygaaaaagcsggwgatytggtagckattttgaatgakttagagcctggrgatgtmctytttattgaygagatycatcgyttrccmatgtcagtggaagargtgctttatagtgcyatggaggacttctacatmgatattatgattggggctggtgarggyagtcgyagtgttcatttggagttrccwccttttaccttgattggtgcgacgactcgggctggtatgctctcmaatccrctacgggcacgttttgggattacaggycatatggagtattatgcycatgctgrcttgacagaaattgtcgagcggacggcagatatttttgagatggaaatcacycatgaggcagcatctgagttggccctacgtagtcgtggracccctcgtattgccaatcgtctcctcaagcgcgtgcgcgattttgcccagataatggggaatggggtwatygatgatrttattaccgataaggctttgactatgctggatgttgaccatgaaggtttggactatgtggatcaaaaaatccttcgyaccatgattgagatgtacagtggaggacctgttggtctaggaactctttctgtgaatatcgccgaagagcgtgagacagttgaagayatgtatgagccttacttgattcaaaaaggttttatcatgcggacacggtctggacgggtggcgactgctaaggcatatgagcacttaggttatgaatacagtgaaaaabhractaat

SEQ ID NO: 1611 - DNA, 1446 bp, Streptococcus pneumoniae
  misc_feature (1)..(1446): tiling:Spneumo1:WAN024AWD; Cluster includes WAN0240TQ |wzg ||AAK20681.1|||1446 bp|Wzg|S.pneumoniae||AF316640|ORF|000
atgagtagacgttttaaaaaatcaggttcacagaaagtgaagcgaagtgttaatatagttttgttgactatttatttattgttagtttgttttttattgttcttaatctttaagtacaatatccttgcttttagatatcttaatctagtggtaactgcgttagtcctactagttgccttggtagggctactcctgattatctataaaaaagctgaaaaatttactatttttctgttggtgttctctatccttgtcagctctgtgtcgctctttgcagtacagcagtttgttggactgaccaatcgtttaaatgcgacttctaattactcagaatattcaatcagtgtcgctgttttagcagatagtgagatcgaaaatgttacgcaactgacgagtgtgacagcaccgactgggactgataatgaaaatattcaaaaactactagctgatatcaagtcaagtcagaataccgatttgacggtcgaccagagttcgtcttacttggcagcttacaagagtttgattgcaggggagactaaggccattgtcttaaatagtgtctttgaaaatatcatcgagtcagagtatccagactatgcatcgaagataaaaaagatttataccaagggattcactaaaaaagtagaagctcctaagacgtctaagaatcagtctttcaatatctatgttagtggaattgacacctatggtcctattagttcggtgtcgcgatcagatgtcaatatcctgatgactgtcaatcgagataccaagaaaatcctcttgaccacaacaccacgtgatgcctatgtaccaatcgcagatggtggaaataatcaaaaagataaattaacccatgcgggcatttatggagttgattcgtccattcacaccttagaaaatctctatggagtggatatcaattactatgtgcgattgaacttcacttcgtttttgaaattgattgatttgttgggtggaattgatgtttataatgatcaagaatttactgcccatacgaatggaaagtattaccctgtaggcaatgttcatcttgattcagaacaggctctcggttttgttcgtgagcgctactcactagcagatggcgatcgtgaccgtggtcgcaaccaacaaaaggtcattgtagcaattattaagaagttaacttctacagaggttttgaaaaactatagtagtattcttcaaggattgcaggattctcttcaaacaaatatgccgattgagactatgatagatttagtgaatactcagttggaaagtgggggggattataaagtaaattctcaagatttaaaagggacaggtcggatggatcttccttcttatgcaatgccagacagtaacctctatgtgatggaaatagatgatagtagtttagctgtagttaaagcagctatacaggatgtgatggagggtagatga

SEQ ID NO: 1612 - DNA, 1067 bp, Streptococcus pneumoniae
  misc_feature (1)..(1067): tiling:Spneumo1:WAN024BFF; Cluster includes WAN0244P9 spr0 149|ABC-NBD|15902193|NP_357743.1|157774..158835|+|1062 bp| ABC transporter ATP-binding protein - unknown substrate|S. pneumoniae|R6|NC_003098.1|ORF|111
atgagtagagatattatcaagttagatcagatcgatgtgacttttcaccaaaagaagagaaccatcacagcggttaaggatgtgaccattcacatccaagaaggggatatctacggaatcgttggatattctggagcaggraaatcaacccttgtacgggtgattaayctyttgcaaaaaccatctgcagggaaaattaccattgacgacgatgtgatttttgacggcaaggtgaccttgacggcagagcagttgcgtcgtaaacgtcaagatatcggratgattttccagcattttaacctgatgagccaaaagacagcagaggagaatgtagcctttgcccttaaacactctgractcagcaaggaagaaaagaaggctaaagtagctaagttgttggacttggttggtttggcagatcgtgctgaaaactacccttcacaactatctggagggcaaaaacagcgtgtggcaattgcgcgtgccttggccaatgatccaaaaatcttgatttcagacgagtcaacttctgcccttgaycckaagacaaccaagcagattttggccttgttgcaagatttgaaccaaaaattaggmttgacwgttgtcttgattacgcatgaaatgcagattgtcaaagacattgccaaccgtgtkgcrgttatgcaggatgggcatttgattgaagagggwagtgtscttgaaatcttctcaraccctaaacaacctttgactcaagactttatctcaacagcyacaggtattgacgaagccatggtcaaaatcgagaagcaagaaatcgtggaacacttgtctgaaaacagtctcttggtgcaactcaagtacgctggakcttcaacagacgagccacttttgaatgaattgtacaagcattaycaagtaayggctaatattctctatggkratatcgaaatyctcgatggtactcctgttggagaattggtggtggtyttgtcaggtgaaaaagcagcgttggcaggtgcccaagaagccattcgtcaagcaggtgtacaactaaargtattgaagggagkacagtaactaat

SEQ ID NO: 1613 - DNA, 231 bp, Streptococcus pneumoniae
  misc_feature (1)..(231): tiling:Spneumo1:WAN024F7G; Cluster includes WAN023LL5 3145 03_1655||||876901..877131|-|231 bp|EGAD orf prediction|S.p neumoniae|R6|NC_003098.1|ORF|110
atgagtagggaggaaaaggtaaaagtttatgcccaaactcttcacataagaactctagcttacccattctatggaatcttgcattatccattaaaacttccagactcatacyctyctaaaatctattcaaaccacgtcagcttcacattatatatgttggtkacctcacaagttttatctrcaacctcaaagctgttctttgagcagcctacagctagcttcctagtttaa

SEQ ID NO: 1614 - DNA, 258 bp, Streptococcus pneumoniae
  misc_feature (1)..(258): tiling:Spneumo1:WAN024CJH; Cluster includes WAN0242HF SP10 59||15900929|NP_345533.1|995408..995659|+|252 bp|hypotheti cal protein|S.pneumoniae|TIGR4|NC_003028.1|ORF|010
atgagtagtcaaatgaaagctttcttgaatgaacttcaaggaaatatggaagttgttggagaattttttgataatcctgaaaaggtaattagaaaatttggaattgtcggaagagagaaggaagcattgctaatccgtgacttaaatgatatggatgattatgctctttcaattcaaaatagcgttgcatcgccttctggggcacatagtagcacttgccattttgttagacaagatttacaatccgcactaactaat

SEQ ID NO: 1615 - DNA, 54 bp, Streptococcus pneumoniae
  misc_feature (1)..(54): tiling:Spneumo1:WAN024A8N; Cluster includes WAN024EGI-rc R 6.IG_1065.2||||1008137..1008186|-|50 bp|Between spr1026 (+ strand) and spr1027 (- strand)|S.pneumoniae|R6|NC_003098. 1|IG-rc|110
atgagtatcatctatagtaaaataaaaaaactgaacaatttggttggggacagc

SEQ ID NO: 1616 - DNA, 1316 bp, Streptococcus pneumoniae
  misc_feature (1)..(1316): tiling:Spneumo1:WAN024ET9; Cluster includes WAN024422 spr0 984|obg|15903028|NP_358578.1|969696..971006|+|1311 bp|GTP- binding protein|S.pneumoniae|R6|NC_003098.1|ORF|111
atgagtatgtttttagatacagctaagattaaggtcaaggctggtaatggtggcgatggtatggttgcctttcgtcgtgaaaaatatgtccctaatggaggcccttggggtggtgatggtggtcgtggaggcaatgtggtcttcgttgtagacgaaggactacgtaccttgatggatttccgctacaatcgycatttcaaggctgattctggtgaaaaagggatgaccaaagggatgcatggtcgtggtgctgaggaccttagagttcgagtaycacaaggtacgactgttcgtgatgcggagactggcaaggttttaacagatttgattraacatgggcaagaatttatcgttgcccacggtggtcgtggtggacgtggaaatattcgtttygcgacaccaaaaaatcctgcaccggaaatctctgaaaatggagaaccaggtcaggaacgtgagttacaattggaactaaaaatcttggcagatgtcggtttartaggattcccatctgtagggaagtcaacacttttaagtgttattacctcagctaagcctaaaattggtgcctaccactttaccactattgtaccaaatttaggtatggttcgcacccaatcaggtgaatcctttgcagtagccgacttgccaggtttgattgaaggggctagtcaaggtgttggtttgggaactcagttcctccgtcacatcgagcgtacacgtgttatccttcacatcattgatatgtcagctagcgargsccgtgatccatatgaggaytacctagctatcaataaagagctggagtcttacaatcttcgcctcatggagcgtccacagattattgtarctaataagatggacatgcctgagagtcaggaaaatcttgaagamtttaagaaaaaattgkctgaaaattatgatgaatttgaagagttaccagctatcttcccaatttctggattgaccaagcaaggtctggcaacacttttagatgctacagctgaattgttagacaagacaccagaatttttgctctacgacgagtccgatatggaagaagaagyttactatggatttgacgaagaagaaaaagcctttgaaattagtcgtgatgacgatgcgacatgggtactttctggtgaaaaactcatgaaactctttaatatgaccaactttgatcgtgatgaatctgtcatgaaatttgcccgtcagcttcgtggtatgggggttgatgaagcccttcgtgcgcgtggagctaaagatggggatttggtccgcattggtaaatttgagtttgaatttgtagactarctaat

SEQ ID NO: 1617 - DNA, 245 bp, Streptococcus pneumoniae
  misc_feature (1)..(245): tiling:Spneumo1:WAN024D8S; Cluster includes WAN0243TW spr1 279||15903322|NP_358872.1|1274286..1274525|-|240 bp|Conser ved hypothetical protein|S.pneumoniae|R6|NC_003098.1|ORF|1 11
atgagtattaaaactataaggaggacgaaggtggytaaaaatttaaaattaaaattagctcgggtagagcktgatttaacwcaaggtcaactrgcagakgctgtcggggtgacrcgccagactattggtttratagaggcgggraaatacaatcccagtctctcgctctgccagtcyatttgcagatgtttagggaaaaccctagaccaactattttgggaggaagaagatgaaaaatarctaat

SEQ ID NO: 1618 - DNA, 812 bp, Streptococcus pneumoniae
  misc_feature (1)..(812): tiling:Spneumo1:WAN024FXV; Cluster includes WAN0243WX spr1 170||15903213|NP_358763.1|1172516..1173322|+|807 bp|Conser ved hypothetical protein|S.pneumoniae|R6|NC_003098.1|ORF|2 21
atgagtattaaactaatygcygtygatatygacggaaccctwgtcaacagycaaaargaratyactcctgaagtyttttctgccatccaagatgccaaagaagctggtgtcaaagtcgtgattgcaactggccgcccyatcgcaggygttgccaaacttctrgacgacttgcagttgagagacsarggkgactatgtggtraccttcaayggtgcccttgtccaagaaactgctacwggmcatgagattatcagcgaatccttgacytatgaggattatctrgatatggaattcctcagtcgcaagctcggtgtccacatgcatgccattaccaaggacggtatctatactgcaaatcgcaatatcggaamatacactgtacacgaatcaaccctcgtcagcatgcctatcttytaccgtaccccwgaagaaatggctggcaargaaattgtyaartgtatgttyatcgatgaaccagaaatyctcgatgctgcgattgaaaaaatwccagcmgaattttacgagcrctactcyatcaacaaatctgctcctttctacctcgaactccttamaaagaatgtagacaagggttcagcyattactcacttrgctgaaaaactmggattraccaaagatgaaaccatggcwatcggwgaygaagaaaatgaccgtgccatgctggaagtcgttggmaayccygtwgtcatggaaaayggaaatccagaaatcaaaaaaatcgccaaatacatcacyaaaacaaatgacgaatccggcgttgcccaygcyatycgwacatgggtactgtaactaat

SEQ ID NO: 1619 - DNA, 861 bp, Streptococcus pneumoniae
  misc_feature (1)..(861): tiling:Spneumo1:WAN024FYZ; Cluster includes WAN0241A6 |bla TEM-1||AAQ94057.1|||861 bp|beta-lactamase TEM-1|S.pneumoni ae||AY392531|ORF|000
atgagtattcaacatttccgtgtcgcccttattcccttttttgcggcattttgccttcctgtttttgctcacccagaaacgctggtgaaagtaaaagatgctgaagatcagttgggtgcacgagtgggttacatcgagctggatctcaacagcggtaagatccttgagagttttcgccccgaagaacgttttccaatgatgagcacttttaaagttctgctatgtggygcggtattatcccgtgttgacgccgggcaagagcaactcggtcgccgcatacactattctcagaatgacttggttgagtactcaccagtcacagaaaagcatcttacggatggcatgacagtaagagaattatgcagtgctgccataaccatgagtgataacactgcggccaacttacttctgacaacgatcggaggaccgaaggagctaaccgcttttttgcacaacatgggggatcatgtaacccgccttgatcgttgggaaccggagctgaatgaagccataccaaacgacgagcgtgacaccacgatgcctgcagcaatrgcaacaacgttgcgcaaactattaactggcgaactacttactctagcttcccggcaacaattaatagactggatggaggcggataaagttgcaggaccacttctgcgctcggcccttccggctggctggtttattgctgataaatctggagccggtgagcgtggatctcgcggtatcattgcagcactggggccagatggtaagccctcccgtatcgtagttatctacacgacggggagtcaggcaactatggatgaacgaaatagacagatcgctgagataggtgcctcactgattaagcattggtaa

SEQ ID NO: 1620 - DNA, 774 bp, Streptococcus pneumoniae
  misc_feature (1)..(774): tiling:Spneumo1:WAN024EYF; Cluster includes WAN0243Q5 spr1 414|dapB|15903457|NP_359007.1|1401137..1401904|-|768 bp|Di hydrodipicolinate reductase|S.pneumoniae|R6|NC_003098.1|OR F|211
atgagtattcgagtaattattgccggttttaagggaaagatgggycargctgcttgycagatggtmttgactgatycagayttggacttggtrgcagttttggatccttttgagtctgagtcagaatggcaggrtattcctgttttcaaggataaggctgatttagctggttttgaagcggatgtctgggtagaytttactactccagctgttgcctacgaaaatacacgttttgctcttgaaaatggctttgctccagtagttggaacgactggtttcacgagtgaagaaattgcagagctaaaagaattttctcgtgcccaagacttgggtggcctgattgcccctaactttgccttgggtgctgtcttactcatgcaatttgcgacgcaggctgccaaatatttcccaaatgtggagattattgagctccatcatgacaagaaaaaggatgctccgagtggaacagccattaaaacagctgagttgatggcagaggttcgagagtcmattcagcaaggygcagcagatgaggaagagctgattgctggtgctcgtggtgctgactttgatggtatgcgcatccactcagttcgtttgccaggyttggtagcycatcargaagtcatctttggcaatcagggagaagggttgaccctccgtcatgactcctatgatcgcatctccttcatgacaggagtcaatttgggaattaaagaagttgtcaagcgtcatgagcttgtctatggattagaacacttattaykaactaat

SEQ ID NO: 1621 - DNA, 497 bp, Streptococcus pneumoniae
  misc_feature (1)..(497): tiling:Spneumo1:WAN024DCN; Cluster includes WAN02444J spr0 895||15902939|NP_358489.1|883412..883903|+|492 bp|Conserve d hypothetical protein|S.pneumoniae|R6|NC_003098.1|ORF|110
atgagtattgaaatgaccgtcagtgagattgcagaggtcttaggattatctcgccaagcaatcaataaccgtgtcaaagaattaccagaagaagacacagataaaaatgacaaaggggtaacagttgttaccagaagtggcttgattaagctagaagaaatctataaaaaaacgatttttgaagatgarcctgtcagtgaagatgtcaaacaacgtgaactgatggagattctagtggatgagaagaatgcagaaattcttcgtctttatgaacaattaaaagccaaggatcgtcagttatcagaaaaagacgagcagatgcgtatcaaagaccgtcagattgctgagaaagacaaacaattagatcagcaacaacaattgacccttcaagccatgaaggatcaagaaaatcttaagctagagctggaccaagcaaaagaagaagtccaatccactaaaaaaggcttttttgctcgtttatttggaggataactaat

SEQ ID NO: 1622 - DNA, 330 bp, Streptococcus pneumoniae
  misc_feature (1)..(330): tiling:Spneumo1:WAN024FX6; Cluster includes WAN02417D |orf 1||CAA06627.1|||330 bp|hypothetical protein|S.pneumoniae|| AJ005619|ORF|000
atgagtatttcatttagaacaaatacatcgatgatgaacattgcttacaagaatagagatttgagtgatgaagaatttaaagaagaagctcatcagtttagagataaagagataaaaatactcgaagaaaaattaaaggaacttaatatttcttgtaaggttgttggaataaatagtataaaagatatgaacgagtataaagagattatggaaaatgttaatcaagcaaaagaggaattaaagagaatagatgaattaatagccgtcaggagctccagaattgattttttagaggataaaacccttagaattacaggaaaccaaagatga

SEQ ID NO: 1623 - DNA, 1547 bp, Streptococcus pneumoniae
  misc_feature (1)..(1547): tiling:Spneumo1:WAN024GCN; Cluster includes WAN0244AK spr0 678|ABC-NBD|15902722|NP_358272.1|682910..684451|+|1542 bp| ABC transporter ATP-binding protein - unknown substrate|S. pneumoniae|R6|NC_003098.1|ORF|222
atgagtattttagaagttaaaaatctgagtcacggttttggtgaccgtgcaatttttgaagatgtgtccttccgtctcctcaagggagaacatatcggcctggtcggtgccaatggtgaaggaaaatcaacctttatgagtatcgtgactggtaaaatgctgccagatgaaggaaaggttgagtggtccaaatatgtgacggctggttacttggatcagcactctgtccttgctgaaagacagtcggtgcgtgatgttctccgtacggcttttgatgagcttttcaaagctgaagctcgtatcaatgacctctatatgaaaatggctgaagacggcgcggatgttgatgctctcatggaagaagtaggagaacttcaagaccgtctggagagtcgtgatttctataccttggatgctaagattgacgaagtagcgcgtgctcttggtrttatggactttggcatggatacggatgtaacttctttgtcaggtgggcaaagaaccaaggtgcttttggcaaaacttctccttgaaaagcctgatatyttgctgttggacgagccgaccaactacttggatgctgagcatattgattggctcaagcgctatctccaaaactatgrgaatgcctttgttctyatttcgcacgatattccattcctcaatgacgttattaatattgtctatcatgtggaaaatcaacagctgacgcgttactctggtgactactaccagttccaagaagtttatgctatgaagaaatctcagctagaggcagcctacgaacgccagcagaaagagattgcagacctcaaggactttgtggctcgtaataaagcccgtgttgcaactcgtaatatggctatgtctcgtcaaaagaaattggataagatggatattatcgaactccaaagtgagaaaccaaaaccatcctttgatttcaaaccagctcgtacaccagggcgctttatcttccaagccaagaacttgcaaattggttacraccgtcctcttactaagcctttaaatcttaccttcgaacgcaatcaaaaggttgcgattattggtgctaatggtattggaaaaacaactctcttgaagagtctcttrggcattatctcgccaatcgctggggaagtggagcgtggagattatttagaacttggttattttgagcaggaagtagaaggyggtaatcgccaaactcctcttgaagctgtctggaatgcctttcctgcccttaatcaagcagaagtccgtgcagcccttgcccgttgtggtttgacaaccaaacatattgaaagccagattcaagtattatcagggggagagcaagccaaggttcgtttctgtctcttgatgaatcgtgaaaacaacgttttagtgctggacgagccgaccaaccatttggatgtggatgcaaaggatgagctcaaacgcgctctcaaagaatayaggggatctatccttatggtctgccacgakccagacttttatgaaggytggatagaccaaatatgggattttaataatttaacttaactaat

SEQ ID NO: 1624 - DNA, 773 bp, Streptococcus pneumoniae
  misc_feature (1)..(773): tiling:Spneumo1:WAN024D2L; Cluster includes WAN0243G8 spr1 772||15903814|NP_359364.1|1741440..1742207|+|768 bp|Hypoth etical protein, truncation|S.pneumoniae|R6|NC_003098.1|ORF |111
atgagtcaaaagwtgaatcaccttgatgtaggggagtttgtcttattgctgcctgaacacctccgttcagaggaagawcattataaatctgtttttgaagacgacttaaccagtcgcatrtctagtcaagatgaacgacagcaaatgactgctacggtaggttatttagaatcaggtcaggatcgttttgtgtataatacgacccctatttcttaccagcagtttttgaaagatccaatcatcattgttataacaccccaatcaactggtccacagtccattttgttttggatagacgcagtacagaactacgttctctttaatcaattgtctgatgcccaggagcttatccagagacaaggcattgaaaattgggtctcagaaatgcaaacaggttaccacaactacatcacattattggataatatccagagggaacgttgggtaatgctagcaggagctgtgcttgggattgcaacttcaatcttgytgtttaacactatgaataggctctactttgaagaatttagacgtgccatttttatcaaacgcattgcaggtctcaggttcttagaaatccatcgcacttatctctttgctcaactgggtgtgtttttactgggatttgttgckagtgtatttcttcaggtagarrtaggarttgctttcttagtcttgttactctttactggtctatctcttttacagttacatgtccaaatgcagaaagaaaacaagatgtccatkcttgttttgaagggaggttaactaat

SEQ ID NO: 1625 - DNA, 438 bp, Streptococcus pneumoniae
  misc_feature (1)..(438): tiling:Spneumo1:WAN024F55; Cluster includes WAN0244SH spr0 033||15902077|NP_357627.1|34024..34461|+|438 bp|Conserved hypothetical protein|S.pneumoniae|R6|NC_003098.1|ORF|111
atgagtcaagaatttatcaatccaagtgatggcgtgattcgtcagtatctcgcaacgagtaaaacccttgctgtggtgggtttgtctgaccgtgaagaaacaaccagyaatcgagtracaaaggaaatgcaggctcggggctataaaatcatcccagtcaatcccaaggcggcaggtggcgaaatcttgggtrawaakgcttatgctagcctcgctgaaattccttttcctgtagatattgtcaatgtttatcgtcgcagtgaatttctgcccgatgtggcgcgtgattttctcaaagctgatgccaagattttttgggcacagctaggacttgaaagtttagaagcgaaagagattttgcgtgatggtggatgtgatgatatcgtgatgaatcgctgtatcaagagagaacatactcgcttgattgaggaagcataa

SEQ ID NO: 1626 - DNA, 369 bp, Streptococcus pneumoniae
  misc_feature (1)..(369): tiling:Spneumo1:WAN024CHP; Cluster includes WAN0243HB spr1 733||15903775|NP_359325.1|1709432..1709794|-|363 bp|Hypoth etical protein|S.pneumoniae|R6|NC_003098.1|ORF|111
atgagtcagaaattatacaatatgaaatttgctgctgtctacttagccttgattgcaaaagttgagcgaaagggtggaaaggcagagtcagttcaccaagtgaccagttggttgacagggtatgaagtgagtgaygttcttgcttgtctggatagggatgttacttacggagatttttttmgacaagcaccatattatgtccctgaacgaattgcaattacagggaagatttgcggtgtccgtattgaggaaattgatgatcctctgatgcaggaaatacgtcgcttggacaagctagtggattggcttgccaaggggaaaacatctcaacaagttctagaaaagtatgagaagcataaaykaactaat

SEQ ID NO: 1627 - DNA, 773 bp, Streptococcus pneumoniae
  misc_feature (1)..(773): tiling:Spneumo1:WAN024EWR; Cluster includes WAN0243K2 spr1 634|trpC|15903676|NP_359226.1|1607098..1607865|-|768 bp|In dole-3-glycerol-phosphate synthase.|S.pneumoniae|R6|NC_003 098.1|ORF|111
atgagtcaggaatttttagcacgaatcttagagcagaaggcgcgtgaggtggagcagatgaagctggagcaaatccagcctctgcgccagacctatcgcttggcagaatttttgaagaatcatcaggacygcttgcaggtaatcgctgaggtcaagaaagctagccctagtttgggagatatcaatctcgatgtggatattgtgcaacaggcccagacttatgaagaaaacggagcagtgatgatttcggtgttgacagatgaggttttctttaaagggcatttggattatctacgggaaatttccagtcaggtagagattccgacgctcaacaaagactttatcatmgatgaaaagcaaatcatccgcgctcgcaatgcaggtgcgacagttatcttgctyattgtggcagccttgtccgaagaacgcctcaaggaactgtatgactacgcgacagagcttggtctggaagtcttrgtggagactcacaatctagctgaactagaggtagcccacagacttggtgctgagattatcggggtcaacaaccgcaacttgactacctttgaggtcgacttgcagaccagtgtagatttagccccttactttgaggaaggtcgctattacatttctgaatctgccattttcacagggcaggatgcggaacgactagccccatactttaayggaattttggtagggacagctcttatgcaggcagaaaatgtggyccagagaatcaaggagttgcagattgacaaaggttaactaat

SEQ ID NO: 1628 - DNA, 476 bp, Streptococcus pneumoniae
  misc_feature (1)..(476): tiling:Spneumo1:WAN024C7B; Cluster includes WAN0244MH spr0 249|rpsG|15902293|NP_357843.1|247994..248464|+|471 bp|30S Ribosomal protein S7|S.pneumoniae|R6|NC_003098.1|ORF|110
atgagtcgtaaaaatagagctccaaaacgtgacgtattgccagatccgctwtacaattcacaactagttactcgtcttatcaaccgcgttatgcttgatggtaaacgtggtacwgctgcttcaatygtttacggtgcytttgagcaaatcaaagaagctactggcaacgatgcacttgaagtatttgamacagctatggaaaacatyatgcctgtacttgaagtacgtgcacgtcgtgttggtggttctaactaccaagtcccagttraagttcgtccagaacgtcgtacaacacttggacttcgttggttggtaacaatcgctcgtcttcgtggtgaacacacaatgcaagaccgtcttgcaaaagaaatcttggatgctgctaacaacactggtgcagcwgttaagaaacgtgaagatactcaccgtatggctgaagctaaccstgcattcgcacacttccgttggtaactaat

SEQ ID NO: 1629 - DNA, 1542 bp, Streptococcus pneumoniae
  misc_feature (1)..(1542): tiling:Spneumo1:WAN024FPE; Cluster includes WAN023POL pne2 4_15||||12815..14356|+|1542 bp|Type 12B capsule operon, Gl immer 2.02 orf prediction|S.pneumoniae||WAN01UCJ2|ORF|000
atgagtcgtgtaaaaaatagtttttttaatattttagctggaatagttggtactatcatatcgagtgttttagctttcatagttagaacagtgtttatccgagttttgggagagacttatctaggtttcaatggtctatacaccaatatcttaacagttttatccctarctgaattagggatcggatcatcaattgcttatttgatgtacaaacctttagcagaaaaagatggggacaaattagctcaagtagttcaattctataaaaaaatatatcgagtrattggtatmattattcttattttaggtttgtgtctcgttccttttttaccagtcattgtaaatttaaaaaatgcagaagatttgaactatacagcattgtatttgctttatttagcagatacagtttctacttatctattctttgcatataaaagaggggtattggytgctgatcaaaagrtctatgttgcgaatatctttgatataattataacgacaattttatctattttccaaattatcactttgatgatttkkaaagayttttatctatatattattttaaaaattgctaaaaatcttactttgaacctagtaattagtttaaaagtagataaaatgtatccaagtattcataaatttaaagrgatagctccrcttccaaaaatggaaagacgactagtttggaaaaatgtatatgctacctctgttcgacaaatctttaacgaattaatgaattcaacagatagtatagttatttccattgtyttaggaatagttatggttggtaagtattcgaactatgcttatattttatcaatcgtatatattttctttggaggaatttttaatccgattcaggcttctattggaaacctatctctgtyagcttctatagagaaaaaaaatgaaatcttcaatagattacgttttataaattttttctttttatcattttgctcaagttgtcttctagtattggtaaatccttttatcactatttggattggagaaaattacactttatcatttacaggtgtgattgcaatagttggtatgttattcgttagacaaactggaaattgtacaaccatttttcgtttgggagaaggatattttagagattatcatttttctcctttaatcgcgggcattttaaatttagttgtttcagtaattttagtgaattatataggtattgcaggtgtttttgttggaacaatgttaggatttggtttccaatttatactggtggatacaattgttacttataaaaaagtacttagtcgtccactatcagagttttatttaagatggttgcagacgatcttattaactgtaggtttatgtattgcgagttactatttatctcgattggttagagtgaatagtatatatgatttgatactgttgtttgtagtggttattggatttaatttttttgctttatgttttatttattggcgaaatgatgattttcaatattttattcaattggttaaaaattttatgaaaaatttggaggaaaaaaatcatgat

SEQ ID NO: 1630 - DNA, 540 bp, Streptococcus pneumoniae
  misc_feature (1)..(540): tiling:Spneumo1:WAN024EUX; Cluster includes WAN024420 spr0 986|IS1167-truncation|15903030|NP_358580.1|971225..971728| -|504 bp|Degenerate transposase (orf2)|S.pneumoniae|R6|NC_ 003098.1|ORF|101
atgagtcgtktkyrtgtycaaatyatgaatcagtttsawcgaaartcycatgaatacaaggctatcaagcgytactggaaactcatycaacaggatagycgtaaaytgagygataarcgwttttatcgyyctacttttcgtatgyayttaaccaataaagagattttaaacaagcttttgagctattcagaagacttgaaacaccactatcagctctataataaggaaccagagaaatttttcggacttattgaggacaatcttaagcaggttcatcctmtttttcagactgtctttaaaacctttctaaagracaaagagaaaatcgtcaacgcccttcaactaccctattcaaacgccaaattggaagcgacyaataatctcatyaaactyatcaaacgmawtgsckktkrytttcgraactttgaaaacttcaaaaaacggatttttatcgctctgaayatcaaaaaagaaaggacraaatktgtcctttctcrasmtctarctwwtcttcaacccactgcagttgacaaagagcca

SEQ ID NO: 1631 - DNA, 1265 bp, Streptococcus pneumoniae
  misc_feature (1)..(1265): tiling:Spneumo1:WAN024G9I; Cluster includes WAN02446M spr0 820||15902864|NP_358414.1|821932..823191|+|1260 bp|Conserv ed hypothetical protein|S.pneumoniae|R6|NC_003098.1|ORF|22 1
atgagtcgtttactagttattggttgtgggggcgttgcccaagttgctatttcaaagatttgtcaagatagcgaaacatttacagagattatgattgctagccgtaccaagtcaaaatgcgatgacttgaaagckaarctrgaaggcaaaacaagtacwaarattgaracwgcwgcwcttgatgctgacaaggttgaagaagtgattgcyctgattgraagctacaaaccagaagctgttttgaatgtagctctgccttatcaagatttaaccattatggatgcttgtttggcaacaggtgttcactatatcgatacagccaactacgaagcagaagacacagaagaccctgagtggcgtgctatctacgaaaaacgttgtaaggaacttggttttacagcctactttgactactcatggcagtgggcttatcaagagaaattcaaagaagcaggcttgactgctcttcttggttctggttttgacccaggtgtaactagtgtcttttcagcttatgccctcaaacactattttgatgaaatccattatatcgacattttagactgtaatggcggtgaccacggttatccatttgcaaccaactttaatccagaaattaatctccgtgaggtttctgcgccaggttcttactgggaagatgggaaatgggtcgaagtcgaagctatgtctatcaagcgtgagtatgatttccctcaagttggacaaaaagatatgtatctccttcaccatgaagaaatcgaatcattggccaagaacattccaggtgtcaaacgcattcgtttctttatgacttttggtcaatcttacttgacgcacatgaaatgtcttgaaaatgttggactccttcgtacggataccattaactttaacggccaagaaattgttccaattcaatttttgaaagccttgcttccagatcctgcyagycttggbccacgtacwgtmggwaaaaccaatattggatgtatctttacaggtgtcaaagayggygtyraaaagactatctayatctacaatgtytgcgaccatcargartgytaygcagargtyggktcrcaagcwatttcwtayacgacaggmgttccagccatgattgggacaaaattagtcatgaacggaacttggaaacaagctggagtgtataaccttgaggagttagatccagatccattcatggaagctttgaatgagtatggtttgccatgggttgtggttgaaaatccacaaatggtggactaactaat

SEQ ID NO: 1632 - DNA, 1517 bp, Streptococcus pneumoniae
  misc_feature (1)..(1517): tiling:Spneumo1:WAN024D7D; Cluster includes WAN0243B2 spr1 959||15904000|NP_359550.1|1945106..1946617|+|1512 bp|Conse rved hypothetical integral membrane protein|S.pneumoniae|R 6|NC_003098.1|ORF|111
atgagtgaaaaagctaaaaaagggtttaagatgccttcatcttacaccgtattattgataatcattgctattatggcagtrctaacttggtttatccctgcgggggcctttatagaaggtatttacgagactcagcctcaaaatccacaagggatttgggatgtcctcatggcaccrattcgggctatgctaggtactcatccagaggaaggttcgctcattaaagaaacgagcgcagcgattgatgtagccttcttcatccttatggttggkggtttccttggcattgtcaacaaaactggtgctcttgacgtagggattgcctctatcgtgaagaagtataagggccgcgaaaaaatgttaattttggtactratgcctttgtttgccctcggtggtacaacttatggtatgggkgaagaaacaatggccttctatccactccttgtgccagttatgatggccgttggttttgatagcctgactggtgttgcaattattttgctcggttctcaaatcggctgtttggcatctactctgaatccatttgcgacaggtattgcttcagcgactgcgggagttggtacaggggacggtatcgtacttcgtctgatyttctgggttaccttgactgctcttagtacttggtttgtttaccgttatgcggataagattcaaaaagatccgactaagtcactggtttatagtactcgcaaagaagatttgaaacactttaacgtagaagaatcttcatctgtagaatctacacttagcagcaaacaaaaatcagttctcttyttatttgtgttgacattcatyttgatggtattgagcttcattccatggacagaccttggcgttaccatttttgatgactttaatrcttggttgactggtcttccagttattggtaatattgtcggttcatctacttctgcactaggtacttggtacttcccagaaggcgcaatgctctttgcctttatgggtatcctgattggtgttatttatggtcttaaagaagataagattatctcttccttcatgaatggtgctgctgacttgctcagtgttgccttgatcgtagcgattgctcgtggtattcaagttatcatgaacgacggtatgattaccgatacaatcctcaactggggtaaagaaggcttgagcgrtctatcttcacaagtctttatcgttgtaacttatatcttctatctacctatgtcattcttgatcccatcttcatctggtcttgccagcgcaactatgggtatcatggctccacttggagaatttgtaaatgtccgtcctagcttgattatcactgcttaycaatctgcttcaggtgtcttgaacttgattgcaccaacatctggtattgtgatgggagctcttgcacttggacgtatcaacattggtacttggtggaaattcatgggcaaactcgtagtcgctattattgtagtgaccatcgcccttcttctccttggaaccttccttccattcctataactaat

SEQ ID NO: 1633 - DNA, 815 bp, Streptococcus pneumoniae
  misc_feature (1)..(815): tiling:Spneumo1:WAN024G2E; Cluster includes WAN0243YQ spr1 105|vicX|15903148|NP_358698.1|1105451..1106260|-|810 bp|Vi cX protein|S.pneumoniae|R6|NC_003098.1|ORF|111
atgagtgaaataggctttaaatacagtattttagcgtcgggttccagtggaaattctttttatctggaaacctcaaaaaagaagcttttagtrgatgcaggcttgtctggcaagaaaattaccagtctgctagctgaaattaaccgyaagccagaagacctggatgccatcttgattacccatgagcattcagatcatatccatggagtaggcgttttggctcgcaagtatggtatggatctttatgccaatgaaaagacctggcaagctatggaaaatagtaaatatcttggcaaggtggattcttcgcaaaagcatatttttgaaatgggtaaaaccaaaacytttggagatatcgacatcgagagttttggtgtaagccatgatgcagtcgcaccgcagttctatcgctttatgaaggatgayaagagttttgtcctyttgacagatacaggttatgtcagtgaccgtatggcgggcattgtcgaaaatgcggatggytatcttatcgaggccaaccatgatgtagagattttgcgatcaggttcttacgcttggcgactcaaacaacgaatcctatctgaccttggtcacctttctaacgaggacggtgctgaagctatgattcggacgctaggaaatcgtactaagaagatttaccttgggcatttatctaaggaaaacaatatcaaggaactggctcatatgaccatggtcaatcagctggctcaagctgatctgggagtcggagtagactttaaggtttatgatacctcaccagataccgcaacaccattgacagagatatarctaat

SEQ ID NO: 1634 - DNA, 912 bp, Streptococcus pneumoniae
  misc_feature (1)..(912): tiling:Spneumo1:WAN024CIA; Cluster includes WAN0241YX SP17 64||15901595|NP_346199.1|1666821..1667726|-|906 bp|glycosy l transferase, family 2|S.pneumoniae|TIGR4|NC_003028.1|ORF |011
atgagtgaattaattagtgttgtggtaccgatatacaatacgggaaaatatttagtggagtgtgtcgagcatattctgaagcaaacctatcaaaatatagaaattattttagttgatgacggttctacggataattctggggaaatttgtgatgcttttatgatgcaagataatcgtgtgcgagtattgcatcaagaaaataaggggggggcagcacaagctaaaaatatggggattagtgtagctaagggagagtacatcacgattgttgattcagatgatatcgtaaaagaaaatatgattgaaactctttatcagcaagtccaagaaaaggatgcagatgttgttatagggaattactataattatgacgaaagtgacgggaatttttatttttatgtaacagggmaagatttttgcgtcgaagaattagctatacaagaaattatgaaccgtcaagcaggagattggaaattcaatagctcggcctttatattgccgacatttaagttgattaaaaaagaattattcaatgaagttcacttttcaaatggtcgccgctttgatgatgaagcaactatgcatcgcttttatcttttagcctctaaaatcgtctttataaacgataatctctatctgtatagaagacgttcaggaagcatcatgagaacggaatttgatctttcctgggcaagagatattgttgaagtgttttctaagaaaatatcggattgtgtcttggctggtttggatgtctccgttctgcgtattcgatttgtcaatcttttaaaagattataagcaaactttagaataccatcaattaacagatactgaggaatataaagatatttgtttcagattaaagttgttttttgatgcagaacaaagaaatggtaaaagtykaactaat

SEQ ID NO: 1635 - DNA, 1097 bp, Streptococcus pneumoniae
  misc_feature (1)..(1097): tiling:Spneumo1:WAN024C87; Cluster includes WAN0244N8 spr0 222|ABC-NBD|15902266|NP_357816.1|214896..215987|-|1092 bp| ABC transporter ATP-binding protein - iron transport|S.pne umoniae|R6|NC_003098.1|ORF|111
atgagtgagatcraaattattaacgccaaaaaaatctaccacgatgtccctgttattgagaatttgaacattacaattccaaaaggaagtctctttacccttcttggagcttcaggatgtgggaaaacgacccttcttcgtatgattgcaggtttcaacagtatcraagrtggagaattttacttcgatgatacaaaaatcaataatatggaacccagcaaacgcaatatcgggmtggttttccaaaactacgctattttcccacatttgactgtycgagacaacgttgcttttggtcttatgcaaaagaaggttccaaaagaagaattgattcaacagaccaacaagtatcttgaactcatgcaaattgctcaatatgcggatcgaaagcccgataaactcagtggtggacaacaacaacgtgtcaccttggcatgcgccttagcggttaatccaagtgttctcctcatggacgagccacttagtaatctggaggccaaacttckcttggatatgcgtcaarccatccgagaaatccaacacgaastgggaattacaactgtttatgtaacccacgaccaagaagaagccatggctatttcagaccaaattgctgttatgaaagatggggtgatccaacaaatcggcssaccaaaagaactctatcataaaccagctaatgagtttgtggcaacctttatcggacgcacaaatattatccctrcyaatcttgaaaaacggagcgacggcgcttatatcgtcttttcagatggctatgcccttcgaatgcyagytcttgatcaggttgaggagcaagctattcatgtaagcattcgtcccgaagagtttatcaaagatgaatctggagatatygaaggaactattagmgatagcgtctatcttggactaaatacggaktatttcattgagacaggttttgcctcaaaaattcaagttagtgaagaatcaacttttgaagaagawctacaaaaagrcaatcgtattcgtctacgaatcaatacgcaaaaattaaacatcttttctgcagatggttcccaaaacctgataaaaggagtcaaccatggaaygtaactaat

SEQ ID NO: 1636 - DNA, 132 bp, Streptococcus pneumoniae
  misc_feature (1)..(132): tiling:Spneumo1:WAN024CLI; Cluster includes WAN0241X0 SP18 35||15901664|NP_346268.1|1745908..1746033|-|126 bp|hypothe tical protein|S.pneumoniae|TIGR4|NC_003028.1|ORF|020
atgagtgagattgtggaaactcgcgtctttttttgttttcagaatattgttcaaaattttgtgcctgtctttcatgttctagtcattcttttgcatgatagaatttatagcatgttgatattactaactaat

SEQ ID NO: 1637 - DNA, 1972 bp, Streptococcus pneumoniae
  misc_feature (1)..(1972): tiling:Spneumo1:WAN024BFU; Cluster includes WAN0243Q7 spr1 412|ABC-NBD|15903455|NP_359005.1|1398073..1399944|-|1872 b p|ABC transporter ATP-binding protein - unknown substrate| S.pneumoniae|R6|NC_003098.1|ORF|221
atgagtgattttatcgttgaaaaactaagtaaatccgttggtgacaagaccgtttttagggatatttcctttattatccatgacttagacagaattggtttaatcggtgtcaatgggactggcaagaccacccttttggacgtcctttctggtgtttctggatttgatggggatgtcagtcctttttcagctaaaaatgattaccagattggttacttgactcaggatcctgattttgatgatagaaagacagttttggatacggttctatctagtgaactcaaggaaatccagctcattcgtgagtatgaattgattatgctcgactatagtgaggacaagcaggcgcgtttggaacgtgtcatggcagagatggactctctccaagcttgggaaatygaragtcaggtcaagaccgttcttagcaaattgggcattcaagacttatctactcctrttggggaattgtcaggtggtctgagaagacgggtacagttggcacaagtcttacttggcaaccacgacctyttgcttttggatgagccgaccaaccatctggatattgcgattattgagtggctgaccctctttttgaaaaattctaagaagaccgtcctttttatcactcacgatcgttatttcttagacgctttgtcaacacggattttcgagttggakcgwgcaggmttgacmgartaycagggmaattaccaggactatgttcgcctwaaggcrgaacaggaygagcgcgaygcrgctctwcttcayaaaaaagaacaactctacaaacaagaaytggcctggatgcgcagacaaccgcaggcrcgtgcgaccaagcarcargcycgtatcaatcgwttccatgatctgaaaaagraagtttcaggcagtagtgctgagacagayttgacyatgaactttgaaaccagtcggattgggaagaaagtcatcgagtttcaggmtgtttcctttgcctatgaaaayaagccyattttgcaarattttaatctcttrgtkcaggcymaagaccgtatyggaatygttggggacaatggtgttggaaaatcaaccctrctyaacytgattgcaggaagtcttgagccracwrmaggacaagttgtgattggggaaactgttcgcatcgcctatttctctcarcaaattgagggtttggatgaaagcaagmgwgtkatcaattacytgcaggaagtggcagargaggtcaagaccagtggyggttctacgacttcsatygcwgagttgctggagcarttcctyttcccacgttcgacgcatggracyttgattgagaaattgtcagggggtgagaaaaaacgtctttatctcctcaaactgcttttggaaaaaccaaatgttcttcttttagacgagccaaccaatgacctagatattgcaactttgacagtcttagagaatttcttgcaaggttttgcaggtcccgttttaacagtcagtcacgaccgctatttcttggataaggtagcgaccaagattctcgcttttgaggatggcaagattcgtcctttctttggtcattacaccgactatcttgatgaaaaagcttttgaaacagatatggccaatcaagtgcaaaaggycgaaaaggaaaaagtggtcaaggttcgagaagacaagaaacgcatgacctaccaagaaaagcaggagtgggcaagtattgaaggtgatattgaaaccttggaaaaacgtatcgctgctattgaagaggaaatgcaggctaacggctctgactttggtaagctggctactctccaaaaagaattggatgagaaaaatgaagcactccttgaaaaatacgaacgctatgagtatctcagtgaatttgatagtywagactawtcgaaaatcaaagtgcaaactatgtcggcttcacattgccgactcaagtacagcctgtgaccggcttcctaatttgcactttgatttttattga

SEQ ID NO: 1638 - DNA, 132 bp, Streptococcus pneumoniae
  misc_feature (1)..(132): tiling:Spneumo1:WAN024GAY; Cluster includes WAN0242MP SP08 54||15900739|NP_345343.1|800399..800524|+|126 bp|hypotheti cal protein|S.pneumoniae|TIGR4|NC_003028.1|ORF|011
atgagtgcttatctcaaagaggcgcttaagggagcggctaagacacaaactaagactaattttggaaaaccagattttcatattgaaaaatacaaacaggatagtttggttacttatcgtaacykaactaat

SEQ ID NO: 1639 - DNA, 159 bp, Streptococcus pneumoniae
  misc_feature (1)..(159): tiling:Spneumo1:WAN024GJW; Cluster includes WAN0242V8 SP05 18||15900432|NP_345036.1|499309..499455|+|147 bp|hypotheti cal protein|S.pneumoniae|TIGR4|NC_003028.1|ORF|120
atgagtgtattggatgaagagtatctaaaaaatacacgaaaagtttataatgatttttgtaatcaagctgataactatagaacatcaaaagattttattgataatattccaatagaatatttagctagatatagagaattatattarctrawcatgata

SEQ ID NO: 1640 - DNA, 1392 bp, Streptococcus pneumoniae
  misc_feature (1)..(1392): tiling:Spneumo1:WAN024CR2; Cluster includes WAN0242AQ SP13 16||15901170|NP_345774.1|1239166..1240551|-|1386 bp|v-type sodium ATP synthase, subunit B|S.pneumoniae|TIGR4|NC_0030 28.1|ORF|011
atgagtgttataaaagaatacagaactgctagtgaagttgttgggcctcttatgattgttgaacaagtaaataatgtgtcttacaatgagttagttgaaattcaacttcataatggagaaattcgtcgtggacaagttttagagatccacgaagataaagcaatggttcagctttttgaaggatctagtggaataaatttagaaaagtctaaaattcgttttgctggtcatgcattagaattggctgtatctgaggatatggttggtcgtatttttaatgggatgggaaaaccaattgatggtggaccagatttaattccagagaaatatttagatattgatggtcaagctattaatcctgtatctagagattatccagatgaatttattcagacagggatctcctctattgatcatttgaatactcttgtacgtggtcaaaaattaccagtattttcaggttcgggcttacctcataatgaattagctgctcagatagcaagacaagcgactgttttaaattctgatgaaaattttgcggttgtatttgcagcaatgggtattacttttgaagaagctgagttttttatggaagaactcagaaaaacaggagcgatcgatcgttcggttttatttatgaacttggcaaatgatcctgcaattgagcgtattgcaactccccgcattgctttaactgcggcagagtatctagcttttgaaaaagatatgcacgttctagttatcatgacggatatgactaactattgtgaagcgttacgtgaagtctcggcagctcgccgtgaagttccagggagacgaggctatccgggatatttatatacaaatttatcaactctatacgaaagggctggtcgcttagttggtaaaaaaggttcggtgacacagattcctattttaacaatgccagaagatgacataacacatccaattcctgatttaactggatacattactgaagggcaaattattttgtcgcatgagttgtataatcaaggttatcgtccaccaatcaatgttttaccttctctctctcgattaaaagataagggatctggagaaggtaaaactcgtggagatcatgctccaactatgaatcaactgtttgcagcctatgcccaagggaaaaaggttgaagagttagcagtagtattaggagaatcggctttatctgatgtagataaattgtatgtgaggtttacaaagcgttttgaagaagagtacataaaccaaggattttataaaaatcgaaatatagaagatacgttgaatcttgggtgggaattactatcaattcttcctagaacagagttaaaacgtatcaaagatgatttgcttgataaatacttacctttggtagaagttctaactaat

SEQ ID NO: 1641 - DNA, 303 bp, Streptococcus pneumoniae
  misc_feature (1)..(303): tiling:Spneumo1:WAN024FNH; Cluster includes WAN023L3Q 3149 04_2467||||1314590..1314826|+|237 bp|EGAD orf prediction|S .pneumoniae|R6|NC_003098.1|ORF|110
atgagtgtttctactgcttctgccaaagctttttcttggtcattctcaaatagtgctgaatcaaccgtrgcaaccccttctgccttctcrgccaggttaaaggcacgagaaagtgattcaacagatggtttaaaatcttcttccttgcttacttctacgagagcacttgctgcttccaacatatctgccacaacaaagtttgaacctgcaagaactgcttccttgatatcttttggagtagagcccatcatcttatcaacacgagccttgataaagtccataacctctgctttattttcataa

SEQ ID NO: 1642 - DNA, 260 bp, Streptococcus pneumoniae
  misc_feature (1)..(260): tiling:Spneumo1:WAN024GIG; Cluster includes WAN0244FV spr0 487||15902531|NP_358081.1|488575..488829|+|255 bp|Hypothet ical protein|S.pneumoniae|R6|NC_003098.1|ORF|111
atgagttacgaacaagaatttatgaaggaatttgaagcttgggtcaatacccaaatcatgattaacgayatggcgcacaaggaaagycaaaaagtttacgaagaagaccaggacgagcgtgccaaagatgccatgattcgctacgagagtcgcttggatgcttatcagttcttgcttggtaagtttgaaaacttcaaagyaggcaagggattccatgatttgccagaaggcttgtttggtgagcgaaattattaactaat

SEQ ID NO: 1643 - DNA, 1844 bp, Streptococcus pneumoniae
  misc_feature (1)..(1844): tiling:Spneumo1:WAN024DHH; Cluster includes WAN0244FD spr0 505|PTS-EII|15902549|NP_358099.1|501729..503567|+|1839 bp| Phosphotransferase system sugar-specific EII component|S.p neumoniae|R6|NC_003098.1|ORF|111
atgagttataaagatamggtacaaaaaatcctcgatgtaattggaggtgaaaaaaatgtcaatagagttacccattgtgtaacacgtttaagattagaattaaaagatgaaaatttagtcaatgatgatgatgtgaagaagataccaggtgtaataggtattatgaaaaaraatggacaatatcaaattatacttggtaatgatgtagctaattattataaagaattcgttaaacttggcaattttgaatccgattcagttrwtcaagggyacaaagggaatattttagaaagaatcattgagtatatcgctggttccatgactccaatcattccagcaatgttagggggaggtatgytgaaagtcttggtaatyattttaccaatgcttggtatattgcaatcagattctcagactattgcttttttgacattttttggggatgctccatattatttcttaccgctgttattagcttattctgcatcacaaaaattaaaagtaacatctacattagctatgtctgtagcaggtgtacttctccatccaaattttgttcaaatggtgcaatcagggaatcctcttagtttatttggtgyacctgtgayaccagctagttatggttcrtcagtcgttccaattmttattatggtttggttgatgaaatatattgaaaaaatrattgctaaattaacacyagctrttactaagagttttttgcaacctacgctagtattattagtatcaagctgtattgccttagttgtagtcrgrcctattggagtaattgttggtgaaggattatcaaatctagttgggcaaatgtatgrtgtagctggatggcttacattagctattcttggtgctattatgccatttattgttatgactggaatgcattgggcttttgcacctatttttttggcggcatctattgctactccagacgtattaattcttccagcaatgttagggtcaaacttagctcaaggggctgcttcgatggctgttgcattaaagagtaaaaataataatacaaaacaaattgcttttgcagcaggtttctcagccttacttgcagggattaccgaacctgcattatatggtgtgactttaaaatataaaaaaccgctttatgcagctatgattggtggtggattagcgggattatttgcaggtcttactagtgttaaagcrtatctatttgctgtcccatctttgatagcgttgcctcaatttatttattctgatgtrccatcaaatattgtaaatgctttaattgtggcggtyatttcggttgttattacctttgtattagcttatatatttggaatcgatgaagaagagagttctagcaatttagaagttraagctggagtttcaaataaaaaaatgatattttctcctatatcaggagaaatcattccgttaagcgatgtccaggataaaacattttcagataaactaattggagacggagtagcgattatyccaagtgaaggtaaggtttatgcaccatttgatgggaaaattacaaatatttttccgactaagcacgcaattggattgaagagtgatgagggtgttgagttactaattcatattggattagatactgttgagctaaaaggtcaaggttttattagtcatgtagaagaaggagacagagttttcaaaaatcagttgatttttgaaatggacttgaatttaatcaagactaaaggctacgaaacagttacaccagtaattgtaacgaataccaatgattttctagatgtattagtattacctaataatcagacaatcgagcattctaaggaattactggyaatattataactaat

SEQ ID NO: 1644 - DNA, 1338 bp, Streptococcus pneumoniae
  misc_feature (1)..(1338): tiling:Spneumo1:WAN024GHW; Cluster includes WAN02406S |cps 19fI||AAC44966.1|||1338 bp|putative polysaccharide polymer ase|S.pneumoniae||U09239|ORF|000
atgagttatttatttttactttgccttacattattcttattgactatattctatttctttgcttttattcaagatttaattgctcctccagtagttatgtctgtaatgtttctaattagttcagtatttgcactggttaattcaaaaaactggaatattgaatatagtggaatagcctatattctcataattagtggtattattatattttcgmttcctttaatggcattaaaatcacctaattttaatactgaggttaagattgctgatcgattaattgatatccaattttggaaaattgctctaactattataattgatctctttattttgtatctttacaggaaggaaatatacaaccttgttcttagtaatggatatacggggtcaaatattcagtggttttttagaaatgcaacgagttatgaaggtgaattgacagtgcgaacttttattcgagttctcattcgtgttattgacgtatctgcttatatttttggatatacttttattaataattttcttatctatcgccataaacgccctaaagacatattacttttagtacctttattaatatttatttcaaaaactttaatatcaggaggccggcaagatattattaaaattctgattgcctatgtaatcatgatgtatatccaacaaaaacggaaagttggatggaatagagtcatatctcataaatatattcaccttggatttgttggtttaatagcaggtattccagcattttactactctttgtttttagccggtcgttcaacgactaggacgctatttgagagtgtttcgacctatctaggaggctcaattcagcattttaatcagtatattgaaaatccattagatcctggtgaagtttttggcagtgaaacattggtgcctatattaaatatattaggggaaatgggcctagttaattatcgtagtacaattcatttagaatttcggacactaggagttactgtaggaaatgtttatactttttttagaagacccttgcatgattttggtctagttggtatgtatgtrtttgtctttgctgtargtgctttttttgctatttattatttagttctgagaaagaaacaggttggttttaatttggatattcataccatyatttattcttatgtcttttattggatttttttatcatcaatcgagcaatactcgttcacaatgattagtctatatacactwgtatttattgtgttggtttactttatggctatcttttactggtgtacagattttaaaagaggaaaactgatttttaaaatttctgactcaagtatcaaattaaaagaagaataa

SEQ ID NO: 1645 - DNA, 533 bp, Streptococcus pneumoniae
  misc_feature (1)..(533): tiling:Spneumo1:WAN024DI2; Cluster includes WAN0244H4 spr0 442||15902486|NP_358036.1|447514..448041|+|528 bp|Hypothet ical protein|S.pneumoniae|R6|NC_003098.1|ORF|111
atgagttattttaaaaaatataaattcgataaatcccagttcaaacttggtatgcgaacctttaaaacaggtattgctgtttttctagttctcttgatttttggcttttttggctggaaaggtcttcaaattggtgctttgacagccgtttttagcctgagggagagttttgatgagagtgttcattttgggacttcgcgtattctaggaaatagtatcggtggactctatgccttggtcttcttcttattaaatacytttttccacgaagccttttgggtgaccttggtagttgttccaatctgcaccatgttaaccattatgacaaatgtagccatgaataacaaagcaggggttattggtggtgtagcagctatgttaatyattaccctatcaatyccaagtggygagacaatttygtacgtgtttgtgcgtgtatyagaaacrtttatgggagtttttgtcgcaattatcgtaaattacgatattgatcgtattcgtctctttttagagaaaaaagaaaaataactaat

SEQ ID NO: 1646 - DNA, 1412 bp, Streptococcus pneumoniae
  misc_feature (1)..(1412): tiling:Spneumo1:WAN024FLE; Cluster includes WAN0243RN spr1 360|atpD|15903403|NP_358953.1|1342395..1343801|-|1407 bp|P roton-translocating ATPase, F1 sector, beta-subunit|S.pneu moniae|R6|NC_003098.1|ORF|221
atgagttcaggtaaaattgctcaggttatcggtcccgttgtagacgttttgtttgcagcaggggaaaaacttcctgagattaayaatgcacttgtcgtctacaaaaatgacgaaagaaaammaaaaatcgtccttgaagtagccttggagttaggagatggtatggttcgtactatcgccatggaatcaacagatgggttgactcgtggaatggaagtattggacacaggtcgtccaatctctgtaccagtaggtaaagaaactttgggacgtgtcttcaacgttttgggagataccattgayttggaagctccttttacagaagacgcagagcgtcagccaattcataaaaaagctccaacttttgatgagttgtctacctcttctgaaatccttgaaacagggatcaaggttattgaccttcttgccccttaccttaaaggtggtaaagttggacttttcggtggtgccggagttggtaaaacygtcttaatccaagaattgattcacaacattgcccaagagcacggtggtatttcagtatttrctggtgttggggaacgtactcgtgaggggaatgacctttactgggaaatgaaagaatcaggcgttatcgagaaaacagccatggtctttggtcagatgaatgagccaccaggagcacgtatgcgtgttgcccttactggtttgacaatcgctgaatacttccgtgatgtggaaggccaagacgtgcttctctttatcgataatatcttccgtttcactcaggctggttcagaagtatctgcccttttgggtcgtatgccatcagccgttggttaccaaccaacacttgctacggaaatgggtcaattgcaagaacgtatcacatcaacyaagaagggytcygtaacctctayymasgctatctatgtgccagcggatgactatactgacccagcgccagcaacagccttcgctcacttrrattcaacaacaaacttggaacgtaagttggtacaattgggtatctacccagccgttgacccacttgcttcaagctcacgtgccttggcacctgaaatcgttggagaagagcactatgcagttgctgctgaagtaaaacgtgtycttcaacgttaccatgaattgcaagatatcattgctatccttggtatggmtgarctttctgatgaagaaaagaccttggttgctcgcgcccgtcgtatccagttcttcttgtcacaaaacttmaacgttgcggaacaatttactggtcagccaggttcttatgttccagttgctgaaactgtacgtggctttaaggaaatccttgatggtaaatacgaccacttgccagaagatgccttccgtggtgtaggttctatcgaagatgtgattgcaaaagctgaaaaaatgggattttaactaat

SEQ ID NO: 1647 - DNA, 378 bp, Streptococcus pneumoniae
  misc_feature (1)..(378): tiling:Spneumo1:WAN024FOC; Cluster includes WAN023L41 3151 56_2445b||||1304728..1305105|+|378 bp|EGAD orf prediction| S.pneumoniae|R6|NC_003098.1|ORF|110
atgagttgcaccaaaatcggtgtcccttttaagaaactaacaaagaaggcctgcaagggatataaaatcttgacacgattgatcttcacaatggcaaaaagaagcgccaaaaccaagccaaaaagggcaccaccaattgtcaacataattgttgttggaagttgttggacaattctagggattccatcaaagaccgaacgtaggctaaacagcttgccatccggaatcaattgcatcaagttttggtaccaatctgatgctaaaatcgttgtaacattcataaaaacatcctcttctgataatgattcattctaccatgcttctgccgtcaatgaaattatttgctacggtcagatacagactttgtctacctactag

SEQ ID NO: 1648 - DNA, 297 bp, Streptococcus pneumoniae
  misc_feature (1)..(297): tiling:Spneumo1:WAN024GGA; Cluster includes WAN023LW7 3142 44_1056||||552545..552841|-|297 bp|EGAD orf prediction|S.p neumoniae|R6|NC_003098.1|ORF|110
atgagttgttacgggcaattcaatcttctcttccttataaatgcgaaggagattgagcaaaatcgccgcactgaccttgtcatccaaatggcgagacttgataaaacctgtctctgtcacgacagttcgtgggtcaaaactgataaaatcaccgacctcaatgccaagagcacgagtttctttttcactagttactttggcgtccaaacgcacttccatattgtcttgcgtgcgttctgcagttcctgcatccttatagacatggcaagaagtttggtggatgaggatggttcctga

SEQ ID NO: 1649 - DNA, 297 bp, Streptococcus pneumoniae
  misc_feature (1)..(297): tiling:Spneumo1:WAN024B6E; Cluster includes WAN023MFU 3133 30_50||||30030..30326|+|297 bp|EGAD orf prediction|S.pneum oniae|R6|NC_003098.1|ORF|110
atgagttgttttgtcgcttttcattataggtcatatgggactttttttctacacaaaataggctccataatatccataggggatttacycactatggatattatggagccattttacaacagtgcctcaaattcagatactgacatacctaattgctggctggcaacctcagaagtcagaagaccttggcgtactatgtctaggaaggyaaaaagtttcctttctgcccttccttcaactttcccacgctctagtccttgttcaaggycttcagccctagcagtttccaaggcatag

SEQ ID NO: 1650 - DNA, 484 bp, Streptococcus pneumoniae
  misc_feature (1)..(484): tiling:Spneumo1:WAN024BFX; Cluster includes WAN0244JT spr0 345|alkD-truncation|15902389|NP_357939.1|349310..349456|+| 147 bp|DNA alkylation repair enzyme, truncation|S.pneumoni ae|R6|NC_003098.1|ORF|222
atgagtttagcagatttacttgaggagctagaagcagcaaaagactctaaaaaagcaaggyccatggaagcctatatgygccatcaattttcttttctaggtattgcggtgcctgaaagaaataaactctataaaaatatttwcyagaagcgaaaaaaacaaagattatcgattgggattttgcagacacttgctgggaaaaggatcctagaaaataccaatatgtggctgctaactatttgaaagcaatgcagtcttatctaaaggaaaccgatttgcctaagctagagcagttagtcgtgacaaaatcctkgtgggacacggtagatatcctagatcgagtagtagggagtttggtgtatgaacaccctgarctagaagaaataatcttaatactcttcgaaaatctcttcaaaccacgtcagctctatctgcaacctcaaaacagtgttttgagcaayctgcggctagcttcctarctaat

SEQ ID NO: 1651 - DNA, 255 bp, Streptococcus pneumoniae
  misc_feature (1)..(255): tiling:Spneumo1:WAN024EYP; Cluster includes WAN023L1I 3141 89_2561a||||1368236..1368490|-|255 bp|EGAD orf prediction| S.pneumoniae|R6|NC_003098.1|ORF|110
atgagtttcaaccacattgatgagttttttcagactatccccattgtgggcatagtcgatgaagaccttggctccatttttctgagtgaggacttccatacgaccaggaacgcgggttgcagcgatgccttttttgatgtcctcaagacttgctccgagacggagacaagcaagtccagcagcaactgcattttcttggttgaagttgccaatgagttgratatcataatctccagcgagtttacccgtagctga

SEQ ID NO: 1652 - DNA, 917 bp, Streptococcus pneumoniae
  misc_feature (1)..(917): tiling:Spneumo1:WAN024FJA; Cluster includes WAN0243PX spr1 422||15903465|NP_359015.1|1407616..1408527|-|912 bp|Conser ved hypothetical protein|S.pneumoniae|R6|NC_003098.1|ORF|2 21
atgagtttcacagtagcagtaaaagaagaaatcctgggccaacaccatctgagcyggcatgaattatctgccattatcaaaatgtctggtagcatcggtctctcgacttcgggcttgactttgtcagttgtgacagaaaatgccaaactggcccgtcacctctatgagtcctttctccatytctatgaaatcaaatctgaaattcgtcaccaccaacggagcaatcttcgcaagaatcgcgtctataccgtttttacagatgaaaaggtgcaggatttgttaagtgatttgcacttggcagactctttctttggcctggaaacaggtattgatgaggcgattttatcggaygaggaagcaggtcgtgcctatctctgtggcgctttcttggcaaatgggagcattcgtgaccctgagtcaggcaagtaccagttggaaatcagttctgtttatctggaccacgcgcaaggaattgcctcccttctccaacagtttttactggatgccaaggtgcttgagcgcaagaagggggctgtgacctatctccagcgagcagaagacattatggacttcttgatagtaatmggagccatgcaggcacgtgatgattttgagcgggttaagattttgcgagaaacccgtaacgacctcaatcgrgctaataatgccgagacagctaatatcgctcggacagtttctgccagcatgaagmccattaacaatatcagtaaaatmaaagatatcatgggcttagaaaatttgccagtagatttgcaggaagtkgcgcaactragrattcagcacccagactactctatccarcagttrgcagatagyctcagcacccctctgaccaaaagtggtgtcmatcacagactcagaaaaatcaataagatagcggatgaattataactaat

SEQ ID NO: 1653 - DNA, 225 bp, Streptococcus pneumoniae
  misc_feature (1)..(225): tiling:Spneumo1:WAN0249VC; Cluster includes WAN024E9T-rc R 6.IG_1584.1.2||||1518574..1518795|-|222 bp|Between spr1537 (- strand) and spr1538 (axe1) (- strand)|S.pneumoniae|R6| NC_003098.1|IG-rc|110
atgagtttctgttttctttttatggactataaatgttcagctgaaactactttcaaggacattattatataaaagaattttttgaaactaaaatctactatattacactatattgaaagcgttttaaaaatgaggtataataaatttactaacrcttataaaaagtgatagaatctatytttatgtatatttaaagatagattgctgtaaaaatagtagtagcta

SEQ ID NO: 1654 - DNA, 378 bp, Streptococcus pneumoniae
  misc_feature (1)..(378): tiling:Spneumo1:WAN024C8C; Cluster includes WAN023M8M 3153 61_411||||209538..209915|-|378 bp|EGAD orf prediction|S.pn eumoniae|R6|NC_003098.1|ORF|110
atgagtttgagtttcacttcttccaaactcttgcgtccaagatttcgtactttcatcatctctgcttcagatttttctgtcaaatcatgcacagtattgataccggcacgttttaaacagttgtatgaacgcacagacaagtccagttcctcaatcgtacgatctaaaatacggtcgtcagattcagtatcagcttctttcatcacttcagttgacttagcaatctcagtaagatttgtaaacaaatcaagatgttctgtcaaaatacgtgctgaaagccctaaagcatcttctggaataattgttccatttgtcaagatttcaagggttaatttgtcgaaaccatcattgctacctacacgagcaggttccacttga

SEQ ID NO: 1655 - DNA, 306 bp, Streptococcus pneumoniae
  misc_feature (1)..(306): tiling:Spneumo1:WAN024BH5; Cluster includes WAN023LOO 3140 39_1468||||777551..777856|-|306 bp|EGAD orf prediction|S.p neumoniae|R6|NC_003098.1|ORF|110
atgagtttgataccagtaagaccaacgagtccacctgctactgctgaaccaaggatgaagcttggaatcgcacgagctgggtcagcggcaccaaatggaatcgctccctcagtgataaatgacaagcccatgatgatgtttgtcaaaccagagttacgttcttccttagtaaatttatctttgaaaagaagagttgcgacaaagattgcaagtggtggcaccattcctccagccataactgctgccatggctacagaaccacctgaagaaacagttgctgcaagcgtacctgtaccaaagacataa

SEQ ID NO: 1656 - DNA, 830 bp, Streptococcus pneumoniae
  misc_feature (1)..(830): tiling:Spneumo1:WAN024D8U; Cluster includes WAN0243TZ spr1 276|nadE|15903319|NP_358869.1|1271411..1272235|-|825 bp|NA D synthetase, ammonia dependent|S.pneumoniae|R6|NC_003098. 1|ORF|111
atgagtttgcaagaaacgattatccaagagctgggtgtcaaaccagtgattgatgcccaggaagaaatccgtcgttctattgatttcttaaaaagatatctgaaaaaacatcccttcctaaaaacctttgtactagggatttctgggggacaagaytcaaccttggcaggrcgtttggcgcaattagctatggaagaactgcgagctgaaacgggagacgatagctacaaatttatcgctgtccgcctgccatacggagtgcaagctgatgaagcagatgctcaaaaagccctagccttcatccagccagatgtcagcttggttgtgaatatcaaggaatcagctgatgccatgacagctgcagttgaagcgacaggtagtcctgtttcagacttcaacaaggggaatatcaaggcacgttgccgtatgattgctcagtatgcccttgctggttyccatagcggagcggtcattggaacagaccacgccgcrgaaaatatcacaggtttctttaccaagtttggtgacggcggtgcggatattctccctctttaccgcctcaataaacgccaaggaaaacarctcttgcagaaacttggcgcagagccagccctttatgaaaaaatcccaacggcagacctagaagaagayaaaccaggcctagctgacgaagtcgcacttggagtcacctaygcagagattgacgaytacctagaaggcaaaacaatcagcccagaarctcaagcgaccattgaaaactggtggcacaaaggccaacacaaacgccacttacccatcacygtatttgatgacttttgggagtaactaat

SEQ ID NO: 1657 - DNA, 273 bp, Streptococcus pneumoniae
  misc_feature (1)..(273): tiling:Spneumo1:WAN024CTX; Cluster includes WAN023LVB 3140 60_1092a||||575897..576169|-|273 bp|EGAD orf prediction|S. pneumoniae|R6|NC_003098.1|ORF|110
atgagttttagggaaacctttgtcatactcaactgttactgttgctggaagacttggttcctgatgcaaatctgtsactacatttacaggacggatrgattgcgcaatcttcttctcagtattggcttggatagtgagttcaacttggyctttagctccctcatattcagcgttcagagtgactgctcctggcttatgcaactcaagcattcctttacgaattgcgacttccccttcaccacttgtagagaaggttactttatcagctggtaa

SEQ ID NO: 1658 - DNA, 2508 bp, Streptococcus pneumoniae
  misc_feature (1)..(2508): tiling:Spneumo1:WAN024C7R; Cluster includes WAN0244MV spr0 235|leuS|15902279|NP_357829.1|227269..229770|+|2502 bp|Leu cyl-tRNA synthetase|S.pneumoniae|R6|NC_003098.1|ORF|442
atgagtttttayaatcataaagaaattgagcctaagtggcagggctactgggcagaacatcatacatttaagacaggaacagatrcatcaaaacctaagttttatgcgcttgatatgttcccttatccgtctggagytggtctgcacgtaggacacccagaaggttatactgcaaccgatatcctcagtcgttacaaacgtgcgcaaggctacaatgtycttcacccaatgggttgggatgcttttggtttgcctgcagagcaatacgctatggatactggtaatgacccagcagaatttacagcggaaaacattgccaacttcaaacgtcaratyaatgcgcttggattttcttatgactgggatcgtgaagtcaacacaacagatccaaactactacaagtggactcaatggattttcaccaagctttacgaaaaaggcttggcctatgaagctgaagtgccagtaaactgggttgaggaattgggaactgccattgccaatgaagaagtgcttcctgacggaacttctgagcgtggaggctatccagttgtccgcaaaccaatgcgccaatggatgctcaaaatcacggcttacgcagagcgcttrctcaatgacttagatgaactwgattggycagagtctatcaaggayatgcaacgcaactggattggtaaatcaactggtgcyaatgtaacyttyaaagtwaarggaacrgacaaggaattyacagtctttacyactcgtcckgayacwcttttcggtgcgactttcactgtcttggctcctgaacatgaattagtagacgctatcacaagttcagagcaagcagargctgtagcaractataaacaycaagcyagcctyaartctgacttggytcgtacagaccttgcyaargaaaaaacwggkgtttggaywggtgcytatgccatcaaccctgtcaatggtaaggaaatkccaatctggattgcvgactatgtycttgctagttayggaacaggtgcsgttatggcygtkccwgcycacgaccaacgtgactgggaatttgccaaacaatttgaccttccaatcgtcgaagtrcttgaaggtggaaatgtmgmagaagctgcctayacagaggatggyctkcatgtcaattcagacttcctagatggaytsaacaaagaagamgctattgccaagattgtggcttrsttggaagaaaaaggctgtggwcargagaaggttacctaccgyctccgcgactggctctttagccgtcaacgttactggggtgarccaattccwatyattcattgggaagatggracttcaacagctgttcctgaaastgaattgccrcttgtcttgcctgtmaccaaggayatccgyccttcaggtachggkgaaagtccaytrgctaacttgacagaytggcttgaagtgactcgtgmagatggtgtcaaaggtcgtcgtgaaacyaacacyatgccacaatgggcwggttcaagctggtactacctycgctatattgacccgcacaatactgagaaattggctgatgargmymwcctcaaacaatggttgccagtagatatctacgtgggtggtgcggaacatgctgtacttcacttgctttatgctcgtttctggcatwaattcctctatgacctcggtgttgtwccgactaasgaayyawkccrraaamtcktyaaccaagggatgaktttgggaacaagctaccgtgaccaccgtggtgctcttgkgrcarccgacaargttgaaaaamgtgatggttccttcttycatrtagaaacaggggaagagttggagcaagcgccagccaagatgtctaaatcgctcaagaacgttgttaacccagaygatgtggtggaacaatacggtgccgatacccttcgtgtttatgaaatgtttatgggaccactcgatgcttcgattgcttggtcagaagaaggtttggaaggaagccgtaagttccttgaccgagtttaccgtttgattacaagtaaagaaatccttgcggaaaacaatggtgctcttgacaaggyttacaacgaaacagtcaaagctgtyacwgarcaaattgagtctctcaaattcaacacagctattgcccaacttatggtctttgtcaatgctgctaacaaggaagataagctttatrttgactatgccaaaggctttattcaattgattgcaccatttgcacctcacttggcagaagaactctggcaaacagtcgcagaaacaggtgagtcaatctcttatgtagcttggcyaacttgggacgaaagyaaaytggttgaagaygaaatygaaatygtygtccaaatcaaaggwaaagtycgtgccaaactcatggtygctaaagayctatcacgtgaagaattrcaagaaatygctytagckgatgaaaaagtcaaagcagaaattgacggtaaggaaatcgtgaaagtrattrskgtaccraataaaytsgttaatatygtygtwaaamtaactaat

SEQ ID NO: 1659 - DNA, 698 bp, Streptococcus pneumoniae
  misc_feature (1)..(698): tiling:Spneumo1:WAN024DCO; Cluster includes WAN02444K spr0 894|pfs|15902938|NP_358488.1|882643..883335|+|693 bp|5'-me thylthioadenosine / S-adenosylhomocysteine nucleosidase|S. pneumoniae|R6|NC_003098.1|ORF|111
atgamaataggaattattgctgctatgccagaagaactggcttatctggtccagcatttagataatrcccaggagcaagttgttttkgggaatacctatcatacaggaaccattgcttctcatgaagtcgttcttgtagaaagtggaattggtaaggtcatgtctgctatgagtgtggcgattttggctgatcatttccaggtggatgcccttattaatacgggttcagctggggcagtagcagaaggtatcgctgttggggatgtcgtgattgctgacaaattagcctatcatgacgtrgatgtcacagcttttggctatgcttatggacaaatggcgcaacaaccgctttatttcgaatcagacaaaacctttgttgctcaaatccaaragagtttatctcaattrgaccaaaactggcatyttggtttgattgctacaggagatagttttgttgcaggaaatgacaagatagaagcgattaagtcccatttcccagaagttttagccgtggagatggagggggcagctattgctcaagcagcgcatrccctcaatctcccagtcttagtcatcmgagctatgagtgacaatgccaaccatgaagcaaacatcttttttgatgagtttattatcgaagctggacgtcgctctgcccaagtcttgttgrcctttttgaaggctttagattaactaat

SEQ ID NO: 1660 - DNA, 239 bp, Streptococcus pneumoniae
  misc_feature (1)..(239): tiling:Spneumo1:WAN024CQE; Cluster includes WAN0244SC spr0 038|acpP|15902082|NP_357632.1|38742..38975|+|234 bp|Acyl c arrier protein|S.pneumoniae|R6|NC_003098.1|ORF|111
atgamagaaaaagaaatttttgacmgtattgtgaccattatccaagagcgacagggagaggactttgtcgtgacagaatccttgagtctgaaagacgayttggatgckgaytcwgttgayttgatggagtttatcttgackctggargatgaatttagtatcgaaatcagcgatgargaaattgaccaactccaaarygtaggagatgtggttaaaatcattcaaggaaaatarctaat

SEQ ID NO: 1661 - DNA, 1181 bp, Streptococcus pneumoniae
  misc_feature (1)..(1181): tiling:Spneumo1:WAN024DY7; Cluster includes WAN023PVB pne1 0_10||||6844..8022|+|1179 bp|Type 7C capsule operon, Glimm er 2.02 orf prediction|S.pneumoniae||WAN01UCKC|ORF|000
atgaraaartcrgtttatatcattggttcaaaaggratycctgcyaartatggaggrtttgaaacttttgttgaaaaattaacagmmtwycaamaaratarkrmyatmcaatattatgtkgcttgtatgcgtgaaaaytckrcwaaatcwggkaytacwgakgatswktttgarcataayggwgckatmtgttwtaayrtmgatgttcckaatattggtccagckcgagckatwgcktatgatatmgctgcwatyaayaragctatwraamtwgcyaargaaaataaggatgaarmtccaatyttytayattttrgcttgtcgwattggtcckttyattycatgraattaagaaaarrattcrwgcwatwggtggaractywtytggtwaatccrgatggkcatgartggctacgagaaaaatggagtttacctrttcgcaaatattggaartactctgaaaractwatggtcaaayatgcagatttattggtttgtgacagyaaaaatatcgaacagtatatccaagaagattataaacagtwycawcctaagaccacctatatygcttatgggacsgatacaactccctcmatcttgaaattkgaagatrctaaagtccgaaattggtatcargagaarggrattagtgaaaayggttattatttagtggtrggacgatttgtccctgagaataactatgaagctatgattcgtgaatttatcaaatcccagtctaaaaaggattttgtcctcattacaaatgtggaacaaaataaattttacgacaagttgcttcgggaaacaggttttgaccaagacccaagaatcaaatttgttggtactgtttatgatcaggaattgttaaaatatattcgagaaaatgcctttgcatatttacatggtcatgaggtggggggkacaaatccatcacttttagaggctttaggatcaacaaagttaaatttgttgcttgatgttggttttaaccgtgaagttggtgaggatggagctatttattggcaaaaagatgaactttcacgagtcatcgaatatgtggaaacgataaatcaagcaactatcgcaaacttaaattttaaatcaacccaaagaatcctctcagatttcacatgggaaaaaattgtggcagattatgaaggagtattttgttttgcgaagagt

SEQ ID NO: 1662 - DNA, 650 bp, Streptococcus pneumoniae
  misc_feature (1)..(650): tiling:Spneumo1:WAN024D5R; Cluster includes WAN0243MH spr1 546|ABC-NBD|15903589|NP_359139.1|1529350..1530000|-|651 bp |ABC transporter ATP-binding protein - unknown substrate|S .pneumoniae|R6|NC_003098.1|ORF|111
atgaracttgaaattataaatggacagaaaatttatgggaaaagacctattttaaatcagttgaatttggtgtttcaatcaggaaaaatttatggacttaaaggtgataatggatctrgcaagacggttcttttaaagrtacttgctggytatattaagcttgacaaaggaaaagttcttcaagayggkaaagtytacgggrtaaaaaatcattatattcaggatgcaggaattttaattgaaaaagtcgagtttttatctcatttatccctgagagaaaatttggaactgttaaggtatttttcatctaaagttacggaaaaaagaattgcctattggattcaatactatgatttacaggaatttgaagayrttgaataccgkcatttatccttrggaacaaagcaaaaaatggccttgattcaagcctttatttcytctccttctatactctttctcgatgaacctatgaatgctttggatgagaaragtgtgaggttaaccaaacaggtcattttatcttacctgaaaaaagaaaatggtctggttatcctgacgtcgcacatatcggaagatatttcagacctttgtacagatgtattagttgtcgaaaatggacatatacaaatgtaamkratatacaatcctag

SEQ ID NO: 1663 - DNA, 657 bp, Streptococcus pneumoniae
  misc_feature (1)..(657): tiling:Spneumo1:WAN024DI5; Cluster includes WAN0244HC spr0 434||15902478|NP_358028.1|434397..435047|+|651 bp|Conserve d hypothetical protein|S.pneumoniae|R6|NC_003098.1|ORF|111
atgaragataaacaaacatttttaatgaagggcagttttgcccttttacttttcgttattcttggctayatggtcaaattttaccctgaaaygytggtcaattttgaccaatcgattcagactgccattcgaggagacttaccagattatttgactattctttttcgakccctcacacgtctgattgatatcccagtgattatcacttgggttgtcattacagcttttgtcttttatcgtaagcgatggaagatagaaagtttcttcatgctgggaaatctggctttggcaggtcttttaatcgtgacctttaaaaatatctaccagcgcccacgrccagmtatyttacatctkgtggaggagaagggattttccttcccaagtgggcattctctrgctgtaacsytgatggtaggbactytgattgtyattctyagtcarcgrattaaaratcmrgtctggagaaaaatcgtacaaatygtccttggcctctacctagtcagtgtgctggtatcaagagtctatctgggagttcattacccatcagacgtccttgccartctctgtgtgggcttgggagtcctgtttatcgagtttcccttbtatgacaagctcygcttccaatggcgatttaaaggcaaacagaagykaactaat

SEQ ID NO: 1664 - DNA, 1368 bp, Streptococcus pneumoniae
  misc_feature (1)..(1368): tiling:Spneumo1:WAN024B3H; Cluster includes WAN0240Y6 |cps 6bE||AAL68408.1|||1368 bp|putative UDP-glucosyl transferas e|S.pneumoniae||AF246897|ORF|000
atgartgraaaaytagyaaagyyttcaktrgyyatagyccagagttttcttgtyattytattgrctkwtctacttagyrctgtgagagaaacrgagattgtttcaacaacagctattgtactttatatcctccactattttgycttttatatcagtgattatggacrgratttctttaaaaggrgatatttgattgaacttgtccagacattgaaatatatcctattctttgcgctagcgattagtatttctaattttttctyagargatcgatttagtatttccagamgaggcatgatttacttcctcytattayatgttytcttagtctatrtgctaaaccbatttatcaagtggtattggargcgggcttatcccaactttaaaggaagtaagaagdttytcctacttacagcaacttctcrtrtygaaaaggtaytggatagaytaatagaatcaratgakgttgttgggragttggtagccgtcagtgttttagataaaccagattttcagcaygatkatttaaaggttgtagcagagggggagatmgtaaaytttgcgactcrtgaggtggtcgatgaagtctttatcaatcttccaagtgaaaaatacaatattggagagcttgtctctcagtttgaaacgatgggarttgatgtaacagtcaatctaaatgctttcgattgtatcttggcacrtaacaagcaaattygtgagatggcaggaytaaaygttgtgactttttctacaacattttataagactagccatrtgattgctaagyggrttattgatattrtcggttccctggtaggtttgataytatgtrgtctagtcagtattgtrctggttcctttgattcgaaaggatgggggytctgctwtttttgctcagacgcgtatwggraaaaatggycgccatttyactttttayaagtttcgctcyatgtgtgtrgatgctgaggakaaaaaragagaactcatggaacaaaataccatgcarggtggaatgtttaaggtgsaygakgatccwcgtatcacgaaaattggtcrttttatacggaagacgagcttggacgagctaccacagttttayaatgttctaaagggagatatgagtttggtwggbacacgrccaccaacagtggacgagtatgarcactataccccagaacaaaaacgtcgsctaagttttaaacctggyataacaggyytatggcaggtcagyggacgaagygaratcaaraatttcgatgargttgtcaarttagatgtggyctatatwgaygrttggacaatytggaaagatattgarattttattgaagacagttaargttgtattgatgaaggatggagckaartag

SEQ ID NO: 1665 - DNA, 905 bp, Streptococcus pneumoniae
  misc_feature (1)..(905): tiling:Spneumo1:WAN024FC4; Cluster includes WAN0243J0 spr1 672|czcD|15903714|NP_359264.1|1644621..1645520|-|900 bp|Ca tion diffusion facilitator transporter - heavy metal trans port|S.pneumoniae|R6|NC_003098.1|ORF|211
atgasaaatatgaaggcaaaatatgctgtttgggtggcttytytcttaaatttgacttatgccattgttgagtttattgcaggtggartatttggttctagcgctgttcttgctgactctgtgcatgacttggkagatgygattgcaattggaatatcagcttttctagaaacaatctccaatcgtgaagaagacaatcagtacaccttgggctataagcggtttagcctgctaggagccttggtaacagctgtgattctcgtaacrggctctgttctagtcattttggaaaatgtcacgaagattttgcatccgcaaccagtcaatgatgaggggattctctggttaggaattattgcgattactatcaatctgttagcgagtctggtggttggtaagggaaagacaaagaatgagtctattctgartctgcattttctggaagatacgctagggtgggtagctgttatcctgatggcgattgttcttcgatttacggactggtatatcctagatcctcttttgtcccttgtcatttctttctttattctttcaaaagcccttycacgtttttggtctacactcaagattttcttggatgctgtgccagaaggtcttgatatcaagcaagtaaagagtggcctggarcgattggayaatgtggccagccttaatcagcttaatctctggactatggatgctttggaaaaaaatgccattgtccatgtttgtctaaaagaaatggaacatatggaaacttgtaaagagtctattcgaattttcctaaaagattgtggttttcaaaatattaccattgaaattgatgctgacctagaaactcaccaaacccataagcgaaaggtgtgtgacttggaacggagttatgagcatcaacattarctaat

SEQ ID NO: 1666 - DNA, 1196 bp, Streptococcus pneumoniae
  misc_feature (1)..(1196): tiling:Spneumo1:WAN024C5W; Cluster includes WAN0244LA spr0 292|ugl|15902336|NP_357886.1|293346..294536|+|1191 bp|Unsa turated glucuronyl hydrolase|S.pneumoniae|R6|NC_003098.1|O RF|111
atgataaaaaaggttacgattgaaaaaataaaatcgcctgagcgcttcttagaagtaccacttctgacgaaagaagaagtcggccaggcaatcgataaggttattcggcagttagaactcaaccttgactatttcaaggaagatttcccgacrccagctacctttgataatgtctatccaatcatggataacacggaatggaccaatggtttctggacaggagaactgtggttggcttatgaatacagtcaacaggatgcatttaaaaacatcgctcataaaaatgttctttctttcctggatcgtgtcaataagagagtagaattggmtcaccatgatctcggcttcttgtacacaccgtcttgtatggctgaatataagataaatggagatggagaggctagagaagcarccttgaaagctgcagataagttgattgaacgctatcaagaaaaaggtggttttattcaagcttggggagacttgggcaagawagagcattaccgtttgattatcgaytgcttgctcaatatccaactcttattctttgcttatcaagaaacaggygatcaaaaatactacgatattgcagaaagycatttctatgcttcagctaataatgtaatccgtgatgacgcttcgtccttccacaccttctattttgatcctgagacaggtcaaccctttaaaggtgtaacgagacaagggtatagtgatgattcatgctgggcacgtggtcartcatggggagtytatggtattcctttgacttatcgtcacttaaaagacgagtcctgctttgacttgtttaagggtgtgaccaattatttcttgaatcgtctrccaaaagatcatgtgtcytattgggatttgatttttaatgatggtagtgatcaatcacgagattcttcagcaacagctatcgccgtctgtgggattcatgaaatgctaaaacatctcccagaggtggatgctgacaaagatatttataaacatgctatgcatgccatgcttcgttccttgatcgaayattatgcaaatratcaatttacccctggtgggacaagtctcctccacggtgtrtactcatggcattcaggtaaaggagtggatgaaggcaatatctggggtgactactattacctagaagcccttatccgtttctacaaagactggaacctatattggtarctaat

SEQ ID NO: 1667 - DNA, 1337 bp, Streptococcus pneumoniae
  misc_feature (1)..(1337): tiling:Spneumo1:WAN024CXZ; Cluster includes WAN0243A0 spr1 997|hk06|15904038|NP_359588.1|1990338..1991669|-|1332 bp|H istidine kinase|S.pneumoniae|R6|NC_003098.1|ORF|111
atgataaaaaatcctaaattattaaccaagtcytttttaagaagttttgcaattctaggtggtgttggtctagtcattcatatagctatttatttgacctttcctttttattatattcaactkgagggggaaaagtttaatgagagcgcaagagtgtttacggagtatttaaagactaagacatctgatgaaatwccaagcttactccagtcttattcaaagtccttgaccatatctgctcaccttaaaagagatattgtagataagcgrctccctcttgtgcatgacttggatattaaagatggaaagctatcaaattatatcgtgatgttagatatgtctgttagtacagcagatggtaaacaggtaacmgtgcaatttgttcacggggtrgatgtctacaaagaagcaaagaatattttgcttttgtatctcccatatacatttttggttacaattgctttttcctttgttttttcttatttttatactaaacgcttgctcaatcctcttttttacatttcagaagtgactagtaaaatgcaagatttggatgacaatattcgttttgatgaaagtaggaaagatgaagttggtgaagttggaaaacagattaatggtatgtatgagcacttgttgaaggttattyatgagttggaaagtcgtaatgagcaaattgtaaaattgcaaaatcaaaaggtttcctttgtccgyggagcatcacatgagttgaaaacccctttagccagtcttagaattatcctagagaatatgcagcataatattggagattacaaagatcatccaaaatatattgcaaagagtataaataagattgaccagatgagccacttattrgaagaagtactggagtcttctaaattccaagagtggacagagtgtcgtgagaccttgactgttaagccagttttagtagatattttatcacgttatcaagaattagctcattcaataggtgttacaattgaaaatcaattgacagatgctacyagggtcgtcatgagtcttagggcattggataaggttttgacaaacctgattagtaatgcaattaaatattcagatraaaatgggcgygtaatcatatcygagcaagatggctatctytctatcaaraatacatgtgcgcctctaagtgaccaagaactagaacatttatttgatatattctatcattctcaaatcgtgacagataaggatgaaagttccggtttgggtctttacattgtgartaatattttagaaagctatcaaatggaytatagttttctcccttatgaacacggtatggaatttaagattagcttgtarctaat

SEQ ID NO: 1668 - DNA, 1140 bp, Streptococcus pneumoniae
  misc_feature (1)..(1140): tiling:Spneumo1:WAN024FWX; Cluster includes WAN024171 |cps 9vI||AAM62293.1|||1140 bp|putative CPS repeating unit poly merase Cps9vI|S.pneumoniae||AF402095|ORF|000
atgataaaaagaaaaatatatataatctgtgtattactgtcgtattttttacctagtttttttacagttggatcaatggcaactatatttaccctactctccacagtaattaggctattcgtaactatatatcatgttcctaaagttttttcacagtataaggtaacgctgattgacattttggttgttctgtttttgttttttcaagtgtttgtgggggttcaaagtcagacagtgaatcttaactatattggaggacagtttttctttttaggattatattcatttttgaaatactttttattgtttgattgtaaaacaacaattgaaagcctctttttaacctttatcttgtttttgtgtgttcaagtaataactcaattgctttttccggttggtttcgactctttgtaccctacaggagataatagactttactttttaggaagaaaaaacatagccaccccatatatcattgttggattaggtagtttttacttattaaataaaaaaatgaatgagtttatatcactaaaggagattatttttttaggattgttcggaattttatcatttttaacacaatccagtacagcgattatatgttatgtgctttttatttttatgcgtatgttaggtttaaaggaaaatataggaaaaccatattctttagtcagtataactgtgtatatttgttttagtttttctataattttttcacaaagtacaattttatcaacttttacagcaattttttccaaaaatgcaaccttttcaggacgtatcaatatttggcagttagcgattcgtatttttgaagaaaatttttggtttggaaaaggacttaatattgatttcaatgcttggacaaatgggattatcgttaactccgcacacaataccttactagatatacttgctcgaacgggtatatttccgggtattttatttgtagtggttcttctaagtctatttcttggaaaatatagagtaaaatcaaaaacgctactgacaatgttgatttcattcatggtttatattacgatggaggctacatctgtaagtattcttctattaataattgctatttgtgtgtattggtcttttggagaggagaagttatatgagcaagttacttaa

SEQ ID NO: 1669 - DNA, 680 bp, Streptococcus pneumoniae
  misc_feature (1)..(680): tiling:Spneumo1:WAN024ETQ; Cluster includes WAN02449R spr0 707|ciaR|15902751|NP_358301.1|707226..707966|+|741 bp|Resp onse regulator, transcriptional regulatory protein|S.pneum oniae|R6|NC_003098.1|ORF|111
atgataaaaatcttattgrttgaggatgacctaggtctgtcaaattcagtatttgactttttagacgattttgcggatgttatgcaggtatttgatggagaagaaggtctytacgaagctgagagtggtgtctatgacttgattttgctggatttgatgttgccagaaaaaaatggtttccaagtcttaaaagaattgcgtgaaaagggaattacgacaccagttctgattatgactgccaaggaaagtttggatgacaagggacatggatttgaactgggagcggatgattatctgaccaaacctttctacctagaagaacttaaaatgcgrattcaggcccttctcaaacgttcagggaagtttaatgaaaacaccttgacttatgggaatatcgtggttaatttatcaaccaataccgttaaagttgaagatactcctgtcgaattgctggggaaagagttcgatttactagtttatttccttcaaaatcaaaatgtgattttgcctaagacgcagatttttgaccgtctatggggatttgatagtgatacaacgatttcggttgtcgaagtctatgtttcaaaagtccgtaagaaattaaagggaaccacttttgcagagaatttgcaaacyttgcgtagtgttgggtatcttttaaaagatgttcagtaactaat

SEQ ID NO: 1670 - DNA, 543 bp, Streptococcus pneumoniae
  misc_feature (1)..(543): tiling:Spneumo1:WAN024CGM; Cluster includes WAN023S4R cont ig_399_1||||84..626|+|543 bp|Glimmer 2.02 orf prediction|S .pneumoniae|670|WAN01UD6U|ORF|000
atgataaaacagataaaagcccacttgaataagagtattcagagtatcattggccaaaaagttgagttcgtcaaacaagatgaacaggcctttactcgtaaaagaaggttatcactagaaactatgattcgtacaattctgggcatgggaggaaaatcactatcaaaagaattactagatgccagactgacagtttcaaattcagcctttgttcaaagacgctatcagataaaacctgaagctttctatgctctatttaaagaatttacagcacctattccacttaatactgattttccaatattcgctgcagatgggagtgatatctgtattcctcgaaatcccatggatacagaaacctctatccaaacccaaacggatgttaaatcctataatctcatacacataaatgccctatacgacttgacgactggagtgtatagagatgtctctattcaagacaaacatgcacaacatgagcgcttagctctgattcagatgatggaggcttctccctttcgagaaagctcttgttatcatgga

SEQ ID NO: 1671 - DNA, 780 bp, Streptococcus pneumoniae
  misc_feature (1)..(780): tiling:Spneumo1:WAN024AZL; Cluster includes WAN0243AN spr1 974|fcsR|15904015|NP_359565.1|1964196..1964969|+|774 bp|Re gulator of fucose operon|S.pneumoniae|R6|NC_003098.1|ORF|1 12
atgataaaagatgaacgtgtacttgaattgattgaaatyatyaaaaagaaaaaaagaattgccgtaaaagagctggcagaaatcactttctccagcacaagtaccttacgtcgtgatttaattttcttagaaaatcaaggtcttatcaaaagaaagcacggatacgtgaccctgtcctctatgaacacaattgaactttctcatcaaatacgkgaaggagaaagtactaggcaaaaaagactaatcgstagtctcgctaaagactttattcggtcwggyatgtgtatytatctrgattcyagtackactgtctacgaactytgtccctatctttctgaacttgataatttgattatttttacaaatggtttacatactgcacaaaccctatctgaaactgttaaagatagctccaaaatctttatcacatctggcgaggtcaaacatcaatcctgtycsgtggtcaactatgataaggaaaattctttattagatcattttaatatcgatttagcattttgttcagcaagaggtattgatgaccaatatgtttatgaagcttctctcagccaagctatttcaaaaaagaatattattgacaaagcccatgaaaccatcttactgattgatagttctaaattttacaagactggattttttaaaattaatcccctmtccaaatacacaacctttatttcwgacaccktgccaraycaaaaattattagaygcagtmgaattatttgatggagaatgggtttctgatattcaaykaactaat

SEQ ID NO: 1672 - DNA, 534 bp, Streptococcus pneumoniae
  misc_feature (1)..(534): tiling:Spneumo1:WAN024GJD; Cluster includes WAN023YJE AL44 9929.1_44||||40985..41509|-|525 bp|Glimmer 2.02 orf predic tion|S.pneumoniae||AL449929.1|ORF|000
atgataaacgaagaaataagcaaggaagcaggtcaagcagcacaaaccataatatcatacacaataaaggcaacaaaagaatcaatcaatttagaaaaagaaataagaaaaaagatgaatgaaactttagaaaaagcaaatggaaacttaaaaagtcttatgggcgatgaaatgaaaataaaagacctctacaagaaaggacaactagaaaatataagcatagatcaaatcgacctcaaagacttaaaaaaagaactaaacaaacttggagtaagtttctcagtaatgaaaaacaaagaaagcaaaaactatgaaatattcttccaagccaaagacataaaagtaatggaatatgcctttaagcaagtcatagccaaggaaaataaaaaagaaaaagaaagtatcctaaaacaaataaagaaatacaaagacctatccaaaaacaaagataagacaaaagaaaaaggaaaaaggaaagtaaaagaaaaagtaaaaccaaacaaaaaagatatgaccagagaaatcctaactaat

SEQ ID NO: 1673 - DNA, 350 bp, Streptococcus pneumoniae
  misc_feature (1)..(350): tiling:Spneumo1:WAN024G97; Cluster includes WAN024465 spr0 837||15902881|NP_358431.1|837801..838145|+|345 bp|Conserve d hypothetical protein|S.pneumoniae|R6|NC_003098.1|ORF|111
atgataaagaaaggaaagggctgttttatggacaaaaaagaattatttgacgcgctggatgatttttcccaacarttattggtaaccttrgccgatgtggaagccatcaagaaaaatctcaagagcytggtagargaaaatacagctcttcgyttggaaaatwstaagttgcgagaacgcttgggtgaggtggaagcagaygctccygtcaaggccaarcatgttcgygaaagtgtccgtcgyatttaccgtgatggatttcacgtatgtaatgatttttatggacaacgtcgagagcaggacgargaatgtatgttytgtgaygagttgytatacagggagtarctaat

SEQ ID NO: 1674 - DNA, 881 bp, Streptococcus pneumoniae
  misc_feature (1)..(881): tiling:Spneumo1:WAN024GLS; Cluster includes WAN0244HI spr0 428||15902472|NP_358022.1|428433..429308|+|876 bp|Conserve d hypothetical protein|S.pneumoniae|R6|NC_003098.1|ORF|111
atgataaaggatatacaaggagataaaatgaayaataatttactggtattacaatcagactttggtctggttgatggtgcggtrtcggctatgattggagtggctttagaagagtctccaaccttaaaaatmcatcacttgacgcacgatatcacgccttataatatttttgaggggagctatcgtctctttcagacggkggattactggcctgagggawcgacgtttgtatcggttgtcgatccaggtgtcggttcgaaacgtaagagtgtagttgccaagactgcaaaaaatcaatacattgtcacgccagataatgggacgctttcctttatcaagaaacacgttggcattgtagccattcgtgagatttctgaggtggccaataggcgtcaaaacacagagcattcttataccttccacggtcgtgatgtctatgcytatactggtgctaaactggccagtggtcacattacttttgaggaagtagggccagagctcagtgtggamcagattgtagagcttccagtcgtagcgaccatcatagaagatcatctggtgaagggagccattgatattctggatgtgcgtttcggttcgctttggacctctatcacacgggaagaattttacaagctggaaccagaatttggtgatcgttttgaagtgaccatctaycatgctgatatgctggtytatcaaaatcaggttgtctatggcaaatcatttgcagatgtgagaattgggcaaccsatyctttacrtcarctctctckatcgtttaggtttggctatcaaccaaggttcctttgccaaggcctataatgtaggtgtcggttcatcttggaccattgaaataaagaaaatagaaggataactaat

SEQ ID NO: 1675 - DNA, 161 bp, Streptococcus pneumoniae
  misc_feature (1)..(161): tiling:Spneumo1:WAN024G7G; Cluster includes WAN02443A spr0 940||15902984|NP_358534.1|924964..925119|+|156 bp|Hypothet ical protein|S.pneumoniae|R6|NC_003098.1|ORF|111
atgataaataaactatccagatacatggaaagcagtggtaagacctatcaaaaccactatgtgacaatcttaaaatggtatgaagaagataaagacaaactaagacagaaaggtttaaataaaaaaatgaattatgatgtaggagaatctttatarctaat

SEQ ID NO: 1676 - DNA, 1478 bp, Streptococcus pneumoniae
  misc_feature (1)..(1478): tiling:Spneumo1:WAN024C6N; Cluster includes WAN0244M2 spr0 264||15902308|NP_357858.1|265664..267136|+|1473 bp|Conserv ed hypothetical protein|S.pneumoniae|R6|NC_003098.1|ORF|11 1
atgataaatgatataattctattattgttcgtaaaaattaaaaggagattgatgatggacaaattatttaaactaaaagagaacggtacagacgttcgtacagaggttctcgctggtttaacaactttctttgcaatgagctatattctctttgtaaacccacaaatactttcacaaacaggaatgcctgctcagggygtcttcctarcgacgattattggtgcagtagcgggtaccttgatgatggctttttatgctaacttaccttatgcccaagcgccaggtatgggactcaatgccttctttacctttacagttgtattcgggcttggttattcttggcaagaagccctagctatggtcttcatctgtgggmttatytcattgattattaccttgacaaatgttcgtaaaatgatcattgaatcgattccmaatgcycttcgctcagctatttcagcyggtatcggtgtcttycttgcctaygtaggrattaagaatgctggayttttgaaattyacgattgatccaggyaactatactgttgtaggagaaggggctgacaaagctmaagcaacgattgcagcaaactcttcagcagttccaggattggtyrrctttaataayccagctgttttrgtggcwcttgcaggacttgcyatyacwatcttctttgtyatcaaagggattaaagggggaattatyctctctatcttgacaacaactgttcttgctatygcagttggtttggtwgatttgtctagtatcgattttgctaataaccatgttggtgcagcytttgaagayttgaagacartctttggtgcagctcttggttcagaaggwttrggagctttgrtttcagatacagctcgyttgcctgaaactctgatggccattcttgccttctcattgacagatatttttgacacrattggtaccttgatyggtacaggtgaaaaagttggtatygtagcgacaaatggtgaaaatcaccaatcagcyaarttggataaggctctttactctgayttgattggwackwcartyggtgccatygcwgktacttcraacgtaacgacttatgtygagtctgctgctggtatcggtgcaggtggacgtactggtttgacagccttggtygtrgcwatctgttttgcgatytcaagcttytttagcccacttctagcgatygtaccaacagcsgctacagctccaatcttgattatcgttgggattatgatgcttggtagcttgaaaaatatccattgggatgatatrtctgaagcrgttcctgcyttcttcacatctatctttatgggattcagctactctatcactcaagggattgcagttggtttcttgacttacactttgactaagcttgtyaaaggtcaagytaaaratgttcatgycatgatttggattttggatgccttgtttatcctkaactacatcagcatggccytataactaat

SEQ ID NO: 1677 - DNA, 866 bp, Streptococcus pneumoniae
  misc_feature (1)..(866): tiling:Spneumo1:WAN024DB6; Cluster includes WAN02441U spr0 992|map|15903036|NP_358586.1|976908..977768|+|861 bp|Methi onine aminopeptidase|S.pneumoniae|R6|NC_003098.1|ORF|111
atgataacattaaaatcagctcgtgaaatcgaagctatggacaaggctggtgattttctagcaagtattcatataggcttacgtgatttgattaarccaggcgtagatatgtgggaagttgaagaatatgtccgccgtcgttgtaaagaagaaaatttccttccacttcagattggggttgacggtgccatgatggactatccttatgctacctgttgctctcttaacgatgaagtggctcacgctttccctcgtcattatatcttgaaagatggtgatttgctcaaagttgatatggttttgggaggtcccattgctaaatcygacctraatgtctcaaaattaaacttcaacaatgttgaacaaatgaaaaaatacactcagagctattytggtggtttagcagactcatgttgggcttatgctgttggtacaccgtccgaagaagtcaaaaacttgatggatgtaaccaaagaagctatgtacaagggtattgagcaagctgttrttggaaatcgtatcggtgatatcggtgcggctattcaagaatacgctgaaagtcgtggttacggtgtagtgcgtgatttggttggtcatggtgttggcccaactatgcacgaagaaccaatggttcctaactatggtattgcaggtcgtggactccgtcttcgtgaaggaatggtcttaaccattgaaccaatgatcaatacaggcgattgggaaattgatacagatatgaaaactggttgggcgcataagaccattgacggtggattgtcatgtcagtatgaacaccaatttgtcattacgaaagatggacctgttatcttgactarccaaggtgaagaaggaacttattaactaat

SEQ ID NO: 1678 - DNA, 309 bp, Streptococcus pneumoniae
  misc_feature (1)..(309): tiling:Spneumo1:WAN024GEB; Cluster includes WAN023LTJ 3140 54_1182||||624770..625078|-|309 bp|EGAD orf prediction|S.p neumoniae|R6|NC_003098.1|ORF|110
atgataagctgcaacaggmtcctcagcttgggtaatgggacgtcccactacgatatagtcactgccgatttgataggcatcagcaggtgtcatgactcgtttttgatctccaactgcaacaccagctggacgaatccctggtgtcagacagataaaatctggattggtagcctgcttgatgacttgtacttcctgagccgagcaaacaacaccatccaagccagcttcagctgtcttcttggcatagtgaatcacagactcttgcagactggtttggatattttgaaactcctgcatctgagcttctga

SEQ ID NO: 1679 - DNA, 2417 bp, Streptococcus pneumoniae
  misc_feature (1)..(2417): tiling:Spneumo1:WAN024D6B; Cluster includes WAN0243NT spr1 498||15903541|NP_359091.1|1475986..1478397|-|2412 bp|Conse rved hypothetical protein|S.pneumoniae|R6|NC_003098.1|ORF| 111
atgataaggaataaaaaacaagattatgtactggcctacaagcaaccrgyttcaaccacttacatgrgttgggaagaagaagctttaccgataggyaatggttctttaggagcaaaagtatttggccttataggggctgaacggattcaatttaatgaaaaaagtctctggtctggaggtccacttcctgatagttcagattatcagggtggaaatcttcaggatcagtatgkttttttagctgagattcggcaggctttggagaagagagattacaatctggctaaggaactggctgagcagcacctaattgggccaaaaacgagtcaatatgggacctatctgtcttttggggatattcacattgagttcarccagcaaggtacgactttgtctcaggtgacggactatcagagacagytgaatattagtaaggcacttgygacgacttcttatgtctataagggaacgcgatttgaacgtraagcttttgcgagttttccagatgatctcttggttcarygttttactaaggaagggkyggaaactctagattttactatagaactatccttgacctgtgatttggcttctratggaaagtatgarcaggaaaaatctgattacaaggagtgtaagttggatattactgattctcatatcttgatgaagggaagagttaaggataatgatctgcggtttgctagttatctagcttgggaaacggatggagatattagagtttggtcagatagggttcagatatcaggagccagttatgccaatctcttcttggccgctaagacggattttgcccaaaatcctgctagcaattatcgcaagaaactagatttagagcaacaggtgatagacttggtggacacagctaaagaaaagggctatacccaattgaaatcaaggcatatcgaggactaccaagccttattccagcgtgttcaattggatttggaagctratgttgacgcatycactacagatgatttgttaaaaaattataagccacaagaagggcaggctttggaggagctgttcttccagtatggacggtatttattgattagttcgtccagagactgcccagatgctctaccagctaacctacagggagtctggaatgcggtcgacaatcctccttggaattcggactatcacttaaatgtcaatctgcagmtgaattattggccagcctatgttaccaatctcctagagrcggtctttccrgtcatcaactatgtagatgatttgcgtgtctatggtcgtctagcggctgtaaagtatgcaggaatcgtctctcaraaaggtgaggaraatggttggttggttcatactcaagcgactccctttggttggacggcacctggttgggattactattggggttggtcaccagctgccaatgcgtggatgatgcaaacygtttatgaagcctattyattttatagggaccaagactatctcagrgagaaaatttatcccatgttgagggaaacggttygtttttggaatrcctttttacataaggatcagcaggcgcagcgttgggtstcttctccgtcttattccccagaacatgggccgatttcgattggcaatacytatgaccaatctctgatttggcagttatttcatgattttattcaggctgctcaggaattgggactggatgaggacttgttgactgaggttaaggagaagtctgatttactaaatyctttgcaaatcactcaatctggtcgaatcagggagtggtatgaggaggaagagcagtattttcaaaatgagaaagtggaggcccagcatcggcaygcttcccatctagtgggactctatcctggcaatctctttagctacaagggacaagagtatattgaagcggcrcgtgctagcctcaatgatcgtggagatggcggcacaggctggtccraggctaataagatcaatctctgggcgcgtttgggagatggcaatcgagcccataaattattggcagagcagttaaarayatccaccttgcmaaatctttggtgtagccatcctccttttcagatagatggtaattttggtgctactagtggcatggcagaaatgttactccagtctcatgcagcttatctggtacctctagctgccctacctgatgcttggtcaacaggttctgtttcaggcttaatggcacgtggacattttgaagtgagcatgagctgggaagataaaaaactcttacagttgaccattttatcaaggagtggaggagatttgcgagtttcttatccagatattgagaagagtgtgattaaaatgaatcaagaaaaaataaaagcgaaatgcatggggaaagattgtatttcggtggcaacagcagaaggtgatcttgttcaattttatttttaactaat

SEQ ID NO: 1680 - DNA, 258 bp, Streptococcus pneumoniae
  misc_feature (1)..(258): tiling:Spneumo1:WAN024CID; Cluster includes WAN023MG4 3153 85_34a||||22704..22961|-|258 bp|EGAD orf prediction|S.pneu moniae|R6|NC_003098.1|ORF|110
atgataaggcaaaataacatgcgcacgatcagaaatacgcaagttatcagttgttacaccttcctcatgaagatagctcaactcttttacaagagatttaggatttacaaccataccattcccaatgacagatattttttcagggaagaaaatcccagatggaatcaagtgcaacttaaatttcttaccgtcaatcacaatcgtgtgaccagcattatcaccaccttggtaacgtgcaatcacttctgcattcgctga

SEQ ID NO: 1681 - DNA, 821 bp, Streptococcus pneumoniae
  misc_feature (1)..(821): tiling:Spneumo1:WAN024GIS; Cluster includes WAN0244FZ spr0 483||15902527|NP_358077.1|485549..486364|+|816 bp|Conserve d hypothetical protein|S.pneumoniae|R6|NC_003098.1|ORF|111
atgataaggtgcaaaaaagaaataaggagtttgtatatggctgaacaagacttagctatgcaagtattrcaacaagtggtraaactaccwgttgttaaggttgatmgttcgaaatttttagtggataagttttccaaagaattggrtccamargayattcctaccttattggaacaaggtmcaacgwctctyytatctcaagaaatmttagatcgwgtrgctaatgcytgtattmgggayaatgtwttattagcgagtgggacttctgttttggcaggattasctggagggcttgctatggcaattaccattccagctgatgtggctcaattttatrctttctctctraaattggctcaagaattaggttatatttatggttatgaggatctttgggyttcacgmgaggagttgagtgaagatgctcaaaataccctcttgctttatctaggcgtmatgttrggggtgaatggaacygctgctttgctaygtgytggtrgtataacaattgccaaacaggtaatgaaaayagtgcctaataaagctttaacaaagacgctttggtaccctattttgaaaaaagtcttaaaaatatttggtgtgaatcttaccaagggagggytggccaaaggaatrgggaaatttattcctatcttgggtggtatcattkcaggtggtttaacctttgcaactatgaaaccratgggkgaaagcttgcagaaagaattrtccaagctagtyaactatagtgaagttcaatatcaagaagatgttgaaacaatccgaaaagaggctgaaatcatyraaggagagtaactaat

SEQ ID NO: 1682 - DNA, 726 bp, Streptococcus pneumoniae
  misc_feature (1)..(726): tiling:Spneumo1:WAN024B3D; Cluster includes WAN0240Y3 |cps 6bR||AAL68411.1|||678 bp|putative CDP-ribitol transferase| S.pneumoniae||AF246897|ORF|000
atgataatgtcaatatataaactttataaagatattgaaagaaaaacgatgtcgcctgctaaaaaagcaatggctaaaaatgattattttgcgttttatgttggaagaccgttatcctatcttttaacagttccttttttaaaaacgaatattactcccaatcaagtatcttatttatctatagcccctttgattcttggatttctgacaatgacatttacaactaatttcattctattattgctggcatggtttctattttttttatggaacttactagatggagtagatgggaacttagctagatatcgggagcaatactcgaaggatggaagtgtagtagatgcaatggcaggctatgtggctatggtgctgacgtattttggtgcaggaatagtagcaactcatctaaatggctcagatatgtatgtgattttgggtgctttatctggaatttctttgatttttccaagattggtgatgcataagtatatcaacacagtagcacgaaatgagtctgtcaataacattaaagataaatcaaattttagtactataaaactactggctttaaatatgacatcaattacaggtattcctcaggttttactactagtaacgattttaacaaatcagtgggaattttttactttagtatatttcacgattaattttttattaatgatattttcgttatattcattatttaaaaaggagaatgtttag

SEQ ID NO: 1683 - DNA, 330 bp, Streptococcus pneumoniae
  misc_feature (1)..(330): tiling:Spneumo1:WAN024AVN; Cluster includes WAN023I5R 8699 1_3549||||2026244..2026567|-|324 bp|EGAD orf prediction|S. pneumoniae|TIGR4|WAN01UC25|ORF|010
atgataattcaactaagtgatttaggtcaagttcaccttgtttgtggcaagacagatatgaggcagggaatagactcattagcctatgtagttaaaacccactttgaattggatcctttctccgatcaagtctttctcttttgtggtggacgtaaagaccgctttaaagtyctttactgggatggtcaaggattttggatattatataaacgctttgagaacggaaaactgacttggtccagtacagaaaaggatgtcaaagctctcrcayctgaacaagtagaytggctkatgaagggcttttctatcactccccaaatactarctaat

SEQ ID NO: 1684 - DNA, 233 bp, Streptococcus pneumoniae
  misc_feature (1)..(233): tiling:Spneumo1:WAN024CGF; Cluster includes WAN0244RV spr0 055||15902099|NP_357649.1|58885..59112|+|228 bp|Hypothetic al protein|S.pneumoniae|R6|NC_003098.1|ORF|110
atgatacaaattatcgttaatacatttattgaaaagkataagactggagcagttgttgaagtgttgtatgccagtgctgaccaagataaggtacaagctaaatatgaagaactagctgcacaataccccgaaaattatttagctatctatratgtaccgctggatacggatttgaatacactagatcattacccgtctgtgtttattgraaaagaggagtttgagtarctaat

SEQ ID NO: 1685 - DNA, 911 bp, Streptococcus pneumoniae
  misc_feature (1)..(911): tiling:Spneumo1:WAN024CEU; Cluster includes WAN0244RP spr0 061|PTS-EIIC|15902105|NP_357655.1|68133..69038|+|906 bp|Ph osphotransferase system sugar-specific EIIC component|S.pn eumoniae|R6|NC_003098.1|ORF|111
atgatacaatggtggcaaattttacttctcactttgtactcagcttatcaaatctgtgatgagttgacgatcgtttcatctgcaggttcccctgtatttgctggtttcattactggtttaatcatgggagatgtgactactggtttacttatcggtggtaacttgcaactgttcgttcttggggttggtaccttcggtggtgcttctcgtatcgacgcaacttctggtgcggttcttgcgacagccttctctgtttcacaaggaattgatgcaccgcttgccattactacaatcgctgtaccagtagcwgctctcttgacttacttcgacgttcttggtcgtatgactactaccttcttcgctcaccgtgtggatgctgcaatcgaacgctttgactataaaggtattgaacgcaactacttgcttggtgcgattccgtgggctctatctcgtgcccttccagtcttctttgcccttgcttttggtggtgcctttgtacaatcagtagtagacttcgttgaagcctacaaatgggttgcagatggcttgacactygcaggacgtatgcttccaggtcttggatttgcaatcttgcttcgttaccttccagttaaacgtaaccttcactaccttgctatgggatttggtttgacagctatgttgactgttctttactcatatgtaacaggtcttggtggcgctgttgctggtatcgtaggtactcttcctgctgaagttgctsaaaaaattggtttcgtgaacaacttcaaaggtttgtctatgattggtatttctatcgtaggtattttccttgcagtgcttcacttcaaaaatagccaaaaagtagctgtagcagcaccttctacaccatcagaaagtggggaaatcgaagatgacgaattctaactaat

SEQ ID NO: 1686 - DNA, 323 bp, Streptococcus pneumoniae
  misc_feature (1)..(323): tiling:Spneumo1:WAN024F9W; Cluster includes WAN0243HH spr1 727||15903769|NP_359319.1|1706390..1706707|-|318 bp|Conser ved hypothetical protein|S.pneumoniae|R6|NC_003098.1|ORF|1 11
atgatacagccagcaagtttagaagaattagcatctttagtggaaaaagcgggcaagaaggtcttcmtttttgtggcagactggtgtrgcgattgtcgttatatttatcctgccttaccagagattgargagaccaatccagagttcacctttattcgaatggaccgagatcagtatatggatttggccaaactctgggatgtttacggaattcctagccttgttgttctagaaaaggacaaggaaatcggtcgttttgtcaatcgcgaccgtaaaagyaagsarcaaatyaaygaytttttagcaggaytgaaatarctaat

SEQ ID NO: 1687 - DNA, 350 bp, Streptococcus pneumoniae
  misc_feature (1)..(350): tiling:Spneumo1:WAN024DAX; Cluster includes WAN024419 spr1 013||15903057|NP_358607.1|994115..994459|+|345 bp|Conserve d hypothetical protein|S.pneumoniae|R6|NC_003098.1|ORF|110
atgatacaggcagtctttgagagagccgaagatggcgagctgaggagtgcggaaattactggacacgccgagagtggcgaatacggcttagatgtcgtgtgtgcatcggtttctacgcttgccattaactttatcaattctattgagaaatttgcaggctatgaaccaatcctagaattaaacgaagatgaaggtggctatctgatggttgaaataccaaaagatcttccttcacaccagagagaaatgacccagttattctttgaatcatttttcttaggtatggcaaacttatcggagaactmttctgagttcgtccaaaccagagttatcacagaaaactaactaat

SEQ ID NO: 1688 - DNA, 146 bp, Streptococcus pneumoniae
  misc_feature (1)..(146): tiling:Spneumo1:WAN024AYS; Cluster includes WAN023SKX NC_0 03098.1_1093||||855031..855162|-|132 bp|Glimmer 2.02 orf p rediction|S.pneumoniae|R6|NC_003098.1|ORF|101
atgataccaagttttctagctcttgtcaagataaaaagttattttttgaaaagtttgtgtttrtattttggtttggttttcraatcaaaaagagagaaycaagttgattcyctcyctatgttagtttttcttattttccctaccta

SEQ ID NO: 1689 - DNA, 225 bp, Streptococcus pneumoniae
  misc_feature (1)..(225): tiling:Spneumo1:WAN024GIR; Cluster includes WAN023LYS 3143 50_925a||||485992..486216|-|225 bp|EGAD orf prediction|S.p neumoniae|R6|NC_003098.1|ORF|110
atgataccacccaagataggaataaatttccccattcctttggccaaccctcccttggtaagattcacaccaaatatttttaagacttttttcaaaatagggtaccaaagcgtctttgttaaagctttattaggcactrttttcattacctgtttggcaattgttatacyaccarcacgtagcaaagcagcggttccattcacccctaacattacgcctagataa

SEQ ID NO: 1690 - DNA, 294 bp, Streptococcus pneumoniae
  misc_feature (1)..(294): tiling:Spneumo1:WAN024FDG; Cluster includes WAN023KRP 3150 51_2990||||1590038..1590286|-|249 bp|EGAD orf prediction|S .pneumoniae|R6|NC_003098.1|ORF|110
atgataccactttttcaaaaaaaatcaagaggaaagtgcaattttttgaaaaggatttcagatttttcgcaaacggtcgatagcttcctttctttgagccaaagcccgttcatatttaccagtatcttctgcttggaaatagtgatgattacgaattttttctggcagatagtcttgcttgacccaatttccaggatagttgtgtggatagagatagtcttgggcattccccagttccttgcttccactgtagtgcccatcacgcaggtgtcgcggaataggcaagtgccctga

SEQ ID NO: 1691 - DNA, 720 bp, Streptococcus pneumoniae
  misc_feature (1)..(720): tiling:Spneumo1:WAN024FPQ; Cluster includes WAN023PP8 pne2 0_14||||10459..11178|+|720 bp|Type 11A capsule operon, Gli mmer 2.02 orf prediction|S.pneumoniae||WAN01UCJ5|ORF|000
atgatacctaaaaagattcattattgttggttcggtggcaaacctttatcaartgatgtaaagcgatgyatagcaagttggaaaaaattttgtcctgattatgaaattattgaatggactgaaaaaaayttttgtattgaaaatcaaaatcaatttgtkcaggatgcatatagagataaagcatgggcttttgtaagcgattatgcaagacttaaaattatatatgaaaatggaggtatttatttagatactgatgttgaagtrattaaaaatctagataagttgttggaaaataaagcattctttggagttcatcaagttaatcatctwgttrvtacaggrttaggrtttggatcggaaaagggcacctytattttaaaggagttattaaatttgtatgatgaaatagaatttgatcttagkaagaaagatgaattgttatgtcctgaattaaatacacctgtatttaaacgtcttggttatacttattctgactgtgttgtaaaaaacgaatatttcacaatctatcctgaagaatattttgatccgatttctttgggtkatggcgtagaaaatattttatcagataaracattctctattcatcattatagtgcttcttggacttccttragaratcagatgaagagyaaaataattcgtaaaytwggyagargtaatrtsttgragttaaaaagaatattaaaggggaaaactaga

SEQ ID NO: 1692 - DNA, 270 bp, Streptococcus pneumoniae
  misc_feature (1)..(270): tiling:Spneumo1:WAN024EY5; Cluster includes WAN023KXS 3130 06_2718||||1447345..1447614|-|270 bp|EGAD orf prediction|S .pneumoniae|R6|NC_003098.1|ORF|110
atgatacggaccttggccattttggcaatcagtgctgcgccccccttgacatcgtttgagtggcggctaccacttggaaacatgatgagagagcggtcactttttttgagaacgttgataggatatttgatggctgaggcgctgggattttcacggtcgatgggaaaggcgccacacatacgaatccaccaaccaaagatacggttggtaaagagttctttttttgccataaagatgaactgttttggcttggtcgcaaaggccatataa

SEQ ID NO: 1693 - DNA, 903 bp, Streptococcus pneumoniae
  misc_feature (1)..(903): tiling:Spneumo1:WAN024CBQ; Cluster includes WAN0244Q5 spr0 117||15902161|NP_357711.1|124392..125294|+|903 bp|Hypothet ical protein|S.pneumoniae|R6|NC_003098.1|ORF|100
atgatacgtaaactaatcatttttttattaatgctccctctttttgtcttgtggctagagttgcatgtcctagtgaataacttactattgaatctagaatctccccttgattttgtgrttagtatgagtcttrctttttttgttttgatattatcaaaaatarttttagacatactatacgcattgaaagatttgtacaagaaagaagctcttattacgatttttccytttatttttatargmaggaaraaagtraatgtgagrttctcgccctatttttcattccatcgwaaaagtttgtcgcctgatgatttaagatctaggattatatggagttttattcttgaaattgctattatcctagtatttattttaaaaattccttttgymatcatyatgcttactacaatatttttytggamtataatggatatcaatcatctcgtttttaataagacggaatttcttttyaatcaaartaaatgggaaaaagaagaytcgtttgaaagygatttgacraawacgttaaaggataaratacaaaaatcagagctaagttattctgacttaatgtctcttcagctgtatgatgcgatgaaccaatccacctttttaacggatagtgaactttttgaggatattttgaaaaaaatcgaagattctcataacacccttctgtgtacaggtcttgtcgagttactgmtgtatgaaatktctattagtaacaataacaactggtcmaamaaggttgataaaattagratacasctcatcagaatcaatcaattagattttttctattatacaagttggttaaggcaaaattttgatttctgtatgaatagagagtatcataaaatgaaatctcggaaattattactgagtaataaaaagatagtttaa

SEQ ID NO: 1694 - DNA, 729 bp, Streptococcus pneumoniae
  misc_feature (1)..(729): tiling:Spneumo1:WAN024EXX; Cluster includes WAN0243NZ spr1 492|psaB|15903535|NP_359085.1|1469087..1469809|+|723 bp|AB C transporter ATP-binding protein - manganese transport|S. pneumoniae|R6|NC_003098.1|ORF|111
atgatacgtatcgaaaayctcagtgtctcctacaaagamacgttggcacttaaggatatttcactagtgctccatggaccaacaattaccggcatcattggtccaaacggcgctgggaaatcaacactattaaaaggtatgytgggaattatcccacatcaarkkcaggcatttctcgatgacaaggaagttaaaaaatccttacaccgaattgcctatgtcgaacaaaaaatcaatatcgactacaactttcccatcaaggtcaaggaatgcgtctcgttaggactatttccctctattcctctctttcgaagtttaaagrctaaacattggaagaaagtgcaagaggcccttgaaatcgtcggcctagctgactacgctgaacgtcaaattagtcaactgtctggaggtcaattccagcgggtcttgattgccagatgtttggtgcaggaagccgactatatcctcttggatgaaccctttgctgggattgactctgtcagtgaggaaatcatcatgaatacgctgagagatttgaaaaaagctgggaagacggttctcatcgttcaccacgacctcagcaagattccccactacttcgatcaagtcttacttgtcaatcgagaagtgattgcctttggtccaacaraagaaacttttaccgaaaccaatctaaaagaagcttacggtaatcaactctttttcaatggaggtgacctaykaactaat

SEQ ID NO: 1695 - DNA, 743 bp, Streptococcus pneumoniae
  misc_feature (1)..(743): tiling:Spneumo1:WAN024D9J; Cluster includes WAN0243X3 spr1 164|gidB|15903207|NP_358757.1|1166177..1166914|+|738 bp|Gl ucose inhibited division protein B|S.pneumoniae|R6|NC_0030 98.1|ORF|111
atgatactaaagaaggaaataactatgaaaccaraaacattttacaacttgcttgccgagcagaatcttccactttcgraccagcaaaaagaacaatttgaacgttattttgagctcttggtcgagtggaatgagaagattaatttgacggcgattacggacaaggaagaagtttatctcaaacatttttacgattcgattgcacccattcttcaaggtttgattcccaatgaaactatcaaacttcttgatatcggggctggggcaggatttcctagtctaccaatgaaaattctctatccggagttagatgtgaccattattgattcactcaataagcgcatcaacttcctacaactcttggctcaagaactggatttgaacggagttcatttctaccacggacgtgccgaagattttgcccaagacaagaacttccgtgctcaatatgattttgtaacagctcgtgcggttgcccgtatgcaggtcctatctgaattgactattccctaccttaaggttggtggmaaactattrgcactcaaggcyagcaatgcgcctgaggarttrttagaagctaagaatgccctcaatctcctttttagtaargtcgaagacaatctcagctacgccctaccraatagagatccgcgytayatcacagtggtagaaaagaaaaaagaaacaccaaataaatatccacgtaaggctggtatgccaaataaacgcccrctttaactaat

SEQ ID NO: 1696 - DNA, 432 bp, Streptococcus pneumoniae
  misc_feature (1)..(432): tiling:Spneumo1:WAN024FZ2; Cluster includes WAN0240Q0 |||A AG13002.1|||354 bp|UmuC-MucB-like protein|S.pneumoniae||AF 227520|ORF|000
atgatactgtggaacggaacagtagccctagtattgactactgtcgtttctattcatattggctattctaggactgagatgaaaaaatcwatwaatgctcagaawaaaattgamccmgcaaatctyccmaaaacaatggktgagtcatgtacttgwattattccgaaaaaatacacctctggtgcagtgagrcaaatyggtgtrtcttatrgtggcttygtagatgaaarctwtactctactrtcactytttgatgatgtagaacaaattgaaaaagawaatagacttcagacagcwattgatgttgtcagagaacagtttggytttttagcyatwcaaaaaggaaccgtcctaacygaaggttccagaaatattgaacgyagtaaacttatcggyggtcattccgckggtggattggagggattaaaatga

SEQ ID NO: 1697 - DNA, 909 bp, Streptococcus pneumoniae
  misc_feature (1)..(909): tiling:Spneumo1:WAN024FXI; Cluster includes WAN0241AD |cps 15bK||AAP76296.1|||909 bp|putative alpha-1,2-galactosyltra nsferase|S.pneumoniae||AY250187|ORF|000
atgatagaaaaaattttagattctattaaaaatcattctttttatagtaaattgaaggataaaattcatagaattattccattatatattataaaaaatcaaaatatagcttttcaacaagataccgatatagcatatagaaaactaaagaagaagtttagrcatatttcgttgactggagatgagcttaaatataaaatggagttttcaaataaagtttggatttgttggtttcagggagaagagcatgccccagagttaattaaaacatgtattcaatcaatgaggaatcaacttcaaggaagagaaatcattgtgttgacagaaaaaaatataagtgattatacagagattccagrctatattattgaaaaatacaaaaaaggatggatttctcgtgcgcattactctgatatccttaggatagatcttctatgtcgccatggaggattatgggtagatgcaacagtgttgaatacaggaggagatttctcaaatcttgaggtaccactttttgtatataaatctttgaatttatcaagaaaagattcacaagctattgtagcatcaagttggttaatttcgtcatatagtaatcatcctatattactctatacgagaaaactcctatgggcctactggcgaagaaaaaatagtttatgtaattattttttgttccatatatgttttacaatagctacagagcggtacccaatcgaatggtctgctgtccctacttttaataatcattctcctcatatacttcattttgagttgaatgaacaattttcggaaaaacggtgggaacaactgaagcatatttcggcgtttcataaattaaatcatcatatagattattctagcggtgttaacactttttataagttcatagtatcttcgaaagtttag

SEQ ID NO: 1698 - DNA, 447 bp, Streptococcus pneumoniae
  misc_feature (1)..(447): tiling:Spneumo1:WAN024AWY; Cluster includes WAN02435A SP01 28||15900070|NP_344674.1|128980..129417|+|438 bp|ribosomal -protein-alanine acetyltransferase, putative|S.pneumoniae| TIGR4|NC_003028.1|ORF|011
atgatagaaatcaagcgaattcaacaacagcctgacctagctcaagccatctacgctgttatggcagctgtttacctagtcagtccttggactctggagcaaatccaagcagayctgtcccaagaccagacttggtatgywytggcttatgatggggcagaagtgattggwtttctagctgtkcaggaraatmtytttgargcagaagtcytgcaaatcgctgtyaaaggagcttatcagggtcagggrattgcgtcagccttgtttgctcaattgccgacagayaaggarattttcctcgaagtcagamagtcaaatcaacgagcgcaagcattttacaagaaagaaaaratgrcrgtyatcgctgagcgaaaggcctactaccatgacccagtcgaggacgccattatcatgaagagagaaatagatgaaggaytarmtatattt

SEQ ID NO: 1699 - DNA, 1017 bp, Streptococcus pneumoniae
  misc_feature (1)..(1017): tiling:Spneumo1:WAN024FVA; Cluster includes WAN0240PB |cps 14I||CAA59781.1|||921 bp|ss-1,3-N-acetylglucosaminyltransf erase|S.pneumoniae||X85787|ORF|000
atgatagaagtatcaatcataattccaatatacaatgctgaaaaaactattaaaaattgtgttgatagtgccttaaagcaaaatttagaatctcttgaagtgattttggtgaatgatgggtctaacgattctacatcaaaaattcttgaacagtatggtgataatccccaagtgatgattttccatcaagtgaacatgggagtatctgctgccagaaacgtaggattatcgtatgcaagcggagagtatgtgttctttttagattcagatgatatattagatgaaggtatgctatctaaaatgtatcagtttgcaaaaagtaataaaattgatcttttatcttgttggcataaagagcctagtacaacacaatacggtggtaatgataatagttcagcttcatttattgcacgaacaaaagaggaaataggaaatcattttgtggatatttttccgagaagtgcttgtgctaagttatttcttcgtagaagaattgaggaaaacaatattgctttttcgactgaaatgtcactaggagaagatatgtcattcgtttgccaatacttgatggtctcaaggagtattgcagtaattgatggactgtattatactattcagaatgttaatccacagtcattatctaagcgatatgtaagtaatatcgaaaactccctattaatgcagaatcagttatgggatcaattattagaagtttatcctaaaattgaggagaactactacaagcaacatatggattttagattttatcttgctagtttatatgtgaataatttatttaaatttgattctccgtattcctcaaaagaaaaatgggataatattgcacaacaattaaaaaaatatagaccatttttagatgagaaagtgagcaaagaaaagaagcctaaaaatatgaatgagatggtcattttttatttactgaagtctaaaattcccgcgttaatctattctttttactcatttaaagaatggtggaagaaaaagcgattaaaaaat

SEQ ID NO: 1700 - DNA, 312 bp, Streptococcus pneumoniae
  misc_feature (1)..(312): tiling:Spneumo1:WAN024BE6; Cluster includes WAN02427N SP14 28||15901281|NP_345885.1|1346956..1347267|-|312 bp|conserv ed hypothetical protein|S.pneumoniae|TIGR4|NC_003028.1|ORF |110
atgatagaggcacagggtttcttagtggataagcaaacaagatgcattcattaccatagcaagctggatattattgctttacaatgctatgattgtaaaaagtattatgcttgttatcggtgtcatgattcattagaamatcacccttttgagccktatcccttatctttgatacaggataagcctattttatgtggtgtttgtctaaaactaytaacatataagcaatataaagaaagcttaagttgccycttttgtttttctcgctttaatccaggttgccaaaatcataaggaacgctattttaaatag

SEQ ID NO: 1701 - DNA, 473 bp, Streptococcus pneumoniae
  misc_feature (1)..(473): tiling:Spneumo1:WAN024DX8; Cluster includes WAN0243BV spr1 930||15903971|NP_359521.1|1911031..1911495|-|465 bp|Hypoth etical protein|S.pneumoniae|R6|NC_003098.1|ORF|212
atgatagataaastggtcagkaacytactcctgacctttttcytttgcaaaatgacaaaaatcataawytttttgacaactatahttgtcaaaaagaaaaagatrtgttacratgwawkcaagttaagarataggaagmagaaaggagytatratgtgggtactagkatttatactatttatkattttcttttattctaataattctaaaaaaatcaagaaactagagaataaaatcaaaaracttgagcgaaaagagaaaggaaacgcagaaatgtcgagattattdcaagaaatgattggaaagraaccaattataacgggagtgtatattgggccagataactgggaagttgtggatgttgatgaggaatgggtmaarctacgwmgtgtwgataatacgggaaaagaaaaattcaagttgcaacgyattgargatatccaaaccgttgaatttgacggagagtarctaat

SEQ ID NO: 1702 - DNA, 957 bp, Streptococcus pneumoniae
  misc_feature (1)..(957): tiling:Spneumo1:WAN024ETK; Cluster includes WAN02448T spr0 741|coaA|15902785|NP_358335.1|738119..739069|-|951 bp|Pant othenate kinase|S.pneumoniae|R6|NC_003098.1|ORF|121
atgatagayaaaatayctaggggaaaacaaatgaccaacgaatttttacattttgaaaaaatcagccgccagacttggcaatctttacatcgaaagacaacacctcctttgacagaagaagaattggaatctatcaagagttttaatgaccaaatcagtctccaagacgttacagatatctatctccccttggctcatytgattcagatttacaagcgaactaaggaagatttagccttttcaaaaggaattttcctccamcgtgaaagtaaatctcaaccttttattattggggtttctgggagtgttgccgttggaaaatccacaaccagtcgcctacttcaaatcctactgtcccgtacgkttacagatgctacggttgagttggttacaactgatggttttctctatcccaatcaaaccttgattgagcagggrattttaaatcgtaaaggatttcctgaaagctatgatatggaagctcttctcaacttcttggaccgcatcaaaaatggacaagatgtagatattcctgtctattctcatgaagtttacgacatcgtacccraaragaaacaaagtgtcaaagctgctgattttgtaatygttgagggaatyaatgtctttcaaaatccacaaaacgatcgtctctatatcactgacttctttgacttttccatctatgtagatgctggagtggatgatattgaaagttggtatctggaccgtttcttgaaratgctgagyctagcccaaaacgaccctgatagctactattatcgttttactcagatgccgattggggaagtggarkcctttgcccatcaggtctggaycagtatcaatctcacaaatctrcaaaattatattgaaccaaccagaaatcgtgcagaagtgattcttcataaaagcaagaaccatgaaatcgatgaaatttacttaaaaaagmtaactaat

SEQ ID NO: 1703 - DNA, 729 bp, Streptococcus pneumoniae
  misc_feature (1)..(729): tiling:Spneumo1:WAN024BIG; Cluster includes WAN023PVF pne1 0_5||||3301..4029|+|729 bp|Type 7C capsule operon, Glimmer 2.02 orf prediction|S.pneumoniae||WAN01UCKC|ORF|000
atgatagayatccattcgcayatcgtytttgatgtagatgayggtcccaagtcaagrgaggaaagcaaggctctcttggyagaatcctacagrcarggggtrcgaaycattgtctctacctctcaccgtcgcaagggcatgtttgaaactccggaagagaagatagcagaaaactttcttcaggttcgggaaatagctaaggaagtggcgagtgacttrgtcattgcttacggrgctgaaatttactacacaccagatgttctggataagctggraaaaargcggattccgaccctcaatgatagtcgttatgccttgatagagtttagtatgaacaytcyttatcgcgatattcatarcgcyttgarcaagatcttgatgttgggaattactccagtcattgcccacatygarcgctatgatgctcttgaaaataatgaaaaacgcgttcgrgaactgatcgatatgggctgttacacgcaagtaaatagttcacatgtcctcaaacccaaactttttggcgaacgttataaattcatgaaaaaaagagytcagtattttttrgaamgtgatttrgttcatrtmrttgcaagtgayatgcacaatytagacrgtagacctccatatatgcaacaggcatatgatatcattgctaagaaatatggagcgaaaaaagcgaaagaaytttttgtagataatcccagaaaaattataatggatcaattaatt

SEQ ID NO: 1704 - DNA, 732 bp, Streptococcus pneumoniae
  misc_feature (1)..(732): tiling:Spneumo1:WAN024BIJ; Cluster includes WAN0241JJ |wgh ||AAQ97640.1|||302 bp|putative phosphotyrosine protein pho sphatase|S.pneumoniae||AY330718|ORF|000
  misc_feature (80)..(80): n is a, c, g, or t
atgatagayatycattcgcayatcgtytttgatgtagatgayggycccaartcaakagaggaaagyaaggcwctyttrrnagaakcytayardcarggrgtkmgaaysattgtststacytckcaycgtcgmaarggsatgtttgaaactccrgaagaraaratwgcarmaaaytttmttmargttmgkgaaatwgcwaargaagtrgcagatgayttagtcathgcttatgghgcagagatatactatactmtggatgytctagaaaagctagaaaaaaaagaaatycctaccctyaatgatagtcgttatgcyttgatwgagtttagyatgmayactycytatcgysakatycatrssgsmttgagcaakatyttgatgttgggaatyacdccagtmattgcycayattgarcgbtatratgcyyydgaraataaygrraaacrtgttygtgaactgattgatatgggvtgytayackcarrtaaatagyyvwcatrtytyraamccwaasttctttggygaamrwtataaattcatgaaaaaragagctcrgtattttttggaacgtgatttagttcatgtmrttgcaagtgayatgcacaatttagacagyagacctccwyatatgsmasargcatatgaymtyrttrcymaraaatayggaghvrmraargydmargaaytttttgtagataatcccakraaaattataatggatcaattaatttag

SEQ ID NO: 1705 - DNA, 498 bp, Streptococcus pneumoniae
  misc_feature (1)..(498): tiling:Spneumo1:WAN024CGK; Cluster includes WAN023S4L cont ig_387_2||||401..898|+|498 bp|Glimmer 2.02 orf prediction| S.pneumoniae|670|WAN01UD7K|ORF|000
atgatagcagatcaattaaaagctatttcaacaaatttagaagaaatacaagaaattcttgtaggagatggaactgcattagctaaaagagaaatcagcagggtattgaacgacttggacgatgtttataatgaactaactagcacagaataccgtgaacaacaggaaacacttaaggaacagacggaaaggatgaaacagagagtagttgctgaagtaataggaggactagaagaacgagaagagtcttattacagaaattattggggtgatactaagtttataaagctactttccaactttgatggatttcttttcttaaacacttacctagctgaaataactaaagaaaatacctacccaatggaacaaagtcaattattgaattatgtatgggaactcatagcggttgatatcgcaaagaaaaaacgaggaaaaaagaacgttttggattcatggacagattcatccttatatactcgtggaatgatgattgat

SEQ ID NO: 1706 - DNA, 594 bp, Streptococcus pneumoniae
  misc_feature (1)..(594): tiling:Spneumo1:WAN024CIM; Cluster includes WAN023MG8 3142 24_15||||12428..13021|-|594 bp|EGAD orf prediction|S.pneum oniae|R6|NC_003098.1|ORF|110
atgatagctggtgctgcttttttggcatcctcaaaaagagagcgaacacgactagctccaactccgacaaacatttctacaaagtcagaacctgagatactaaagaatggaacacctgcttctccagcgactgccttagcaagcaaagtyttacctgtccccggaggtccctccaaaagaacacctgctggaatacgggctccaagttttgtgaatcgttttggatcttttaagaactcaacaacttcaactagttcttgtttttcttcctcagctccagcaacatctgaaaatcttactttaatatcttctttatttgctgctttagccttactacgtccaaaactcattggattacggccattgcctcctcccatatttcccatcatagagaataggaagaagaatagaattccaaatggcacaatggatacgagtagattaatccatataccacttgaactttcatgcttaacagttacttctgctttatggtcagtagcaagtttttgcaattctgatacggtagtatctgcaggaagaatagtgctggtaaatttctctaccttagtaacagatggcgtgaaaaactga

SEQ ID NO: 1707 - DNA, 231 bp, Streptococcus pneumoniae
  misc_feature (1)..(231): tiling:Spneumo1:WAN024G5R; Cluster includes WAN023LI7 3144 91_1863||||1002346..1002576|-|231 bp|EGAD orf prediction|S .pneumoniae|R6|NC_003098.1|ORF|110
atgatagctttattggctgtgcgagaaaaggcaaaagcaatagcctgcacaatgttagcaacaatcaaagcgccaatcatccagctatcattccttatgaaagaaatagccagacaaagaatcccacaaacaagatctgccgtcattaaaatcttacgacgagaaaaacggtctgaaataactccgccaaagggattgacgagaatagatgtgacgagctcagaaatctga

SEQ ID NO: 1708 - DNA, 234 bp, Streptococcus pneumoniae
  misc_feature (1)..(234): tiling:Spneumo1:WAN024CUI; Cluster includes WAN023LLY 3140 27_1617a||||858494..858727|-|234 bp|EGAD orf prediction|S. pneumoniae|R6|NC_003098.1|ORF|110
atgataggcaggtctgttgtttgggcwacttggcggatgagtttgagggctactggaaagactgctggaccwgacattccacctgttccattggccaagattggttttctrgttttgaggtcaaagcgcattccaaccagagtattgatcatggtcaagccacttgctcccgcatcttctgcagcttttgcgacagtaacgatatcggtcacactcggggttaatttgacataa

SEQ ID NO: 1709 - DNA, 965 bp, Streptococcus pneumoniae
  misc_feature (1)..(965): tiling:Spneumo1:WAN024CRZ; Cluster includes WAN0243L2 spr1 598|dctA|15903640|NP_359190.1|1575376..1576335|+|960 bp|Di carboxylate/amino acid:cation (Na+ or H+) symporter|S.pneu moniae|R6|NC_003098.1|ORF|111
atgatagggactttcgccgctgctcttgtagctgtactagcaartttcatcgtccctattgaaattacccyaaatagtgccaatactgaaattgcaccaccagatgggattgggcaggtyctcagcaacctcttgctcaaactggttgacarcccagtcaacgccctgcttactgctaactatattrgaatcttatcttgggcagtcatttttggaatcgctatgagagaagccagtaraaatagtmaagaattgctaaaaactatcgctgacgtgacttctaaaattgtcgaatggatcatcaatctgrctccatttggaatccttggtcttgtttttaaaaccatttctgacaagggagtcggaagccttgccaactacggtattttattggttcyattagtaacgactatgctttttgttgcccctgtggtcaaccctttgattgccttcttytttatgagacgcaatccttaccctctagtttggaactgcctccgtgtcagcggtgtgacagcctttttcactcgtagttctrcgrctaacattcctgtcaayatgaaactctgccatgaccttggactcaacccagatacctattctgtttctatcccactcggttctactatcaatatggctggagtagcgattaccattaacsttttgacccttgytrcagttaacactcttggaattcctgttgactttgccacagcctttgtcctcagtgtggtagcagctatctcakcctgtgrtgcttcaggtattgccggaggttccctccttcttatcccagttgcttgtagccttttcggtatttctaacgatattgccatacaarttgttggggttggttttgtgattggtgtcatccaagactcatgtgaaacagcccttaactcttctacagatgtcctctttaccgccgttgccgaatacgcagcaacccgtaaaaaataactaat

SEQ ID NO: 1710 - DNA, 684 bp, Streptococcus pneumoniae
  misc_feature (1)..(684): tiling:Spneumo1:WAN024FOT; Cluster includes WAN023PJL pne3 2_12||||8974..9657|+|684 bp|Type 16F capsule operon, Glimm er 2.02 orf prediction|S.pneumoniae||WAN01UCIC|ORF|000
atgatagttaagagtttcataaaaaagattactggaaaaacagtagacattcatccagatgtacctttgtcgtatatactacaaagaggtataaactatrgtttcggactctttcgtggggttgtacgtggaatcggatttggtcaaaacgacaaacgtttattcattggacaaggagtttctatcttagcaaagcgtaaattatttgttggaaaaaatgttcgaattggtaaaaaggtgtctatagatgcactgtcaaaagaaggaatccattttgcagataatgtaaagattggagattattctcaaattattggcacaggttctataaaaaatatggggattggcttgaaaatcggtaagaaytcatctttttcagaatatagtttatttggttctgctggaggtatcacaattggtgataatgttatcgcaggtcagaatgttcgttttcatgctgaaaatcataattatagtgatttagataaactcattgttgaacaaggggtatctcgaaagggaatttcagtaggtgataattgttggattggtgctggatctgtttttttggatgggtccagcatyggttcaggttgtgttgtwgswgcraatkctgtmrtyackaarmastttccagataaygttatyrtwgstggagtaccagctarratwmtrrmmatgaaa

SEQ ID NO: 1711 - DNA, 1776 bp, Streptococcus pneumoniae
  misc_feature (1)..(1776): tiling:Spneumo1:WAN024CX3; Cluster includes WAN0246Q9 2036 68-92-2_3||||668..742|+|75 bp|Glimmer 2.02 orf prediction from Patent Sequences|S.pneumoniae||WAN024703|ORF|000
atgataraaaatgtttcgaaagaagaatttaccattacattggagaatggtataagactttcttcaaatcatttttcagcaatcgttagggaagagggagatacgcgaattcaggtttcttttgtttgtccttccattcgtttacgtttaatctttgaatcgagggatgatgttctttcgaagcaattagttttagaatcatctactgaggttattaaatctgtagaggtagagagttttgagtttgaaacagaagacaatattttctatccgaaaagacaagattgtattaaggaaatggcgaatttttccggtyattatgtagaattgggacaacctgtttatgcgaattctttattcttaggaatggaatttccaatgtctgaaaacaaggtagatggtagacactatgtatcaagatattacttgggaactgttgtaaatcaagaaaagagtttgtggtcttgtattattgggggagcatgttcttataaaaaagaagagattcaagaggcattttttgaatatgttgaaggaatagctcaacctagttatttccgtaaacagtataattcctggtatgaccatatgaccgatattacagaggaaggtattttaaaaagtttttctgagattcgagatggatttgaaaatcatggagttcatttagatgcttatgttgttgatgatggttggacaaactatcaatcagtttgggaattcaatcataaattcccaaatggtttgagaaatattaaacatcttgtaaatggatttggttcaascctaggattgtggattggtccccgaggtggttataatgggacagaaatcattatgagtgattggttagaagcacatccagagttaaatattggatctaaaaatttgatttcaaatgatgtaaacgtggctgattttaactatctcaatcaaatgaagaaaargatgttggaatatcaaaaagaattcgatatcagctattggaaaattgatggytggttacttcaacctgacaaacctgataagagtggaccgcacggtatgtataccatgacagyggtttatgagttcttaattcaactgttgatagatctaagaaaggagagaggaggaaaagattgttggttaaacttgacttcttatgtaaatcctagtccatggtttttacagtgggtcaatagtttatggattcaaatatctcaagatgtaggctttacagagaatgcaggtaatgatatcaatcgtatgatwacttaccgagataktcagtatcaagaatttttggaaaaacgtgagatacagttacctatgtggtcgctttataatcatgaaccaatctatgctgtcagtgcaaatacctggtacatggatcatcaaatgtttgcatcaataccagattttgaagcttatctattatttatttcaacaagagggaatgctttttgggagtttcactattcttttgatatgtttgatgaagaacgctggaaagccaatgctcgtgccgtcaaatggatagaggagaattatcaaacactaaaatatagtaaaaaaataggaggaagtcctgaaaaatttgaaatttatggttataagtgtcacaatcagaagacttctactgaaattctctctctgagaaatcctgctcagattaaacaaaaaataaaaatagagaatctttcgatagagaattttaccagagtaattggagattttactattcaagaagatgagatagaattggcaccgtactctatcgtgatactgaagaag

SEQ ID NO: 1712 - DNA, 436 bp, Streptococcus pneumoniae
  misc_feature (1)..(436): tiling:Spneumo1:WAN024ASD; Cluster includes WAN024EQU-rc R 6.IG_258.2.1.1||||231411..231846|-|436 bp|Between spr0237 (+ strand) and spr0238 (ruvB) (+ strand)|S.pneumoniae|R6|N C_003098.1|IG-rc|110
atgatatagaactagtactcaattcctttttattatcccatagttcacgaattttgtcaaarstttacattttcttcaaccgctgtacgacaagacggttaagattaagagaacgttagggattctatcaatttcatagaaattttgatttcgtaaacgaagagacaatcttacatgtcacttctcatttaatacgccactactagacaagcaaaatcattattacagtagttccagtycttcaattaacagtcacttacaatcaaattgagtttgaactagctgaagcgaccacagacctatttcttagttatattcgctaaaaaagtccccgccaattccccgaccaaaatccgaaaaataccgaaaaatatcgaaaaattatttttagaatagtccccaaaagcctgaaatagagctaaaaaactccacctga

SEQ ID NO: 1713 - DNA, 252 bp, Streptococcus pneumoniae
  misc_feature (1)..(252): tiling:Spneumo1:WAN024EWB; Cluster includes WAN023KLS 3147 96_3282||||1757957..1758208|+|252 bp|EGAD orf prediction|S .pneumoniae|R6|NC_003098.1|ORF|110
atgatatccagatgcccatttgtcatcggatcaaatgagcctgtgaataagccaatcttatctgacatagactgtcaccttactaattccataaatcttttccttccagatacccagacaggcaatytcttctggaagttcaacggcyttatccgtctcgcacacaaccataacatcttcagaaaaaagctctctctyagccattttttcaatatctgctacgatttgttccttggcatagggagggtctaa

SEQ ID NO: 1714 - DNA, 339 bp, Streptococcus pneumoniae
  misc_feature (1)..(339): tiling:Spneumo1:WAN024EWG; Cluster includes WAN023KOG 3147 86_3144||||1673219..1673557|+|339 bp|EGAD orf prediction|S .pneumoniae|R6|NC_003098.1|ORF|110
atgatatctccattacttgtatcatttagaccgatgatagcacgaccaatagttgttttcccactaccggactcacctacaagcgagaaagtttctcccttgttgataaagaagttagcatttttaaccgcgacaaacttcttacttccttcaccgaaggaaatttctaaatctttgatttctactaatttttcagacatttccttcctcctagtcagccagatgggcaaatcccattttttcacggatcttatcatggagatttgcaatcacagctggtttttctactttyggagcatcctcatgaagaagccaagttttagcccaatgtgtctctga

SEQ ID NO: 1715 - DNA, 234 bp, Streptococcus pneumoniae
  misc_feature (1)..(234): tiling:Spneumo1:WAN024D5W; Cluster includes WAN0243MQ spr1 537||15903580|NP_359130.1|1518294..1518521|-|228 bp|Hypoth etical protein|S.pneumoniae|R6|NC_003098.1|ORF|111
atgatatttaaggcattcaagacaaaaaagcagagaaaaagacaagttgaactacttttgacagtttttttcgacagttttctgattgatttatttcttcacttatttgggattgtcccctttaagctggataagattctgattgtgagcttgattatatttcccattatttctacaagtatttatgcttatgaaaagctatttgaaaaagtgttcgataaggatykaactaat

SEQ ID NO: 1716 - DNA, 228 bp, Streptococcus pneumoniae
  misc_feature (1)..(228): tiling:Spneumo1:WAN024G9L; Cluster includes WAN023LNG 3145 11_1528||||812149..812376|-|228 bp|EGAD orf prediction|S.p neumoniae|R6|NC_003098.1|ORF|100
atgatatttcctctttctgctaggttagacatagtatatcacggggaggctcggctttcatcagtcctcaggctgatttatcagaagcaatttacctcgacaaagtccacagcgatagcgttkggtatcaatcctacgcttrcgctgatacctttgctggcaggattgrcaacgataragcttgaktggyttrgagttactattgggcaaggatggtacaaaccktaa

SEQ ID NO: 1717 - DNA, 1304 bp, Streptococcus pneumoniae
  misc_feature (1)..(1304): tiling:Spneumo1:WAN024CG9; Cluster includes WAN0244RU spr0 056|purB|15902100|NP_357650.1|59175..60473|+|1299 bp|Adeny losuccinate lyase|S.pneumoniae|R6|NC_003098.1|ORF|111
atgatcaaccgttactctcgccctgagatggcgaatatttggagtgaagaaaataaataccgtgcttggcttgaggtggaaatcctctctgacgaggcatgggctgagttgggggaaatccctaaggaagatgtggctttgattcgcaagaaggcggactttgacatcgaccgtattttggaaattgagcaggagacgcgccacgatgtggtggctttcacgcgtgcggtttctgagactcttggtgaagagcgcaagtgggttcactatgggttaacttctacygacgtggtggatactgcytatggttacctctacaagcaggccaacgacatcatccgtcgtgaccttgaaaacttcactaatatcatcgctgacaaggccaaggagcacaagttcaccatcatgatggggcgtactcatggtgtgcacgctgagccgacaacytttggtcttaaattrgcaacttggtayagcgaaatgaaacgcaatatcgagcgyttcgagcatgcrgctgctggtgtagaagctggtaagatttctggtgcggttgggaactttgccaatatcccaccatttgtagaggagtatgtctgcrayaarcttggyatccgtgcycaagaaatctctacacaagtccttcctcgtgaccttcacgctgagtactttgcrgttcttgccagcattgcgacttcaatcgaacgtatggcgactgagattcgtggtctacaaaaatctgagcaacgcgaagtagaagagttctttgctaaagggcaaaaagggtcttcagcaatgcctcacaaacgcaacccaatcggttctgaaaatatgactggtctggcgcgtgtcattcgtggtcacatgattacggcttatgaaaacgtcgctctctggcaygaacgcgatatttcycactcatcagctgagcgtatcatcacaccagatacgaccattttgattgactacatgctcaaccgttttggaaatatcgtcaagaacttgacagtcttcccagaaaatatgatccgaaacatgaactcgacttttggtcttatctttagccaacgggctatgttgacattgattgaaaaaggcatgacccgtgagcaagcctatgacttggtgcaaccaaaaacagcctactcttgggacaaccaagtagactttaaaccacttcttgaggcagattcagaagtaacatcacgtctcacwcaagaagaaatcratgaaatcttcaacccartttattacaccaaacgagtggatgatatctttgaacgtcttggactaggtgattaactaat

SEQ ID NO: 1718 - DNA, 2709 bp, Streptococcus pneumoniae
  misc_feature (1)..(2709): tiling:Spneumo1:WAN024FHC; Cluster includes WAN0243NV spr1 496||15903539|NP_359089.1|1472325..1475099|-|2775 bp|Hypot hetical protein|S.pneumoniae|R6|NC_003098.1|ORF|211
atgatcaagcgaaaaacttattggaaggacttarttcagtccttcacagrctccaaggggcgttttttatccatcttgatcctgatgatgttgggatctctagccttagtaggcctcaaagtaaccagtcccaacatggaggcgacagctaatgcttatttaacaactgctcaaaccttrgatttggcagtcatgtctaactatggcttggatcaagcagaccaagaagaactaaaacagacggagggcgcagaggtcgagtttggctatttgacagatgtgactatggataatgggcaggatgccattcgrctgtactccaaaccagagcgaatttcaacctttcagctaagraagggacgacttcctcagtcagacarggaaatcgctttggccactcatttgcaaggccaatacagcgtgggacaggagattagttttaaagaaaaagaagagggtcattcctctttaaaagaccatacttataccattactggttttgtggattcggctgaaatcctctcccagcgagatatgggctacgcaggaagtggaagtgggactctgayagcctatggggtgattttacctagtcartttgatcagaaagtctacaatatagctcgtttgaaatatcaagatttagcrggtttaaatgccttttcatcagcttatgaagaaaaatccaagcaacatcargaagascttgaacaaaytttatcagataatggcaaggtacgtctrcaacttttgaaaaaagaaggacaagagtctctagacaaggggcaagagacycttgacaaggctcagactaatttgcaggaaggcaagcgtcgtttagcagctgctcaagctcgtatacaggctcaagaaagtcaactagccttgtttcctcaagytcagagagagcaggctagtgctcaacttacccaagccaagcaggaaytgggcaaggaagaggmcaaactaaagcaagctgaacaaaatctagcccaagaaaaggaaaaattagaaaaacatcagcaagtcttggaygatttggcggagccaaggtatcaggtytataatcgtcagaccatgccaggtggtcagggctatcttatgtatagcaatgcttcatccagtattcgagcagtgggcaatatctttcctgtggtactttatgccgtagcagccatggtgacctttacgaccatgactcgctttgtagacgaagagcgaactcatgcagggatttttaaggccttgggttaycgtagtaagratattatcrccaagtttctcctttatggactagtagctgggactgtyggaacggctctaggtagtatacttggtcattatttgctagccagtgtaatttcaagtgtcattacaaaaggcatggtggtgggagaaacycagattcagttctattggacctatagcttactagctyttgtcttgagctkgttggcgagtgtgttaccagcctatctggtggcttggagggaacttcatgmcgaagcagcccagcttctacttcctaaacctcctgtcaaaggagctaaaatcttattggagcgtatcggttttatctggcgtcgtctcagttttactcataaggtaacagcccgcaacatctttcgttataagcagagaatgttgatgacaatctttggtgtggcaggttctgtagctctgctctttgcaggtttgggaatccaatcttctgtagcaggagttccgtctaaacagtttcaacaaatccaacagtatcagatgcttgtctctgaaaatcctagtgcgaccratcaggacaaggtagagctagcagaagtrttgaaagggcaggagatactagcctaccagaaaatctattctaaarcgctakacaaggatttcaarggcarrgctrgtcttcaaaacattactcttatgatgatagagaaggaagatttgactccctttatccatcttcaacatcatcagcaggagctgacattaaaagatggcatcgttattacagctaaactcgcccagctggcaggtgtcaaggttgggcagactttagaaattgaaggtaaggaactaaaggtcgytgctattactgagaactacgttggtcactttatttatatgagtcaggctagctatgagcaactttacggacagctaccccaagccaacacttatctggtctcattaagggataccagtgcaactagtatcgaaagtcaggcgggcttgcttatgartcaatctgcggtgtccagygttgtccaaaatgcttcagccattcgactcttcgactctrtcgctagctcactcaatcagaccatgaccatcttggtcatcgtatcggttctattagctattgtcatcctttacaatctgaccaatatcaacgtagctgagagaatccgtgaactctccactaycaaggttctyggttttcataataatgaagtcaccctctacatttaccgtgagacgattgtgctrtcccttgtgggaatcgtacttggtctgrtagctggtttctatttacaccaatttttgattcaaatgatttcgccwgcgactattctcttttatccgcaggtaggctgggaagtctatgtaatcccagtggcagcagtaagcatcattttgaccttgcttggtttcttcgtcaattattatctgagaaaggttgayatgttagaagccctgaaatctgtagagtaa

SEQ ID NO: 1719 - DNA, 330 bp, Streptococcus pneumoniae
  misc_feature (1)..(330): tiling:Spneumo1:WAN024GLE; Cluster includes WAN023M18 3143 58_823||||437488..437817|-|330 bp|EGAD orf prediction|S.pn eumoniae|R6|NC_003098.1|ORF|110
atgatcacaaacaatttggtccatcccttgtgcctgcaagttcagtggaatttggtaaaggtgttcaacatccaacgattcgataacggcttctggtgccacatcacagaactgggccagtttatttttaattccttgaccagctggctcttctgtacgaataaccaacatatttggttggattcccaagccacgcaattctttgacagagtgttgggttggtttggttttcatttcaccagcagccttgaggtaaggaagcaaggttgtatggatatacatgacattatccgcacccacatctgccttcatctgacgaagagcctctag

SEQ ID NO: 1720 - DNA, 845 bp, Streptococcus pneumoniae
  misc_feature (1)..(845): tiling:Spneumo1:WAN024GIA; Cluster includes WAN0244FE spr0 504|licT|15902548|NP_358098.1|500872..501711|+|840 bp|Tran scriptional antiterminator (BglG family)|S.pneumoniae|R6|N C_003098.1|ORF|111
atgatcataaaacgaatactaaaccacaatgccgtaattgcgcaaagtaaaaaagatatcgatattcttctttttggaaggggaatagcttttggaagaaaaaytggagataaagtaaatccaattgatattgagaaaagtttttttctcaaaaatagagataatatgacccgttttacagagatgtttattaacgttcctttggagttggtgtacatcaccgaaaaaataattaayctaggtaaaataacattrggtaataattttgatgarattatctatatwaatytaacggatcatatttcttcgagyatagaacgttataaagaaggrrttattatttcgaatcccctacgctgggaaatmtcgaaatattataaagaagaatttgarcttgggaaaagggctttacaaataataaaaaaagagttaggtattgaacttccaattgaygaagctgcattcatagcgctacattttgttaatgctaatttagaaaataattttcaagagtcgtataaaatcactgaaataattatgggaattgagaaaatcattcaagatttctattgtactgagtttaaccaagattctattgattattatagattcataactcatatraaattatttgcccatcgcttggttgaraatacaacttattgtgacgatgatgaygaagacttgttagcattaatgaaaaataaatatcctagagaatatgaatgtggtgaacaggtrgcaatgtttatacaaackgagtayaattatttgctgacttctagtgaattagtttatttgatggctcatattcgtcgcttaacaaaaaatttagattaactaat

SEQ ID NO: 1721 - DNA, 1425 bp, Streptococcus pneumoniae
  misc_feature (1)..(1425): tiling:Spneumo1:WAN024EXB; Cluster includes WAN0243LN spr1 577|pkn2|15903619|NP_359169.1|1556104..1558083|-|1980 bp|E ukaryotic-type serine/threonine kinase|S.pneumoniae|R6|NC_ 003098.1|ORF|321
atgatccaaatcggcaagatttttgccggacgctatcggattgtcaaacagattggtcgaggaggyatggcggatgtytacctagccaaagacttaatcttagatggggaagaagtggcagtgaaggttctgaggaccaactaccagacggacccgatagctgtagctcgytttcagcgtgaagcgagagctatggcagatctagaccatcctcatatcgttcggataacagatattggygaggaagacggtcaacagtayctwgcwatggagtatgtkgctggactrgacctcaaacgctatatcaaggaacattatcctctttctaatgaagaagcmgtccgtatcatgrgacaaattctcttggctatgcgcttggcccatactcgaggaattgttcacagggacttgaaacctcaaaatatcctyttgacaccagatgggactgccaaggtcacagactttgggattgctgtagcctttgcagagacaagtctgacccagactaactcgatgttgggctcagttcattacttgtcaccagagcaggcgcgtggttckaaggcgactgtgcagagtgatatctatgccatggggattattttctatgagatgytgacaggccatatcccttatgacggggatagcgcggtgaccattgccctccagcatttccagaamcccctgccgtccgttattgcagaaaatycatctgtacctcaggctttagaaaatgttattatcaaggcaactgctaaaaagktgaccaatcgctaycgmtcggtttcagagatgtatgtrgacttgtctagtagcttgtcctacaatcgtagaaatgaaagtaagttwatctttgatgaaacgagcaaggcagataccaagaccttgccgaaggtttctcagagtaccttgacatctattcctaaggttcaagcgcaracagaacacaaatcaatcaaaaacccaagccaggctgtgacagaggaaacttaccaaccacaagcaccgaaaaaacatagatttaagatgcgttacctgattttgttggccagccttgtattggtggcagcttctcttatttggatmytatccagawctcctgcaaccattgccattccrgatgtggcaggtcagacagttgcagaggccaaggcaacgctcaaaaaagccaattttgagattggtgaggagaagacagaggctagtgaaaaggtggaagaagggcggattatccgtacagatcctggcgctggaactggtcgaaaagaaggaacgaaaatyaatytggttgtctcatcaggcaarcaatcyttccaaattagtaattatgtcggycggaaatcytctgatgtyatygcggaattaaaagagaaaaaagttccagataatttgattaaaattgaggaagaagagtcgaatgaaagt

SEQ ID NO: 1722 - DNA, 96 bp, Streptococcus pneumoniae
  misc_feature (1)..(96): tiling:Spneumo1:WAN024DNF; Cluster includes WAN0241UR SP19 21||15901745|NP_346349.1|1830183..1830278|-|96 bp|hypothet ical protein|S.pneumoniae|TIGR4|NC_003028.1|ORF|110
atgatcctaagtgagaaaatcacttgggatttttttaatcaagaaaatagttctcatagaaatttaattattctccagagaactatttttatttag

SEQ ID NO: 1723 - DNA, 498 bp, Streptococcus pneumoniae
  misc_feature (1)..(498): tiling:Spneumo1:WAN024FS2; Cluster includes WAN023L5W 3151 51_2359||||1262164..1262661|+|498 bp|EGAD orf prediction|S .pneumoniae|R6|NC_003098.1|ORF|110
atgatcctactccaaaataaatcgttctgctacagtatctcccaaaaagagacctctctttgtcatgcgaacgtggtcaccctcaatctgcatgaggccttgttgaaccaaatctctgacaatttctccataaagtccagcaaaagactgtccaaatttttcctcaaatcgcgccatggaaaccccggatttcttgcggagtcccaagaacatttcttcttccatttgctccttttgactcaggtgatcttctgtaatacaagcattgccttcctcaaccgcactgagataatgacgaatgggaccatgatttttatagcgtactccattgacataaccagatgcccctgcaccaataccatagtattcagcattgtcccagtacatgagattatgacgactttcaaaaccgggtttggagaaattagaaatctcataatgctcaaaacccgctcgctccagctctgcaatgatgtactcaaacatctccgcttctag

SEQ ID NO: 1724 - DNA, 428 bp, Streptococcus pneumoniae
  misc_feature (1)..(428): tiling:Spneumo1:WAN024DIQ; Cluster includes WAN0244IQ spr0 384|fabZ|15902428|NP_357978.1|382845..383267|+|423 bp|Hydr oxymyristoyl-(acyl carrier protein) dehydratase|S.pneumoni ae|R6|NC_003098.1|ORF|111
atgatcgatattcaaggaatcaaagaagcycttccccaccgttatcctatgcttctagtggaccgtgtcttggargtgagcgaggataccattgttgctatcaaaaatgtgaccatyaacgarcctttctttaacggccactttcctcaatacccagttatgccaggtgttstgattatggaagccttggcgcaaactgcyggtgtgttggagttatcaaaacctgaaaataaaggaaaactggtcttttacgctggtatggayaaggttaagttcaagaagcaagttgtaccaggcgaccaattggttatgacagcgacttttgtaaaacgtcgtggcaccatagctgtggttgaagcaaaggctgaagtggatggcaagcttgcagccagtggtayccttacttttgcaattgggaactaactaat

SEQ ID NO: 1725 - DNA, 102 bp, Streptococcus pneumoniae
  misc_feature (1)..(102): tiling:Spneumo1:WAN024C9C; Cluster includes WAN023QZC cont ig_1394_9||||6586..6687|-|102 bp|Glimmer 2.02 orf predicti on|S.pneumoniae|670|WAN01UDYH|ORF|000
atgatcgatgtagaagaaattctgtgcaagatgacccccaatcagaagattaattatgaccgtgtcatgcagaaaatggtacaagcatgggaaaaaaatgag

SEQ ID NO: 1726 - DNA, 773 bp, Streptococcus pneumoniae
  misc_feature (1)..(773): tiling:Spneumo1:WAN024CX8; Cluster includes WAN02438U spr2 039||15904080|NP_359630.1|2031511..2032278|-|768 bp|Conser ved hypothetical protein, truncation|S.pneumoniae|R6|NC_00 3098.1|ORF|111
atgatcgggatttctcttattccagmtctgtacaatatcatatttttgtcatcaatgtgggatccatatgggcaattgtctgacttacctgtggcagttgtaaataatgataaagaggcttcctataatggtaatactatggcaataggaaaagacatggtgtccaatttaaaagaaaataaaaccttggattttcattttgtagatgaagaggaaggaaagaagggattggaagatggcgattactatatggtagtgactttaccaagtgatttatctramaaaacaactacattatccaatmttcaatcgacagcagcttatcaatcattgacaagtgagcaacaaactgrgataagtgattctgtatctcaaaattcaactgatagtattcaatcggctcagtcaattgtagctttagtacaagrtttacagggaagtttagaaaacttacaaaatcaatcttctaatctttcgactttaaaaaatcaakctaatcaagtatyacctattacttctacttctttgataggattgtcaagtggattaacagagatacaaggagmtgttactagcaaattagttcctgccagtcagtygattgcatcaggtgtaaacgcatatactacaggtgttgataaagtttctcagggcgcaagtcaactaagtgaaaaaaatgccaccttgacaggtagtttggataaactagtttcaggctcaaacaccttgacacaaaaatcttctagattgacagcaggagttggttaactaat

SEQ ID NO: 1727 - DNA, 1092 bp, Streptococcus pneumoniae
  misc_feature (1)..(1092): tiling:Spneumo1:WAN024CKA; Cluster includes WAN0240F8 |cps 19aK||AAC78673.1|||1092 bp|UDP-N-acetylglucosamine-2-epime rase Cps19aK|S.pneumoniae||AF094575|ORF|000
atgatgaaaaaaattatgttagtattcggtacacgtccggaagccatcaaaatgtgtccattagtcaatgagttgaaaaaacacgaagatatggaaacaattgtgtgtgttactggacaacacaaagagatggttagtcctgttttagatttatttggtgttgtaccagattatgatttagaaattatgaaggctaaccaaaccttgttctctatcacaactagtatcttggaaaagataaaaccagttttagagaaggaacaaccagatattgtcctarttcacggtgacactacgacaacttatgcagcagccttggcagcattctatttgggaattaaagtaggacatgttgaagctggtttgcgaacgtacaatttacaaagtccatttcctgaagaatttaacaggcaatcgacatcaatcattgcaacttaccattttgctccaactgagttggctaaagaaaatctcttaaaagaaggtagagagaatgtttatgtgactggaaatactgtcattgatgctcttacaactactgttcaagaggattatacacacactcatttagatttaaacgctaacaatcgtctcatcttattgactgctcatagacgcgaaaatctcggcgaaccgatgagacatatgtttagagcagttaaacgagtattgaatgaatacgaagatgttaaagtcatttatccaattcataagaatcctttggtacgtgaaacagctgcagagatctttggagatacagaacggattcaaattattgaacctttggatgttcttgatttccacaacttcatgaaccaaagttatatgattttaacagattctggcggagttcaggaagaagcaccttctttaggaaaacctgtattggttatgcgcgatactactgaaagacctgaaggagtagcggcaggaaccttgaaattagtaggaactgacgaagaaacaatttatcaaaacttcaaactacttctagatgattctggagaatacaaaaaaatgagtcaggctagcaatccatacggtaatggtgatgctagtcaacagattgttcagattttgcgtgggatttaa

SEQ ID NO: 1728 - DNA, 1086 bp, Streptococcus pneumoniae
  misc_feature (1)..(1086): tiling:Spneumo1:WAN024FSQ; Cluster includes WAN02402P |cps 19bP||AAB66520.1|||1083 bp||S.pneumoniae||AF004325|ORF|000
atgatgaaaaaarttttatatgtgacaaatgttgattggaattggataaaacaacgtccacaatttattgcagaaaacttatctaatttttatgagatgctagttctgtatcgctattggtacaatagaaaaggattgactgaggatagaaatactaacattacaaatatatcacgtatttatgccctaccttttgttaataggtcaccgaaactaaagcaactgaatgataaaattgttgcttggaatattcgaagaaaagttaaggcttttaaaccggaatatgtatatttgacaaatccaatgcagtttgcatctcttgtagacaattcagaacaaaaaataatatatgattgtatggattatcatgtggcttttatagaaaatagagaagaacgycagcgattaaaggatttagaagagaaactggtcaatagagctaatttaatcttggtttcgagtgagaaactaagagaaaatattatttctgattataacttggaagagcaggttaataaaatagtggttgttagaaatggttataatggtaaaatcttaagcattcctactcggcataaaaagaataaccaaaagcttgtacttgcatatgttggaactatcagtcattggtttgactttgatatcattttacgaagtttaaaagattttgataatattgaatataatttgattggtccgattagcaaagctgatattcctgaacatgatagaattcattatttaggaagtgtaccacacgagaagatttatcagtatattgagaatgcagatgttctgattatgccgtttcaaattaatgatattgttgaagcagtggatccagtcaagttgtatgaatatattaattttaaaaaaaatatacttacggtatgttataaggaaattctgagatttgaaccatttgtatacatgtattcaaattatttagattaccaaatgaatttrttgcaattgattgaaaataataatttgaaatatgacagtatagctagagaagattttttgaaaagtaatrcttgggaaaaaagagcggagctgattcatcagctgattaaccaattgtaa

SEQ ID NO: 1729 - DNA, 138 bp, Streptococcus pneumoniae
  misc_feature (1)..(138): tiling:Spneumo1:WAN024F7C; Cluster includes WAN023VR3 AX57 1394.1_1||||1..138|+|138 bp|Glimmer 2.02 orf prediction|S. pneumoniae||AX571394.1|ORF|000
atgatgaaaaccacggatcgtttagaagctataggttttagtttcatactcttcgaaaatctcttcaaaccacgtcagctctatctgcaacctcaaaccagtgttttgagcaacctgcggctagctgccctaactaat

SEQ ID NO: 1730 - DNA, 1209 bp, Streptococcus pneumoniae
  misc_feature (1)..(1209): tiling:Spneumo1:WAN024FPH; Cluster includes WAN023POP pne2 4_11||||8147..9355|+|1209 bp|Type 12B capsule operon, Glim mer 2.02 orf prediction|S.pneumoniae||WAN01UCJ2|ORF|000
atgatgaaaagaatttattatcaccttttggctatttkggcttggactcttccaaattcttatgcttttattgattcgttaaaggtgttttttccgaatattagyttacaaattgcaggttctcttttggctgttrtctcrataggaatttttatcactagaatatattatacargataygaagtttttatatctctattggtttgtatttytattttaattttttattcaactcgctttttttattcgaytaaygtagagttgtatcaktctttcttcaattcctttctgattcgtccagttcctgsgatattagtagcgatgctgttagctaagaataatcatataaaaggtttcataaaatggtcagaacctatgatgcttttctatacattgacatcatttttagcagccctatctcctagaaayagcattattayttaccaatctttatcttattatgccatgacagcttatatgattaatgtgtttaatattatatacaaagagaaaatattggaggagcaactgacgtatttcagattctcagcgtggaattttattagatattttttacttttgattcaagcttttaatgcactctcaggaggtgggagaggtgcctttatyttattaattatttttacaggaatattattaataagaaytgctatgaawtttaagttccttttctcattyattggaggcytrtctgctatagctctagttgttttttktayaaaagrtttggatttsacatggctcttgaatatggacggtggagagcgattgttgaacttcttcggcagacctgaacrtatatctacagataatagactattgatttatgatactgtttggtctgcaatacaggaaaaaccctttttaggatggggagttggttcaacttttttaaaatttaatggatattcacataatattgtattggatttattgcatgatatgggaagttttggtttattaattattctttcggctttctttgcttcttcagtaatattgtacaaattacgtaaaatagattggaaagtgaatttatttattctgatgtttctagaagtatatgttcacatgagtttcagtggaagctatcttgcagatggtagactatggtttttggtgatctttacttattgttactacaggtggaaagtgcaggaaaaggatgaagttagcaattttattatc

SEQ ID NO: 1731 - DNA, 1991 bp, Streptococcus pneumoniae
  misc_feature (1)..(1991): tiling:Spneumo1:WAN024F8Y; Cluster includes WAN0244KB spr0 327|aliA|15902371|NP_357921.1|325111..327093|+|1983 bp|ABC transporter substrate-binding protein - oligopeptide tran sport|S.pneumoniae|R6|NC_003098.1|ORF|221
atgatgaaaagttcraractayttgcccttgckggygtracmttattggcggsrwstactttagchgcatgytctrratcagrttcragyrctaaagstgagaaracattmtcatayatttatgaracrgaycctgayaaccthaactayttgvbractrvtaaggctgcracagcaaatattaccagtracgtggttgatggkttgctagaaaatgatcgctacgggaactttgtgcygtctatgrctgaggattggtctgtatcyaaggatggrttgacttacacttataytatmcgtaaggatgcwaaatggtatacttctgwrggkgwagaatacgcggcagtcaargctmavkamtwwstrryaggrytwaartatgctgctgataaaaaatcagatgctctttaccytgttcaagaatcaatcaaaggrktggatgsctatgtmaaaggggaaatcaaagayttctcwcaagtaggaattaaggctytggatgawcagacagttcagtacactttgaacaaaccagaaagyttytggaaytcwaaracaaccatgggtgtgcttgcgccagttaatgaagagttkttgaaytcaaaaggrgatgattytgccaaagckacggaymcaagyagtctcttgtataayggwccttatttgttgaaatccattgtgacmaaatcytctgttgaatttgcgaaaaatccgaactactgggataaggacaatgtgcatrttgacaaagttaaattgtcattctgggatggtcaagataccagcaaacctgcagaaaactttaaagatggtagccttacagcagctcgtctctatccaacaagtgcaagtttcgcagarcttgagaagagtatgaaggacaatattgtctatactcaacaagrctctattacgtatctagtyggtacaaatattgaccgtcagtcctataaatayacatctaagaccagcgaygaacaaaaggcatcgactaaaaaggctctcttaaacaaggayttccgtcaggctattgcmtttggwtttgaycgtacagcctatgcytctcagttgaatggacaaactggagcaagyaaaatcttrcgtaatmtctttgtbccaccaacatttgttcaagcagatggyaaaaactttggcgatatggycaaagagaaattggtyacttatggggatgaatggaaggatgttaatcttgcagattytcaggatggtctttacaatccagaaaaagcmmrggctgaatttsstaaagctaaatyagccttacaagcagaaggwgtsmmwttcccaattcatttrgatatgccagttgaccaracagcaactacaaaagttcagcgcgtccaatctatgaaacaatccttggaagyaactttaggagckgataatgtmrtyattgatatycaacaactacaaaaagacgaagtaaacaatattacatattttgctgaaaatgctgctggcgaagactgggatttatcagataatgtcsgttggggtccagactttgccgatccatcaacytaccttgatatyatcaaaccwtctgtaggagaaagtactaaaacatatttagggtttgactcaggggaagataatgtagctgctaaaaaagtaggtctatatgactacgaaaaattggtyactgaggctggtgatgagrctacagatgttsstaaacgctatgataaatacgctgcagcccaagcttrsytgacagmymrwgctttraytattccaactacatctcgtacagggcgyccaatyttgtctaagatggtaccatttacaataccatttgcattgtcaggaaataaaggtrcaagtgaaccartcttrtataaatacttggaacttcaagacaaggcagtcactgtagatgaataycaaaaagctcaggaaaaatggatgaaagaaaaagaagagtctaataaaaagrctcaagaagatctcgcaaaacatgtgaaataactaat

SEQ ID NO: 1732 - DNA, 980 bp, Streptococcus pneumoniae
  misc_feature (1)..(980): tiling:Spneumo1:WAN024AWO; Cluster includes WAN0244M0 spr0 266|sulA|15902310|NP_357860.1|268022..268966|+|945 bp|Dihy dropteroate synthase|S.pneumoniae|R6|NC_003098.1|ORF|110
atgatgaaaatccttgagggagtgaccgatatgtcaastaaagymaatcatgcaaagacagytatttgcggaattatcaatgtaaccccagaytccttttcggayggtggtmaattttttgctcttgagcaggcrmtccagcaggctcgkaarttgatmgcagaaggrgcyagtatgctmgatatcggyggagaatcractcgsccgggvagtagctatgttgagatagaagaggaaatccagcgtgttgttccagtgatyaaagcgattcgyaaggaaagygatgtcctyatytctatygatactyggaaragycargtrgcagaggctgctttggctgctggtgccratctagtyaatgatatcactggtctyatgggygatgaraaaatgscyyatgtggtwgctraagckrgwgcgmaagtggtcatcatgtttaayccagtyatggckcgacctcagcaycctagytcgctyatcttccctcattttrgytttggwcaarcytttacagarraagagttagctgactttgaaacattgccaatcgamgamttgatggwggctttctttgaacgagcmctagcgagagcrgmrgaagctggtattgcaccmgaaaatatcctgttggatccaggaattggctttggtctgaccaagaaagaaaatctbctycttttacgggacctggataaactacatcagaagggctatccaatctttctcggagtgtcgcgcaagcgatttgtcatcaatatcctwgargarartggktttgaagtcaatcctgagacagarcttggtttccgmaatcgggacacggcttcggctcatgtaacyagtatygctgcragacagggtgtagaagtggtrcgcgtgcatgacgtagctagtcacaggatggcagttgaaattgcctctrccattcgtctggctgatgaagcggaaaatttagatttaaaacaatataaataactaat

SEQ ID NO: 1733 - DNA, 696 bp, Streptococcus pneumoniae
  misc_feature (1)..(696): tiling:Spneumo1:WAN024B4N; Cluster includes WAN024177 |cps 9vC||AAM62287.1|||693 bp|Cps9vC|S.pneumoniae||AF402095|ORF |001
atgatgaaagaacaaaacaygayagaaatcgatgtatttcaattabttaaaaycttgtggmaacgcaagytaatrattttawtagtggcacttgtgacargtrygggggcttttgcatatagcrcttttattgttaagccagaatatacgagtaccacgmgaatttaygtagtgaatcrmratcaagraracarkyyrgggytgacaaatcaggatttgcaggcaggwwcttatctggtaaaagaytaccgygagattrycctttcgcakratkyattggaaaaagtagygacaaatttgaagytggayatrccarcmaaaacrttarcyagmaaagttmaagtgrctgtrccarhtgacactcgtatcgtctcaatctctgtcaargataaacarccagargaagccagtcgtatcgcyaattytytacgagaagytgctgyagaaargatcrtcrctgtaacgcgagtatctgatgtracgacrcttgaagaagcgcgaccagytacracyccytcttctccaaatgttsgwckcaattccttgtttggttttyttggaggagyagtygtaacagtaattgctkttcttttkattgagktghtsgacayccgtgtgaaacgtcctgaaratdtygaaraygtactgmaaattccacttttagggvtcgttccagatttdracaaaatraaatag

SEQ ID NO: 1734 - DNA, 693 bp, Streptococcus pneumoniae
  misc_feature (1)..(693): tiling:Spneumo1:WAN024FQO; Cluster includes WAN023PR6 pne1 7_6||||3685..4377|+|693 bp|Type 10A capsule operon, Glimme r 2.02 orf prediction|S.pneumoniae||WAN01UCJH|ORF|000
atgatgaaagaacaaaatactatggagattgatgtawttcaattgttaaataccttgtggaaacggaaattgattattgctttggttgctatcgtaacgggagcgattgcctttkcatatagtagctttattataaaaccagagtataccagtacaacgcgtatttatgtagtcaaccgtaaccaaggggataaatcaggtttgacaaatcaggacttgcaggcaggttcatatcttgttaaagactatcgtgagatcattctttcccaagatgtattagagaaggttgtcacagacttgcaactcgatatgccgaccaaaaatcttgctagtaaaatacaagtaactgtaccagttgatacacgtattgtttctatttctgtcaaggacaaacagccagaggaagcaagtcgtatcgctaactccttgcgcaagattgcagctaaaaaaatcattagcgtaacgcgtgtgtctgatgtaacaacactcgaagaagcgcgaccagccacttccccttcatctccaaatatccgtcggaatactttgataggttttctcggaggattaggggtggtagttatggtcgttctcttgsttgagttgctagatgtccgtgtcaaacgaccagaggatatcgaagacgwtatgcaaattccactcttaggagtcattccaaatttggataaattgaaa

SEQ ID NO: 1735 - DNA, 702 bp, Streptococcus pneumoniae
  misc_feature (1)..(702): tiling:Spneumo1:WAN024COX; Cluster includes WAN0242ZJ SP03 48||15900277|NP_344881.1|322263..322955|+|693 bp|capsular polysaccharide biosynthesis protein Cps4C|S.pneumoniae|TIG R4|NC_003028.1|ORF|010
atgatgaaagaacaaaayacgatagaaatcgatgtatttcaattagttaaaagcttgtggaaacgcaagctaatgattttaatagtggcacttgtgacaggtgcgggggcttttgcatatagcacttttattgttaagccaraatatacgagtaccacgcgaatttacgtagtgaatcgcaatcaaggagacaagycggggttgacaaatcaggatttgcaggcaggawcttatctggtaaaagactaccgtgagattatcctttcgcaggatgttttggaggaagttgtttctgatttraaactagatttgacgccaaaaggtttggctaataaaattaaagtgacagtaccagttgatacccgtattgtctctrtttcagttaatgatcgagttcctgaagaggcaagccgtatcgctaactctttgagagaagtagctgctcaaaaaattatcagtattactcgtgtttctgaygtgacaacactggaggaggcaagrccggcgatatcmccgtcttcgccaratattaaacgcaatacactaattggttttttggcaggggtgattggaactagtgttatagttcttcwtcttgaacttttggayactcgtgtgaaacgtccggaagatatcgaaratacaytgcagatgacacttttgggagttgtrccaaacttggrtaagttgaaactarctaat

SEQ ID NO: 1736 - DNA, 696 bp, Streptococcus pneumoniae
  misc_feature (1)..(696): tiling:Spneumo1:WAN024B4L; Cluster includes WAN0240Y8 |cps 6bC||AAL68406.1|||696 bp|putative regulatory protein|S.pne umoniae||AF246897|ORF|000
atgatgaaagaacaaaayacgatagaaatcgaygtatttcaakyacttaaaaccttrtggaaayacaagytaatmattttattagtggcrcttgtgacaggggcgggagcttttgcatatagcayttttattgttaarccagaatatacragyaccacgcgtatttacgtmgtcaaycgtaatcaagrarrtaagycgggactgacgaatcaggacttgcaggcaggracttatctggtaaaagactaccrcgaaattatcctttcgcargatgtattggaaaaggtagcgayaaatttgaarttggatatkccagyaaaarcgttaactagcaaagtkcaagtgaytgtaccarccgacactcgtatcgtctcaatctctgtcaaggataaasaaccagaggaagccagtcgcattgctaattctmtacgagaagttgcwgcagraaagatcrtcgctgtmacgcgagtatctgatgtaacgacgcttgaagaagcgcgrccagctaygactccctcttctccmaatgttcgackyaacaccttagttgsttttcttggagsmrccgycgtaacagtaattactgttcttttgattgagttgytcgatacccgtgtraaacgtcctgaagawrttgaagakgtrctgcaartgccacttctaggagtcgttccagatttkrataaaatgaaatag

SEQ ID NO: 1737 - DNA, 158 bp, Streptococcus pneumoniae
  misc_feature (1)..(158): tiling:Spneumo1:WAN024DLY; Cluster includes WAN0244PV spr0 127|orf51|15902171|NP_357721.1|137368..137520|-|153 bp|orf 51|S.pneumoniae|R6|NC_003098.1|ORF|121
atgatgaaaratttgaacaaytatcgtgaaatttctaataaggaattgcaagaaatcaagggtggctttggtgtmggtgttggtatcgctttatttatggcaggttataccattggaaaagaccttcgtaaaaagtttggtaartcatgctarctaat

SEQ ID NO: 1738 - DNA, 305 bp, Streptococcus pneumoniae
  misc_feature (1)..(305): tiling:Spneumo1:WAN024DB3; Cluster includes WAN02441C spr1 010||15903054|NP_358604.1|992198..992497|-|300 bp|Conserve d hypothetical protein|S.pneumoniae|R6|NC_003098.1|ORF|121
atgatgaacatgcaaaacatgatgcgtcaagcacaaaaacttcaaaaacaaatggaacaaagccaagctgaacttgctgctatgcaatttgttggcaaatctgctcaagatcttgtccaagcgaccttaactggcgataagaaagttgtcagcattgatttcaatccagctgtcgttgacccagaggaccttgagactctttctgatatgaccgttcaagccatcaactctgctcttgaacaaatcgatgaaactaccaagaaaaaactgggtgctttcgctgggaaattacctttctaactaat

SEQ ID NO: 1739 - DNA, 1352 bp, Streptococcus pneumoniae
  misc_feature (1)..(1352): tiling:Spneumo1:WAN024DWW; Cluster includes WAN0243BN spr1 938||15903979|NP_359529.1|1919726..1921072|-|1347 bp|Conse rved hypothetical protein|S.pneumoniae|R6|NC_003098.1|ORF| 211
atgatgaagttcatattggatattgttagtacaccagctattttagtagctttaattgcaatyttaggattagttcttcagaagaagaaattacctgatattattaaaggtggaattaagacctttgttggtttcttagttgtatctggtggtgcaggaattgtacaaaattctttaaatccatttggtaccatgtttgagcatgcttttcatttatctggcgttgtgccgaataatgaagcaattgtagcwgtagctttaacaacatatggctcagctactgcaatgattatgtttgcaggcatggtgttcaatatcttaatcgctcgttttactcgatttaaatatatytttttaacagggcaccacactctatatatggcrtgtatgattgcggtcattttatcagttgctggctttactagyttgcctctyatcttactaggaggattagcactcggtattattatgagtatttccccagcatttrtgcaaaaatatatggttcaattaactggaaatgacaaggtrgctttaggtcatttcagttctttgggatattggttgagtggttttactggtagccttatcggtgacaaatcaaaatcaacagaggacattaaatttccaaagagtttagcttttttacgtgatagtactgttagtatyactttatcyatggcagttatttacattattgtagctatctttgcagggtcagaatatatagaaaaagaaatcagtagtggtacaagtggtctagtttatgctttacaattagcaggtcaatttgcagcaggggtatttgttattttagcaggtgttcgccttattttgggygaaattgttccagcctttaaaggtatttcagagcgtcttgtacctaattcaaaacctgctttggattgtccgattgtttatacttatgcacccaatgcagttctaattggatttatctctagttttrttggtggtttagtaagtatggyaattatgattgcttcaggaacggttgttatcttaccaggtgttgtgcctcatttcttctgtggagcractgcaggtgtyattgggaatgcatctggtggtgttcgtggagccactattggagcatttttacaaggtattttaatcagttttctyccagtctttttaatgccagttttgggaggactyggtttccaaggatcaactttctcagatgcagattttggtctatcaggaattattttaggaatrttaaatcaatttggctcacaagcaggcattgtgattggtcttgttcttattytagcagttatgtttggagtatcctttattaaaaagccatctgcaamggaggaataactaat

SEQ ID NO: 1740 - DNA, 806 bp, Streptococcus pneumoniae
  misc_feature (1)..(806): tiling:Spneumo1:WAN024DVT; Cluster includes WAN0243AU spr1 967|PTS-EII|15904008|NP_359558.1|1958932..1959732|-|801 bp |Phosphotransferase system sugar-specific EII component|S. pneumoniae|R6|NC_003098.1|ORF|211
atgatgaataataaagtaactaaagttgaacttaaaaaagttttcaaacgaagttttatgtatggttcttcatggaactatgagagaatgcagaacctaggttttctatatacaattcttccagtattgaaaaaactatacccagacaaagattcagcttctcctgcaatgaaacgtcaccttgagtttttcaatactcatcaaacagcggcaccatttattcttggagttacttccgctatggaagaacaagaaggaaatgaaggtgcagcttcaattactggtattaaagttggcttgatggggccactggctggtctaggagatagtttgttctggctgacactagttcctatctgttttagtattggtgcgtcttattctaaagacggcggtgctttaggtatctttatcgccttaatattgtttaatattattaatattcctgttaaatatttcggtttgaaatatgggtatactaagggttctagtcttatccaagaaaataatacaaaaggaacattgaatcgcgttacgagtatggcgacagcattagggctagtactagtgggtggtttgattccatcaatggttggtattaattttggattagaatttaagcagggggaacttgttatttctgttcaagaaatgattacaaaattaattccaggatttatccctatggctttgactttattaatgtgtaaattaattagaaaaggaaagaatccggttgtactaatctttagtgttatggctattggagttatyctagttgttttaggaattttgaagtarctaat

SEQ ID NO: 1741 - DNA, 424 bp, Streptococcus pneumoniae
  misc_feature (1)..(424): tiling:Spneumo1:WAN024GAB; Cluster includes WAN02447I spr0 788||15902832|NP_358382.1|784661..785068|+|408 bp|Hypothet ical protein|S.pneumoniae|R6|NC_003098.1|ORF|221
atgatgacgacaggttgctctatgggagcctatcatgcactcaatttcttcctccagcatccagatgtctttaccaaagtgattgctctcagtggtgtttacgacgcacgtttctttgtcggygattactacaacgatgatgctatttaccaaaactcgccagtagattatatttggaaccaaaacgayggctggtttattgaccgttaccgtcaggcagagattgtgctgtgtacggggcttggagcctgggaacaagatggtttrccatccttttacaagctcaaagaagcctttgacmagaaacaaattccagcctggtttgctgaatggggacatgatgtcgcccaygactgggaatggtggcgtaaacaaatgccttatttcctcggtaatctctatttataaaakgagttacctatga

SEQ ID NO: 1742 - DNA, 938 bp, Streptococcus pneumoniae
  misc_feature (1)..(938): tiling:Spneumo1:WAN024CYO; Cluster includes WAN0243BP spr1 936|tktC|15903977|NP_359527.1|1917936..1918868|-|933 bp|Pu tative transketolase c-terminal section|S.pneumoniae|R6|NC _003098.1|ORF|111
atgatgagaagyacgaaagaattacggcatgtatatagagacttccttttagaggctaatcaaagtkmttctgatatagtagtcttagaagccgatttgtcaagttcgatggctactmataatcttgaaaaggacttyggagaccgttatgtgaatgttgggattatggaagcagaaatggtcggccttgcagcaggcttgtctattcaggggtttagaccttatcttcatacatttggtccttttkcttcacgaagrgtatttgatcaattatttatttctcttggatacgcacaattggatgccactgtgattggatcagatgcaggagtaackgcagaratgaatggtggracacatatgccatttgaagaaattggmttgttacgtttaattcctaaatcratcattttygaagcaactgatgatatccaatttcgtgaaatattgaaycagacattagacttaaaaggactaaaatatattcgaacaattagaaaagctccagwksctgtrtatcaaggtggagaagatttttctaarggctacattgagttaagrcatggtgaagatcttgtaatcgttgcttctggyataatggttgctccaagtattcgagttgcagatgaactgtctaaattaggttattcagtargtgtgatagatttatttagaatcaaaccgataccagaacagataaaaacaatgttaagtggaaaaactatatttactgtagaaaaccacaatcagataggtggaattggcagtgctttatgtgaattattctctgatgatggaataacaaaaattcatcggatgggtgttcaagaaagattyggtcaagtagggaaaatggattatcttcttaatgagtatggtttgagtgaatcgaatataaaagagaaggttctagaaatttataatgcaagatarctaat

SEQ ID NO: 1743 - DNA, 384 bp, Streptococcus pneumoniae
  misc_feature (1)..(384): tiling:Spneumo1:WAN024CEW; Cluster includes WAN023RVX cont ig_1609_47||||34214..34597|-|384 bp|Glimmer 2.02 orf predi ction|S.pneumoniae|670|WAN01UDCD|ORF|001
atgatgagattagcaaatggcattgtattagataaagacacgacttttggagaattgaaattctctgctctacgtcgtgaagtgagaatccaaaatgaagacgggtcggtttcagatgaaatcaaggaacgtacctatgacttaaaatccaaaggacaaggacgcatgattcaagtaagtattcctgccagcgtgcctttgaaagagtttgattataacgcacgggtggaacttatcaatcccattgcggacaccgttgctactgccacctatcaaggagcagatgttgactggtatatcaaggcagacgatattgtsctgacaaaggattctagttcattcaaagctcaaccacaagcaaagaaagaaccgacacaagacaaa

SEQ ID NO: 1744 - DNA, 899 bp, Streptococcus pneumoniae
  misc_feature (1)..(899): tiling:Spneumo1:WAN024FNW; Cluster includes WAN0243SP spr1 322|pdx1|15903365|NP_358915.1|1308368..1309261|-|894 bp|Py ridoxine biosynthesis protein|S.pneumoniae|R6|NC_003098.1| ORF|122
atgatgaggataaaacaaatgactgaaaatcgttatgaactaaataaaaacttggcacagatgctcaagggtggtgttattatggatgtgcagaatcctgaacaggctcgyatcgcagaagctgctggtgcggcarctgtgatggccttggaacgaattccggctgatattcgtgcagctggaggagtttcccgcatgagcgacccaaagatgattaaggaaatccaagaagcggttagtattccagtaatggctaaggtcagaatcgggcattttgttgaagctcagattttagaggctattgaaattgattatatcgacgagagtgaagttctatctccagctgatgaccgtttccatgtggayaagaaagaattccaagttccttttgtctgtggtgctaaggatttrggtgaagccttgcgtcgtatcgctgaaggtgcttccatgattcgtacyaaaggagaaccagggacaggggatatmgtccaagctgttcgtcatatgcgtatgatgaatcaggaaattcgccgcattcraaacttacgtgaggacgagctttatgttgctgccaaggatttgcaagtccctgtagaattggtccaatatgttcatgaacatggaaaattgccagttgtaaatttcgctgctggaggtgttgcaacgccagcagatgctgcgttaatgatgcaattaggggcagagggggtctttgtcggttcaggtattttcaagtcaggagatcctgttaaacgagcgagtgccattgttaaggctgtgactaacttccgtaatcctcaaatcctagctcaratctctgaagatttaggagaagccatggttggtattaatgraaatgrratccaaattctcatggctgaacgaggaaaatarctaat

SEQ ID NO: 1745 - DNA, 186 bp, Streptococcus pneumoniae
  misc_feature (1)..(186): tiling:Spneumo1:WAN024AZB; Cluster includes WAN023SBA NC_0 03028.1_1574||||1198472..1198645|-|174 bp|Glimmer 2.02 orf prediction|S.pneumoniae|TIGR4|NC_003028.1|ORF|010
atgatgatacttttcgaaaatctcttcaaatacgtcagctcagctttgccttgctgtgttttgagcaagctacggttagcttccgagtttgattttcatttactagaaatgaaactgatgagagatatcagtagacatttgagtcaggatattatggaaaatgataaaaagagctcgctaactaat

SEQ ID NO: 1746 - DNA, 258 bp, Streptococcus pneumoniae
  misc_feature (1)..(258): tiling:Spneumo1:WAN024EXU; Cluster includes WAN023KWX 3144 43_2761||||1469790..1470047|-|258 bp|EGAD orf prediction|S .pneumoniae|R6|NC_003098.1|ORF|110
atgatgatggcagctagcaatccaaagacaatggctccgataaagaagtcaaggcccaagatgaaggakagggctacacctggtaagacagcatgtgaaatggcatctcccatgagtgacatcccgcgtagaataatgaaacatcccacagctccagctacaatcccgacgacaatagctgttatcaaggcattttgtaggaaatggaatttttgcaatccatcgataaattctgcaatcataggtcacctccattga

SEQ ID NO: 1747 - DNA, 834 bp, Streptococcus pneumoniae
  misc_feature (1)..(834): tiling:Spneumo1:WAN024FOY; Cluster includes WAN0243T5 spr1 306||15903349|NP_358899.1|1298337..1299164|-|828 bp|Conser ved hypothetical protein|S.pneumoniae|R6|NC_003098.1|ORF|1 11
atgatgattaaggtaattgcgacagatatggatggraccttgctggatgctakaggtcagcttgatctcccacgattggaaaagattttagatcagttggatcaaaggggcattcgttttgtcattgcgacgggcaatgaaattcaccgcatgagacaactactgagtcccttggtggatcgrgtggttctggttgttgctaatggcgctcgtatttttgaaaacaatgaattgattcaggctcagacatgggatgacgccattgtcaacaaggctttgrctcatttcaagggtcgagcgtgtcagraccagtttgttgtaacggggatgaagggtgattttgtcaaggaaggtacgatttttacagatcttgaaagttttatgactccagaaatgattgaaaaattctaccaacggatgcaatttgtggatgaattaacatctgacctctttggtggtgtgctcaagatgagcatggttgttggtgaggaacgtttgagttcggttttggaagaaatcaatrctctctttgatggccgtgtccgagctgtatccagtggctatggttgcattgatatcctccaagctgggattcataaagcatggggcttggaggaattactcaagcgctgggacttgaaatcccaagmaatcatggcttttggtgatagtgaaaatgatgttgaaatgcttgaaatggctggaattgcctatgcgatggaaaatgctgatgagaaagccaaagctgtggcgactgctctagcaccagccaacagccaaggaggagtttatcaagtcttggaaaactggttagaaaaaggagaaykaactaat

SEQ ID NO: 1748 - DNA, 815 bp, Streptococcus pneumoniae
  misc_feature (1)..(815): tiling:Spneumo1:WAN024D49; Cluster includes WAN0243IY spr1 674||15903716|NP_359266.1|1646347..1647156|-|810 bp|Conser ved hypothetical protein|S.pneumoniae|R6|NC_003098.1|ORF|1 11
atgatgcatacttatttgcaaaagaaaattgaaaatatcaaaacaaccctaggtgaaatgtcaggtggttaccgtcgtatggttgcggctatggctgatttaggattttcaggaactatgaaggctatctgggatgacctctttgcccatcgtagttttgcccagtggatttatttgctggttttaggaagttttcctctctggctggagttggtttacgaacatcgtattgttgactggattgggatgatttgtagcttgacagggattatctgtgtaatctttgtatcggaaggtcgagcaagtaattatctttttggcttgattaactctgttatttaccttattttggccctacagaaaggcttttatggtgaggtgctgacgacactttacttcacagtcatgcagccaattggacttctagtttggatttatcaggcacagtttaagaaggaaaagcaggagtttgtcgcgcgtaaactggacggcaagggctggacaaagtatctttccattagtgtgctttggtggttggcctttggcttcatttatcagtctattggtgccaatcgtccctatcgtgattcaatcacagatgcaaccaatggggtagggcaaatcctcatgacagctgtttaccgtgaacagtggatattctgggcggctaccaatgtyttttcaatctatctctggtggggagaaagcctgcaaattcaagggaaatatctaatttatctcattaacagtctagttggttggtatcaatggagcaaggcagctaagcagaatactgatttacytaactarctaat

SEQ ID NO: 1749 - DNA, 560 bp, Streptococcus pneumoniae
  misc_feature (1)..(560): tiling:Spneumo1:WAN024F7V; Cluster includes WAN0243GX spr1 747||15903789|NP_359339.1|1718441..1718995|-|555 bp|Hypoth etical protein|S.pneumoniae|R6|NC_003098.1|ORF|111
atgatgccagctaatacgaaagttatttttcaagaaatgtttgcggattttcagaactattatgttctgattgggggaactgctacctctatcgtattggattcgcaaggatttaaaagtcgcacaacaaaagattatgatatggtcatcattgatgaagtaaaaaataaggaattttatactaccttgaatcaytttttagaattgggagagtatcaaggaagtcagaaagatgagaaagcgcagctttttcratttacaacaactaatyctgagtttcmttctatgattgaactatttagtatyttaccagaatatccattaaagaaggacggtcgagaaattcccttayattttgaycaagatgctagtttatcagccttattattggatgaagattattataatatattggtgcatgwaaaagaaaccattcaggggtattcggtattgagtaattgtggtytatactcttcgaaaatctcttcaaaccacgtcagcttccatctacaacctcaaaacagtgttttgagcagcctgcarctagcttcctarctaat

SEQ ID NO: 1750 - DNA, 308 bp, Streptococcus pneumoniae
  misc_feature (1)..(308): tiling:Spneumo1:WAN024G2W; Cluster includes WAN0243Z4 spr1 091||15903134|NP_358684.1|1086183..1086485|-|303 bp|Hypoth etical protein|S.pneumoniae|R6|NC_003098.1|ORF|121
atgatgcgaaatgagtttcgagaaagggtggagcaacttcttcaacaaaaagaaataaatgaaaatagtgagttgagtcacctgtttcgtcttgctatacaaaatttagacagaaatgaaaaataccaawcggtcatggccaatttgagtcaagggttgtcactttacctcatgacgcatcattaccaggcacctaagtctgtcattgattttggtttatggaytrmcaaagctcctagccaggaaagagggagactggctttcttgcagatgcttgctcaaaccctacagggctttcgttaactaat

SEQ ID NO: 1751 - DNA, 1314 bp, Streptococcus pneumoniae
  misc_feature (1)..(1314): tiling:Spneumo1:WAN024D4S; Cluster includes WAN0243KG spr1 620|ABC-SBP|15903662|NP_359212.1|1593995..1595308|-|1314 b p|ABC transporter substrate-binding protein - sugar transp ort|S.pneumoniae|R6|NC_003098.1|ORF|100
atgatgcgtaaaggtacaatgttatctgttgttgcggggctatcgttagctatacttgcaggttgtagtggaggaactaactcaaaacaagcgagttcttcaaatgatattaaagtctgggtacaattctctgacgaaacaaatgaaggaaaagcttggcaaaaagttgttgataactttaatcaatcaggaaaaagtaagtacaaggttgtaactgagtatattcctcgtagtggtagtggtggaggatatgaagacaaggttaatgctgctattacgactaatagtcttccagatgttattacccttgatggaccaaatacggcagcttatgcaaaatctaaagtaattactccgctagatgattatctaaaagataataatatggatgatgttttggacagtattaaacaacagggaacttataatgggaaattctatgcatttggattttctgaatcgaatgttggtgtttattacaataaaaaaatgttcaaagaggccggaattgcggaatcagagcttccaacgctagaaaagccatggacatgggacgaatttaatacgattgctaaaaaattgaaagatcattataacaaaccarcaattgattttcgtattaattcaaacgatgaaatgttgccatatgcttatatgccgttgatttggtcaaataatggttctgtcgtaaacgaagatggaacaaaggcagaaggatacttcaactccaaagagagtgtagaagcagttcaattcattcaaaatcttgtaaaagaaggctatacaactgttagtccagtcgaaaaaggttttgaaacaggagagtatccaatgcttttgagtggttcttggacgattgctgacatgaatacaaactacaaagatattgattttggtatccttccttacccagtatctagtaagacgaaaaaattagtatccccttcaggtagttggcaattagctgtgacgacaaaatctgataaaaaagaggccgcatctgaatttgttaaatttgctacaaatacagaatcaagtgaaattattagcttggggaattcggtccttccaattcgtaaatctacaattgaaaatatcaaagataaagtatccgaaccaatgcgtttcttgatggaacaaaattcaaaaacagctcatgctcgcccagttgttgtagcatatcctcaggtttctcgagcttttcaacaagcaatgcaagatattagctattatgaagaaaatccaaatgtgcaaaaagtcttggatactcgtacaaaagaaatgcaaactgctattgatcagtcactcaaataa

SEQ ID NO: 1752 - DNA, 282 bp, Streptococcus pneumoniae
  misc_feature (1)..(282): tiling:Spneumo1:WAN024CEM; Cluster includes WAN023RVQ cont ig_1609_54||||39413..39694|-|282 bp|Glimmer 2.02 orf predi ction|S.pneumoniae|670|WAN01UDCD|ORF|001
atgatggaagatacctattatcaattagaagaggctttggtacagggatttcaaacacctgaagaataccaagcctacaaggagttaaaggaacattatgaggaagtgacaggggattacagyttttcyaaacgagarctyactagycaattggaaatcgctcttcagaatcatcraggtgtggactttgaagaayatgaaaaarargastatytggamttrgttcaaaaaytagaagagtttgattcctctcttgccacccattatcgtcarttgattgay

SEQ ID NO: 1753 - DNA, 99 bp, Streptococcus pneumoniae
  misc_feature (1)..(99): tiling:Spneumo1:WAN024DRC; Cluster includes WAN02431W SP02 58||15900192|NP_344796.1|231372..231464|-|93 bp|hypothetic al protein|S.pneumoniae|TIGR4|NC_003028.1|ORF|120
atgatggaattagtactcaaaactatyatcggaccaattgtggtcggtgtcgttcttcgtatagtcgataaatggctaaacaaggacaaactarctaat

SEQ ID NO: 1754 - DNA, 1091 bp, Streptococcus pneumoniae
  misc_feature (1)..(1091): tiling:Spneumo1:WAN024DDH; Cluster includes WAN02446K spr0 822||15902866|NP_358416.1|824315..825400|+|1086 bp|Conserv ed hypothetical protein|S.pneumoniae|R6|NC_003098.1|ORF|11 1
atgatggacagtccaaaaaaattaggctatcacatgccagcagagtacgaaccccatcatggtaccctcatgatatggccgaytcgaccaggatcatggccttttcaaggaaaggctgctaaaagagcatttactcagatyatcgagaccatagcagaaggggaaagagtctatcttttggtggagcaggcctatctatctgaagcccaatcctatcttggrgacaaggttgtttatttagacattcccaccaatgatgcctgggcgcgtgatactggcccaaccattctcgtcaatgataaaggtaagaaattagccgtggattgggccttyaatgcttggggaggcacctatgatggtctttatcaagattatgaagasgatgaccaagtagccagtcgttttgctgaggccttggaaaggcctgtctatgatgctaaaccttttgtactggaaggaggcgcaatccatagcgatggtcaaggaactattctcgtaactgaaagttgcttgcttagtcctggtcgcaatcctaacytgactaaagaggagattgaaaacacattattagaaagtcttggtgctgaaaaagttatttggcttccttatggtatttatcaggatgaaaccaatgaacacgtmgataatgttgytgcctttgttggtcctgctgagsttgttttggcttggacagatgacgaaaatgatccccagtatgccatgtcaaaagcagatctcgaactcttagaacaggaaacagatgcaaaaggttgtcacttcaccattcataaattgcctatccctgcagttcgacaagttgtgacagaagaagatttgccaggctacatctatgaagaaggagaagaaragcgatacgcaggtgaacgactagcagcttcctacgtaaacttttatatcgccaacaaggctgtcttggttccacagtttgaggatgtaaacgaccaagtggccttagatatcctcagcaagtgtttcccagaccgtaaagttgtcggaataccagccagagatattytcttaggtggtggcaatatccactgtatcacccaacaaattccagaatarctaat

SEQ ID NO: 1755 - DNA, 1250 bp, Streptococcus pneumoniae
  misc_feature (1)..(1250): tiling:Spneumo1:WAN024DV4; Cluster includes WAN0243AG spr1 981|dltB|15904022|NP_359572.1|1971225..1972469|-|1245 bp|D -alanine transfer from Dcp to undecaprenol-phosphate|S.pne umoniae|R6|NC_003098.1|ORF|222
atgatggagttttttcaacagcttcctcatttagagccatatggcaatcctcagtattttgtttatgtgattgctgcaaccttgcccatctttataggyctctttttcaagaaacgctttgcctggtatgaagtgttggtaagtctcttctttattgtcaccatgttggtgggtggaaagaccaatcaactagctgccttgggtatttacctttgctgggaaatattgctcctgcttttctacaagcattatcgaaaaagcaaggatggcaagtgggtcttctacttagttagttttctgtccctacttccgattatctttgtcaaggtgcaaccagctatcaatggaacgcagtctttgcttgggttcttgggaatttcttacctkacctttcgttckgttggrattrtcatcgagctgagagatggagtgattaaggattttaccctctgggaattcctccgtttccttctcttcatgccaactttctcgagtggtccaatcgatcgctttaagcgatttaatgaaaattatcaggcyattcctgagcgagatgagttgatggatatgctggatgaatctgtccgctatatcatgyggggctttttgtataagtttatcctagctcatgttttaggagagaccttactmcctcctctgaagaatttagccttgcagtcaggtggcttctttaatctctatgccttggcagttatgtatacttttggtctggarctcttctttgactttgcaggttattctatgtttgctttggccatctcaaacttgatgggaatccgtagccctatcaactttaacaagccctttttatcaagggatttaaaggagttttggaatcgctggcatatgagtctgtcyttctggttccgtgactttgtctttatgcgaatggtgatggtgttaaccagaaagaaagtctttaaaaatcgtaatgtaacctcaagcatggcctacattgtaaatatgctgattatgggattttggcatggygtgacctggtactatatcgcctatggactctttcatggactaggcttggtcatcaatgatgcctgggttcgcaagaaaaaaacgctcaataagraacggaaaaaagcagggaaggctgccctacctgagaatcgctggattcagttkcttggcatggttgtcactttccatgttgtcatgttgtcattcttaatcttttctggattcttgaataatctatggtttaaaaaataactaat

SEQ ID NO: 1756 - DNA, 258 bp, Streptococcus pneumoniae
  misc_feature (1)..(258): tiling:Spneumo1:WAN024GNR; Cluster includes WAN023M3A 3143 65_705||||369478..369735|-|258 bp|EGAD orf prediction|S.pn eumoniae|R6|NC_003098.1|ORF|110
atgatggccataaaaggaacaacagtagttgaaaccttagaaatagacttgagtccaccaaagactgcaatcgctacaaagacagacaagacgagagctgtgatggctggcgaaatcgtcgttgtattttggatagattctgyaatcgagttgacttgggtgaaggttccgattcccaagagagcaaccaatactcctgctactgcaaacaaaacagcaagtggtcgccacttttctcccatccctagaaggatatar

SEQ ID NO: 1757 - DNA, 1046 bp, Streptococcus pneumoniae
  misc_feature (1)..(1046): tiling:Spneumo1:WAN024CGG-3; Cluster includes WAN0244RW sp r0054|purK|15902098|NP_357648.1|57724..58875|+|1152 bp|Pho sphoribosyl glucinamide formyltransferase|S.pneumoniae|R6| NC_003098.1|ORF|342
atgatggccatttctgctatctacatgggccacaaggttatcgcgctggatcctgcggcggattgcccggyctctcgygtggcggaaatcattgtggcaccttataacgatgtrgaygccctccgtcagttggcagaccgttgcgatgtcctcacttaygagtttgaaaatgtcgacgctgacggtttggatgccgttatcaaggatggacaactccctcaaggaacagatctgctccgcatttcgcaaaatcgtatttttgaaaaggactttttgtcaaacaagkctcaagtcactgtggcaccctacaaggtcgtgacttctagcctagacttggcagatatcgacttgtcgaaaaactatgtcctcaagactgcgactggtggctacgatggtcatggacaaaaggttattcgttcagaagyagacttggaagcagcctatgcgctagcagactcagcagactgcgtcttggaagaatttgtcaactttgaccttgagatttctgtyatcgtgtcaggaaatggcaaggaggtgacgtttttcccagttcaggaaaatatccaccgcaacaatatcctgtctaagaccatcgtaccagcccgcatttctgaaagtctagtagayaaggctaaagctatggcagtgcgaatcgcagaacaactcaacttgtctggaactctctgtgtggaaatgtttgcgacwgmtgatgacrtyattgtcaatgaaatcgccccacgaccacataactctgggcactattctattgaagcctgtgatttctctcagtttgacacccatattctsggtgttctcggagcaccattaccagtcatcaaactccatgcgccwgccgtyatgcttaaygtyctcggycagcatgtygaggcyrctgarmaatatgtsacagaaaatycaagcgcccacctccacatgtatggtaaaatagaagcraagcayaaycgyaagatgggacatgtgacyttgwttagtratgwrccrgatagtgtggrwgagyttggggaagggattgatttttarctaat

SEQ ID NO: 1758 - DNA, 273 bp, Streptococcus pneumoniae
  misc_feature (1)..(273): tiling:Spneumo1:WAN024DMV; Cluster includes WAN023I83 8686 0_3452||||1962984..1963250|-|267 bp|EGAD orf prediction|S. pneumoniae|TIGR4|WAN01UC25|ORF|111
atgatgggagatgggatgaaagaatttcaatttgagagaaagcagcgtttttctttgaggmmatatgcaataggagcttgttcggtcttgctaggaacgagtttattttttgctggtatgggtgmtcagcctgtacaggatacagaaacgagttcagcactaatttcaagtcattatttggatgagcaggatttatctgaaaagctgaaatctgagttgcaatggyttgaattagaaaacaagcttttgaacttatgggagcatctarctaat

SEQ ID NO: 1759 - DNA, 243 bp, Streptococcus pneumoniae
  misc_feature (1)..(243): tiling:Spneumo1:WAN024BEQ; Cluster includes WAN023LNR 3155 83_1508||||801790..802026|+|237 bp|EGAD orf prediction|S.p neumoniae|R6|NC_003098.1|ORF|101
atgatgggctctttttttgtccagggggcaaaaagggggcaaaactttcataatggattgatactcttcgaaaatctcttcaaaccacgtcagcgtcgccttaccgtatatatgttactgacttcgtcagttctatctacaacctcaaagcagtgctttgagcaacctgcggctagcttcctagtttgctctttgattttcattgagtatgaaataagatatgcacaaattgatctarctaat

SEQ ID NO: 1760 - DNA, 231 bp, Streptococcus pneumoniae
  misc_feature (1)..(231): tiling:Spneumo1:WAN024FF4; Cluster includes WAN023KTP 3133 32_2897||||1547147..1547377|+|231 bp|EGAD orf prediction|S .pneumoniae|R6|NC_003098.1|ORF|110
atgatggtgataccattaccagtaccagcaagtccaaggatagaagccaatccaccaccgattgcaccagcaatcaatgaaaggaagaatggtttacggaagcgcaagttcaccccgaagatagcaggctctgtaatacctaggaaggcagaaagagcagccgggaaagcaagtgttttcagttttggattttttgttttaacaccaaccgcaacagtagcagcaccttga

SEQ ID NO: 1761 - DNA, 1878 bp, Streptococcus pneumoniae
  misc_feature (1)..(1878): tiling:Spneumo1:WAN024CEE; Cluster includes WAN0240SM |||A AG38036.1|||339 bp|Orf20|S.pneumoniae||AF295925|ORF|001
atgatgtacagtggaaagaaattcmtactattctcactgttaggyatcttactaggytatctttttcatcgtttgacgcttttgtatgattcctatactggaaatashttagataaatggaytcrtctyctratggaaggtcaagakgaagttcttcagtcgccatggaatrtttcyttyactggaaaatcmagtgctttttttctactaggctttgtgatgatgttgctggtttatctytatytagagacyggyaaraaacaataycgagaagggdtagaatacgggagygcccrttttggaactctaaaagaaaagaakctcttttacggyaaggaattttywcatgatacratcttagcmcaagatgttcgtytgacattattagataaaaaaccaccccaatatgatagaaayaagaatattgcrgtgathggaggttcaggaagtgggaagacatttcgctttgtgaaacccaatctrattcagatgaatagttcwaatattgtrgtggatcctaaagatcacttrgcygaraaaacwggmaaactctttttagaacrtggctaccaagtaaaggtgttagatttagtyaatatgaagaactcagatggcttyaatccttttcgctatatagagacagaaaaygatttgaatcgmatgctgrcggtttatttyaataacaccaaaggctcwggmtcycgwagtgatccattttgggatgaagcttctatgactttggthcgagctttagcctcytacttggtcgatttctataayccaccyaaaacaagagaacagctcatwgaagaragtcgtttaagtcaaaaagaayacmaaaacttgttgaaacgtcaaaaaaaagaagtggargagcgaaaaaaacgagggcgttatccaagttttgckgaaatctcaaaactcattaaacacttatccaagggtgaaaaycaagaaaaaagtgtcttagaaattctatttgaaaattatgctaaaaagtatggractgaaaatttyaccatgcgaaattgggcagatttycaaaattataaggataagactctggattctgtyatagctgtaaccactgctaaatttgccctcttcaatattcaragtgtcatggatttgaccaaaagagatacycttgatatgaagacatggggcmaggaaaaatcaatggtttacttagttatcccagataacgatagtacctttcgctttctwtcagccctctttttttcaacmgtatttcaaacyctaacaagacaagcagatattgatkttaagggkcaattrcctcttcatgtgagagtytayttagatgarttcgcaaatatyggagaaatyccmgattttgctgaacaaacctcaacagtccgytctcgdaatatgagtctcgttccyattctwcaaaatattgcycaacttcaaggrctctataaagaaaaagaagcttggaaaacyattytwggraactgtgatagcttagtmtacttaggtggkaatgatgaagatacytttaaatttatgagtggbttactcggtaaacaaaccattgatgttcgaaatackagtcgttcctttggccaracaggttcaggatccctttctcatcaaaagattgctcgtgatytaatgacaccygatgarrtcggaaatatgaaacggcatgaatgcytrgttcgaattgccaatatgcctgtctttaaaagcaaaaaatacwattcmacyaagcatccaaactggargtacctagccaatcaagaaascgatgaamggyggtggractatcaratyaatcctttraatcaaarwcargaaaatcatcttgaaggccttagaattcgtgatttracttttgaatctagtttaaaa

SEQ ID NO: 1762 - DNA, 234 bp, Streptococcus pneumoniae
  misc_feature (1)..(234): tiling:Spneumo1:WAN024FSC; Cluster includes WAN023L65 3138 20_2349||||1259658..1259891|+|234 bp|EGAD orf prediction|S .pneumoniae|R6|NC_003098.1|ORF|110
atgatgtcatcagtaccattttcggtcaaggaaaggatgtgttgcaattcttttcttgttaaaggactggtcataatattgtgttccacaaagggaaccttatgtttttctaaccaggccttagccttacgacatgatgtacagctcggtgatagaaatagtgtaatcatgcttttctcttcttatctatactttgctacttctattatacaaaaaaataargcgcttgactag

SEQ ID NO: 1763 - DNA, 234 bp, Streptococcus pneumoniae
  misc_feature (1)..(234): tiling:Spneumo1:WAN024CGX; Cluster includes WAN023MED 3132 23_105||||51843..52076|-|234 bp|EGAD orf prediction|S.pneu moniae|R6|NC_003098.1|ORF|110
atgatgtcgttgacacacatggccacacagtcctgcccgatggtatcgtgcttgtcgtacttgatagccaacatgagcttggttccgacaccgtcagtccctgaaatcaagacgggttctttaaccccagtcttggaaaggtcaaacataccaccaaagccaccaagagctcccatgacacctgcacgctccgtacgggccacgtgctttttaatccgttcaacaacttcataa

SEQ ID NO: 1764 - DNA, 684 bp, Streptococcus pneumoniae
  misc_feature (1)..(684): tiling:Spneumo1:WAN024CAB; Cluster includes WAN0244OR spr0 167||15902211|NP_357761.1|175326..176003|+|678 bp|Conserve d hypothetical protein|S.pneumoniae|R6|NC_003098.1|ORF|221
atgatgtctaacaaaaataaggraattctgatttttgcgattctctatacartcctctttrtgtttgatggcgttaaattgctggcttctttaatgccatctgycattgcaaattatcttgtttatgtagttttagctytatatggctccttcttrttcaaggatagattgatccaacaatggaaggrgattagaaagactaaaagaaaattcttctttggmgtcttaacaggatggctctttctcattctgatgactgttgtctttgaatttgtatcagagatgttgaagcagtttgtgrgactagatggacaaggtctaaatcagtctaatattcaaagtacctttcaagaacaaccactactgatagctgtttttgcttgtgtcattggacctctggtagaagaattatttttccgtcaggtcttattgcattacttgcaggaacggttgycaggtttactaagcattattctggtaggacttgtttttgctctgactcatatgcacagtttggcyctatcagagtggattggtgcagttggttacttaggtggaggccttgccttttctattatttatgtgaaagaaaaagagaatatctactatcccctacwtgttcacatgttaagcaacagcctctccttaatcattttagctatcagtatagtaaaaykaamtrat

SEQ ID NO: 1765 - DNA, 237 bp, Streptococcus pneumoniae
  misc_feature (1)..(237): tiling:Spneumo1:WAN024FDF; Cluster includes WAN023KRQ 3140 94_2989||||1589428..1589664|-|237 bp|EGAD orf prediction|S .pneumoniae|R6|NC_003098.1|ORF|110
atgatgtctaaggtgatgtggcgaatgccctcgtcattctcaggggtagagagaacagcyaagtccagtgagttaaaggcagagcgaaggtctccgtttgtagaggttgcgatgaaatccagcgcatcctcatctagttctattggaaaatcaaaaccacgttcagggttacttagagctatctgcagggcctctttgacgtcttggttagacagaggttccaactcgaaaatttga

SEQ ID NO: 1766 - DNA, 177 bp, Streptococcus pneumoniae
  misc_feature (1)..(177): tiling:Spneumo1:WAN024CWW; Cluster includes WAN0243JJ spr1 653||15903695|NP_359245.1|1626138..1626314|+|177 bp|Hypoth etical protein|S.pneumoniae|R6|NC_003098.1|ORF|120
atgatgtctagtaaggattctaaatgctayacyaaattgctcacatcttatttcaaaccacgggactcccacaagaaaggaaaatcctataaaaattckmtctctgaggagaaagrrgcctcaactacaggtgtaaactattatcaattgaaaacaacagtttttacactcaattag

SEQ ID NO: 1767 - DNA, 320 bp, Streptococcus pneumoniae
  misc_feature (1)..(320): tiling:Spneumo1:WAN024ESM; Cluster includes WAN0243LI spr1 582||15903624|NP_359174.1|1563551..1563865|-|315 bp|Hypoth etical protein|S.pneumoniae|R6|NC_003098.1|ORF|121
atgatgttaaaaccctctattgataccttgctcgacaaggttccttcaaaatattcactcgtaatcttggaagcaaaacgtgcccacgaattggaagcaggtgccccagcaactcaaggtttyaagtctgaaaaatcaactcttcgcgctttagaagaaatcgaatcaggaaacgttacaattcacccagatccagaaggaaaacgtgaagcagtgcgtcgccgtatcgaagaagaaaaacgccgcaaagaagaagaagaaaagaaaatcaaagagcaaattgctaaagaaaaagaagatggtgaaaaaatttaactaat

SEQ ID NO: 1768 - DNA, 216 bp, Streptococcus pneumoniae
  misc_feature (1)..(216): tiling:Spneumo1:WAN024CK2; Cluster includes WAN0242S3 SP06 39||15900545|NP_345149.1|602699..602980|+|282 bp|hypotheti cal protein|S.pneumoniae|TIGR4|NC_003028.1|ORF|010
atgatgtttgtaattgaagaagtcaaggatgaaaatcaaaaaaagrcagttgtmgctgaggttttgaaggatttgccagaatggtttggaatcccagaaagcacacaagcctatatagaaggaaccacgacactgcaagtttggrccgcctatcaggagagtgatttgactrgatttgtaagcttatcctattcgagtgaagattgtgcagagatt

SEQ ID NO: 1769 - DNA, 854 bp, Streptococcus pneumoniae
  misc_feature (1)..(854): tiling:Spneumo1:WAN024G5X; Cluster includes WAN024414 spr1 018||15903062|NP_358612.1|996732..997580|-|849 bp|Conserve d hypothetical protein|S.pneumoniae|R6|NC_003098.1|ORF|111
atgattaaaaaaatttaccccatttttaccattttactaggtgctgctatttatgcttttggactgacttattttgtagttccccatcatctctttgaaggaggggcgacaggyattaccctcatcacmttttatctttttaaaatccctgtttccctcatgaacctgctgattaatattccccttttcatcctagcttggaagatytttggagccaaatccctctattctagtttactaggaaccttagctttgtccgsctggttagctttttttgagcatattccccttcatattgatcttcaaggtgatttactaatcacagcccttatagcgggaatcctattgggaattggccttggaattatttttaatgctggaggtacaactggcggaactgatattctagctcgtattctcaacaaatacactcatatatccataggaaaactgctctttatcttagatttttgtattctcatgttgattctcctaatcttcaaggatttgagattggtttcctacacgcttttgtttgattttattgtttctcgtgttattgatttgattggtgaaggaggatatgccggcaaaggctttatgattatcacaaaacgtcctgaccaacttgctaaggcgattaatgatgacctcggaagaggtgttacttttatttctggtcaaggctactatagtaaagaaaatttgaaaatcatctactgtattgtcggaagaamtramattgtgaaaacgaagsaaatgattcatcgaatcgatcctcaagcctttataactattacagaagcccatgaaatcctaggagaaggcttcacctttgaaaaagaataactaat

SEQ ID NO: 1770 - DNA, 1574 bp, Streptococcus pneumoniae
  misc_feature (1)..(1574): tiling:Spneumo1:WAN024CGS; Cluster includes WAN0244RZ spr0 051|purH|15902095|NP_357645.1|53954..55522|+|1569 bp|Phosp horibosylaminoimidazolecarboxamideformyltransferase|S.pneu moniae|R6|NC_003098.1|ORF|111
atgattaaaaaggagaatataatgactaaacgcgtcttaatcagcgtctcagacaaagcgggcattgttgaatttgcccaagaactmaaaaaacttggttgggagattatctcracaggtggaactaaggttgcccttgataatgctggggtggakaccattgckatcgatgatrtgackggyttcccagaratgatggayggycgtgtkaagachctycayccaaatatccacggrggkcttctcgctcgtcgtgayttggatagccacttggaagcrgcyaakgasaacmarattgagctyattgaccttgtrgtggtcaacctttayccwttyaaggaaackatyctyaaaccagaygtgacktaygctgatgcwgtkgaraatatygatattggtgggccrtctatgcttcgttcagcagcgaaraatcatgccagygtkacrgttgtggtagaycctgctgactayrcwgtggttttggaygarttgkcagcmaayggygaaacswcttaygaaackcgycaacgtttrgcagccaargtwttycgtcacacagcggcttatgacgcyttgattgcagaatacttcacagctcaagtgggygaaagyaarcctgaaaarytsacyttgacytatgacctmaarcaaschatgcgttayggkgaraayccycarcargaygcggayttytaccaraaagcyttgccdacwgaytactcyattgcwtcagccaaacagctyaayggkaargaattgtcmttyaayaatatccgygatgcrgatgctgcyatycgtatyatycgtgayttcaaagaymgtccaacygttgtggctctcaarcayatgaayccatgtggwatyggycargckgatracatygagackgcttgggaytaygcttatgagtctgacccagtrtctatctttggtggkatygyygtyctyaaccgtgaggtggatgctgcgacagctgagaagatgcacggcgttttcctcgaaatcatcattgcaccaagctatacggatgaagcgctagcyattttgatcaataaaaagaaaaacttgcgtatccttgccttgccatttaatgctcaagaggctagcgaagtggaagcagaatacacaggtgtagtcggtggacttctcgtgcaaaatcaagacgtggtcaaggaaagcccagctgactggcaagtggtgacyaaacgtcagccaacygagacagaagcgactgctcttgagttcgcttggaaggctatcaagtacgtcaaatcaaatggtattatcgtgaccaacgaccacatgacacttggtgttggtccaggtcaaaccaaccgtgtggcttctgttcgccttgccattgaccaagccaaagatcgtctgracggggcggtccttgcttcagatgccttcttcccatttgcggataacgtggaagaaatcgccaaagcaggaattaaggccatcatccagcccggtggctctgtccgtgaccaagaatycatcgaagcagcggataaatacggcttgactatggtctttacaggtgtgagacattttagacattaactaat

SEQ ID NO: 1771 - DNA, 1235 bp, Streptococcus pneumoniae
  misc_feature (1)..(1235): tiling:Spneumo1:WAN024CK8; Cluster includes WAN0242Z8 SP03 59||15900288|NP_344892.1|334029..335258|+|1230 bp|capsular polysaccharide biosynthesis protein Cps4K|S.pneumoniae|TI GR4|NC_003028.1|ORF|010
atgattaaaaatattttartsacwggwkcdaaaggatttgtaggaaaaaatcttatctgtactctggaagctttgaaagatggrcgagataggactcgtcctaatttagagattggagagatttttcagtatgatcgtgatacagatccgattttattagatgaatattgtaagaaggycgatttcgtattccatttagctggtgtcaatcgtccacagaatcctgatgaattcatggagggaaattacggtttttcaagtagattattggagattttagamaagtatgaaaacacttgtcctgttctactctcaagttctactcaagctagtttagaaggccgattttcaaactctatatatggacaatctaagctagyaggggaagaactcttctttgaatatggaaagaaaacgggagcacctgtcttagtttaccgtttcccgaatctttatgggaagtggtgccgtcctaactacaattctgctgtagcaactttctgtyataatmtagctcacgatttacctattcaagtaaatgatccaagtgtagaattggagttgctgtatattgatgatttgatacaagagtgtctaactgcattggaaggaaatcctcatcgttgtaatctagatggattacaaatcttacctagcccrtcaggaaactactgctacgtaccaacgactcatcgtgcaaccttaggagagattgtctctctattagaaacatttaaaaaacagcctratagtttarttatgcctgaaattcctcarggatcgtttaaaaagaaattgtattctacctacctatcttatttaccagtagataagtttargtttcctctaaaaatgaatatagatgaacgaggtagttttacggaattattaaaaacagaaaatamgggtcaattttctgttaatatttctaaacctggcattaccaaagggcaacattggcatcattctaagtgggaatttttcatggttgtttctggtcgtgctttaatacaagagcgtaggatagggctggatraaaayggtcaagagtatcctattctgaactttgaagtgtcgggcgataagattgaagcaatacatatgataccgggctatgcacataatattattaatctttctgatacagaaaatctarttactgtcatgtgggctaatgagtcatttgatcctagacatccagatactttttttgaacaagtggagaaataactaat

SEQ ID NO: 1772 - DNA, 1416 bp, Streptococcus pneumoniae
  misc_feature (1)..(1416): tiling:Spneumo1:WAN024DH7; Cluster includes WAN0244ES spr0 526|vex3|15902570|NP_358120.1|525639..527018|+|1380 bp|ABC transporter membrane-spanning permease - Pep export|S.pne umoniae|R6|NC_003098.1|ORF|111
atgattaaaacaaaatctagaaagggaatctatgttacacaacgcatttgcytatgttacaaggaagtttttcaaatcgattgtcatcttcctgattattctcctcatggcgagcttgagtttggtcggcttgtcaatcaagggagctactgccaaggcttctcaggagacctttaaaaatatcaccaatagcttctccatgcaaatcaatcgtcgcgtcaaccaaggaacgcctcgyggtgctgggaatatcaagggtgaagacatcaaaaaaatcaccgaaaacaaggccatygagtcttatgtcaaacgtatcaacgctatcggagatttgactggatatgacctsattgaaacgccagaaaccaagaagaatctcactgctgatcgtgccaarcgttttggaagtagcttgatgattacaggtgtcaatgactcctctaaagaagayaagtttgtctctggttcttataaactagtcgaaggagagcacttaaccaacgacgacaaggataaaatcctcttgcayaaggacttggcagccaaacacggctggaaagtaggggacaaggttaaactggactctaatatctacgatgcagataatgaaaaaggagccaaggaaacagttgaagtgacaatcaagggactctttgatggtcayaayaagtcrgcagtwacctactcacaagaactttacgaaaacacagctattacagacattcacactgctgcaaaactttatggatacacagaagacacagccatttatggggacgcaaccttctttgtaacagcagacaagaacttggatgatgttatgaaagagttgaatggcatcagtggtatcaactggaagagctacacactcgtcaagagctcctctaactacccagctcttgagcaatctatmtctggtatgtacaagatggccaacctcctcttctggggtagcttgagcttctcagttctcctccttgccctcttgctcagcctttggatcaacgcccgtcgcaaggaagtgggaattctcctctctatcggcctcaagcaggcaagtatcttgggtcaattcatcaccgaatctatcttgattgctatccctgctctagtttctgcttacttcctagctaattacactgcccgtgcaattggaaacactgtccttgccaatgtgacttcaggtgttgccaaacaggctagtaaggcggctcaagcctctaaccttggtggyggtgcagaagtagatggctttagcaagaccttgtcgagcctagacatttcyattcagacatcagactttatcatcatttttgtccttgccttggttctagtggttctcgttatggcgcttgcttcaagcaatctccttagaaaacaaccaaaagarctcttgctggatggtgaataactaat

SEQ ID NO: 1773 - DNA, 1007 bp, Streptococcus pneumoniae
  misc_feature (1)..(1007): tiling:Spneumo1:WAN024GHQ; Cluster includes WAN0244F8 spr0 510||15902554|NP_358104.1|509689..510690|-|1002 bp|Hypothe tical protein|S.pneumoniae|R6|NC_003098.1|ORF|211
atgattaaaacatttctctctgccctttcggtcattctctttkytatccctatyatarcttattcttttttyccatcttctaatcttaayatttggctatctaccmracctatcttggcacagatttatgccttccccttagctactgcaactatggctkcyattttaagtttcktatttttttycctatctttttacaagaaaaataaacaaatacggttttactctggcattttgctcttaytatcgctcatattactattattyggaacagataaaaccctttcttcygcwycaaataaractaaaaccttaaaattagtaacttggaacgtcgctaatcaaatagaagcacaacatattgagcgaatttttagccattttgaygccgatatggctatattccctgaactagctaccaatatcagaggtgagcaagaaaaccagagaatcaaactattgtttcatcaagttggactttctatggccaactatgatattttcacttctccacctaccaatagtggaatagctcctgtgactgtgattgtcaagaaaagttatggtttctatacagaagctaaaacttttcatacaacacggttcgggacaattgtattacattcgagaaaacaaaatataccagatatcattgccttgcatactgckcctcctctgccaggtttaatggaaatctggaagcaagacttaaacatcattcataatcaattggcttcaaaatatccaaaggctattattgcaggtgattttaatgcaactatgcgtcatggagcacttgcaaaaataagctctcatagggacgcattraatgyactkccaccttttgaaagaggaacttggaatagccaaagtccaaaactttttaatgcaacratagatcatatyttattgcctaaaaaccactactatgttaragayttagacattgtaagttttcaaaactctratcatagatgtatttttacagaaatcacattttaactaat

SEQ ID NO: 1774 - DNA, 1350 bp, Streptococcus pneumoniae
  misc_feature (1)..(1350): tiling:Spneumo1:WAN024GHE; Cluster includes WAN0244EZ spr0 519|cysS|15902563|NP_358113.1|519634..520977|+|1344 bp|Cys teinyl-tRNA synthetase|S.pneumoniae|R6|NC_003098.1|ORF|221
atgattaaaatctatgacaccatgtctcgtgatttgcgagaatttgtcccgattgaggacggcaagatcaagatgtatgtttgtgggccaacsgtgtacaactatatycacgtrggaaacgcccgttcgacggtagcttttgatacgattcgtcgctattttgagtaccgtgggtataaggttgcctatatttccaattttacagatgtggatgataagattatcaaccgtgccagggaagaaggyatcacrcctcaggaggttgcggataagtacatcgctgcctttcgtgaggatgtgacggcmttrggcgtgaaacctgcgactcgccatccgcgtgtagtggagtttatggcagacatcatccgttttgtggaagacttgatcgagaraggctttgcctatgagagtcaaggggatgtctatttccgtgtagaaaaatcccacaactatgctaaattggctaataaaaccttggaagatttggakctaggtgcttcaggtcgtaccgatgaagaaacggctcgtaaggaaaatcctgtagaytttgctytatggaaatcttccaaaccaggtgagatttcttgggatagtccttggggacctggacgtccgggttggcatattgagtgttcagtcatgtcgacagagattttaggtgataccattgatatccacggtggtggagctgacctagagtttccacaccacaccaatgaaattgcccartctgaagctaaaacaggcaaggcttttgctaactactggatgcacaatggctttgtcaatatcgacaatgtcaaaatgtctaagtccttgggtaacttcattacggtacacgatgcccttaaaactcttgatgggcaagtacttcgtttcttctttgcgacccagcactaccgtaagcctatcaacttcacggaaaaggcagttcgcgatgccgagaccaatctcaagtatctsaagaatacttacgaacaaccatttacaggaaaygtggatgcccaagagttacaaaactttaaagataagtttgtagcagctatggatgaagattttaatgctgccaacggtatcacagttgtctttgaaatggccaaatggatcaactcagggaactatgatgcaagtgtcaagcaagctcttgcagatatgttagaaatttttggaattgtctttgttgaggaagttttggatgcagagattgaagacttgattcaaaaacgccaagaggcgcgtgccaatcgwgactttgmgacagcagaccaaatccgtgaccaattggttactcaaggaattaagctccttgataccaaggatggagtgaggtggacacgtgatykaactaat

SEQ ID NO: 1775 - DNA, 311 bp, Streptococcus pneumoniae
  misc_feature (1)..(311): tiling:Spneumo1:WAN024BGV; Cluster includes WAN0244DR spr0 563||15902607|NP_358157.1|569990..570295|+|306 bp|Hypothet ical protein|S.pneumoniae|R6|NC_003098.1|ORF|111
atgattaaaattcttgctgcctgcggtgcaggtgttaactcaagtcaccaaattaaaagtgctctaraagaagaactttcaaaccgtggttatgatgttcactgtgatgcagtcatggtgaaagatgtaaacgaagaccttatgaaaggttacgatatctttacaccaatcgctgcaacagaccttggttttgaaccaggtatcccagttatcgaagctggrccaatcttattccgtatmccagcaatgagygctccagtatytgacaatatygaakcagctaytaaagaacaygrattaagctaactaat

SEQ ID NO: 1776 - DNA, 404 bp, Streptococcus pneumoniae
  misc_feature (1)..(404): tiling:Spneumo1:WAN024DSZ; Cluster includes WAN0244OL spr0 173|arsC|15902217|NP_357767.1|183232..183630|+|399 bp|Arse nate reductase, putative|S.pneumoniae|R6|NC_003098.1|ORF|1 11
atgattaaaatttatacagtctcaagttgtactagytgtaaaaaagcaaaaacctggctcaatgcccaccagttaagttataaagaacaaaaccttggtaaagaaggaattacgagagaagaattactggatattctaaccaaaacagataacggaatagccagcatcgtttcgtctaaaaatcgctatgccaaagcccttggagtggatattgaagatttgagtgtcaatgaagttctcaatctgattatggaaacaccgagaattttaaagagcccaatccttgtagatgaaaaacgcctgcaagttggctacaaggaagacgatattcgtgccttcctaccacgctctgtccgtaatgtagaaaatgcagaagcacgtttgcgtgcagctctataactaat

SEQ ID NO: 1777 - DNA, 859 bp, Streptococcus pneumoniae
  misc_feature (1)..(859): tiling:Spneumo1:WAN024G9F; Cluster includes WAN02446I spr0 824||15902868|NP_358418.1|826466..827275|-|810 bp|Conserve d hypothetical protein|S.pneumoniae|R6|NC_003098.1|ORF|221
atgattaaactactagccttggatatggayggmaccctcctcaatgaagccaaggaaatcccacargcwcacatyrctgctattcacmaagccattgaaaaaggtgtcaaactggttctctgtacgggtcgcccccttttcggtgtcctcccctactacaaaaaactggrrctygacctccagaaygartatrtkattgttaacaacggttgttcaactcaccaracyagygaytggrgyytrgttgactggmaagaactkagtccagctgacatcgaatacctctatgaccttgctgaaaagagtgatgttcagttgacactttttgacgagtcrcattattttgttctcggtgrmaarcccaatcaagttattgaaaatgatgctaaactagtattttcagacctgactgaaatttctcttgargaagcgactagtggaaagttmcggatgttccaaggtatgtktttaggaacaaaagaacaaacagacgattttgagcagcgttttgctgaagagctttgccaacgattcagtggagttcgttcgcagcctgtcatttatgaagcaatgccrcttggaacgacaaaggctactgctctttcacgactagctgagattttgaagattgattcctcagagattatggccatgggcgatgctaataacgatatcgaaatgctccagtttgcagggcttgggattgcaatgggaaatgccagcgattatrtcaaatctcttgcggatgccgttacctcaagcaacgaagaagacggcgttgcgcgtgctattgagaaatatattctataamwaakaaaagcaaatagacagaagttactgctatttgcttttttgctaa

SEQ ID NO: 1778 - DNA, 486 bp, Streptococcus pneumoniae
  misc_feature (1)..(486): tiling:Spneumo1:WAN024DMN; Cluster includes WAN0244T1 spr0 013|comX1|15902057|NP_357607.1|14254..14733|+|480 bp|Compe tence-specific global transcription modulator|S.pneumoniae |R6|NC_003098.1|ORF|221
atgattaaagaattgtatgaagaagtccaagggactgtktataagtgtagaaatgaatattaccttcatttatgggaattrtcggattgggascargrwgscawgctcyrsttmywtgaattgattagtagagaagaaggactggyagacgatattccacgtttaaggaaatatttcaaraccaagtttcgaaatcgaattttagactatatccgtaarcaggaaagtcagaagcgtagatacgataaagaaccctatgaagaagtgggwgagatcagtcatcgtataagtgagggrggtctctggctagatgattattatctctttcatgaaacactaagagattatagaaacaaacaaagtaaagagaaacaagaagaactagaacgcgtcttaagcaatgaacgatttcgagggcgtcaaagagtattaagagacttacgcattgtgtttaaggagtttactatccgtacccacytarctaat

SEQ ID NO: 1779 - DNA, 1065 bp, Streptococcus pneumoniae
  misc_feature (1)..(1065): tiling:Spneumo1:WAN024FVB; Cluster includes WAN0240UN |wci V||AAK20714.1|||1065 bp|WciV|S.pneumoniae||AF316642|ORF|00 0
atgattaaagatatgtcctgtccagaaattagcgtaattgtaccagtttataatgtggaacgatatttaagrcagtgtatggattcattgataaatcaaacttatagggattttgaaataattttagtaaacgatggatcaacggattcttctgggrttctctgtgargaktgggcaaaaaaagatgaaagaattcatgtagttcacaaaaaaaatgaggggcttggcttcgctcgtaatacaggggttgaacacgcaaaggggaaatacataacctttgtagattcagatgactatgtttctctagatatgctgcaaactctatataatgctgttcaagaatatgatgtcgaagttgtatacagtgcgggatattatcgttcctttagtaatggrgaaataaagaagacagatgtagraacaaaaaarcctcaacttttcgaaggaggagatgttgcctctraattactccctratgtaatttctgctcctcctgartatccgaatgatgggaaagttggagtgtcggcatggaaggttctctayraagctaatttrtttaaggawaaaggsytattatttcattcrgaaagagaattcatttcagaagatgctatttttcaaattgattgtttaaaattagcaacatctgcccttgttatcccagatattttatactactatcgtgaaaactttggttctttaagtatgaaatataaagaagawcggtttgagttggataaratcttgtataacgagcaattaaaaagagttgaggggttacctaatcaagaaattttggaagaaagaatmgagagaattttaattgctaatattcgtttatgtrtctttcaggaatcyttayataaaagttctagaatwcataaacgyttgcaaagaattagacagatttgtaaggayccartmtcaaaakyagtwttacrycaytatccaatccatcgyttaccttttmctaaacgtttgatctgtgtattagctaagtataatatgtcgytgttkcttttagytttaaccyyattaaaatatcggaatcggagtgtrtaa

SEQ ID NO: 1780 - DNA, 1125 bp, Streptococcus pneumoniae
  misc_feature (1)..(1125): tiling:Spneumo1:WAN024CKG; Cluster includes WAN0242ZE SP03 53||15900282|NP_344886.1|326936..328054|+|1119 bp|capsular polysaccharide biosynthesis protein Cps4H|S.pneumoniae|TI GR4|NC_003028.1|ORF|010
atgattaaagtattacatctatttacaacactagatagtggtggagtagaaagttttctattcaactattattctcacattgatagaaaaaaaattcaatttgattttattgtgcctggaaaagaacaaggatttttagaggataaaatgaaagaattgggtgcaaaggtttatcatgtgcctctattaaggaaaaagcctctacatcagtttctctctcttgctagaataataaagaaaggagattatgatatagttcattgccatggctataaatctgcaattggtctgatcttatctaaaataattggttgtaaaattagaattattcatagtcatatggcttatgtaacagaaaacagttttcaaaaagtattgcgtaaattagtaacaattttggtaaaaatcttagcaactcattggtttgcatgtggggaagattcggctaagtggttatatggagagaaagcgtataaagacggaaaaattgaaattatttttaatgcaattgatttgaaaaagtatcaatttttgtcagatgttagagaaaaatgtcgtagagaattagatgtgtcaaataagttcgtattaggaaatatagctcgcctatcagatcaaaaaaaccaaagttatttatttaacgttttaaaagaactcattttaatcaaaccaaatgttattttactcctagttggtaatggtgaggatgagcagaaattaaaacagaaagctttagaactaaatctgaccccatatgtgctatttttagggagaaggactgatatttctgatttattatctgcgatggatgtttttttgcttccgtctaaatatgaggggttgcctgtttctctagtagaggctcaggcatcgggattacaaattttatcgtcagatacagtgacgcaagaagtagatgtgaccaaaaacattagttacttacctatcaacgaagagtctgtgttgctatggaaagataaagtactgtctttaacatctgaggaatgcaatcgttttgaaataaataacagtatgacagatggactctatgatatttgttatcaagctagtaaattattgaatcgttatcaagaaatgtgtgtaataaaggagatactarctaat

SEQ ID NO: 1781 - DNA, 554 bp, Streptococcus pneumoniae
  misc_feature (1)..(554): tiling:Spneumo1:WAN024CXT; Cluster includes WAN02439M spr2 011||15904052|NP_359602.1|2004669..2005217|-|549 bp|Conser ved hypothetical protein|S.pneumoniae|R6|NC_003098.1|ORF|1 11
atgattaaatatagtatccgtggtgaaaacctagaagtaacagaagcaattcgtgattatgtagtttctaaactcgaaaagatcgaaaagtacttccaaccagaacaagagttggatgcccgaattaacttaaaagtttatcgtgaaaaaacggctaaagtggaagtaacgattccgcttggatctattactctccgcgcagaagatgtatctcaagatatgtatggttcaattgaccttgtaactgataaaattgaacgtcagattcgtaaaaataaaacaaaaatcgagcgtaaaaataaaaataaggtagcaactggtcaattatttacagatgctttggtggaagattcaaatrttgtccagtctaaagttgttcgttcaaaacaaattgatttaaaaccaatggatttggaagaagcaattctacaaatggatttattggggcatgatttctttatytatgtggatgttgaagatcagacaaccaatgtgatttatcgtcgtgaggatggcgaaattggtttgttagaggttaaagaatcttaactaat

SEQ ID NO: 1782 - DNA, 1257 bp, Streptococcus pneumoniae
  misc_feature (1)..(1257): tiling:Spneumo1:WAN024FKK; Cluster includes WAN023OMC pne8 3_12||||10521..11777|+|1257 bp|Type 41F2 capsule operon, G limmer 2.02 orf prediction|S.pneumoniae||WAN01UCDZ|ORF|000
atgattaaatttaattattctaaattagcattaatttaccagtttataataattttttttctgggtgcttggtataagaatagcattcagtttaaaatttttttgatatctattgatactatcatttctttattttatttatataaaaataatttatctagaagtgacttaaaaaaagtttatatcttgataactacagtgttagtaagcttatttttaccatcgtttatgaatagagtatcttttatacttctcatattgcaaaaattatatatatttaaccatattattaatgatataaagtttgaatatttgctctcagtctttctacaatttattgtactactaaccttttgtatgggattagaattcatttcattaggacaatttaatccgtttaaaacattttatgcaccaagagttcttcttgatatgagttttaaagtcggaacacctttatattttttgagatcaagtttagagcatcctctaataacttcgattrtattagtagttactggccctttcttattccttttagaaaagaaatggttgagatatgtatgtgtgtttctaaatattagtttaatcttttttattcagaagagaactgcgtatatattggtatcgattggagttgtatgttttgctttgtattatctaaaatatattaatcgtagatttcaattgaataaaataacttcagtgatatttttaatgacactatttataattgctttatcctttataagggtgcaaggtgattatgtattaaatattatttttagtaaattttctgctttacaagatgcagatagtttctcgctaaataatcgtgtaattaatgctaaaactggattagatgtaattttcgatcaaaatgttataaatatattcattgggaatggatatgactttttacctaatttttttgaacaatacaatgtgtatgtaattcggaatggtttttatgtgattgacaatacatatatttcatttcttgccgactatggaatgattggtctgttcttagtattgttatatattataaatgcgatccgaaaaagtatgactaatatttacaaaataaagagtaaaaaagaacaattatttatgttgtatagtattataggtattatcaatttratggtatcaatagctttttttgatatatatgcttggtacacgcyattaacgttattgatttttttaatatcagtagtgacttcttattgtaaatttcattccaataagttt

SEQ ID NO: 1783 - DNA, 476 bp, Streptococcus pneumoniae
  misc_feature (1)..(476): tiling:Spneumo1:WAN024D7O; Cluster includes WAN0243QO spr1 395|ssbA|15903438|NP_358988.1|1374841..1375311|-|471 bp|Si ngle stranded binding protein|S.pneumoniae|R6|NC_003098.1| ORF|111
atgattaacaatgttgtacttgtagggcgtatgacacgtgacgctgarttgcgttataccccatcaaatgtagcagttgcgacttttactcttgcagtaaaccgtacatttaagagtcaaaatggtgaacgtgaggctgattttatcaatgtcgttatgtggcgccaacaggctgaaaatcttgctaactgggctaaaaaaggctcacttatcggggtgacaggtcgtatccagactcgtagttacgataaccagcaaggacaacgtgtctacgtgacagaggtcgtggctgaraatttccaaatgttggaaagccgtagtgtgcgtgagggycacacaggtggagcttactctgcaccaactgcaaactattcagcacctacaaattcagtaccagacttttcacgtaatgaaaatccatttggagcaacaaacccattggatatttcagatgatgatttaccattctaactaat

SEQ ID NO: 1784 - DNA, 132 bp, Streptococcus pneumoniae
  misc_feature (1)..(132): tiling:Spneumo1:WAN024AJQ; Cluster includes WAN024EM8 R6.I G_607||||600016..600132|+|117 bp|Between spr0583 (+ strand ) and spr0584 (glcK) (+ strand)|S.pneumoniae|R6|NC_003098. 1|IG|110
atgattaacagatactggtaggcgaaaaaaattccttataattcaytyacgcaaacctttgcataagtgaatgrattttgatatactagtactgtaagcattttcaattactacacaatgaaaaaggagaat

SEQ ID NO: 1785 - DNA, 174 bp, Streptococcus pneumoniae
  misc_feature (1)..(174): tiling:Spneumo1:WAN024DAT; Cluster includes WAN02440V spr1 027||15903071|NP_358621.1|1008187..1008360|-|174 bp|Hypoth etical protein|S.pneumoniae|R6|NC_003098.1|ORF|100
atgattaagatatattttaccaaattttcagaaaataacaaccctttttgcaaaatttttgagattattttcacaagcttgatttttcaaagtatactcaataaaaataaaaaaatccactacgtcaaggcgaggctaatgtggtttgaagaaattttcgaagagcgtgaatga

SEQ ID NO: 1786 - DNA, 261 bp, Streptococcus pneumoniae
  misc_feature (1)..(261): tiling:Spneumo1:WAN024FTI; Cluster includes WAN023L7J 3142 05_2300||||1234469..1234729|-|261 bp|EGAD orf prediction|S .pneumoniae|R6|NC_003098.1|ORF|111
atgattaagattggtaatcaaaaatatatagggaggaatgttttgaataagaaatataayatagttctattwttgttgtttatagtttatttattkggatatttttcaatttcaaaaacgttaattcctataatgtgtgtgwtccaagtatttttgatagaacatatatttagagttcgaaatagaatgatgcarataggtgaaattwtaattattgttgcttctataatattatttattgatagtatattgagtttgtaa

SEQ ID NO: 1787 - DNA, 750 bp, Streptococcus pneumoniae
  misc_feature (1)..(750): tiling:Spneumo1:WAN024D8I; Cluster includes WAN0243SX spr1 314|ABC-NDB|15903357|NP_358907.1|1303465..1304208|-|744 bp |ABC transporter ATP-binding protein - aspartate/glutamate transport|S.pneumoniae|R6|NC_003098.1|ORF|110
atgattaagatttcgaatttaagcaaatccttttcaggacagactgtcttggatcatctggacttggatattcaaaaaggggaagttgtagccttgattggttcttcaggagctggaaaatcaacctttcttcgcagtctcaattatctwgaaacacctgacagtggctctattcagattgatggtttttcagttgatttttctaaaatyactcaagaagaaatccttgccctacgycgtaagttgtctatggttttccaacagtttaatttrtttgaacgccgaacagcacttgataatgtgaaagaaggcttggttgttgtcaagaaattatctgaccaagaagcgactaagattgccaaggaagagttggctaaggttgggctttcggaccgtgaaaaccattatcctcgccatttatcaggtggacagaagcaacgggttgccctagcgcgtgcgcttgctatgaaaccagatgttttgctyttagacgaaccaacttcagcccttgacccagaattggtcggtgaagtagaaaagtctattgcagatgctgctaagtcaggtcagaccatgattttggtcagtcatgacatgycctttgtagcccaagttgcggataarattctcttcttagataaggggaaaatcatcgagtctggaactccggatgagattatccacacccctaaagaagagcggacaaaagaattyttcgctagttacaaacggacttatattykaactaat

SEQ ID NO: 1788 - DNA, 308 bp, Streptococcus pneumoniae
  misc_feature (1)..(308): tiling:Spneumo1:WAN024BGT; Cluster includes WAN0243ZF spr1 080||15903123|NP_358673.1|1076140..1076442|-|303 bp|Hypoth etical protein|S.pneumoniae|R6|NC_003098.1|ORF|112
atgattaamattcttgctgcctgcggtgcaggtgttaactcaagtcaccaaattaaaagtgctctagaagaagaactttcaaaccgtggttaygatgttcactgtgatgcagtyatggtgaaagatgtaaacgaagaccttatgaaaggttacgatatctttacaccaatcsctgcaacagayyttggttttgaaccaggtatcccagttatcgaagctgggccaatcttattcygtatmccagcaatgagcgytccagtatytgacaatattagactycctgcgaaacaaaayatggtatarctaat

SEQ ID NO: 1789 - DNA, 1113 bp, Streptococcus pneumoniae
  misc_feature (1)..(1113): tiling:Spneumo1:WAN024CKT; Cluster includes WAN02434C SP01 66||15900104|NP_344708.1|161162..162268|+|1107 bp|pyridoxa l-dependent decarboxylase, Orn/Lys/Arg family|S.pneumoniae |TIGR4|NC_003028.1|ORF|010
atgattaataaaaaaatacaacaagttgttttggaatcattacagaattttttgaatgggaacttcatttcgccttgtgtagtctatgattttggcttgctggaaactgtacttgatgaatttaaaaatcaaattcctgtaacattcaattaccaacttttttatgccgttaaagcaaattcaaatgagaagatacttgaattcttagtagataaaattgatggagttgatgtggcgtcattatctgaattagatgtggctaaaaaatttttcccaccaactcaaatttctgttaatggtcccgcattttcttatgaaactttatataatctgattaaaaaacaatataaagttgatattaactttttggaacatcttcaacaattttccccaaaagaatctgttggaataagagtaacggagccagatgaacttaataatcgtatgagtcgatttggaataaatatttgcagtgataattggactagtaatttacaaaatcctttaattacacgactgcattttcattttggagaaaaagatgataaatttattgttaagttagataaaatattatttaagttacaagaaattaataaacttagagaggttagagaaataaatcttggaggcggttttatgaaattatttatggaaaatcgtttgaaagaattttttctatcacttatggaaatctataaaaagtacgatattgatagtactgtgactacaataatagaaccaggtagtgcaattacttcattttctgcctatatgattactagcccagttaatgttagtgaggtgaatgagcagcaggttatcacgttagacacatcaatatacaccaatacattatggtttgttccgcatattattacaacgttaaattcaagtagtaaagagcgttatagtactattctctatggtaatacctgttatgaacatgacaagtataaaatgaaagtttcgcttccaaggttaactcaaaatagcagtatagtgttttttcctgtaggagcttatataaaaagcaatcattcaaatttacatcgtaatgattttatgcgggaggtatatttgtggacaaaaaacttgacatatctarctaat

SEQ ID NO: 1790 - DNA, 1221 bp, Streptococcus pneumoniae
  misc_feature (1)..(1221): tiling:Spneumo1:WAN024FPD; Cluster includes WAN023POK pne2 4_16||||14352..15572|+|1221 bp|Type 12B capsule operon, Gl immer 2.02 orf prediction|S.pneumoniae||WAN01UCJ2|ORF|000
atgattaatgtaatcggattaggttatattggattgccaacaattttaatgttggcaacaaacggcgtgaaagtagttggaactgactacaatcaggatttggtgagaactttaaatgaaggtcaaacaacctttaaagaagatggattggatgaactattycataaagcagtggagtcgggtgtggactttacaaccgaatatcaacaaacggatacctatattatttccgttccaacaccatatgactccttctctaaaaaaattgatccaagctatgtgattgaagctacgaaaacggtacttgataattgcaataaaggagcggttattattattgaatcgaccgtatcaccaggaacggttgataaatttattcgacctgttgtagaagaaaaaggttttgttattggtagtgatattcatcttgtccatgctccagaacgtattattccagggaatatggtctatgaattggtgaataataaccgtacaattggagctgatgacctagaaatcggctataaagtgaaagagctttatgcttcattttgtaagggcgatattgttgttacagatattagaactgcggagatgaccaaggtagtagaaaatacatttagagctgtaaatattgctttcgctaacgaattagcacagatctgtagttatgataatatgaatgtttatgaaattatccggatctgtaatatgcacccacgggtaaatattctacaacctggacctggtgttggtgggcattgtatttctgtggatccttggttcttagttggagattatcctgagttgacaaatgttattgaacattctatgcgaacaaatgctgccatgccagaatttgtattaaatcgtatctataccattatgaacgaacatcatctaacagatattagtcgggttggtctatatggtcttacctacaaagagaatgtagatgatatgcgtgaatctccaacgcttcagttattagaatctatgagccgccatctggcaacacctgctattaaagtatatgatccatttatagaaaaagatgttgtggcgaatcagtcacatgatttagatgaatttttatctaatgttgatattgttgtactgttggttggtcatgatgagattttacaaaatatggataaactaaaagataagatagtgttagatacacgttatatctgtcatcttgatggaacttacagatta

SEQ ID NO: 1791 - DNA, 1229 bp, Streptococcus pneumoniae
  misc_feature (1)..(1229): tiling:Spneumo1:WAN024GM2; Cluster includes WAN0244HQ spr0 420|xylR|15902464|NP_358014.1|417068..418291|-|1224 bp|Xyl ose repressor protein|S.pneumoniae|R6|NC_003098.1|ORF|110
atgattacaaaacaatcagcctttttacaaaatagagccactatactggagtttctatatcgaaatccagcaacatcccgtacagatattgktaatgaaacaggacttactccagcaacaacgactaacatcataaaagagctaagcgaacagtccctcatatacgaaactggtgatgaatttagcgagttttccggatctggaagacgtagaaaaactatttctatcacagataatattccgtatgttgttggaggtattgaaataaacgtcctaggtatctttctcagtctatgtgacttacaagggaaaactcttttcgagacagaaattttgaatgaagattatcctatttcagaaatcaattccaccattaccaatatgataaaaacagctatagagtacgtccctttggaaacaaaattacttggatttggcttatcaatacctggacattataacaaagactccggaagtatcattacaaacaaccccatatgggaatcttttaatttattaaatgtaattaaaagattcaattttccttttattgtaaaaaataatatcgattgtatggctataggacaatacctttttaatccacacaatacccccgataactttattttcctacacgctggattaggtatttacacttcctttttcacaaaagaaaaaataggagcctctaaaaatccttatatcggagaaattggacacaccattgtcgaattgaatgggcaatattgtgaatgcggaaaaaaaggttgtttacaaacatatatttcggatgcttggttaatcaaacacgcccaattattatttaaaaattcccaactaactgtactaaaaagccttgtaaagactgaaaaagacattcatttagayacccttttaacrgcttayaayttaggcgactccgctttacgycaacaaattgataaaggagtcaatttattrgccacttctattgcaaatctyctcctcatcaatcctgctgataaaatctatatcaacagtcaattgcttaattatcaacctttcactcatgaagtcagggataaaatccaagaycagctccacttcgttccytttactcgtaatatagaaattgaaattttaccttacaacaaacatcgtggaagtataggagcttgtgcattagctatcgtcgcttttttcatagaacatagcaatgtattacaagatattatttcaccttaactaat

SEQ ID NO: 1792 - DNA, 647 bp, Streptococcus pneumoniae
  misc_feature (1)..(647): tiling:Spneumo1:WAN024GB7; Cluster includes WAN02448F spr0 755||15902799|NP_358349.1|749110..749751|-|642 bp|Conserve d hypothetical protein|S.pneumoniae|R6|NC_003098.1|ORF|211
atgattacaatagttttattaatcctagcctatctgctgggttcgattccatctggtctctggattggacaagtattctttcaaatcaatctacgcgagcatggttctggtaacactggaacgaccaayaccttccgcattttaggtaagaaagctggtatggcaacctttgtgattgactttttcaaaggaaccctagcaacgctgcttccgattatttttcatctacaaggcgtttctcctctcatctttggacttttggctgttatcggccataccttccctatmtttgcaggatttaaaggtggtaaggctgtcgcaaccagtgctggagtgattttcggatttgcgcctatcttctgtctctaccttgcgattatcttctttggagctctctatcttggcagtatgatttcactgtctagtgtcacagcatcgatygcggctgttatcggggttctgctctttccactttttggttttatcctgagtaactatgactytctcttcatcgctattatcttagcacttgctagtttgattatcattcgtcataaggacaatatagctcgtatcaaaaataaaactgaaaatttggtcccttggggattgaacctaacccatcaagatcctaaaaaataactaat

SEQ ID NO: 1793 - DNA, 1374 bp, Streptococcus pneumoniae
  misc_feature (1)..(1374): tiling:Spneumo1:WAN024AWI; Cluster includes WAN0246TS 3520 36-53-4||||||1374 bp|DNA Streptococcus pneumoniae strain 0 100993 GTP-binding protein thdF|S.pneumoniae||WAN0246TS|OR F|101
atgattacacgtgaatttgataccatcgctgctatctctactccactaggtgaaggrgctattggtattgtccgcctgagcggaacagacagttttgctattgygcaaaagatttttaaaggaaaagacttgaacaaggttgccagccacactctcaactacggtcacattattgatcctctgactggtaaagtcatggacgaggttatggttggggctatgaagtctccaaagaccttcactcgtgaggatattatcgagattaacacccacggtggkattgcggtgaccaatgarattctccagctagctatycgtgaaggrgctcggttggcagaacctggtgaatttaccaaacgtgcytttttaaacggtcgcgtagayttgacacaggcmgaggckgtgatggatatcatccgygccaagacwgacaaggccatgaacatygcggtcaaacaaytwgayggytccctttctgayctyatyaayaatayccgtcaagaaatcctyaatacacttgcccaagttgaggtcaatatcgactatcctgartatgaygatgttgaggaagcyactactgcygttgtccgwgagaagacwatggagtttgagcaattrctaaccaakctycttagracagcmcgtcgyggyaaaatccttcgtgaaggaatttcaacrgctatcatyggacgtcccaacgttgggaaatcmagccttctcaacaacctcttgcgtgaggacaaggctatcgtaacmgatatcgctgggacaacacgagatgtcatcgaagagtacgtcaacatcaatggtgtwcctctmaaattgattgayacagcyggtattcgtgaaacrgatgayatmgtkgaacaaatcggtgttgagcgttcgaaaaaagccctcaargaagccracttggttctactagtgctaaatgccagtgaacmactgactgcgcaagacagacaacttcttgaaattagccaagataccaatcgcattattctacttaataaaaccgacctgccagaaacgattgaaacttcgaaactacctgaagacgttatccgtatttcagtccttaaaaaccaaaacatcgacaagattgaagagcgaatcaacaacctcttctttgaaaatgctggcttggtcgagcaagatgctacttacttgtcaaacgcccgtcacatttccctgattgaaaaagcagttgaaagcctacaagccgttaatcaaggtcttgagctggggatgccagttgatttgcttcaagttgacttgactcgtacttgggaaatcctcggagaaatcactggggatgctgctccagatgaactcatcacccaactctttagccaattctgtttaggaaaataa

SEQ ID NO: 1794 - DNA, 407 bp, Streptococcus pneumoniae
  misc_feature (1)..(407): tiling:Spneumo1:WAN024FSD; Cluster includes WAN0243UD spr1 262||15903305|NP_358855.1|1259426..1259827|-|402 bp|Conser ved hypothetical protein|S.pneumoniae|R6|NC_003098.1|ORF|1 11
atgattacactatttctatcaccgagctgtacatcatgtcgtaaggctaaggcctggttagaaaaacataaggttccctttgtggaacacaatattatgaccagtcctttaacaagaaaagaattgcaacacatcctttccttgaccgaaaatggtactgatgacatcatttcaactcgttcaaaaatttttcaaaaattgaatattgatgtagagagtatttcggtatcggaattgcttcatttgattgagcagtatcctagtcttttgcgtcgtccaattattattgatgccaagcgtatgcaaatcggttttaatgaagatgagattcgtgcttttctccctcgtagttatcgtaagcaagaactaaaagaagcaagaatgagagctggtattagttaactaat

SEQ ID NO: 1795 - DNA, 1499 bp, Streptococcus pneumoniae
  misc_feature (1)..(1499): tiling:Spneumo1:WAN024DE8; Cluster includes WAN02447G spr0 790|hsdM|15902834|NP_358384.1|786755..788248|+|1494 bp|Typ e I restriction modification enzyme methylase subunit|S.pn eumoniae|R6|NC_003098.1|ORF|111
atgattacaggcgaattaaaaaataaaatcgaycagctgtgggaaattctttggacagaaggaaacgcaaatcctttaacaaatattgaacagttgacttatctcttatttatgaaagatttggatagtgtcgagcttggacgtgaaagtgatgctgaatttctagggattccttatgagggagtttttccaaaagataaacctgaayaccgttggtcaacttttaaaaatataggagatgctcaggaagtttatcgtttaatgactcaggagatttttccgtttattaaaaatctcaagggggatacagatgatacagccttttcacgatatatgcgagaagctatttttcaaataaataaacctgctacgcttcaaaaggcaatttctatcttagatgtttttccaactaggggattagatgtagattttgataatgacaaacaaagtattactgatatcggagatatctatgaatatctgttatcaaaattgtcgaccgcaggtaaaaatggacagttccgtacacctcgtcacatcatcgatatgatggttgagttgatgcaaccgactatcaaagatatcatctcagatcccgctatgggttctgctggcttcttagtatctgctagccgttacttaaagcgtaagaaagatgaatgggaaaccaatacagataatatcaatcattttcataatcagatgtttcrtggaaatgatacggatacgactatgttgagacttggggcgatgaacatgatgctacatggagtagaaaatccacaaatcagttaccttgactcgctgtctcaagataatgaagaagcygataaatatactttggttttagcaaatcctccttttaagggctcacttgactacaattcaacctctaatgaccttcttgcaaccgtaaaaaccaaaaaamcagaattactctttctttctcttttcttgcgaactttaaaaccaggtggacgagcagcagttatcgtacctgatggtgtcctttttggttcgtctaaagctcataaaggaattcgtcaggaaattgtagagaatcataagcttgatgctgtaatctcaatgcctagtggtgtgttcaagccttatgctggagtttcaactgccattctcatctttacaaaaactggtaatggtggtactgacaaagtctggttttacgatatgaaagcggatggtttaagtttggatgataagcgacaaccgattagmgacaatgatattccagatattatcgaacgctttcatcatcttgaaaaagaagcagaacgtcagagaacggatcaatctttctttgttccagttgctgagataaaggaaaatgattatgatttgtctatcaataaatataaagagattgagtatgaaaaagttgagtatgaaccaacagargtcatmttaaagaaaatcaatgatttagaaaaagaaattcaagctggcttggctgaattrgaaaaattactcaagtarctaat

SEQ ID NO: 1796 - DNA, 258 bp, Streptococcus pneumoniae
  misc_feature (1)..(258): tiling:Spneumo1:WAN024C9O; Cluster includes WAN023M98 3143 92_367||||196582..196839|-|258 bp|EGAD orf prediction|S.pn eumoniae|R6|NC_003098.1|ORF|110
atgattacatcaaacacaactgattcatttggttcgataccaaatactgcatcgctaagaacaacttggccagcttctttaccagtttggtcaaataatgttacgtttgccattgtgactgatttcccctttctttattatttaccagctttaactgctgatttgatagtgataagagatttcttagcacctggtacgttacctttgataaggataacgttcttttctggaacaacttgtacaacttcaaggttttga

SEQ ID NO: 1797 - DNA, 660 bp, Streptococcus pneumoniae
  misc_feature (1)..(660): tiling:Spneumo1:WAN024BHY; Cluster includes WAN023PR3 pne1 7_10||||5127..5759|+|633 bp|Type 10A capsule operon, Glimm er 2.02 orf prediction|S.pneumoniae||WAN01UCJH|ORF|000
atgattaccatgagaggagagtttaaggtgawacagaatggyatyatytatattkgctttaaaagrrttatggatgtttttatyggyttatttggracaatattcatmrtcttrcctagttcyttaatratttatattatytataaaataaaaggttacaaaggaartatattcttcacacaatatagagtggggytraaggggaaaaaatttaaaattattaaatttagatcaatggttgaaaatgctgaagaasttttgrccgcaaataargcactctatgaaaaatatataaataacagttayaaattacctccaaatgaggatcctcgtcttacyaatatcggagattttatmagraaaacragyattgatgaaattcctcaatttataaayttrwtgytaggtgatatgagycttattggacctagaccrattttggagaatgagttagaggagtattctaaggaagaacagcmagttttrytatctgtacgrccaggtattacrgggatgtggcaagtttctggtaggagtgaggtatattatcctgaacgctgtgaaatggarctgtaytaycctcgraaycaatcctttttgttggatgthaaaatcttctttttgacaatmaaaaaagttctrtctggagaaggggctcat

SEQ ID NO: 1798 - DNA, 417 bp, Streptococcus pneumoniae
  misc_feature (1)..(417): tiling:Spneumo1:WAN024AWS; Cluster includes WAN0244MT spr0 237||15902281|NP_357831.1|230671..231087|+|417 bp|Conserve d hypothetical protein|S.pneumoniae|R6|NC_003098.1|ORF|101
atgattactattaaaaagcaagaaattgtcaagctagaggatgttttacatctctatcaggctgtcggttggacaaattatacccatcaaccagagatgctggagcaggccttatctcattcattagtaatttatctggcacttgatggtgatgctgtggtgggcttgattcgtttggttggagatggattctcatcagtattggttcaggatttaatcgttttaccaatctatcagcgtcaaggaattggtagtgccttgatgaaagaggctttagaggattacaaagatgcctatcaagtccagctggtgacagaagagacagaaagaaccttgggcttctatcgttctatgggctttgaaatcttatccacctataattgtatagggatgacttggatgaatcgtaaaaaataa

SEQ ID NO: 1799 - DNA, 423 bp, Streptococcus pneumoniae
  misc_feature (1)..(423): tiling:Spneumo1:WAN024AWT; Cluster includes WAN02431X SP02 56||15900191|NP_344795.1|228154..228570|+|417 bp|acetyltra nsferase, GNAT family|S.pneumoniae|TIGR4|NC_003028.1|ORF|0 10
atgattactattaaaaagcaagaaattgtcaagctagaggatgttttgcatctctatcaggctgtcggttggacaaactatacccatcaaacagagatgctggagcaggccttatctcattcattagtaatttatctggcacttgatggtgatgctgtggtgggcttgattcgtttggttggagatggtttttcatcagtttttgtacaggatttgattgttttgyctagctatcagcgycaagggattggtagctccttgatgaaasaggctttaggaaattttaaagaggcctatcaagtccagctggcgacagaasagacagaaaaaaacgtgggatttwatcgttctatgggctttgaaatyttatccacctatraytgkayaggratgayttggatraaymgwraaaaactaactaat

SEQ ID NO: 1800 - DNA, 1341 bp, Streptococcus pneumoniae
  misc_feature (1)..(1341): tiling:Spneumo1:WAN024FOL; Cluster includes WAN023PJH pne3 2_16||||13790..15130|+|1341 bp|Type 16F capsule operon, Gl immer 2.02 orf prediction|S.pneumoniae||WAN01UCIC|ORF|000
atgattactgttccartttttactagaktattgacaacggaacaatatggtgtatactctgtatatcaatcatggtattcaataattggagtttttgcaacactaaacctatattatggagtctttaataatggaatgrttaaatacgagaaagataaaaatgyctttacttcctctatgcagggactaacaacaacagttacagctatatttttastgatatatttaatagggattgatttttggaactcgttgttaggcttacctacrctactaatcttagtgatgttctttgatttgttttttacycctgcttattctttttgggytrckcgtcagagatttgaatatmaatatmgaaacttagtatttatcacayttattatagcgattggaagycctattattggtatttctkcagttgttttatcgacttataaagcggaggctagagttatctcatttgtgttagttcaatcttgtataggrttatatttctatrttttgaacctttaccgaggtaaayattttttttgtaaaaaatattggctctatgctttgaattttaatttacctcttattcctcattatttatcgcaatcagttttaaaycaatcggatagaataatgattaattcaatggtaggaatgggagaagcagcwatwtatagtgttgcttacagcatatcaaytttgatgsttttagtgacaagtgctataaacagctcttttattccttacacatataagtgtattcgagataagaaatatactgaactagggaaaagtgcaaatcttttaattactctggtaggcattggttcgattttaactatttctcttggaccagaaatcattcaattatttgcaccaaaacaatattacgaagcaatatggattattcctccwgttgctctktcagtatatttcatgttcttatatcccatttttggtaacattgagttttactttgaagcaaatcattttgtaatgtgggcttcaatmggtggagcaattatgaatatttttttgaattttatttttwtaaaacactttggmtatattgcggcaggctatacaactttattmtgttatattttatttgcrttgggacattacatttttatgagragagyaytgtatcagaatctttcgggtatccaaatttatrattcymgatatattttmtttttttcgwttcttcttmtkattctaatgctactaatcgtgaytatttatccatttrtrytgattcgttatmttrctatctcactcatcctaggaggatgttttttaaagaggaraaagataatgagttcgatagyyatsatwaaamaacag

SEQ ID NO: 1801 - DNA, 135 bp, Streptococcus pneumoniae
  misc_feature (1)..(135): tiling:Spneumo1:WAN024CL9; Cluster includes WAN023R3H cont ig_1455_3||||1383..1508|+|126 bp|Glimmer 2.02 orf predicti on|S.pneumoniae|670|WAN01UDT2|ORF|000
atgattagttcaactttaaaaattcatcccaatagtctttatcgatggattcaagaatatgaaaaatatgaagaaagtgcgttcccaggacatgggagcgcacttcgtcatactcaatttgagatactaactaat

SEQ ID NO: 1802 - DNA, 515 bp, Streptococcus pneumoniae
  misc_feature (1)..(515): tiling:Spneumo1:WAN024DHE; Cluster includes WAN0244FA spr0 508||15902552|NP_358102.1|506633..507142|+|510 bp|Conserve d hypothetical protein|S.pneumoniae|R6|NC_003098.1|ORF|111
atgattakaaaagtagaaatggcagatgttgaggtgttggctaaaattgccaaacaarcctttcgtgaaacctttgcrtatgataatacggaagagcagttacaggaatactttgaagaggcttatagtctgaaaactttgtcaactgagttgggaaatcctgactctgaaacctatttcattatgcatgaggaggagatagctggttttctcaaagtcaactggggaagtgctcaaactgagagagaattagaggacgcttttgaaattcaacgyctctatgtgctacaaaaattccaaggatttggactaggtaagcaactgtttgaattcgcacttgaacttgctacaaaaaatagtttttcttgggcttggytaggtgtttgggagcataatacaaaagctcaagcsttttataaycgatatggttttgaaaaatttagccaacatcattttatggttggtcaaaaagtagatacggattggttactgagaaagaaattaaggtaactaat

SEQ ID NO: 1803 - DNA, 696 bp, Streptococcus pneumoniae
  misc_feature (1)..(696): tiling:Spneumo1:WAN024FLK; Cluster includes WAN023OVA pne7 0_15||||13084..13779|+|696 bp|Type 32F1 capsule operon, Gl immer 2.02 orf prediction|S.pneumoniae||WAN01UCC2|ORF|000
atgattatagaagctataggtttacctggaagcggaaaaacgtttttattccatgagcttgaaaaagaatttcggagtaattcaatcagaacttataattttactgaattatcacggaataatatttcagtcaaaattgttgtaaaattattgctaaagtttgtatcgttgaaatatatttgtaaaaaatggaaaaaagaattatacgatattctttctgaagagcttccgtatgagagtaaatttgatttatatgaaaatccagattattgtgtgaattatgcgcttatgcttctctttatctatagattatttcaaaatagtaaaattgtattattactagatgagggaatgtatcataatattgtgaaattatgtgctgactttgatttttcaatcagactatcaaataagttaattgaaaaatgtgtattgttaagtagattaaatgatagtaagcatatagttatttacaatatttttccaatttctgagacactattgtctattgaaaaacgtaatcgacatgtgtctaaatttgatgaactagaaactacccagttgagcaagatattagataactacgataaactaaataatgcaatctataataatgacaaaaaacagataatatcagtttttagaaaggattttattgaaaagaatatttcttatataaaacaaaatttaaatatt

SEQ ID NO: 1804 - DNA, 843 bp, Streptococcus pneumoniae
  misc_feature (1)..(843): tiling:Spneumo1:WAN024C4G; Cluster includes WAN023Q1J cont ig_1216_7||||5220..6062|+|843 bp|Glimmer 2.02 orf predicti on|S.pneumoniae|670|WAN01UEKW|ORF|000
atgattatgaatacacatataaatggtattagtaaaaaaggcaaagttcttatatatggttatatgctccttaccattttaatttctattttccctattgcgtggatttttttatcatcattaaaagcagatcctatgaaaaatccaggtattagtttaccgactgactttactcttgaaggttatataaatgtttttacaaaacttcatgttttcacttacttttggaatagctttaaagtagtgtctatatcagttattattagcattgttatgatctccatgtcttcatatgttattgctaggatggaatttagagggaagaagttggtgacttctatgctgtattctactctatttattccagcaacagctatgacttttccagtttatagattagtaaatgagttggggatttataataccccagttgctctaattctggtctactcttgtagtggaattgctatgagtttctttattataaagaactattttgaaattattccaaaagaattggaggaggcagcagagattgatggtgcgacatatgctcaaactttttggaaagtgatgttrccaattgctagaccaggaattttaacagcagcagtacttgcctttattaataactggaatgaatattattgggcatctatgttggtgattgataaaaatgaattaacagtaccagcattaytaggtcaatttactacaagttttaatactaattataatggtctattttcagctattgttgtaatcgtattaccaccaatcattctattcgcatttacaagtaaatacttcattgaagctttaggaggaggagcagtaaaagga

SEQ ID NO: 1805 - DNA, 762 bp, Streptococcus pneumoniae
  misc_feature (1)..(762): tiling:Spneumo1:WAN024FE9; Cluster includes WAN0243LC spr1 588||15903630|NP_359180.1|1568307..1569053|-|747 bp|Conser ved hypothetical protein|S.pneumoniae|R6|NC_003098.1|ORF|1 11
atgattatggcgacttatgaaacctttgcggcggtctatgatgcggtcatggacgatagtttatacgacaaatggacraatttttctctgcgtcatttgcctaagaccaaggagaraaagaaactcttggaaytggcttgtgggacaggaattcaatcagtgcgcttytctcaggctggttttgatgtgactggacttgacttgagtgcggatatgttgaagattgcggagaagagagcaacttcagccaagcaaaagattrcttttatagaaggtaatatgctraatttgtccaakgcagggaaatacgattttgtcacgtgttattcggactctatctgctatatgcaggatgaggtggaagtaggggacgtctttaaggacgtgtacaatgcgctgaatgaagagggagttttcatctttgacgtgcactcgacctaccagacagatgaagtattccctggctattcctaccatgaaaatgcggaagattttkccatgctttgggatacatatgaggacgaagytcctcactccatcgtgcatgagctgactttctttatcaaggaggctgacggttcctttagtcgycaygatgaagtacatgaggagaggacctatgagatcttgacctatgakatcttgctggaacaggctggattyaagtccttcaaactctatgcagactttgaggataaggagccaacagaaactagcacccgttggttttttgtggcgcagaagtarswrawcatcatgacc

SEQ ID NO: 1806 - DNA, 458 bp, Streptococcus pneumoniae
  misc_feature (1)..(458): tiling:Spneumo1:WAN024D5X; Cluster includes WAN0243MS spr1 535||15903578|NP_359128.1|1513477..1513929|-|453 bp|Hypoth etical protein|S.pneumoniae|R6|NC_003098.1|ORF|111
atgattattacaaaaattagccgtttaggaacttatgtgggagtaaatccacattttgcaacattaatagattttctagaaaaaacaggactagaaaatttaacagaaggttcgattgctatcgatggtaatcgattgtttgggaattgctttactwatctagcagatggtcaagcaggggctttctttgaaacmcaccaaaaatatttggatattcatttagttttggaaaacgaagaagccatggctgttacatcgccggaaaatgtaagcgttacccaagaatatgatgaagagaaagatattgaattatacacagggaaagtggaacagttggttcatttgagagctggygaatgcctcatcacttttccagaagatttacatcaacccaaggttcgtataaatgatgaacctgtgaaaaaagttgtctttaaagttgcgatttcttaactaat

SEQ ID NO: 1807 - DNA, 447 bp, Streptococcus pneumoniae
  misc_feature (1)..(447): tiling:Spneumo1:WAN024CIF; Cluster includes WAN0241Z1 SP17 60||15901591|NP_346195.1|1662001..1662441|-|441 bp|conserv ed domain protein|S.pneumoniae|TIGR4|NC_003028.1|ORF|011
atgattattacacagagacagtctattcattggggagaagttggtgggacttatatgtatggaacaactgtatcttattaccctgacaaaagtgttcgtctgtataatcctctattgccatctggtgagattctaaagacttggttttctagtgtcaattaccaggctgcacgaacccaacctcagcttcccttattaaaaagaaagcaggagtatcaactatcactggtttttgaytgtcagcctgaaaatggagtttataccaagataactttttttgaccgctatggtgatattttagaaaaaaaggtagaaaaagygaaagatttcatatttacttatccagaagatagttatacttatcragtttctcttttaagtgctggatttgagtccttaactttttatcatttttctatcaaggagatcagaagtgttctarctaat

SEQ ID NO: 1808 - DNA, 927 bp, Streptococcus pneumoniae
  misc_feature (1)..(927): tiling:Spneumo1:WAN024DAV; Cluster includes WAN024415 spr1 017|mreA|15903061|NP_358611.1|995722..996639|+|918 bp|Macr olide-efflux protein|S.pneumoniae|R6|NC_003098.1|ORF|111
atgattattactattcctataaaaaaccaaaaagatattggcacaccatctgattcagtcgttgttctcggctattttgatggcatacataaggggcatcaagaattatttcgtgttgccaacaaggctgcgagaaaggatttrttgcctatcgtcgttatgacctttaatgaatctccaaagatcgctttagarccttatcatccagatttgtttttgcatattttgaaccctgctgaacgtgaaagamaattaaagcgcgaaggtgtagaagaattatatctccttgattttagtagtcaattcgctagtctcactgcacaagaattctttgcaacttatatcaaggctatgaatgccaaaattattgttgcaggttttgattatacatttggttctgacaaaaaaacagcagaagatttaaagrattactttgatggagaagttatcattgttccacctgtagaagatgagaaaggaaagattagttcaactcgtatccgtcaagctattttagatggaaatgtgaaagaagcaggaaaacttttgggggcaccgcttccatcaagaggtatggtrgttcatggtaatgctcgtggtcgtacaattggttatccgacagcgaatttagtgcttttagaccgtacttatatgccagcagatggcgtttatgtygttgatgttgagattcaaagacagaagtatcgtgctatggctagtgtcgggaaaaatgtgacctttgatggagaagaagcacgttttgaagtcaatatttttgattttaatcaagatatttatggggaaaccgtcatggtttattggcttgatcgcattcgwgatatgaccaaatttgactcagttgaccaattagtggatcagttaaaggctgatgaagaagtaactcggaattggtmttaaswrmttgag

SEQ ID NO: 1809 - DNA, 123 bp, Streptococcus pneumoniae
  misc_feature (1)..(123): tiling:Spneumo1:WAN024FG4; Cluster includes WAN023T5K BD00 3683.1_1||||475..573|-|99 bp|Glimmer 2.02 orf prediction|S .pneumoniae|ATCC55840|BD003683.1|ORF|001
atgattattatagcatgtttaaaacaagaaagtaaatttgttgrcaaagaagatttttttttcactagaatcatggttagttttcttggtagaaatattttgataataattaagcaaaactac

SEQ ID NO: 1810 - DNA, 465 bp, Streptococcus pneumoniae
  misc_feature (1)..(465): tiling:Spneumo1:WAN024CQQ; Cluster includes WAN0242AF SP13 27||15901181|NP_345785.1|1251628..1252086|-|459 bp|conserv ed hypothetical protein|S.pneumoniae|TIGR4|NC_003028.1|ORF |011
atgattatttctgaacaatctgattttaracgatatgcttctgtcaataaayatttttcaaaagtctgtgattttttagaaaatacaaatttgacagatttagttgatggaaaaattgatattgacggggaaaatgtttttgcaaattgtatgacttatctagctgatggagttccaggagatatttttgaaactcataagaaatatttagatattcatattgttgttgaaaatacwgaaaaaatggcagtaacttccccagttcgtgcycagtcacgtgtaccttttagcgaagagaaggatattgctttttacgatagcaaagactatcaaattgttgaattgcttccagggaatatgttggtgacttttgaagaagatcttcaccaaccaaagattcattgcaatgatgaaactgttaaaaaacttgttatcaaagttttmaacgaggaaaaactaactaat

SEQ ID NO: 1811 - DNA, 1907 bp, Streptococcus pneumoniae
  misc_feature (1)..(1907): tiling:Spneumo1:WAN024G5U; Cluster includes WAN024411 spr1 021|ABC-NBD|15903065|NP_358615.1|999368..1001269|+|1902 bp |ABC transporter ATP-binding protein - unknown substrate|S .pneumoniae|R6|NC_003098.1|ORF|111
atgattattttacaakctaataaaattgaacgttcttttgcaggagaggttcttttcgataatatcaacctgcaggttgatgaacgagatcggattgcycttgttgggaaaaatggtgcaggtaagtctactcttttgaarattttagttggaraagaggagccaactagyggaraaatcaataagaaaaaagatatttctctgtcttacctagcycaagatagccgttttgagtctgaaaataccatctaygatgaratgcttcatgtctttratrayttrcgtcggacrgakaracaactgcgtcagatggagctggagatgggtgaaaagtctggtgaggatttggataaactgatgtcagattatgaccgcttatctgaraattttcgccaagcaggtggctttacctatgaagctgatattcgagcgattttgaatggattcaagtttgacgagtctatgtggcagatgaaaattgctgagctttctggtggtcaaaatactcgtttggcwctwgcyaaaatgctccttgaaaagcccaatctcttggtcttggacgagccaactaaccacttggatattgaaaccatykcctggctagagaattacttggtaaactatagcggtgccctcattatcgtcagccacgaccgttatttcttggacaaggttgcgacaattacgctagatttgaccaagyattccttggatcgctatgtggggaattactctcgttttgtygarttgaaggagcaaaagctagytactgaggcaaaaaactatgaaaagcaacagaaggaaatcgctgctctggaagactttgtcaatcgcaatctagttcgtgcttcaacgacyaaacgtgctcaatctcgccgtaaacaactrgaaaaaatggarcgtttggacaagcctgmagctggcaagaaakcagccaacatgaccttccagtctgaaaaaacgtcgggcaatgttgttttgactgttgaaaatrcwgctrttggytatgacggggaagtyttgtcacaacckatyaacctagatcttcgtaagatgaatgctgtcgctatcgttggtccaaatggtatcggcaagtcaacctttatcaagtctattgtggaccagattccttttatcaarggwgaaaagcgctttggcgctaatgttgaggttggttactatgaccaaacccaaagcaagctgacaccaagtaatacggtgctggatgaactctggaatgatttcaaactgacaccagaagttgaaatccgcaaccgtcttggrgccttccttttctcaggagatgatgttaaaaaatcagtcggcatgctatctggtggcgaaaaagctcgtttgcttttagctaaattgtctatggaaaacaayaayttyytgatyctkgaygagccgaccaaccacttggatattgatagyaaggaagtgytrgaaaatgcyttgattgactttgatggwaccttgctktttgtcagtcatgatcgttactttatcaatcgtgtggcaactcatgttttggaattgtctgagaatggttcaactctctaccttggagattacgactactatgttgagaagaaagcaacagcagaaatgagtcagactgaggaagcttcaactagcaatcaagcaaaggaagcaagtccagtcaatgactatcaggcccagaaagaaagtcaaaaagaagttcgcaaactcatgcgacaaatcgaaagtctagaagctgaaattgaagagctagaaagtcaaagccaagccatttctgaacaaatgttggaaacaaacgatgccgacaaactcatggaattacaggctgagctggacaaaatcagccatcgtcaggaagaagctatgcttgagtgggaagaattatcagakcaggtgtaactaat

SEQ ID NO: 1812 - DNA, 374 bp, Streptococcus pneumoniae
  misc_feature (1)..(374): tiling:Spneumo1:WAN024C8Z; Cluster includes WAN0244NV spr0 199|rplN|15902243|NP_357793.1|200848..201216|+|369 bp|50S Ribosomal protein L14|S.pneumoniae|R6|NC_003098.1|ORF|111
atgattcaaacagaaactcgtttgaaagtcgcagacaacagcggtgctcgcgaaatcttgactatcaaagttcttggtggttcaggacgtaaatttgcaaacatcggtgatgttatcgtggcatctgtaaaacaagctactcctggtggtgcggttaaaaaaggtgacgttgttaaagcagttatcgttcgtactaaatcaggtgctcgtcgtgctgatggttcatacatcaaatttgacgaaaacgcagcagttatcatccgtgaagacaaaactcctcgcggaacacgtatctttggcccagttgcacgtgaattgcgtgaaggtggcttcatgaagatcgtgtcacttgctccagaagtactttaactaat

SEQ ID NO: 1813 - DNA, 168 bp, Streptococcus pneumoniae
  misc_feature (1)..(168): tiling:Spneumo1:WAN024FAX; Cluster includes WAN0241VH SP18 92||15901719|NP_346323.1|1797703..1797870|+|168 bp|hypothe tical protein|S.pneumoniae|TIGR4|NC_003028.1|ORF|120
atgattcaaattgtcgttcgaagtgtcaaagactacagtgaaaataggaaatttgacgcagaaactttggagtttaggaagacatacagtaaaatgaaatacggacggaacaatgtgattttggaattcaaattaaattataacaatattgtagaagtatcattctag

SEQ ID NO: 1814 - DNA, 890 bp, Streptococcus pneumoniae
  misc_feature (1)..(890): tiling:Spneumo1:WAN024DHC; Cluster includes WAN0244F0 spr0 518||15902562|NP_358112.1|518668..519552|+|885 bp|Hypothet ical protein|S.pneumoniae|R6|NC_003098.1|ORF|111
atgattcaagcaagaaacaagttaagccaagargagctatctgaggcgaaaaaagtaattaactgttgccaaaactatgacggtacctatcgcgatccctatctctctaacatgcttaattttgayccaaacatgcccgcctttttcctttattatgaaaaaggcraacttgttggtttattaactgtctatgcagatgaccaagatgtagaagtgacgataytggttcatccaggtcatcgccgtcaggggattgcgcgtgcattgtttactagttttgagagagaaacagcttctttccccattcgrtcagtcacttttcagacagaacgtatttttttagagaatcatcctgactttgccagtaactggggactaatcgaggatgaagagacagaaacytggttaggtaaggatagaagaccwtatcmgttagcaaawstttcymatcttgaarttttgttagcagatagttcgtatcaggakcaaattagycarttaaaatttcaggcattttcagrggaacatgaatcgagagaagttgtggatagatatgtcgctgaagctctgaargatccagaaagycgmytatatattttrttaaaagmyggtcaggttattggracttgyacggtwgatttatcgasyratacgaattacytctayggtttagcaatatyrgaacctgaacgtggraaaggctatggaagctacttagcaaaatccctygtcaaccaactaattgagcaaaatgayaaggaatttcagattgcagtggaagatagcaatgtaggtgccaaacgtttgtatgaaaaaattggctttgtcaaacagacwcaggtggtttatctgaatgagaaaggagcaagggattccgaagtgtarctaat

SEQ ID NO: 1815 - DNA, 327 bp, Streptococcus pneumoniae
  misc_feature (1)..(327): tiling:Spneumo1:WAN024B4H; Cluster includes WAN023KN3 3147 93_3221||||1718801..1719127|+|327 bp|EGAD orf prediction|S .pneumoniae|R6|NC_003098.1|ORF|110
atgattcaaggtagtataaaattccttattttttacttcatcaatgatgaccatatcataatcttttgttgtgcgacttttaaatccttgcgaatccaatacgatagaggtagcagttcccccaatcagaacataatagttctgaaaatccgcaaacatttcttgaaaaataactttcgtattagctggcatcatcttctcccagatactgtaatatcatattttctagtgcttcactctcttcctctatacgtgggtcatcatcatcttttaaggtcaaataaagagaaatcggatctacaaattgtttatcatgattatttttaa

SEQ ID NO: 1816 - DNA, 770 bp, Streptococcus pneumoniae
  misc_feature (1)..(770): tiling:Spneumo1:WAN024CUA; Cluster includes WAN0244RI spr0 068||15902112|NP_357662.1|75311..76075|+|765 bp|Conserved hypothetical protein|S.pneumoniae|R6|NC_003098.1|ORF|111
atgattcagaaacatgcgattccyattttagagtttgatgayaatcctcaggcggttatcatgcccaatcacgaggggytggayttgcagttgccaaagaagtgtgtytatgcwtttttaggtgaggagattgaccgctatgcragggaagtaggggcgraytgtgtyggcgaattygtttctgcyaccaagacctatccagtytmtktyrtsaactacaaggrygaggagrtytgtctgghtcaggctcctgyyggytcmgctccagcagcccagtttatggatkggttgattggctatggtgtggagcagmttatctctactgggacctgtggtgtcctagctgatatagaggaaaatgcctttctagtccctgttcgcgctytgcgagatgarggagccagttaccactatgtggcaccttstcgttatatggaaatgcagccagaggctattgctgcyattgagsragttttggawgayagagggattccttatgaagaagtcatgacctggwcsacagayggtttttaccgagaaacggctgaaaaggtggcttatcgyaaggaagaagrctgtgctgttgtggagatggagtgttcygctcttgcggcagtagctcaattgcgtggggttctctggggtgaattgttgttcacagcarattctctagcggacttggaccagtacracagtcgtgactggggctcggaascttttaataaggcgctaraactgagtttagcaagtgtycaccacctttarctaat

SEQ ID NO: 1817 - DNA, 777 bp, Streptococcus pneumoniae
  misc_feature (1)..(777): tiling:Spneumo1:WAN024CQC; Cluster includes WAN0244SE spr0 036||15902080|NP_357630.1|36977..37747|+|771 bp|Conserved hypothetical protein|S.pneumoniae|R6|NC_003098.1|ORF|221
atgattcagtctatcacgagtcaaggcttggtgctttacaatcgcaattttcgtgaggatgacaagctygtcaaaatttttacagagcaggttggcaaaygcatgttttttgtcaaacacgctggtcagtctaagctggcgcctgttattcagcccttggtgctggcacgatttctmttgcgaatcaatgatgacggactcagttacatcgaagactatcatgaggtcatgacttttcccaagattaatagtgacctctttgtcatggcctatgcgacctatgtggcagctcttgcagatgctagtttgcaggacaatcagcaggatgctcccttgtttgcttttttgcaaaagactttggagttgatggaagcaggcttggattatcaggttttgaccaatatttttgaaattcaaattttgactcgatttggaatcagcctcaattttaatgagtgtgtcttctgccatcgggttggtcaggcttttgacttttctttcaaatatggarcctgyctctgtccagagcattatcatgaggatragagacgttgycatctcaatcccaatatcccctatctgctcaatcaatttcaagctattgattttgagactttggagaccatttcgctcaagcctggaatcaagcaagagctacgccaatttatggatcaaytatatgaagagtacgttgggattcacctaaaatcaaagaaatttattgattccctagcagactggggacaattactaaaagaggaaaagaaaykaactaat

SEQ ID NO: 1818 - DNA, 1316 bp, Streptococcus pneumoniae
  misc_feature (1)..(1316): tiling:Spneumo1:WAN024CZZ; Cluster includes WAN0243EM spr1 830||15903872|NP_359422.1|1804233..1805543|+|1311 bp|Conse rved hypothetical protein|S.pneumoniae|R6|NC_003098.1|ORF| 111
atgattcatttaataatgattagcgccattgctctagccattggaattggttaccgcaccaaaatcaatattggcctgctggctattgctttttcttacctcatcgcaaccactctcatgggattaagccccaaagaacttcttcatttttggccaacctcactcttttttaccatttttagcgtctctctcttttataacgttgcaayaactaacggtactcttgatgttttggctcaacacattctctaccgcacacgcaccyaccctaacgccctctacatgattttatacctgatggcaacccttttgtctgctttaggtgctggatttttcactactatggccgtttgctgtcctctagcgattacyctctgtcaaaaagcggacaaacaccctttgattggagctcaagccgtcaattggggagcttcaggaggggctaatttgataaccagtagctcaggcattgtctttcaaggcctgtttaagcaaatgggatgggargagcaagctttttcacttggcaatcatatctttatcgtcagcattatctacccactcatygtcttgcttttattatcctgttacagycactatagtaagggaagaacaaactcatccttgactattgaccaaccaccactcctcagcaaggttcaaagacaaaccaccttgctcatgatcagcagcatggttttggtttggctttttcccttgttgcatctcattttcccaaacatcgcctggatagctacttatcraaaaacatttgatattggctttgtctcaatactcatggtctgcctcgccttaaggctcaaattagggaagcaagaagccattttrgctaargttccctgggctacaattatcatgctctgcggcatgagcttactaatgtctctagcggtcaagtcaggtttagtcacactgatagggcacctcatgacaacawccattcctcatttctggttacctctgttcttttgtgtgatagccggagtgatgtcactctttagttccaccctatccgttgtagctccagccctctttcccatcattgctatcatcagtgctcaaaatccycagattgatattcacttactcacaacagccaccgttattggcgctctatctactaatatctcacccttttcatcagctggttctctcattcaactctcacttcccaatatagaggaacgyggccttgccttcaaaaagcaaattattctgggtgtccccatcagcttaagtttggractcttgaccacctggattctcatccttctagcttccttaagttarctaat

SEQ ID NO: 1819 - DNA, 1142 bp, Streptococcus pneumoniae
  misc_feature (1)..(1142): tiling:Spneumo1:WAN024DMS; Cluster includes WAN0244TC spr0 002|dnaN|15902046|NP_357596.1|1521..2657|+|1137 bp|NA bios ynthesis; sliding clamp subunit, required for high process ivity; DNA polymer...|S.pneumoniae|R6|NC_003098.1|ORF|111
atgattcatttttcaattaataaaaatttatttctacaagcattaaataytactaagagagctattagttctaaaaatgccattcctattttatcaacwgtmaaaattgacgtgaccaaygaaggtrttactttaattggttcaaatggtcaaatttcaattgaaaattttatttctcaaaaaaatgaagatgctggtttgttaattacttctttaggttcgatccttcttgaagcttctttctttatcaatgtagtatctagtttacctgatgtractcttgattttaaagaaattgaacaaaatcaaattgttttaaccagtggcaaatcagaaattaccctaaaaggaaaagatagcgaacaatatccacgaatccaagaaatttcagcaagcactcctttaatacttgaaacaaaattactcaagaaaattattaatgaaacagcctttgctgcaagtacacaagagagtcgtccgattttaacaggtgtccacttcgtattgagtcaacacaaagagttaaaaacagttgcaacagactctcatcgcctaagccagaaaaaattractcttgaaaaaaatagtgatgattttgatgtcgtaattcctagccgttctctacgcgaattttcagcggtatttacagatgatatcgaaactgtagagattttctttgccaataaccaaatcctctttagaagcgaaaatattagcttctatactcgtctcctagaaggaaactatcctgatacagatcgcttgattccaacagactttaacactactattacttttaatgtggtaaacttacgccagtcaatggagcgtgcccgtcttttatcaagtgcgactcaaaatggtactgtgaaacttgaaattaaggatggggttgttagcgcccatgttcactctccagaagttggtaaagtaaacgaagaaatcgatactgatcaggttactggtgaagatttgaccattagtttcaacccaacttacttgattgattctcttaaagctttaaatagcgaaaaggtgacyattagctttatctcagctgttcgtccatttactcttgtgccagcagatactgacgaagacttcatgcagctcattacaccagttcgtacaaattaactaat

SEQ ID NO: 1820 - DNA, 243 bp, Streptococcus pneumoniae
  misc_feature (1)..(243): tiling:Spneumo1:WAN024FE4; Cluster includes WAN023KS8 3145 97_2965a||||1578183..1578425|-|243 bp|EGAD orf prediction| S.pneumoniae|R6|NC_003098.1|ORF|110
atgattccaaaagcacgagctgtgtttggattttcatcaacgtccattttaacgattttcaagacatcttctgaaagttcttcagacaatttgtccaagattggaccttgcatacgacatggaccacaccaagttgcccagaagtctactaagaccaaaccgtcttttgtttcttgttcgaatgttgcatctgtaattgcttttgccattgtatttctcctttttttagttatattggcttaa

SEQ ID NO: 1821 - DNA, 276 bp, Streptococcus pneumoniae
  misc_feature (1)..(276): tiling:Spneumo1:WAN024CSG; Cluster includes WAN023LOG 3132 05_1478a||||783006..783281|-|276 bp|EGAD orf prediction|S. pneumoniae|R6|NC_003098.1|ORF|110
atgattccagccactgctcgctcaaccaagccttcaacatccatacgcgcttcgtactgctccgcattcttaattttaggatttgtttttggacgatctggtgcaaaaatggtacaacagtcttcaaacggttggattgaaatgtcaaaggtatcgatttcctgggcgatgtcaatgatttccaacttgtccatggtaaccacaggacgaatgatgggagtgttggtaacagcattgatagccttcatactttcaagggtttggctggctacttga

SEQ ID NO: 1822 - DNA, 729 bp, Streptococcus pneumoniae
  misc_feature (1)..(729): tiling:Spneumo1:WAN024FUX; Cluster includes WAN0240H4 |cap 8J||CAB43613.1|||729 bp||S.pneumoniae||AJ239004|ORF|000
atgattcctaaaaaaatccactatatttggttcggtggaagtgagaaaccagatgttgtcttaaaatgtattaattcttggaaaaaatatatgccagactatgagattgttgaatggaatgaggataattttgatttatcagattcacaatttgcgaagtctgcatatgaatctaggaaatgggcatttgcatcggattatgctcgttttaaaattttatctaagtatggtgggatctattttgatacggatgttgagttgttaaaaacaataycagatgatatattagctcattcatcttttacaggttttgaatatattggtgaagtaaatccaggacttgtatatgcttgtatgccagatgataagatagcaaaatatatggtgcaatattatgagcaagcaagttttgatatcaatcatttggtaactgtcaatacaattattacagattatctattaaaaaataactttcaaaaaaataatcagttccaaataattgatggattagcaatttatccagatgattacttttgtggttatgatcaggaggtcaaggaggttaggcttacggaacggacgattagtattcatcattatagtgctacttggaaaacaagaactttaaaaagaaaagtacagatgattgttaaaacaattataggagctgagaattataggaaattattatattgtaagaggaaaataaccaatgccgtatctaaataa

SEQ ID NO: 1823 - DNA, 278 bp, Streptococcus pneumoniae
  misc_feature (1)..(278): tiling:Spneumo1:WAN024AVT; Cluster includes WAN0243ZE spr1 081||15903124|NP_358674.1|1076480..1076752|-|273 bp|Hypoth etical protein|S.pneumoniae|R6|NC_003098.1|ORF|110
atgattcctcacacagatattgttcataatctagctgagaaagtggtggttgttcgattagagaaaccggtgactttccataatatgattgcgccaggtaaggaagtagaagtatccttgctcttctttatcatcaataattcaagttcaagtcaaacgaacattcttgctcagttratggacttyttcacaggaaatggwcatcttgaagacctatcaaaaatttcygaaccagaarmmctttatgcttayatwgmtgaagcaaycgcttaactaat

SEQ ID NO: 1824 - DNA, 596 bp, Streptococcus pneumoniae
  misc_feature (1)..(596): tiling:Spneumo1:WAN024DFK; Cluster includes WAN0244B6 spr0 656|clpP|15902700|NP_358250.1|661436..662026|+|591 bp|ATP- dependent CLP protease proteolytic subunit|S.pneumoniae|R6 |NC_003098.1|ORF|110
atgattcctgtagttattgaacaaacaagccgtggagaacgttcttacgatatttactcacgtcttctcaaagaccgcatcattatgctgacaggtccggttgaagacaatatggctaactctgttattgcccaaytgcttttcttggatgcccaagatagtacaaaagatatttacctttatgtcaatacaccaggtggttctgtttcagctggtttggcaatcgtarataccatgaactttatcaaggcagatgtccaaaccattgttatgggaatggctgcatctatgggracwgtcatcgcatcaagtggagcaaaaggcaaacgtttcatgcttccaaatgctgaatacatgattcaycaaccaatgggyggtacaggtggtggtacccaacaaactgatatggctatcgctgcagaacacttgctcaaaaytcgtaataccttggaaaaaatyttggctgaaaattcagktcagtcaatggaaaaagtccatgcagatgcagaacgtgataactggatgagcgcccaggaaacactwgaatatggctttattgatgaaattatggccaacaattcattgaactaactaat

SEQ ID NO: 1825 - DNA, 821 bp, Streptococcus pneumoniae
  misc_feature (1)..(821): tiling:Spneumo1:WAN024G9R; Cluster includes WAN024472 spr0 804||15902848|NP_358398.1|806221..807036|-|816 bp|Conserve d hypothetical protein|S.pneumoniae|R6|NC_003098.1|ORF|321
atgattcgatttttagttttagctggctattttgaactgactatttacctccatctgtcgggcaaactaaaccagtacatcaacatgcactattcctatctggcctatatctccatggtgmtttcytttatcttggcwatygttcaattgtatatctggatgaagcaagtcaaaacccacagtcatctgaacagccgattrgccaagatracgagtatttctcttctggctattccacttgtcatcggcttaactttcccaactgttagcttggattctcagacygtttcwgctaaaggytatcatttcccyctatcggaaggaacgratctrgcyattcagacaagygaagggackacaagccaatatttgaaaccagatacyagttcttatttttcaaaatcagcctatgaaaaggaaatgcgaacggcggcggataaatacttatcccaagayagyattcagrtcactaatgaaaactatatggaagtcatggaggctatctacgactatccagatgartttgagggcaagacaatccagtttacaggctttgtctataacgaccccagtcatgccaatagtcaatttctgttccgattcggcattatccactgtatcgcagattctggtgtctatggattgctgaccaagggcaatacccggcagtatgaaaacaacacytggatwwcagccaaaggaaaactggtcaatcactaccataaagaactcaaacaaaaccttccaaccttggaaatcgacagctttaccaaagtcgataaaccagaaaatccctatgtatatagagctttttaactaat

SEQ ID NO: 1826 - DNA, 246 bp, Streptococcus pneumoniae
  misc_feature (1)..(246): tiling:Spneumo1:WAN024F2S; Cluster includes WAN023KRE 3127 47_3005||||1600645..1600890|+|246 bp|EGAD orf prediction|S .pneumoniae|R6|NC_003098.1|ORF|110
atgattctcagaaaacaaaaagctagagattcccaattgcggaactctagctttttaattttgcctctttctcttattatatttcagcaggttgttggccatgagtaygaatcccatgtcaattctcacttgacgcttacctctcagatgacatctcttataacccaaacaaacctttatctgcccaaagacagatttcatatcaatcttacgtttagcgaaaatttgtctacccttggaagataa

SEQ ID NO: 1827 - DNA, 1076 bp, Streptococcus pneumoniae
  misc_feature (1)..(1076): tiling:Spneumo1:WAN024GCC; Cluster includes WAN02449O spr0 710||15902754|NP_358304.1|709610..710680|+|1071 bp|Conserv ed hypothetical protein|S.pneumoniae|R6|NC_003098.1|ORF|22 1
atgattctctccttaacagtacatacctattttatcattttttcggcagaraattattacagaaaggttacaaaaagaataaagtcccttttcattttcaaagcatggmtgattttggagaaatgtggtataatttttcttatggaaaagattgtcattacagcaactgctgaaagtattgaacaagttgaacaactactcgaagctggcgtagaccgtatctatgtcggtgagaaagattttggycttcgtctgccaacgacctttarttatgaccaattacgtgaaatcgctaagttggttcatgatgctggtaaggaattgmtcgttgcggtcaatgctctcatgcaccaagatatgatggaccgtatcaagcctttcttaracttcttggaagaaatcaagacagactatattacgattggggatgcaggcgtcttttacgtagtyaaccgcgatggttattcatttaagaccatctacgatgcttcaaccatggtaactagcagtcgtcagattaacttctggggacaaaaggctggygcatctgaggctgttttggcgcgtgaaattccatcagctgaacttttcaaaatgccagagattttggaaattcctgctgaagttttggtttacggtgctagygtcatccatcattctaaacgtccrctcttgcaaaactactataactttacacatatcgatgatgaaaagacgcataaacgtgacctcttcttggctgagccaagtgatccagagagccactattccatttttgaagataatcatgggacccatatctttgccaacaatgaccttgatttgatgatcaaattaacagaattggtggagcatggctttactcgctggaaactagaagggctctacactcctggtcagaactttgttgagattgcaaarctctttatccaagcgcgtagcttgattcaagagggcaactttagycatgmycaagccttcttgctrgatgaagaagttcgtaaacttcaccctaaaaaccgtttccttgatacaggattttatgactacgatcctgacatggttarataactaat

SEQ ID NO: 1828 - DNA, 168 bp, Streptococcus pneumoniae
  misc_feature (1)..(168): tiling:Spneumo1:WAN024D6F; Cluster includes WAN0243O6-3 sp r1485||15903528|NP_359078.1|1462112..1462423|+|312 bp|Hypo thetical protein|S.pneumoniae|R6|NC_003098.1|ORF|120
atgattctctccttggtgtctttaagtgatattccacttttccttcagggaactctcctcatcctaggacatctcatcccttcctatcgcatctgccaaagcctgaaaagagacttcccccaagcatatcaagaaccgatttctttttggagtattttaykaactaat

SEQ ID NO: 1829 - DNA, 1245 bp, Streptococcus pneumoniae
  misc_feature (1)..(1245): tiling:Spneumo1:WAN024F2P; Cluster includes WAN0244D1 spr0 589||15902633|NP_358183.1|603262..604500|+|1239 bp|Conserv ed hypothetical protein|S.pneumoniae|R6|NC_003098.1|ORF|11 1
atgattgaaacggagaaaaaagaggagcgagtcctgctgattggtgtggaattgcagggtatggacagttttgacctctccatggaagaattggctagtttagcgaaaacggcaggggcagtcgttgtagatagctacagacaaaaacgtgaaaaatatgattccaagaccttcgtcggctctggtaagttggaagagattgcgcttatggtggatgcagaagaaatcactactgtcatcgtcaacaaycgtctgaccccaaggcagaatgtcaatctagaggaagttctsggtgttaaggtcattgaccgtatgcagttgattttggatatctttgccatgcgggctcgaagccatgaagggaagctccaagtccacctagcccaaytcaaatacctyttgcctcgcttggttggtcaggggattatgctcagccgtcaggcagggggaattggttcccgtggtcctggtgaaagccarctggagctgaaccgtcgtagcgttcgcaatcaaatcacggatatygagcgccagctyaaggtggttgagaaaaatcgtgcgactgtcagagaaaaacgtttggagtmtagcacttttaagattggtttgattggttatactaatgctgggaaatcaactatcatgaacatcttgaccagtaagacccagtatgaagcagatgagctctttgcgactctggatgcgacaaccaagagtattcatctgggaggcaayctccaagtaactttgacagataccgttggctttatccaagatttgccgacagagttggtgtccagtttcaagtcaaccttggaagaaagcaagcatgtggaccttctggttcatgttatcgatgctagcaatccttaccacgaggagcatgaaaaaacggttctctccatcatgaaagacctggacatggaagatattcctcacttgacgctttataataaagcggatttggtggaggatttcacgcskacccaaacgccatataccctcatttctgccaagtctgaggacagtcgtgaaaacttgcaagcattattgctagataagattaaggaaatttttgaagcatttaccctgcgagtgcctttttcaaagtcctacaagattcatgatttagagagtgttgcaattctggaagaacgtgattatcaggaagacggcgaagtgattacaggctacatttccgagaaaaataaatggaggttagaagaattttatgacykaactaat

SEQ ID NO: 1830 - DNA, 1077 bp, Streptococcus pneumoniae
  misc_feature (1)..(1077): tiling:Spneumo1:WAN024FL3; Cluster includes WAN023ORX pne7 5_21||||13240..14316|+|1077 bp|Type 35A2 capsule operon, G limmer 2.02 orf prediction|S.pneumoniae||WAN01UCEX|ORF|000
atgattgaaagttttaatgataaagtgttgcaggaagatttagagataattgcaaaagaagagctyccatttcgaaaatttagaaattcaactgtttttatcacgggagtaacaggtttagtaggccttcaattatttaaggctttggcttgtatcaatagagtccatcagttgaatatgaaaattattggtctagtcagaaatttggataaagcagaaaaaatttttggagatttattgaaacggaaggatatacaaatagttttaggagatgtttcggaagatttccactcgtatatccctgatggtttagttattgactatatcattcacggagcaagcgtgactacctctaaactcatgattgaatttccagtagatacaattcgagtagcttttaatggaacgtatcaaatgttagaattggcaaaagaaaaaaaagtgaaaagttttgtatatctttcttcaatggaggtatatggtagctttcagtcagatagaacaactgttgtaaacgagaatatgttagggtatcttgatttgacatctgttcgaacaaattacccagaatgcaaaagaatttgtgaaaatatgtgcattgcatttctaagtcagtatcaagtcccggctaagattgctcgtctatcccagacctttggtgcaggcactctaccgggtgaaaatagagtatttgctcaatttgctcgtagtgttatgcaagggaaagatattgttttacatacgttagggcaatcagaaggaaattactgctacacagctgatactgttgttgcattattaacaattctattgagaggagaaaatggggaggcttataatattgctaatgaagagagtcatacaacaatagcagatatggcaaaaatggtaacttcgcaattctctcaaacgagtcaagtggtttttgatattccgaagaaaaatatatttggttatgctgtagatactaaaatgaagttatcaacacacaaaattcaacaattgggttggaagccgagggtctctcttgtagatgcttatgatcgaatgatgagaagtatgaatgaaactggggta

SEQ ID NO: 1831 - DNA, 225 bp, Streptococcus pneumoniae
  misc_feature (1)..(225): tiling:Spneumo1:WAN024CIH; Cluster includes WAN0241Z6 SP17 55||15901586|NP_346190.1|1656373..1656597|-|225 bp|hypothe tical protein|S.pneumoniae|TIGR4|NC_003028.1|ORF|011
atgattgaaatactaattgttttagctattatcctatctcttgctttgattgtattggtaactatacaaccccgtcaaaatcaactattttccatggatgccactagtaatattggtaaaccaagctactggcagagcaacaccttggtcaaggtgctcactttattggtgagtttggctttatttrttctactattaacctttatggtgattacttataaataa

SEQ ID NO: 1832 - DNA, 648 bp, Streptococcus pneumoniae
  misc_feature (1)..(648): tiling:Spneumo1:WAN024DGD; Cluster includes WAN0244CO spr0 602|ABC-NBD|15902646|NP_358196.1|614626..615267|+|642 bp|A BC transporter ATP-binding protein - sodium transport|S.pn eumoniae|R6|NC_003098.1|ORF|111
atgattgaactaaagaatatatctaaaaaatttggaagccgtcarctattttcagatayraatcttcattttgaaggtgggaaaatttatgccttaatcggtacaagtggctgtggtaagacaacaytcttgaatatgattggacgattrgagccatatgacaaaggrcaaatcatctatgatggyacttctcttaaggacatcaagycttctgttttctttagagattacttrggatayttatttcaagattttggcttaattgaaarccaaaccgtcaaagagaatctcaatctgggtttagttggtaaaaagttgaaggaaaaagagaaaatctctttgatgaaacaagctctaaacygtgtaaacctctcttatttggatttgaagcaacctatatttgagttatcaggaggagaagcacaacgtgttgcaytagcgaagataattttaaaggatccrcctttgatyctygcagatgaaccaaccgcttcmytagaccccaaaaaytctgaggaattactttccatcctagaatctytaaaaaatccgaatcggaccattattattgcgacccayaatcctctgatttgggagcaagtggatcaggtcattcgagttaccgatttatcacatagaykaactaat

SEQ ID NO: 1833 - DNA, 638 bp, Streptococcus pneumoniae
  misc_feature (1)..(638): tiling:Spneumo1:WAN024DGC; Cluster includes WAN0243G7 spr1 773|ABC-NBD|15903815|NP_359365.1|1742209..1742841|+|633 bp |ABC transporter ATP-binding protein - unknown substrate|S .pneumoniae|R6|NC_003098.1|ORF|111
atgattgaacttaaacaggtgagtaaatcttttggagaacgagagttattttcgaatctttcaatgacatttgaggctggaaaagtctatgccttaattggttcaagtggtagcggaaaaacaaccttgatgaacatgattgggaaattagaaccttatgatgggacgattttttaccgaggtaaagacttggccaattataaatcragtgattttttccgtcacgaattgggctacctcttccagaactttggcttaattgaaaaccaaagtattgaagaaaaccttaagctaggtctcattggtcaaaagttgagtcggtcggaacagcggttgaggcagaagcaggctttagaacaggtcggcctggyttatcttgacctagataagcgcatctttgagttatcgggcggagaatcgcaacgrgttgccttggcaaaaattatcttaaagaatccaccctttattctggcagatgagccaacagcttcaatagacccagcaacctctcagttgattatggagattttgctatctcttcgagatgataataggctaatcattatcgcaacacataatccggcaatttgggagatggctgatgaagtgttcacgatggatcatctgaaataactaat

SEQ ID NO: 1834 - DNA, 1344 bp, Streptococcus pneumoniae
  misc_feature (1)..(1344): tiling:Spneumo1:WAN024CIG; Cluster includes WAN0241Z4 SP17 57||15901588|NP_346192.1|1656783..1658120|-|1338 bp|conser ved hypothetical protein|S.pneumoniae|TIGR4|NC_003028.1|OR F|011
atgattgaactttatgatmgttayagtcawgaaagtcgagatttacatgaaagtctagkcgctactggtctttctcaacttggagtggtcatcgatgcagatggttttctgcctgatggtctgctttctccttttacctattatctaggttacgaggatggaaaacctctctattttaaycaagttcccgtttcagatttttgggaaattttaggagataatcagtctgcttgtattgaagatgtgacgcaggagagggctgtcattcattatgytgatggaatgcaggctcgcttggttaaacaggtagactggaaagacctagaaggtcgagtacgtcaggttgaccactacaatcgcttyggwgcttgytttgctamaacsacttatagcgcagatagcgagccgattatgacagtttaccaagatgtcaatggycaacaagttttactggaaaaccatgtgacgggtgatatcttattgactttgccwggtcagtccatgcgttactttgcaaataaagttgaatttatcaccttctttttgcaagatttggaaatagataccagtcagcttatctttaatactctagcgactcctttcttggtttccttccatcatccagataaatctggctcggatgtcttggtatggcaggaacctctctatgatgccattccaggtaatatgcagttgattttggaaagtgataatgtgcgtactaagaagatcatcattccaaataaggcgacttatgagcgcgctttagagttaactgacgagaaataccatgatcagtttgtgcacttgggttatcattaccagttcaaacgtgataatttcctaagacgagatgccttaatcttgaccaattcagatcagattgagcaagtagaagcaatcgcaggagccttgcctgatgtcactttccgtattgcagcggtgacagagatgtcttctaagctcttagacatgcttygctatcctaatgtggycctttaccagaaygctagtccacagaagattcaggagctgtatcaactgtcggatatttacttggatataaaccacagtaatgagttrctacaggcagtgcgtcaggcctttgagcacaatctcttgattcttggctttaatcagacggtgcacaatagactttatatcgctccagaccatctatttgaaagtagtgaagttgctgctttggttgagaccattaaattggccctttcagatgttgatcaaatgcgtcaggcacttggcaaacaaggccaacatgcaaattatgttgacttggtgagatatcaggaaaccatgcaaactgttttaggaggcctaactaat

SEQ ID NO: 1835 - DNA, 566 bp, Streptococcus pneumoniae
  misc_feature (1)..(566): tiling:Spneumo1:WAN024F3N; Cluster includes WAN0244II spr0 392|efp|15902436|NP_357986.1|388250..388810|-|561 bp|Elong ation factor P|S.pneumoniae|R6|NC_003098.1|ORF|111
atgattgaagcaagtammttaaaagctggtatgacctttgaaacagctgacggcaaattgattcgcgttttggaagctagtcaccacaaaccaggtaaaggaaacacgatcatgcgtatgaaattgcgtgatgtccgtactggttctacatttgacacaagctaccgtccagaggaaaaatttgaacaagctattatcgagactgtcccagctcaatacttgtacaaaatggatgacacagcatacttcatgaatacagaaacttaygaccartacgaaatccctgtagtcaatgttgaaaacgaattgctttacatccttgaaaactctgatgtgaaaatccaattctacggaactgaagtgatcggtgtcaccgttcctactactgttgagttgacagttgctgaaactcaaccatctatcaaaggtgctactgttacaggttctggtaaaccagcaacgatggaaactggacttgtcgtaaacgttccagacttcatcgaagcaggacaaaaactcgttatcaacactgcagaaggaacttacgtttctcgtgcctaactaat

SEQ ID NO: 1836 - DNA, 734 bp, Streptococcus pneumoniae
  misc_feature (1)..(734): tiling:Spneumo1:WAN024FBZ; Cluster includes WAN0243IU spr1 678|proV|15903720|NP_359270.1|1650495..1651223|-|729 bp|AB C transporter ATP-binding protein - choline transporter|S. pneumoniae|R6|NC_003098.1|ORF|111
atgattgaatacaaaaatgtagcactgcgctacacagaaaaggatgtcttgagagatgtcaacttacagattgargatggggaatttatggttttagtagggccttctggrtcaggtaagacgaccatgctcaagatgattaaccgtcttttggaaccaactgatggaaatatttatatggatgggaagcgcatcaaagactatgatgagcgtgaacttcgtctttctactggttatgttttacaggctattgctctytttccmaatctaacagttgmggaaaatattgctctcattcctgaaatgaagggktggasyaaggaagaaattrckmaraaaacagaagagcttttggctaaggttggtttaccagtagcygagtatgggcatcgcttaccwagtgarytatctggtggagaacagcaacgggtcggtattgtccgagctatgattggtcagcccaagattytcctcatggatgaacccttttcrgccttggatgctatttckmgmaarcagttgcaggttctgacaaaagaattrcataaagagtttgggatgacaacgatttttgtracycatgatacggatgaagccttraagttggcrgaycgtattgctgtyttgcaggatggagarattcgycaggtrkcgaatccygagacwattttaaaagykcctgcaacagactttgtwgcagacttgtttggaggtagtrttcatgactaactaat

SEQ ID NO: 1837 - DNA, 369 bp, Streptococcus pneumoniae
  misc_feature (1)..(369): tiling:Spneumo1:WAN024AW2; Cluster includes WAN0241MA |||A AR22394.1|||369 bp|hypothetical protein|S.pneumoniae||AF37 6746|ORF|000
atgattgaccgttcatatttaccatttcaatcagcaagagagtaccaggatacaaagatgcaaaaatggatgggctttttcctatctgaacatgcatcagcactctctgatgatacaaacaaagtaacgtacatgtctgacttatcactagagaagaaattattactcctcagtcaagtatacgccgggcagctacgcacacgcattcaagtgattgaaaaaaacaagcgtgtttcctacactggaacaataccaagtctgaccaaagatttcattttgataaaaactacaacaggtcacatcaatttgaaattaaaagacattattagtattgaacttgtcgaggaggtgctctatgaatcagcttga

SEQ ID NO: 1838 - DNA, 506 bp, Streptococcus pneumoniae
  misc_feature (1)..(506): tiling:Spneumo1:WAN024DD3; Cluster includes WAN02445S spr0 850||15902894|NP_358444.1|846911..847411|+|501 bp|Hypothet ical protein|S.pneumoniae|R6|NC_003098.1|ORF|111
atgattgaccmactatctaagtattacagttgtaggatactaactgaaaaggatattccaagtattttatctttatatgaaagtaatcctctgtattttcagcattgtccaccagarccaaattttgcaactgtaaaagaggacatgctttgtctacctgaaggtaaagctaaggctgataagttttttgttggattttggaatggmtctgaccttgtggctgttatggattttgtctatgcatatcctgatgaggagactgtttttattggtttgtttatggttgwtcaagcctatcagagraaagggattggtagtcatattgtgacagaagcactagcttattttgctaagaactttcgaaaggcacgtttggcttatgttaagggaaatccgcaatctcagcatttttgggaaaagcagggytttaaatcaattggatgcgaggttaagcaagaactctatacggttgttatcgytgaacagagcctagaagattarctaat

SEQ ID NO: 1839 - DNA, 387 bp, Streptococcus pneumoniae
  misc_feature (1)..(387): tiling:Spneumo1:WAN024ERJ; Cluster includes WAN023KJW 3141 73_3373||||1809136..1809522|-|387 bp|EGAD orf prediction|S .pneumoniae|R6|NC_003098.1|ORF|110
atgattgagattaagttcattccagttatattgaataataatgctgaaacaaccccaaataaggagatgacggtcatgactggaagtaatacgctaaatgatctactaacagctggtggaatattttcaccaaggttcatttgtaaagctttaacrtttgataattcaatgaataattctgttgcaataatcgctacgataaccccggcgaacattgcgcctgtacctgtgttgttgaatgaaagaacacctgaaatgtttacmgcatcttttgctccgtcaggaactacagaaactgtatttggcatcatcacaattaaagaaactaatgatagcattgatgctgctaacgggttttcgaaatctctgtttttagctaagaaataa

SEQ ID NO: 1840 - DNA, 648 bp, Streptococcus pneumoniae
  misc_feature (1)..(648): tiling:Spneumo1:WAN024DTD; Cluster includes WAN0244QM spr0 100|ABC-NBD|15902144|NP_357694.1|107650..108291|+|642 bp|A BC transporter ATP-binding protein - amino acid transport| S.pneumoniae|R6|NC_003098.1|ORF|111
atgattgagttgaaaaatattaccaaaaccattgggggaaaagtgattttggataacttatctctcaggattgatcagggggmtttggtagcyattgttggyaaragtggyagtggsaagtcgaccttgttaaatttattgggtttgatagatggtgattatagcggacggtatgagatttttggtcagacaaatctagcggttaattctgctaagtcgcaaacaataatccgtgaacatatctcttatctgtttcaaaattttgccctgattgatgatgaaacggtcgagtacaatctcatgctggcgctgaaatatgtgaaattgcctaagaaagacaagctcaaaaaggtggaagagattttagagagagtaggtttrtcagctactttgcatcaaagggtctccgasttgtctgggggcgaacaacaacgaattgcagttgctagagccatsttaaaacccagccagctgattttagccgatgaacckacaggttckctggatcctgaaaatagagatttggtcttgaagtttctcttagagatgaatcgagargggaaaacagtcattatygtgacccacgatgcttatgtagcccaacaatgtcatcgwrtcattgaattrggcgagggaaaaykaactaat

SEQ ID NO: 1841 - DNA, 869 bp, Streptococcus pneumoniae
  misc_feature (1)..(869): tiling:Spneumo1:WAN024DLJ; Cluster includes WAN0244PI spr0 140|mutR|15902184|NP_357734.1|149499..150362|+|864 bp|Posi tive transcriptional regulator of mutA|S.pneumoniae|R6|NC_ 003098.1|ORF|111
atgattgararaatggaaytgggggaattttacaaggaattacgtttggcgagaaagctyaagcagwcagatgtggcttgtgasggkctaacagcttctcagttgtccaagtttgarctagggcagtcyatgytgtctgckgataagytsatwytagcyatccaaggkatmaatgtgacctttgatgagtttrggcacaagctcaacaactatcaagaatctccacatatgcrratyggtmgaaaggttgtgratcgctttgcycatcargatatagctgsyttagagcarctrttggaggaagtygakcaagaacagatggcrsagacytatcgtcgtttgaatgcyatygtratyaaagatgccatccaytcactarataaaagctacccactagcagaggaggatagcgagtttttgaccacctatctctatgmtatcgagtcttggacctggtttgaactctatctcttttgcaatacymtgcccttcttgagcaatcaagatctgatytttttatcaacctccttactcgaaaaatccaaagaatttaaagagttagtayacmatcgattgtatatgaagcaaggactcttaaatatcwtmtcagarctcatggagcgmaaacttttytcytayatcccaatcttygaagccgagytggagagkatgytmcgwccrtaygatgtttttgaraaagtrtygtggcartttttaaagaagatgagyrtyttycttcaaacwaagggaagcaatcaaaaagagattgaacrctttatccaatctctgcargtattagaaaatccacaattaayakccctttttgaattgcgtttkcagcaatayaaararcttatmgattarctaat

SEQ ID NO: 1842 - DNA, 771 bp, Streptococcus pneumoniae
  misc_feature (1)..(771): tiling:Spneumo1:WAN024C9F; Cluster includes WAN023QZF cont ig_1394_6||||4716..5486|-|771 bp|Glimmer 2.02 orf predicti on|S.pneumoniae|670|WAN01UDYH|ORF|000
atgattgataaagtaattgaacaatataaaagtcatgataatcttgatattcgagtagaattgcataagaagtattcaaaaaataaattgggatttaataattggatattttctaactaccaaatcactgatgaagtaaaggttctagaattgggatgtggtacaggagaattgtggaaaagtaatagtgattctatagataaaatgaagcagttgattgttacagatttttctaaagatatggtaaaatcaacgaagtcagtgattggaaatagaaacaatgtcaattatgagataatggatattcaaaagatttcttttgagaatgaaacttttgatattgttattgctaatatgcttctacatcatgtgaatgatattcctaaagctctctctgaggtgaatagggtcttaaaaaccggaggcattttttactgtgctacatttggtgaaaatggagttgtaaattatttggcaagtttatttaaagatgaggttaatcaagatttagaaaatagaacgtttactttacaaaatggtaaaaggtacctgagtaggtattttaactctgtcgatacattactctatgatgatgagttacaggtaactagtatagatgacctagttaaatacatccaatcgtttaaaggaatttcagaaataggttcactagaagaggaaataatacgtaaaagattggaaagtgagtttaataatggtatgttgatcattcctaaagaatatggtatgtttatcgctcgaaaagaaagt

SEQ ID NO: 1843 - DNA, 648 bp, Streptococcus pneumoniae
  misc_feature (1)..(648): tiling:Spneumo1:WAN024D2E; Cluster includes WAN0243FF spr1 801|ABC-NBD|15903843|NP_359393.1|1771588..1772229|-|642 bp |ABC transporter ATP-binding protein - unknown substrate|S .pneumoniae|R6|NC_003098.1|ORF|111
atgattgatattcaaggattggaaaagaaatttaatgaccgcgcgattttctctggtttgaatctcaagctggagaagggcaaggtttatgccttaatcggaaagagtggaagyggaaagacgacgctgctgaatatcttgggaaagctagaaaagatagatggwggaagggttctctatcaggggaaagatttaaaaaccattcccactcgtgagtattttcgagaccagatgggctatctctttcaaaatttyggcctcttagaaaaccaatcaatcaaagaaaatttggatttgggttttgttggtcagaaaatctcaaaagtagaacgtttggaaaggcaagtgggggctttagaaaaagttaatctagggtatttggatttagaacaaaaaatytatactttatctgggggagaggcccaacgagttgcccttgctaagactattttgaaaaatccacccttgattttggcagatgaaccaacagcagctcttgatcctgaaaattcagaggaggttatgaatctcttggtggatttgaaagatgaaaatcgaattatcatcattgcgacccataatcccctagtctggaataaggctgwtgaaatcattgatatgaggaaacttgctcatgtgykaactaat

SEQ ID NO: 1844 - DNA, 386 bp, Streptococcus pneumoniae
  misc_feature (1)..(386): tiling:Spneumo1:WAN024AV7; Cluster includes WAN0243VW spr1 207||15903250|NP_358800.1|1205988..1206368|-|381 bp|Hypoth etical protein|S.pneumoniae|R6|NC_003098.1|ORF|121
atgattgatctctatctaagtaaaaatarmcrwagaaatcaacttcttttagahttcttccaaaactatggcathgaggtatcttgtcattcagtttctgaaatgacaaaggayaaattaattgagatgatgagctattcttcagattgttttgartttttatctcccaatttattacgatttaagaaccgtgayaatctaagattaacggatttcgttgagatrattttaaaaaatcctgaactaamcatcrgacttcctyttgyggtttcaaataagcgrgtttatccaartctgaatttggaagaggytagagctytattgccaagagatacgaaacaattgatttacatggcrcaaacacattatttatctaactaactaat

SEQ ID NO: 1845 - DNA, 402 bp, Streptococcus pneumoniae
  misc_feature (1)..(402): tiling:Spneumo1:WAN024GFF; Cluster includes WAN023LUX 3140 57_1115a||||589934..590335|-|402 bp|EGAD orf prediction|S. pneumoniae|R6|NC_003098.1|ORF|110
atgattgatttcgtcagagagacaaatcaagtccttgccttgattgagcgccaagcggaaataggttgccaaggacttggtcacctgcaccactcgctgactatcatgaaattcagccatccagatgatggtgtccaaagtgttatagaggaaatgtggattaatctggctcgaaagggcttgaagttggtactgacgggtcgtttcttcctggctacgaatagctaccatcaactgatcaatctgatccaacatrgcattaaattggcgagttacttctctcagttcataggcaccaacttccttggcacgaagattttgagcaccagaagcaatttccaacatggtttctctcaaatccttcaaaggagcaatccagcgtttaagactgaaccacactaa

SEQ ID NO: 1846 - DNA, 666 bp, Streptococcus pneumoniae
  misc_feature (1)..(666): tiling:Spneumo1:WAN024EWU; Cluster includes WAN0243K8 spr1 628|pilD|15903670|NP_359220.1|1601632..1602291|+|660 bp|Ty pe 4 prepilin peptidase|S.pneumoniae|R6|NC_003098.1|ORF|22 1
atgattgatttttatttttttctcgtcgggagcattctmgcttcctttcttggtttggtcattgaccgttttccagagcaatccattatcagttcagccagtcactgcgattcctgtcagactcscttgcgtcccttagatttgattccgattctctcacaggtcttcaatcgctttygctgtcgctactgcaargtycgctatcctgtctggtatgccctctttgaaytargcttaggactcctctttctgctttactcttgggratkrctytccttgrgkcaagtcrtcctaatcacygctgstttgaccttgggyatctacgactttcrccatcaggaatatcccttactggtctggatgactttccasctaatcctaatagcttcctctggctggaatctggtcatggtctccttcctcatacttggaattttggctcattttatcgatatccgcatgggtgcaggggatttyctytttttagcttcttgygctctcgtctttagcgtaacggagttactgatcttgattcagttcgcttctgcgacgggtatcctgrcctttctcctgcaaaagaaaaaggaaagacttcctttcgtgcctttcctcttacttgctrcttgtktgattatttttggtaagctactgcttgtyykaactaat

SEQ ID NO: 1847 - DNA, 854 bp, Streptococcus pneumoniae
  misc_feature (1)..(854): tiling:Spneumo1:WAN024EXW; Cluster includes WAN0243NY spr1 493|psaC|15903536|NP_359086.1|1469806..1470654|+|849 bp|AB C transporter membrane-spanning permease - manganese trans port|S.pneumoniae|R6|NC_003098.1|ORF|111
atgattgcagaatttatcgatggattgcaaaaattccatttcctacaaaatgccttgataacagctattgtcgtcgggattgtagctggagcygtgggatgtttcattattctacgcgggatgtcactcatgggagatgccatttcacatgctgtcttaccaggtgtagccctmtccttcatcttgggccttgacttctttatcggagccattgtctttggattgctagctgccatcatcattacctacatcaaaggaaactcgaytatcaaaagcgataccgccatcggcattaccttttcttctttcttagccctcggtatcatcttgattggtgtcgctaaaagttcaactgaccttttccatatcctttttggtaatatyctggccgtccaagatacggatatgtttattactatgggtgtgggggcagcyatcctcttgttaatctggattttcttcaagcaactcttgataacttcctttgatgaactcttggctaaagccatgggaatgcctgtcaatttctatcactaccttctcatggtactcctgactctcgtgtctgtgacagccatgcaaagtgtcggaactatcctgattgtagccatgctgattrccccagctgcaactgcttatctgtatgctaatagtctgaaaagyatgattttcctttcctcaaccttcggagctactgcttcagttttgggactctttattggctatagttttaatgttgcggcaggttctagtatcgtgcttacagctgctagtttctttctcattagcttctttatcgctcccaaacaacgatatttgaaactgaaaaataaacatttgttaaaataactaat

SEQ ID NO: 1848 - DNA, 93 bp, Streptococcus pneumoniae
  misc_feature (1)..(93): tiling:Spneumo1:WAN024DQY; Cluster includes WAN023SM4 NC_0 03098.1_509||||401101..401178|+|78 bp|Glimmer 2.02 orf pre diction|S.pneumoniae|R6|NC_003098.1|ORF|100
atgattgcatctggattgaaagaatcgggtttaaatgactggactgcgaaaactttagcttcagctattcgtgggatattagatgtacttatt

SEQ ID NO: 1849 - DNA, 468 bp, Streptococcus pneumoniae
  misc_feature (1)..(468): tiling:Spneumo1:WAN024FBG; Cluster includes WAN0243IF spr1 693||15903735|NP_359285.1|1662976..1663437|-|462 bp|Conser ved hypothetical protein|S.pneumoniae|R6|NC_003098.1|ORF|1 11
atgattgccaaggagtttgagactttcttgttggggcaggaggaaacttttttgacccctgctaaaaatctagctgtgttgattgatacccacaatgcggatcatgcgaccctcttgctyagtcagatgacctatacccgtgttcccgttgtgacagatgaaaaacagtttgttgggacgattggactcagagatattatggcttatcagatggagcatgacttgagccaagaaatcatggcggatacggatatcgttcatatgacaaaaacggacgtagcggttgtttcgcctgatttcaccattacggaggtcttgcacaagctagtagatgagtccttcttaccrgtygtggatrcagagggtattttccaagggattattacgcgcaagtccatcctcaaggccgttaatgccctcttgcatgaytttagtaaggaatatgagattcgatgccaaykaactaat

SEQ ID NO: 1850 - DNA, 1013 bp, Streptococcus pneumoniae
  misc_feature (1)..(1013): tiling:Spneumo1:WAN024C3S; Cluster includes WAN0244JY spr0 340|mvaK2|15902384|NP_357934.1|344894..345901|+|1008 bp|Ph osphomevalonate kinase|S.pneumoniae|R6|NC_003098.1|ORF|111
atgattgctgttaaaacttgcggaaaactctattgggcaggtgaatatgctattttagagccagggcagttagctttgataaaggatattcccatctatatgagggctgarattgctttttctgacagctaccgtatctattcagatatgtttgatttcgcagtggacttaaggccyaatcctgactayagcttgattcaagaaacgattgctttgatgggagacttcctcgctgttcgyggtcagaatttaagacctttttcyctarmaatctrtggcaaaatggaacgagaagggaaaaagtttggtctaggttctagtggcagcgtcgttgtcttggttgtcaaggctttactggctctstatratstttckrttgatcagrakctcttgttcaagctgactagygctgtcttgctyaagcgaggagacaatggttccatgggcgaccttgcctgtattgyggcagaggatttggttctytaccagtcatttgmtcgccagaaggyggctgcttggttrraagaagaaaamttggcgacwgttytrgagcgtgattggggmttttywatytcacaagtgaraccaactttagaatgtgatttcttagtgggatggaccaaggaagtggctgtatcgagtcacatggtccagcaaatcaagcaaaatatcaatcaaaattttttaasttcctcaaaagaaacggtgryttctytggtmgaagccttggarcaggggaaakcmgaaaarrttatcgakcaagtagaagtagccagcaagcttttagaaggcttgagtacagatatttacacgcctttgcttagacagttgaaagaagccagtcaagatttgcagrccgttgccaagagtagtggtgctggtggtggtgactgtggcatcgccctgagttttgatgcgcaatcwwccraaacyttaaaaaatcgttgggccgatctggggattgagctcttatatcaagaaaggataggacatgacgacaaatcgtaactaat

SEQ ID NO: 1851 - DNA, 483 bp, Streptococcus pneumoniae
  misc_feature (1)..(483): tiling:Spneumo1:WAN024AVG; Cluster includes WAN02442Z spr0 951||15902995|NP_358545.1|934826..935359|+|534 bp|Hypothet ical protein|S.pneumoniae|R6|NC_003098.1|ORF|112
atgattggaaagaayataaaatccttrcgtaaaacacatgayttaacmcaachcgaatttgcacgrattrtaggwatttcwcgaaatagyytragtcgttatgaaaatggaackagttcagtctctacvgaaytaatwgacatcatytgycagaagtttaatgtatcttatgtcgatatygtaggagaarataaaatgctcaatcctgttgaagattatgaattgactttraaaattgaaattgtgaaagaaagaggtgctaatctattatctcgactctatcgytatcaagatagtcakggaattagcattgatgatgartctaatccttggattttaatgagtgaygatctdtctgayttgattcatacgaatatctatytagtagaaacttttgatgaaatagagagatatastggctatttggatggaattgaacgkatgttagagatatytgaaaarcggatggyrgcyytaactaat

SEQ ID NO: 1852 - DNA, 245 bp, Streptococcus pneumoniae
  misc_feature (1)..(245): tiling:Spneumo1:WAN024DK2; Cluster includes WAN0244LP spr0 277||15902321|NP_357871.1|275987..276226|+|240 bp|Conserve d hypothetical protein|S.pneumoniae|R6|NC_003098.1|ORF|110
atgattggaagtattgcagcaattttaacaacatttgcatttttaccacaagtttttcgtgtagttaagacaaaggacacaggatctattgctctaggtatgtatgttatgcaagttattggtattgcattgtggcttgctcatggtattcgtataggagacttgcctttgattttagcwaatagtgtttcatttctactytcaggaataattttattttataaattgaagtataaataactaat

SEQ ID NO: 1853 - DNA, 110 bp, Streptococcus pneumoniae
  misc_feature (1)..(110): tiling:Spneumo1:WAN0249YH; Cluster includes WAN024EBQ R6.I G_1429||||1369085..1369184|+|100 bp|Between spr1385 (- str and) and spr1386 (- strand)|S.pneumoniae|R6|NC_003098.1|IG |110
atgattgtctcctttagtttattccgatatgtgttaccggttacatatagtttataccgaatactaaggaaagtcaaacaatgtrctcagaaacaagaaatcacgctaag

SEQ ID NO: 1854 - DNA, 873 bp, Streptococcus pneumoniae
  misc_feature (1)..(873): tiling:Spneumo1:WAN024G6L; Cluster includes WAN02442A spr0 976|ABC-MSP|15903020|NP_358570.1|961807..962673|+|867 bp|A BC transporter membrane-spanning permease - unknown substr ate|S.pneumoniae|R6|NC_003098.1|ORF|111
atgattgtttccattatttctcaaggatttgtctgggctattctaggtctgggaatctttatgacatttaggattttaaactttccaratatgacgacagaaggttccttccctcttgggggagctgttgctgtcactttgataaccaaaggcgtgaayccatttttagcgacacttgttgctgtaggagcaggttgtttggctggaatggcagcaggccttctttatacaaaagggaagatcccaaccttgctmtcagggattttggtgatgacttcttgtcactcaatcatgctcttgattatgggacgtgcraatttaggcctgcttggaaccaagcaaattcaggatgttttgccttttgattcggatttgaatcaactcttgacaggtctcatctttgtgagyattgttattgctctcatgctctttttcttggacactaaactcggacaagcctatattgctacaggggataatcctgatatggctagaagtttcgggattcatactggacrcatggagctcatgggcttggtcttatcaaatggtgtgattgcccttgcaggtgccctcattgctcagcaagaaggytatgccgatgtgtctcgagggatcggggttatcgttgtgggrcttgcaagtttgattattggagaagttattttcaagagtttgagcttggcagagcgtttggttactatcgttgtaggttctatcgcttatcaatttttagtgtgggcagttatcgcacttggctttaatacaagttaccttcgtttatacagtgcyttgattttagcagtctgcctcatgattccaacatttaagcaaacaatcttgaaaggagccaagttaagcaaaykaactaat

SEQ ID NO: 1855 - DNA, 239 bp, Streptococcus pneumoniae
  misc_feature (1)..(239): tiling:Spneumo1:WAN024EUJ; Cluster includes WAN0244PX-5 sp r0125||15902169|NP_357719.1|134636..136468|-|1833 bp|Conse rved hypothetical protein|S.pneumoniae|R6|NC_003098.1|ORF| 211
atgatttacaaagttttttatcaagaaacaaaagaacgtagcccacgccgtgaaacaacacgcrcgctttacctagacatcgatrccagctcagaacttgagggccgtatcactgctcgccaacttgtcgaagaaaatcgcccagagtacaatatcgartatatcgaactcttgtctgacaaattgctcgattacgaaaaagaaactggcgccttcgaaattacggagttctaactaat

SEQ ID NO: 1856 - DNA, 255 bp, Streptococcus pneumoniae
  misc_feature (1)..(255): tiling:Spneumo1:WAN024GMR; Cluster includes WAN023M1Z 3142 70_772||||400724..400978|-|255 bp|EGAD orf prediction|S.pn eumoniae|R6|NC_003098.1|ORF|110
atgatttaccaactatatttgttaatgttttttatttctcaaaatccatttcgctatataacgagcagatttagtcgcaccagctctctcaaacggagaatgaatttcaagaccttcttctctagctatttgtgccaatttgaagaattgttcaaagktcatatgcaacctaccatcttcaaaattagcatcatcataaatgttaattacagyattttcatcatacgaccaatctgctttattttggtctgctag

SEQ ID NO: 1857 - DNA, 252 bp, Streptococcus pneumoniae
  misc_feature (1)..(252): tiling:Spneumo1:WAN024E2E; Cluster includes WAN023KJB 3133 26_3400||||1822664..1822915|+|252 bp|EGAD orf prediction|S .pneumoniae|R6|NC_003098.1|ORF|110
atgatttacccccaaattcgtttgatttcatccttgaaggcacgcgctgctcctgctggatccrcagcctctgtaattccacgacctgcgataaaggtaaagacatcaayaccttcaaagagtttgagagtatctacatctagaccacctgttacagatacacggaagcccatgtcaatgagttttttaaccttattaaggtctttttcaccccaagtttcaccagcaagaagagcatcacgagattggtga

SEQ ID NO: 1858 - DNA, 638 bp, Streptococcus pneumoniae
  misc_feature (1)..(638): tiling:Spneumo1:WAN024D9S; Cluster includes WAN0243XS spr1 139|cutC|15903182|NP_358732.1|1140517..1141149|-|633 bp|Co pper sensitivity|S.pneumoniae|R6|NC_003098.1|ORF|111
atgatttacgaattttgtgctgaaaatgtgactttacttgaaaargcgatgcaggctggagctygtcggattgaactctgtgataatytagcagttggtgggacmacaccyagctatggagtgamtaaggcagcggttgaactggcagctaaytacgatacaaccatcatgaccatgattcggccacgtggtggtgactttgtctataatgacctagaaattgctatcatgctagaagacattygtttgactgctcaggctggaagtcaagggkttgtatttggagctttaactgctgataaaaagttggataagcctaatctggaaaagttaattgctgcatcaaaaggaatggaaattgtctttcacatggcctttgatgaactaagtgatgaagatcaascggaagctattgactggctcagtcaagccggtgtcactcgtatcctaactcgtgctggtgtgtctggckactccttagaaaaacgttttgttcactatcacagaattttggagtacgctaaaggtaaaattgaaattctaccaggtggggggattgaccttgamaaccgtcaaayctttatygaccaggtgggggtaacacaattgcatggtactaaggttgttttttaactaat

SEQ ID NO: 1859 - DNA, 1148 bp, Streptococcus pneumoniae
  misc_feature (1)..(1148): tiling:Spneumo1:WAN024ETD; Cluster includes WAN02447N spr0 783||15902827|NP_358377.1|780983..782125|+|1143 bp|Probabl e pyridoxal-phosphate dependent aminotransferase|S.pneumon iae|R6|NC_003098.1|ORF|111
atgatttactttgataattcrgcgacgaccargccytatccwgaagcccttgaaacctatatgcaggtsgcttcaaaaattttaggaaayccatctagtctccatmgtttgggagaccargcaacacgaatyttagatgcttcycgycaacagattgcagatttaatcggtaagaaaagygatgaaatcttctttacmtckggtggracagaaggggataactggvtyatcaagggwgtrgcmtttgaaaaagcycagtttggcaagcacatcatygtwtcagccattgaacatccagcagtyaargartcagccctctggttgaaarstcaaggwtttgaagtggattttgctccagttgataasaaaggmttkgtsgatgttgaggcgytagmagrtttgatamgrcmtgatacraycctcgtttcyatcatggctgtgaacaatgaaatcggctctatccaacctattgaggctatttcagaattcttggcagacaagccractatttccttccacgttgatgsggttcaggcgcttrccaarattccgactgaaaagtatctgacagaacgrgtggattkygcgactttctctrgtcacaagttccacggrrtycgwggtgttggytttrtctatatcaartctggcaagaagattacrcctcttytwacaggtggtggycaggarcgwgattaycgttcgacaactgaaaatgtggcaggrattgcagcgacmgcyaaggcyctccgtttrtctatggaaaagctagatatctttaggagcaagactgggcagatgaaggcagtgattcgycaagcwcttctgracyatccggatatwtttgtcttttcagatgaggaaracttygcmcctcatattctgacttttggaatcaarggtgttcgwggtgargtcatygttcacgcctttgaagactatgatattttcatctcaacracctcrgcttgttcrtcyaaggcwggraaaccagccggwaccytgattgcyatgggagtggacaargataaggcymagtcagctgtgcgtcttagyctagacytkgaaaatgatatgagtcaggtcgagcagttyttgaccaagytaaaattratttacaatcaaactagaaaagtaagatarctaat

SEQ ID NO: 1860 - DNA, 918 bp, Streptococcus pneumoniae
  misc_feature (1)..(918): tiling:Spneumo1:WAN024GAG; Cluster includes WAN02447R spr0 779|fruB|15902823|NP_358373.1|775123..776034|+|912 bp|Fruc tose-1-phosphate kinase|S.pneumoniae|R6|NC_003098.1|ORF|11 1
atgatttatacagtcacactcaatccatccattgactatatcgttcgtttggaccaagtcaaagttggtagtgtmaatcgtatggacagtgatgataagtttgctggtgggaaaggaatcaatgtcagccgtgtcttgaaacgtttgaatataccaaatacagcgacgggatttatcggtggctttactggtaaatttatcacagatactttagcagaggaagaaatcgagacacgttttgtccaggtggcagaagatactcgtatcaatgttaaaatcaaagcagaccaagaaacagaaatcaacggaacgggtccaactgttgaaycggttcagctagaagaattgaaagctattttatctagtctgacagcagaagatacagttgtctttgcaggttcaagtgctaaaaatctaggcaatgttatctataaggatttgatttccttgacgcgccagactggtgcgcaagtggtctgtgactttgaaggacagaccttaattgatagtttggactaccagcctcttcttgtaaaaccaaacaatcatgaacttggagcgatttttggggttaaactcgaaagtytagatgaaattgagaaatacgctcgtgagttactggctaagggtgctcaaaatgttattatctctatggctggtgatggygcccttcttgtcacatctgagggagcttacttcgctaaaccaatcaaaggaacagtcaaaaattcagttggagctggtgattctatggttgctggattcacaggtgaatttgtcaaatcaaaagacgyagtagaagccttcaaatggggagtggcttgcggaacggcaactaccttctcagatgacttggcaacggcggaatttattaaagaaacatatggaaaagttgaggtagaaaaamgaykaactaat

SEQ ID NO: 1861 - DNA, 713 bp, Streptococcus pneumoniae
  misc_feature (1)..(713): tiling:Spneumo1:WAN024FZ6; Cluster includes WAN0243XI spr1 149||15903192|NP_358742.1|1150320..1151027|-|708 bp|Conser ved hypothetical protein|S.pneumoniae|R6|NC_003098.1|ORF|1 11
atgatttatgcaggaattcttgccggtggaactggcacacgcatgggratcagtaacttgccaaaacaatttttagagctaggtratcgacctattttgattcatacaattgaaaaatttgtcttggarccaagtattgaaaaaattgtagttggkgttcatggagactgggtttywcatgcagaagatcttgtagataaatatcttcctcttyataaggaacgtatyatcattacaaagggtggtgctgaccgcaatacaagtattragaamatcattgaagccattgatgcttatcgyccgcttactccagaggatatcgttgttacccacgattctgttcgtccatttattacrcttcgcatgattcargacartatcmaacttgcycaaaatcatgacgcagtggayacagtrgtagaagcrgtkgatactatcgttgaaagtaccaatggtcaattyattacagrtattccaaatcgtgctcacctytatcarggacaaacacctcaaacattccgttgcaaggacttcatggacctttatggatctctttctgatgaagagaaggaaatcttgacagatgcatgtaaaatctttgtgatcaaaggaaaagatgtrgcyttggccaaaggygaatactcaaatctgaagattacaaccgtaacagatttgaagattgcaaaaagtatgattgagaaagactarctaat

SEQ ID NO: 1862 - DNA, 570 bp, Streptococcus pneumoniae
  misc_feature (1)..(570): tiling:Spneumo1:WAN024D9X; Cluster includes WAN0243YE spr1 117||15903160|NP_358710.1|1115894..1116457|-|564 bp|Conser ved hypothetical protein|S.pneumoniae|R6|NC_003098.1|ORF|1 11
atgatttatttaagaaagttaaagaragaagatttgatgtctttatgggaaatggcttattcacarcttaatccagtttggaaacagtatgatgctccctattatgatgattatcagtatttttcaaattttaaagaattcgaactacaaaaatcagaatccattttaagcaactcaaatcgccttggtatttttgttgatgataaactagttgggactgtttcgcgttattgggtatgtaaasaaacaagatggatggaattgggaattggtatttatgataaaaaattctggaacactggtattgggaaagttgctatgttgcagtggatagataggacgtttcaggattacttggagttggagcatctggktttgacaacttggtcaggraatmttggtatgatgaaacttgctgaaaaattaagaatgaaaaaagaagctcatattccaaaagttcgttattatcaaggtaaatattttgayagtattaaatatggtattttgagagaagactgggagaaaataaatgacggttattatcaaatcaatggaaactccykaactaat

SEQ ID NO: 1863 - DNA, 684 bp, Streptococcus pneumoniae
  misc_feature (1)..(684): tiling:Spneumo1:WAN024EYB; Cluster includes WAN0243OS spr1 463||15903506|NP_359056.1|1443951..1444628|-|678 bp|Conser ved hypothetical protein|S.pneumoniae|R6|NC_003098.1|ORF|1 11
atgatttcaaagagattagaattggtagcttcctttgtgtcacagggggctattttactagatgtgggaagtgaccatgcttatctgcctatcgagttggttgagagaggccaaatcaaaagcgctattgcaggtgaggtggtggaaggtccctatcagtctgcggttaaaaatgttgaggctcacggcctaaaggagaaaatccaagtccgtttagccaatggcttggcagcttttgaagagactgaccaagtgtctgtcattaccattgctggcatgggtggtcgtttgattgctaggattttagaagaaggtttggggaagttagctaatgtagarcgtttgatcctccagcccaataatcgtgaagacgacttgcgtatctggctacaggatcatggattccagattgtagcagaaagmatyttagaagaagctggaaagttttatgagattttggtggtggaagcaggacaaatgaagctatcagccagtgatgttcgctttggtcccttcttgtccaaagaagtcagtccagtatttgtccaaaaatggcaaaaagaagctgagaagctagagttcgccctcggacaaatcccagaaaaaaatctggaagaacgtcaagttctagtagataagattcaagctatcaaggaggtgctccatgttagcaagykaactaat

SEQ ID NO: 1864 - DNA, 414 bp, Streptococcus pneumoniae
  misc_feature (1)..(414): tiling:Spneumo1:WAN024D3V; Cluster includes WAN023MDK 3126 68_136b||||63967..64257|+|291 bp|EGAD orf prediction|S.pne umoniae|R6|NC_003098.1|ORF|210
atgatttccttgagctgttctggtgagaaatatttacgtccagcatcaatagaaacaattttctttttcgctagtttttcatttacagttgcagcacgttcctttcctgyctctgttkccggtttgtcagcctctgctttcgcttcatcttttttagctggtttatccttgtcagtcttgtctgtatttgactctttagaatcaacctctttcgcttcttcctttttagggctagcttcttctkcctttttattagcagtttctttttcagcagaagttggagttaccacytctgctttatcactaggagttgaactaacttcctcttgtggtttttcttctgtttttggaagactagctaccttatcagtagctggagtttctgtttctacagtttttggagcttctggttga

SEQ ID NO: 1865 - DNA, 291 bp, Streptococcus pneumoniae
  misc_feature (1)..(291): tiling:Spneumo1:WAN024F5M; Cluster includes WAN023LJ4 3144 93_1808||||973675..973965|-|291 bp|EGAD orf prediction|S.p neumoniae|R6|NC_003098.1|ORF|110
atgatttcgacaagactggctacatccgaaatatctggaacgcaatccaaagtcaccacatcatcagccaagataatagctggaattaaggcaacgacactatttttagcaccactaatagtgatttcaccttgcagtggtaatccaccattgataacaatttttctcattctaagttttcaatactctttcaagatttctaataaggtcttcaaaataaagtatatcataaatttatccttttttccatccttttcaattttattggataaatcagagttgacgagttag

SEQ ID NO: 1866 - DNA, 966 bp, Streptococcus pneumoniae
  misc_feature (1)..(966): tiling:Spneumo1:WAN024FTO; Cluster includes WAN023P1D pne6 1_17||||11406..12371|+|966 bp|Type 33B capsule operon, Gli mmer 2.02 orf prediction|S.pneumoniae||WAN01UCGA|ORF|000
atgatttcgattattgttccagtatataatgtgaaagactatctacattatgcaatggaaagtttatttagacaaacatacacagactttgaagttattttagttaatgatggttcaacagatagttctggtgaattatgtaatcggtacgctgaaaatcatgagaatgtttatgtttttcataaaaaaaatggtggactttcggatgctagaaattttggtgtcacgaaggcttcttcggattggatagtttttctrgatccagatgactattttgaagtagatgctttagaactattagttaagattcagcaaagatatgacgcagatttgatatcaactaaagtaaaatctacttcgacatatgaagattataattctgactatatgggagaatctgtttatagtaatcttgaagtactttcaaaagaggaagcattagaactgatgcttcaagataaagttgcaacagtatcggcctgtgctaaactatatcataagagtattttagaaagagctcccttccctattggaaaagtctatgaagatttttatgttgttggtgaacatttggcattagcaaatagaattgtaataagtccttataaaacctacaattatttttgtagaccgggtagtatcgttcgttctaaatttactgttaagaggtttaacttttttgaagctgctgaacataatcgtagtattattaaaaaatattataattcaaaaaatcttgaaaatgttttaaatatcaaaatagtgcagggttccttttctattgcttcatcagctgctgaatcagatgtagaatccttactagcaattaggaagaaactgtcctcattgtattggagtgttttcacatcaccaaaagcttcttatagactaaaattaaaatatacgttatttttacttttccctaaaggatattacaaattaaaaaaaatgataaagagagtggat

SEQ ID NO: 1867 - DNA, 115 bp, Streptococcus pneumoniae
  misc_feature (1)..(115): tiling:Spneumo1:WAN024F8C; Cluster includes WAN024269 SP14 81||15901331|NP_345935.1|1393992..1394099|-|108 bp|hypothe tical protein|S.pneumoniae|TIGR4|NC_003028.1|ORF|121
atgatttgtcaatttatccgcgatatgctggacttgccagcaaaaaatgtgacgattttggagggaagtaacattcacgtcttgccttccatgccctactcagcgywaskawttc

SEQ ID NO: 1868 - DNA, 828 bp, Streptococcus pneumoniae
  misc_feature (1)..(828): tiling:Spneumo1:WAN024CJR; Cluster includes WAN0242NE SP08 26||15900714|NP_345318.1|775754..776575|+|822 bp|hypotheti cal protein|S.pneumoniae|TIGR4|NC_003028.1|ORF|011
atgattttaaaaatttataatrgggaatatagtttacaatgggatggaatatactacytagcactaattgattatccaaatattcaagagtgggaattagaaaaaattgctaaatttatagcttacgaaaaacttcataaacgtcaaacaagtattgagtgtgctgattcttgtttaaaaaaagaaattttagattacatctgtcagcatccctttctgccaccatttacycctacagataaaagagtagcctcgacttatgayctacataagaggttagtgacttcagactactgtagtcatactacgactatagatgcagcgatttctatytttaaaacwgrtcrkctyttatctgctgtgaaagcctttrggcgagatgctgargagttggttttggatagtmgaaatgctgcatckgatccgatagattattttgaytatgtcatgttagggtggtcaaatacaagttctggttatcgattrgcgatggagcgtttattaggtcgagctccttcagagaaagaattacaagacaagtttattcctggagtragttttcattttatctatacagatttgattaaagttmctggttatatttttgatggytaccatgytgyaaaaattaaggacatgytkaatttattwagtgagttgtatatttgyattattccaactcataataagagccaatttgaaaatattattccaacyaaaatacaagatagggtgyattatcttgactatgctggagaagacttagaagagtggactaagaaagtctatcaagttgttttaaaacaatcagataaaggactarctaat

SEQ ID NO: 1869 - DNA, 935 bp, Streptococcus pneumoniae
  misc_feature (1)..(935): tiling:Spneumo1:WAN024D2B; Cluster includes WAN0243ZL spr1 074|lacC|15903117|NP_358667.1|1072748..1073677|-|930 bp|Ta gatose-6-phosphate kinase|S.pneumoniae|R6|NC_003098.1|ORF| 112
atgattttaacagtyacaatgaacccatccatygatatttcctatcccttggatgagttgaagattgatactgtcaatcgtgtggtggatgtaaccaaaacggctggtggtaagggactcaatgttacccgagtactttcagaatttggygattctgttcttgctactggtttagtgggtggcaaacttggtgagttyttggttgaacatatcgataatcaagtaaagaaagatttcttctcaattmagggagaaactmgwractgtatcgcyattctccacggagacaaccaaacagaagttcttgaaaaaggtcctgaagtattggaacasgaaggtcaagastttttggaacatttcaaaammctcttggagtcagttgaagtagtrgccatctcaggtagtctgccagctggccttccagttgaytactatgcgagcttggtagaamttgctaatcaagctggcaagcmtgtagtcttggactgctcaggtgcagcacttcaggctrtyctygaatcaccccatawwccaacagtcatcammccaamtaatgawgaattgtctcagcttcttggaagagaagtttctgaggatttrgatgaattmamagaagtacttcaagaacctttgtytgcagggattgaatggattatcgtttcacttggtgccaacggtacttttgccaaacatggtgacactttctacaaggtagatattcctagaattcaggtggtaaatcctgttggatctggagactytactgtggcaggaatttcttcaggacttcttcacaaagaatcggatgcagaattactcatcaaggcaaatgtccttggtatgctcaatrctcaagaaaaaatgactggtcatgtcaacatggccaactatcaagytctatatgatcaattaatagtaaaagaggtataactaat

SEQ ID NO: 1870 - DNA, 864 bp, Streptococcus pneumoniae
  misc_feature (1)..(864): tiling:Spneumo1:WAN024CYN; Cluster includes WAN0243BO spr1 937|tktN|15903978|NP_359528.1|1918865..1919722|-|858 bp|Pu tative transketolase n-terminal section|S.pneumoniae|R6|NC _003098.1|ORF|111
atgattttaagtaaaaatagagaagatgrgttaagaaaatttgcgactaacatccgattaaatactcttagaacattgaatcatcttggattcggacattacggaggaagtctgtctatcgtagaagttttagcrgtgctttatggtgaaataatgccaatgactccagaaatatttgcagcacgagatagagattatttcatattatcaaaaggtcayggaggaccagctctatacagtacactctatttgaatggtttctttgacaaagaattcytatattctttaaatacaaatggaaccaaattaccgtctcatcctgatagaaatctaacgccaggcatagatatgacaacgggctctttaggacaaggaattagtgttgcaactggacttgcatatggtcagagaataagaaagagtcccttttatacttaygctattgttggagatggtgagttaaatgarggacaatgttgggaggctatacagtttgcttctcatcaacagttatccaacttaattgtatttgttgatgakaacaaaaaacaattagatggttttacaaaggatatttgtaatccaggtgatttcgtagaaaaattttcagcatttggatttgaatccattagggtcaagggttcagatattagagaaatttatgaagggattgtccaattaaaacagtcaaataattcatcacctaagtgcattgtattagatactattaaaggtcaaggggttcaagagctggaagaaatgaaatccaaycatcatcttcgccctactgtagaggagaracaaatgttaacytcagttgtagaaagattaagtcaggaattggaggaaacagaaykaactaat

SEQ ID NO: 1871 - DNA, 222 bp, Streptococcus pneumoniae
  misc_feature (1)..(222): tiling:Spneumo1:WAN024AVI; Cluster includes WAN02446H spr0 825||15902869|NP_358419.1|827547..827768|+|222 bp|Hypothet ical protein|S.pneumoniae|R6|NC_003098.1|ORF|121
atgattttaatgacaaaaaatataaatctaacaaatgaagaattagagctgatacaaggtggagcagatycatatggtaaaaatcctaatggtaggtacgattgggaaatagaaccagtattaactctgcyggttcatggattttgtyccagaggcacctatgattyaggatatattggaggaggyaatcatctttgcaaaggaagtgctgcgagattttaa

SEQ ID NO: 1872 - DNA, 240 bp, Streptococcus pneumoniae
  misc_feature (1)..(240): tiling:Spneumo1:WAN024DV5; Cluster includes WAN023KD0 3140 72_3656||||1971003..1971242|+|240 bp|EGAD orf prediction|S .pneumoniae|R6|NC_003098.1|ORF|110
atgattttattagctgtattccagtcgtcacgaccaaactctgttacagggacacgaatgtcaaaacggttctcaatctccacaatcaactcaaccgttcccatactatccaagacacctgcatcaaaaagatcttcatccatcatgtcagaaacatcttccataaacaactcatcaataatttcaataacttctgatttgatatccatattttatttccttttattttttaaaccatag

SEQ ID NO: 1873 - DNA, 573 bp, Streptococcus pneumoniae
  misc_feature (1)..(573): tiling:Spneumo1:WAN024FD7; Cluster includes WAN0243K0 spr1 636|trpG|15903678|NP_359228.1|1608877..1609443|-|567 bp|An thranilate synthase component II (glutamine amido-transfer ase)|S.pneumoniae|R6|NC_003098.1|ORF|111
atgattttattgattgacaactatgattcttttacctataacttggcccaatacattgggaattttgcagaagttcaggttctgagaaatgatgattccaagctgtatgaagaagctgaaaaagcagatggtctggtcttttctcctggtcctggttggccagttgatgctggaaagatggaagacatgattygtgaytttgcaggcaagaagccgattctwgggatttgtttrggycaccaagccattgcagaagtctttggtggtaagctaggtttggctccaaaagtcatgcatgggaaacagagcaatatcaactttgaagcgccatctgttttgtatcaaggtattgaggatgrmcrtgcggtcatgcgttatcacagtattttgattgaggaaatgccagaagactttgaagtgacagctcgttcgactgatgaccaagccatcatggggattcaacataaaaacctaccgatttatggcttccagtaccatccagagagcattggaacgccagacggcttgtcttctattcggaattttatcgagraggttgtaaagykaactaat

SEQ ID NO: 1874 - DNA, 249 bp, Streptococcus pneumoniae
  misc_feature (1)..(249): tiling:Spneumo1:WAN024GJI; Cluster includes WAN023LZG 3149 71_895||||473546..473794|+|249 bp|EGAD orf prediction|S.pn eumoniae|R6|NC_003098.1|ORF|110
atgattttcccctggtcaagaacaatgacacggttrgttcgttcggctatactgagacgatgggctacaaagagaatggttttatcagttagrgayataagattatctataacctttttctcagtcaagacatcaagaccgctagtagcttcrtctagtattaaaacaggagatttagttaaaagagcacgagcgagagcgattcgttgcttytgtcctcctgatagaccagctccatcagagagctga

SEQ ID NO: 1875 - DNA, 102 bp, Streptococcus pneumoniae
  misc_feature (1)..(102): tiling:Spneumo1:WAN024G76; Cluster includes WAN023SKK NC_0 03098.1_1210||||940071..940172|-|102 bp|Glimmer 2.02 orf p rediction|S.pneumoniae|R6|NC_003098.1|ORF|101
atgattttcttcttccataatatccaattgatagttgggaatgaaaataagaccgctctatttgacaccgaaagacaccttgatatagacgcccttatcaac

SEQ ID NO: 1876 - DNA, 381 bp, Streptococcus pneumoniae
  misc_feature (1)..(381): tiling:Spneumo1:WAN024BDR; Cluster includes WAN023MCN 3127 95_184a||||89747..90127|-|381 bp|EGAD orf prediction|S.pne umoniae|R6|NC_003098.1|ORF|110
atgattttgttggcatttgctaacaattcatccaagttgtctggtttgtcaccgatttggtacattttgataacaggtttgtcacctgaatcagcagcttttttgctgttacctgtcaaatttccacaagcagcaagacctgcagccagagcgactacactagcagatgcaaaagcatattttttccagtttttcatgataaaaactcctttttttatttttaaacttataaacaatgtaatgatcttatactcaatraaaatcaaagagcaaactagaaaactagccgcaggctgctcaaagcactgctttgaggttgtagataagactgacgaagtcagttacatatatctacggcaaggcgacgttgacgcggtttga

SEQ ID NO: 1877 - DNA, 632 bp, Streptococcus pneumoniae
  misc_feature (1)..(632): tiling:Spneumo1:WAN024F9X; Cluster includes WAN0243HI spr1 726||15903768|NP_359318.1|1705748..1706374|-|627 bp|Conser ved hypothetical protein|S.pneumoniae|R6|NC_003098.1|ORF|1 11
atgatttttacrtataayaaagaacatgtcggtgatgtccttatggtcatcgtgaaaaatagcggagatgccaaactgratgtggarcgyaaaggcaaggtagcccgtgttttyctcaaagawaatggggaaacagtrgcttggaayattttygargtttcragyttrtttgaaaytgcagagcgcggtcaagtctttttrwcagatgagcaagtcgctcgtttgaaccaagarttrcaggcggaaggttttacagaagaaattgttaatgataaggaacctaagtttgttgthggtgaaattgtygagatggtagcycatccagayagtgaccacctcaacatctgccaagttgcagtcgcaagtgayaagaywgtrcaaatcgttgcaggagcwccyaatgcgcgtgtkgggttgaaaaccattgtsgckcttcctggwgcyatgatgccaaaagggaatytcattttcccaggygaacttcgtggtgaaaagagttttggkatgatgtgyagtcctcgtgaattgcatytgccaaatgctccrcaaaaacgtggggtgcttgaattatcagaagaccaagttgtcggaacaccrttygacycagckaaacactggactgcctarctaat

SEQ ID NO: 1878 - DNA, 102 bp, Streptococcus pneumoniae
  misc_feature (1)..(102): tiling:Spneumo1:WAN024CNH; Cluster includes WAN0246S8 5613 45-74-2||||||102 bp|DNA Streptococcus pneumoniae phage Dp- 1 open reading frame 270|S.pneumoniae||WAN0246S8|ORF|000
atgatttttcggtcttcgccatatcggtttttaacgacagatagttcaagtatgccggatttttcgtcacgcttcatagcgataactctgctagcattttga

SEQ ID NO: 1879 - DNA, 1262 bp, Streptococcus pneumoniae
  misc_feature (1)..(1262): tiling:Spneumo1:WAN024G7W; Cluster includes WAN02443M spr0 928|glyA|15902972|NP_358522.1|913285..914541|+|1257 bp|Ser ine hydroxymethyltransferase|S.pneumoniae|R6|NC_003098.1|O RF|111
atgatttttgacaaagatgattttaaagcatatgatgctgatctctggaatgctattgccaaagaagaagaacgccaacaaaataatatcgagttaattgcttcggaaaacgtagtttccaaggctgttatggcagctcaagggtctatcttgacaaataaatatgccgagggttacccaggacgccgttattatggtggaactgatgtagtagacgttgtagagactcttgctattgaacgcgcaaaagaaattttcggtgctaaatttgcyaatgtycaaccacattcaggaagccaagctaactgtgcggcttacatgtccttgattgagccaggtgatacggttatgggaatggatttggcakcaggtggwcayttgacycayggrgctccwgttagcttctctggtcaaacctacaactttstttcytatagtgtkgatcctraaacggaactyttrgactttgatgctatcttgaaacaagcccaagaagtaaaaccaaaactgattgtagctggtgcttcagcmtattctcaaattatygayttttcaaaattccgtgaaatygcagatgctgtyggkgckaagctyatggtkgayatggcccayatcgctggyttggttgcrgctggycttcayccaagcccagtkccatacgctcatatcacwacaacaacgacccacaaaacccttcgtggwcctcgtggtggtttgattttgaccaatgaygargawytwgctaaraaaatcaattcagctattttcccwggtattcagggyggtcctttrragcatgttgtggckgctaaggcagtttccttcaaagaagttttggatccagcyttcaaggaatatgctgccaatgtaattaagaacagcaaggctatggcagatgtcttcttgcaagaccctgatttccgtattatttcaggtggaactgaaaaccatctcttccttgttgatgtgactaargttgtagaaaacggmaaagttgctcaaaacttgytggatgaagtcaatattaccytaaataaaaaytcaatcccttacgaaascttgtcrccattcaagacaagtgggattcgtatcggagcagcagcyattactgcacgtggatttggtgaagaagaaagtcgcaaagtggctgaactcatcattaaaacccttaagaattcagaaaatgaggctgtattagaagaagtgagaagtgcagtcaaagaattgacagatgccttccyaytatacgaggamtaactaat

SEQ ID NO: 1880 - DNA, 458 bp, Streptococcus pneumoniae
  misc_feature (1)..(458): tiling:Spneumo1:WAN024D62; Cluster includes WAN0243N3 spr1 524||15903567|NP_359117.1|1500534..1500986|-|453 bp|Conser ved hypothetical protein|S.pneumoniae|R6|NC_003098.1|ORF|1 11
atgatttttgacgatttgaaaaacatcaccttttacaaagggattcatccyaatttagacaaggctatcgactayctctaccaacaycgtaargattcwttcgaattaggaaagtatgakattgatggrgataaagtctttctagttgttcaggaaaatgtcctcaatcaagytgaraatratcratttgaryaycataagaacyatgcagatttgcatttgctgrtagaaggrcatgaatattcgagctacggttcacgtatcaaagacgaggcagtagcattcgacgaagcgastgacattggctttgttcattgtcatgaacactacccrctcttrttgggttatcacaattttgcgattttcttcccaggtgagccacatcagccaaatggttatgcaggcatggaagaaaaggttcgaaaatatctctttaaaatyttgattgattaactaat

SEQ ID NO: 1881 - DNA, 779 bp, Streptococcus pneumoniae
  misc_feature (1)..(779): tiling:Spneumo1:WAN024EW9; Cluster includes WAN0243FB spr1 805||15903847|NP_359397.1|1776061..1776834|-|774 bp|Conser ved hypothetical protein|S.pneumoniae|R6|NC_003098.1|ORF|1 11
atgatttttgatacacatacacacttgaatgtagaagaatttgcaggtcgtgaggcagaagaaattgccttggctgctgagatgggtgtgayacagatgaatattgttggttttgataaaccgacgattgagcrtgccttggagttggtagatgagtatgagcagctctatgcgactattggttggcatcctacagaagctggtacttatacagaggaagttgaggcttacttgttggataagttaaaacatyccaaggttgtggctytaggtgaaattggcttagaytaccattggatgacagcgcccaaagaggtgcaggagcaggtttttcgycgtcagattcagctatctaaggacttggatttgccttttgttgtccatacccgtgatgcgctggaagatacctatgagattatcaagagtgagggcgttggtcctcgtggtggtatcatgcattcattttcagggacgcttgagtgggcagagaagtttgtggatcttggtatgaccatttccttctcaggagtggtgacyttyaagaaggcaactgacctccaagaagcagctaaagagttacctttggacaagatkttggtrgaaacagatgcgccttacttagcacctgtacccaagcgtggycgtgaaaataaaacagcctatactcgctatgtggtsgactttatcgctgacttgcgtggtatgacgacagaagagctrgcggyrgmaacgactgcaaatgcagaacgmatttttggaytggacagcaagtaactaat

SEQ ID NO: 1882 - DNA, 477 bp, Streptococcus pneumoniae
  misc_feature (1)..(477): tiling:Spneumo1:WAN024FOI; Cluster includes WAN023PIV pne3 3_14||||7880..8356|+|477 bp|Type 16A capsule operon, Glimm er 2.02 orf prediction|S.pneumoniae||WAN01UCI4|ORF|000
atgatttttgtaactgtcggtacgcatgagcaacaatttaatagactaataaaagagattgatgaattgaaagcagagggagttattacgtcggatgtatttatccaagttggtttttcagactatcaacctcgattttgtagatgggaacgttttctttcgtatgatgagatgaataacctaatggaagaagcggatatagttattactcatggtggtcctgctacatttatgaatgttattgctaatgggaaaagaccagtagttgttccgagaagaaaaaaatttggagaacatgtgaatgaccatcagttagatttttgtaataggattgttcaggagggatatgatttagtagtcatagaggatattaaaaaaatccgagaatacctgaatccatctagtagtattgccgttaaatctaataatgaatgctttgtacaacatttttcaaatttgattgcagaattagttgag

SEQ ID NO: 1883 - DNA, 477 bp, Streptococcus pneumoniae
  misc_feature (1)..(477): tiling:Spneumo1:WAN024FUJ; Cluster includes WAN023PPB pne2 0_10||||7963..8439|+|477 bp|Type 11A capsule operon, Glimm er 2.02 orf prediction|S.pneumoniae||WAN01UCJ5|ORF|000
atgatttttgtgacaataggtactcatgagcaacagtttaatcgacttattaaagaagttgatagattaaaaggtgagggatttattcaggatgatgtttttattcagactggtttttcagattatgaaccagtgtattgtcaatggaagaatctgatttcttatgatgagatgaatcgctatatagatgaagcaaatattatcattacacatggcggcccagctacatttatggcagttattgctaaaggaaaaataccaatagttgttccgagattaaagaagtttggtgagcatgtgaatgatcatcagatggaattttgttctaaaatactatccgaagggtatgaattatctctgattaatgatataagcgaattgcagtatagtttaaagcaagaaaagaaaactaaattttactctaataatacatgttttcttaagaaattatcaaaaacaattgaagatttaatagta

SEQ ID NO: 1884 - DNA, 504 bp, Streptococcus pneumoniae
  misc_feature (1)..(504): tiling:Spneumo1:WAN024FUK; Cluster includes WAN023PM2 pne2 8_11||||6966..7469|+|504 bp|Type 15F capsule operon, Glimm er 2.02 orf prediction|S.pneumoniae||WAN01UCCC|ORF|000
atgatttttgtgacagtaggtactcatgaacaacagtttaatcgacttattaaagaggttgatagattaaaaggtgagggatttattcaggatgatgtttttattcaaacaggatactctaattatgttccaaaattttgtaaatgggaaaaattaatatcttatgaaaaaatgaatcaatttattgaggaagctgatacaatcattacccatggcggtccagctacgtttatggcagttattgctaaagggaaaagtccgataattgttccgagattaaaaaaatttggtgagcatgtgaacgaccatcaacttgaatttgttgagaaagtgttaaatgtctataatttgacagtcatcactaacataagtgatcttaattcctatatttctaattttgatgagcgaaaaaaatcagatttgaagagcaaaaataatctatttatggagaaatttatagatatgattaatcagttgatggagacaggtgacatcaagtatgac

SEQ ID NO: 1885 - DNA, 504 bp, Streptococcus pneumoniae
  misc_feature (1)..(504): tiling:Spneumo1:WAN024FUH; Cluster includes WAN0240PD |cps 14G||CAA59779.1|||504 bp|ss-1,4-galactosyltransferase|S.pn eumoniae||X85787|ORF|000
atgatttttgtgacagtaggtwctcatgaacaacagtttaatcgacttataaaagaggttgatagattaaaaggtgagggatttattcaggatgatgtttttattcaaacaggatactctaattatgttccaaaattttgtaaatgggaaaaattaatatcttatgaaaaaatgaatcaattgattaaggaatcagatattatcattacccatggcggtccagctacgtttatggcagttattgctaaaggtaaaaatccaataattgttccgcggctaaaaaaatttggtgagcatgtaaatgatcaccagatgcaatttgtaaaaataacgaaagaaatatacaatttaatagttatagatgatatttcagacttacatttaattcttcataattttaaggacaaacattttgaaacttatttgaataacgagagatttaatgtacgtttcaatgtggaaatcagtaacctttttaaaggaaataaaataaatgaaaattag

SEQ ID NO: 1886 - DNA, 501 bp, Streptococcus pneumoniae
  misc_feature (1)..(501): tiling:Spneumo1:WAN024FUI; Cluster includes WAN023PKQ pne3 0_9||||6612..7112|+|501 bp|Type 15B capsule operon, Glimme r 2.02 orf prediction|S.pneumoniae||WAN01UCIK|ORF|000
atgatttttgtgactgtaggtacacacgaacaacaatttgatcgattgattaaagaagttgattatctaaaaaaagaaaatcttattcaagatgaagtatttattcaaataggatattccagttatattccgaaatattgtgagtgggaaaagataatttcttatgaaaaaatgaatcaattgattaaggaatcagatattatcattactcatggtggaccagcgacgtttatgggggttattgctaaaggaaaagttccgatagttgttccgaggcaaaaaaaatttggagagcatgtgaatgaccatcagcttcaattcgtaaaactgacgaaagaaatatacaattttatagtcatagatgatatttccgacttatatttaagtatacgtgattttaaggataaatattttggaatttgtttgaacaatgaaagatttaatctacattttaatgcggaaattaataaactatttgaaggaaataaagtagatgaaaat

SEQ ID NO: 1887 - DNA, 270 bp, Streptococcus pneumoniae
  misc_feature (1)..(270): tiling:Spneumo1:WAN024D67; Cluster includes WAN0243NK spr1 507||15903550|NP_359100.1|1485184..1485447|-|264 bp|Conser ved hypothetical protein|S.pneumoniae|R6|NC_003098.1|ORF|1 11
atgatttttttaattcgtatgatttataatgcagtggatatttactccctgattttggtagccttcgctgtcatgtcttggtttccaggtgcctacgaatccagtttaggtcgttggattgtagcgttggtgaaaccagtrcttgctcccttgcaacgcctgcctttacagatagcgggtcttgatttatctgtttgggtygcgattgttttggttcgatttttaggagaaaacctagtgcgttttctggcgatgataggaykaactaat

SEQ ID NO: 1888 - DNA, 114 bp, Streptococcus pneumoniae
  misc_feature (1)..(114): tiling:Spneumo1:WAN024E2Q; Cluster includes WAN02429R SP13 51||15901205|NP_345809.1|1272544..1272651|-|108 bp|hypothe tical protein|S.pneumoniae|TIGR4|NC_003028.1|ORF|021
atgattwkkgtaaaagcaactcagttagttgatgaaatggaacaagtaggtttaatccgatttgatgaatttggaaatgttggaattttagtcttggagggacaayyaactaat

SEQ ID NO: 1889 - DNA, 1451 bp, Streptococcus pneumoniae
  misc_feature (1)..(1451): tiling:Spneumo1:WAN024EYQ; Cluster includes WAN0243QZ spr1 384|murE|15903427|NP_358977.1|1367399..1368844|+|1446 bp|U DP-N-acetylmuramoyl-L-alanyl-D-glutamyl-L- lysine Ligase|S .pneumoniae|R6|NC_003098.1|ORF|221
atgatwaarattgaaacygtattagatattttaaagaaagatggcctttttcgcgaaattattgaccaaggtcattaccactacaactacagcaaagttrtttttgatagcatcagctacgacagccgaaaagtaacagaagacactctttttttygcaaaaggcgctgcctttaaaaaagaataccttctttctgctataacacaagghttagcttggtatgtagctgaaaaggactacgaagtcgrtatccctgtcatcattgtgaacgatataaagaaagccatgagtttgattgccatggagttctatggtaatccacargaraaactcaaactccttgcctttactggtactaagggtaagacaacagcarcctatttcgcctataacatcttatctcargggcatmgacctgctatgttgtcgaccatgaacacaactcttgatggcgagactttctttaagtcagcgttgacaacccctgagagtattgacctctttgacatgatgaatcaggctgtgcwaaatgaccgtacccacctcatcatggaagtctccagtcaakcctatctrgtcmrwcgwgtctatggwctracctttgatgtrggagtyttycthaayatcasyccwgaccatatcggcccgattgaacaccctagctttgaagactatttctaccacaagcgtctcttgatggaaaakagccgagcagtcatcattaacagtgacatggaccacttctcagtcttgaaagaacaggttraagatcaagaccatgatttctatggtagccaatttgataaccaaatcgagaattccaaagcctttagcttttcagctacgggtaaactcgctggagattatgatatycaactcattggcaacttcaaccaagaaaatgcagttgctgctggacttgcttgtctccgtctcggagcaagtcttgaggacatcaaaaaaggcatcgctgcaacccgcgttcctggtcgtatggaagtcctcactcagaaaaatggagccaaggtcttcatcgactatgcccacaatggggatagtctgaaaaaactcatcaatgtggttgaaactcatcaaaccggaaagattgctctggttctgggatcaacaggaaacaagggagaaagtcgtcgtaaggactttggcctcctcctcaatcaacaccctgagattcaagtctttctgactgctgatgaccctaactatgaagacccaatggccattgcagatgaaattagtagctacatcaatcatcctgttgaraagattgcggatcgccaagaagccatcaaggcggcaatggctatcacaaatcacgaattagatgcagttattattgcgggtaagggagccgattgttaccaaatcatccagggcaagaaagaatcctacccaggagatacagccgtcgcagaaaattatttataactaat

SEQ ID NO: 1890 - DNA, 732 bp, Streptococcus pneumoniae
  misc_feature (1)..(732): tiling:Spneumo1:WAN024BII; Cluster includes WAN0241JI |wgh ||AAQ97638.1|||302 bp|putative phosphotyrosine protein pho sphatase|S.pneumoniae||AY330717|ORF|000
atgatwgayatycattcgcayatygtytttgatgtagatgayggtcccaagtcaagagaggaaagyaaggctctcttgrcagaakcctacaggcagggggtgcgaaccattgtctctacctctcaccgtcgcaagggcatgtttgaaactccagaagagaagatagcagaaaactttcttcaggttcgggaaatagctaaggaagtcgcgagtgacttrgtcattgcttatggggcygaaatttactacacrycagatgttttggrtaagctggaaaahaatcggattccgacmctcaataatagtcgttatgccttratagagtttagtatgaacacyccttatcgcgatattcatagtgccttgadtaaaatattgatgttgggaattactccmgtcattgcccacatmgagcgctatgatgywcttgaaaayaatgaaaaacgcgttcgagagctgatyratatgggctgttacacgcaartaaatagttcacatgtcctcaaatccaaactttttggagaacsktataaattcatgaaaaaaagagckcagtatttcttggagcgtgatttggttcatrtsattgcaagtgatatgcataatgtggacrrcagaccyccccatatggcagaagcrtatgaccttgtttcycaaaaatayggagaarcgaaggctcaggamctttttatagahaatcctcgaaaaattgtaatggatcaactaatttag

SEQ ID NO: 1891 - DNA, 1772 bp, Streptococcus pneumoniae
  misc_feature (1)..(1772): tiling:Spneumo1:WAN024CYD; Cluster includes WAN0243AX spr1 964|fucI|15904005|NP_359555.1|1951630..1953396|-|1767 bp|L -fucose isomerase|S.pneumoniae|R6|NC_003098.1|ORF|111
atgatycaacatccacgtattggkattcgtccgactattgatggtcgtcgtcaaggtgtacgcgaatcacttgaagtrcaaacaatgaacatggctaaaagtgtggcagatttgatttcaagcacattgaaatatccagatggggaacctgtggaatgygtgatttctccatctacyattggycgtgtwccagaggctgcagcttcccatgagttgttyaaaaaatcaaatgtttgcgcaacaattacagttacaccatgctggtgttatggtagtgaaactatggatatgtctccagatattcctcatgctatttggggatttaatgggacagaacgcccaggagctgtctatcttgcagctgtactagcttcacatrctcaaaaagggattccagcctttgggatttatggwagagaygtycaggaagctartgayacagmtattccagaagatgtcaaagaaaaacttttacgytatgcgcgkgcagctcttgcaactggcttgatgagagacactgcttacctatcaatgggtagtgtttcgatggggattggyggttctattgtaaatccrgatttcttccaagaatacttaggaatgcgaaatgaatcggtagatatgacggagttcacrcgccgtatggaccgtggtatttacgaccctgaagagttygaacgtgckmtsrwwtgggtraaagaamayrtmaaagaaggaktygaccrwaaycgtgargaycttgttytwwsymrwgaagaraaagawaracaatgggaatttgttattaagatgttcatgattggacgtgacttaatggttggtaacccaagacttgctgaacttggttttgaggaagaagcrgttggtcaccatgctttagtagctggtttccaaggtcaacgycagtggacagaccattttccaaatggkgactttatggaaactttcctcaatactcagtttgactggaatggtattcgaaaaccatttgtatttgcgacagagaatgattcactaaatggtgtgtctatgctctttaattatctattaacaaatactccacaaawctttgctgatgtgcgtacttattggagyccagaggctgttraacgtgtaacrggayatactttagagggtcgtgctgcagctggmttcttacatctaatcaactctggwtcttgtacattggatggtacaggtcaagctactcgagatggcaaacctrttatgaaaccattctgggagttggawgaaagtgaagtrcaggctatgcttgaaaatacagacttcccaccagcaaaccgcgaatacttccgtggaggaggattctcaactcgtttcttgacgaagggggatatgccagtaacaatggtacgtctcaatctwytaawaggggttggtccagtgctacaaattgcagaaggttacacacttgaacttcctgaagatgttcaccatactttagataatcgtacagatccaggatggccaastacttggtttgctccacgtttgacaggaaaaggtgctttcaagtctgtctatgacgtcatgaataattggggagctaatcacggagccataacatatggmcacattggagcagacttgattaccytggcttctatgttgagaattcctgtcaatatgcataatgtaccygargaagatatctttagacctaaaaattggtccttatttggaacagaagatctagaatcagcagactatcgtgcatgtcagttrttgggrccrctacataaataactaat

SEQ ID NO: 1892 - DNA, 674 bp, Streptococcus pneumoniae
  misc_feature (1)..(674): tiling:Spneumo1:WAN024F8N; Cluster includes WAN0243KW spr1 604|aqpZ|15903646|NP_359196.1|1579849..1580517|-|669 bp|Aq uaporin Z - water channel protein|S.pneumoniae|R6|NC_00309 8.1|ORF|211
atgawmraatttgttgctgagttaatcggtacgttcatgyttgtrttcgtygggacaggagctgttgtttttggaaatggtyttgatggccttggtcaccttggaatcgcctttgcctttggtttggcaatcgtggtggcagcctactcaatcggaactgtttcaggtgctcacttgaacccggctgtttcgattgctatgtttgtaaacaaacgtttgtcatcttcagaacttgtaaactacatccttggtcaggttgttggagctttcatcgcttctggcgcwgtcttcttcctcttggstaaytcaggtatgtcaactgctagycttggtgaaaatgccttggcaaacggtgtcactgtctttggtggtttcttgtttgaagtcatcgcaactttcttgtttgtmttggttatcatgactgtgacttcagaaagyaagggcaatggcscgattgctggtttggtaatcggtttgtcattgatggcgatgattcttgtcggattgaagattactggactttcagtaaacccagctcgtagcttggcaccagctgtcttggtaggcggcgcascccttcaacaagtttggattttcatccttgcaccaatcgctggtggagttcttgcagcccttgttgcaaaaaatttccttggaacagaagaataaytaat

SEQ ID NO: 1893 - DNA, 164 bp, Streptococcus pneumoniae
  misc_feature (1)..(164): tiling:Spneumo1:WAN0249MT; Cluster includes WAN024E88 R6.I G_1717||||1641770..1641932|+|163 bp|Between spr1668 (galK) (- strand) and spr1669 (galR) (+ strand)|S.pneumoniae|R6| NC_003098.1|IG|110
atgawttctcctttgactgtccgttaagccaycttaacgtgtaatcgttttctttctattrtatccaaggratttyccaaggtcaatcctttttactaaaattttastaaamtatcagtaaaaagmagaaaaayatgatatactaacctaatcaaggaggattt

SEQ ID NO: 1894 - DNA, 2451 bp, Streptococcus pneumoniae
  misc_feature (1)..(2451): tiling:Spneumo1:WAN024CI7; Cluster includes WAN0241YU SP17 67||15901598|NP_346202.1|1670182..1672626|-|2445 bp|glycos yl transferase, family 8|S.pneumoniae|TIGR4|NC_003028.1|OR F|011
atgawyaaaacaattgtaytagcwggkgatcgyaattacaycaggcagttagaaacaacsataaaatctattttataccacaatcgagatgttaagatttatattttraatcaagatatyatgccagattggtttcgcaaaccacgaaaaatagctcgcatgttaggtagtgagattatcgatgttaaactacctgaacaaactgtgtttcaagattgggaaaagcaagatcacattagtagcattacytatgctagatattttattgcagattatatccaagaagatamggttttatatttagacagtgatttgattgtaaatacttctttagagaaattatttagtatttgtttagaagaaaaatcactcgcagcagttaaagatacagatggaattacatttaatrcaggtgttytattaatcaacaatraaaaatggcgtcaagagaaattaaaagaacgactaattgaacagagcattgttacaatgaaggaagttgaagaaggccgtttcgagcattttaatggtgatcaaacgatttttaatcaggtcttrcaagatgattggttagaactaggtcgagcttataatttacaagtagggcatgatattgtggctttgtataacaattggcaggaacatctggcttttaatgataaaccagtggtgattcattttacgacctacagaaaaccctggacyaccttgacagccaatcgttatcgtgatttatggtgggaattccatgatttggagtggartcagattttacaacaycatwtgggagaatttgaactaatatcgcctctagataaggaattttcttgcttaaccttaacgaattcccaagatttagaaggaatagaagagctagttacagctctacctgaggtggtatttcatatcgcagcttggacggatatgggagataaattaaaaaaattagctgtatataataatgtgagattgcatccacaaattgttccwcckgtmttagataagctgaaaaagtcaacaaatctatatttggatatcaatcatggtagtgcagatgagaactttttaaaatctttgcaagaacaagaaaaaacgctactagcttttcaatcgactcagcacggagagttaggacaaatcgttttcgaaaatgggaaagtttcctttatgattgatacgattaaagattttaagaaaaacggacatcttacctgttttcgacaacttccaagtttaacttgtttaacgtttacggcttctcagkatatcgaacaattggattacttggctggacagttgccaaatgttgtttttcaarttgctgcttggacagctatggggccaaaattatatgatttgtctaatcgttatcctaatattcagctctatccggcaatttctagagataagctagacgagttgaaggagaagatggatgcttatttagatatcaacctactgacttcaacatccgatatcgttgcagaaatggctcatctatctaaacctatactagccttttataaatctcaaaatgggaataatggccaaaggttgtattcaagtgaacatcctgaacgaatgttggctgatttgcaaaaattgataactaaggatatgctagaaaaaccgcttgatataatccaggtgaaagggatagatgaaaccttggattatattattgaacacaactcttctttagttcgttttggagatggggaaatcaatatgcttgcagggcattcaattccctaccaggattatgatgaagagttggtttcaatcatgagggacattatcggccaagaaagtcgagaagatttagtagtgtgccttcctgatgcttttacagatcgttttaggtttacatcgtgggcgattccattttggaaagatcacatggatcattatatggatttttacagagagttatgcagtgattcatggtatggctcaacctttgtatctcgcccttatatcgattttgaagacaagagtcaagctaaagctcaatttgaaaaattgaaaagcatttgggaaaaccgtgacttactgatagtcgaaggtgcgacttctcgttcaggtgtcggaaatgatttattcgatgaggcaaattctattaagcgaattatctgtccttctcatagtgccttttctagagttcatgaacttgaacaagaaattgaaaagtatgctggtggtcgcttgattttatgtatgcttggacctacagcaaaagttctgagttataatctatgccagatgggctatcaagttttggatgtaggccatattgactcagagtatgaatggatgaaaatgggagctaaaactaaggttaaattttctcataaacatactgcagaacataatttcgaccaagatattgaatttattgatgatgaaacctataacagtcagattgttgcacgaatattaaacctarctaat

SEQ ID NO: 1895 - DNA, 1022 bp, Streptococcus pneumoniae
  misc_feature (1)..(1022): tiling:Spneumo1:WAN024DW5; Cluster includes WAN0243B4 spr1 957|arcB|15903998|NP_359548.1|1942769..1943785|+|1017 bp|O rnithine transcarbamoylase|S.pneumoniae|R6|NC_003098.1|ORF |221
atgayaaattcagtattccaaggacgcagcttcttagcagaaaaagactttacccgtgcagagttagaataccttattggtctttcagctcacttgaaagatttgaaaaaacgcaatattcaacaccactaccttgctggcaagaatatcgctctcctatttgaaaaaacatctactcgtactcgtgcagcctttacaactgcggctatcgaccttggtgctcacccagaatacctcggagcaaatgatattcagttgggtaaaaaagaatctactgaagatactgctaaagtattgggacgtatgtttgacgggattgaattccgcggattcagccaacgtatggttgaagaattggcagaattctcaggcgttccagtatggaacggtctaactgacgaatggcacccaactcaaatgctcgctgactacttgactgttcaagaaaacttcggtcgcttggaaggcttgacattggtatactgtggtgatggacgtaacaaygttgccaacagcttgctcgtaacaggtgctatccttggtgtcaatgttcacatcttctcaccaaaagaactcttcccagaaaaagaaatcgttgaattggcagaaggatttgctaaagaaagtggcgcacrtgttctcatcactgaagatgctgatgaagcagttaaagatgcagacgttctttacacagacgtttgggtatcaatgggtgaagaagacaaattcgcagaacgtgtagctcttcttaaaccttaccaagtcaatatggacttagttaaaaaagcaggcaatgaaaacttgatcttcctacactgcttgccagcattycacgatactcacactgtttatggtaaagacgttgctgaaaaatttggtgtagaagaaatggaagtaacagacgaagtcttccgcagcaagtacgctcgccacttcgatcaagcagaaaaccgtatgcacactatcaaagctgttatggctgctacacttggtaacctttatattcctaaagtataactaat

SEQ ID NO: 1896 - DNA, 446 bp, Streptococcus pneumoniae
  misc_feature (1)..(446): tiling:Spneumo1:WAN024DQ4; Cluster includes WAN02449T spr0 705||15902749|NP_358299.1|704074..704514|+|441 bp|Conserve d hypothetical protein|S.pneumoniae|R6|NC_003098.1|ORF|111
atgayaccgcaagaaatgtggaataaatacaarcaaatcaatccttykatcggagatgaaatcgatgcytgggcttttggagttgaaccagaccttttagcggatttggtgtttaaaggagaaaagacagcaacagcatcagcctatgacctytatgtrytagaagacgaaccacttccccaagtagggaccttcgatrtcattttagatagtcaaaatcagkctgtctgcattgtcgaaattacaaaggtttctgttraacycttcaatcragtktcwgcksamcatgcctwtaaggaaggtgagggaracaarwcacttgyctattggcgccaggttcatgaggaytttttcasaractgyttgggtgaagyaggrytgacttttacayctgaaagcaaggttgttttagaagaatttcgcaaggtctacccactgtarctaat

SEQ ID NO: 1897 - DNA, 327 bp, Streptococcus pneumoniae
  misc_feature (1)..(327): tiling:Spneumo1:WAN024CJP; Cluster includes WAN023K2D 8284 5_454||||254558..254836|+|279 bp|EGAD orf prediction|S.pne umoniae|TIGR4|WAN01UC25|ORF|010
atgayacgcaaagcatatgatactgatttaaaygatcaagaatgggckaagattgaaccctatttctccaaacaccgcacctataaatggccgaaacgagtacttgttaatgagactttgtacgtcactaaaacaggttgtcaatggcgcatgctccctcacgactttcctctttacttaayggtatggagtttctttcgtcgttctatgacgacaggttggttccaggtcaatggcagatggtactacgcttatagctcaggtgccttggcagtgaatacgacygtagatggctattctgtcaactataatggcgaatgggytcaa

SEQ ID NO: 1898 - DNA, 1406 bp, Streptococcus pneumoniae
  misc_feature (1)..(1406): tiling:Spneumo1:WAN024CU4; Cluster includes WAN0244E7 spr0 547|pepV|15902591|NP_358141.1|548029..549429|+|1401 bp|Dip eptidase|S.pneumoniae|R6|NC_003098.1|ORF|221
atgayagcaattgattttacagcagaagtagaaaaacgcaaagaagacctcttggctgacttgtttagycttttggaaatcaaytcagaacgtgatgayagcaaggctgatgcccarcatccatttggrcctggtccagtaaaagccttggaraaattccttgaaatcgcagaccgygatggytayccaactaaraatgtygataactaygcaggacattttgagtttggtgatggagaagaagttctcggaatctttgcccatatggaygtggtkccwgctggtagcggttgggayacagayccttacacaccaactatcaaagatggtcgcctttatgcgcgcggggcttcggacgataagggtcctacaacagcttgttactatggtttgaaaatcatcaaagaattgggtcttccaacttctaagaaagttcgcttcatcgttggaacagacgaagaatcaggctgggcagacatggactactactttgagcacgtaggacttgcsaarccagayttyggtttctcwccagatgctgaatttccaatcatcaatggtgaaaaaggaaatatcacggaatacctccactttgcaggagaaaatacaggtgytgcccgtcttcacagctttacaggtggtttacgtgaaaatatggtaccagaatcagcaacagcagtcgtttcaggtgayttggctgacttgcaagctaaactagatgcctttgttgcagaacacaaacttagaggagaactccaagaagaagctggcaaatacaaggtgacgatcattggtaaatcagcccacggtgctatgcctgcttcaggtgtcaatggygcracttacctwgccctcttcctyagycagtttgrctttgctggtccagccaaagamtaccttgacatcrcwggtaaaattctcttgaacgaycatgagggtgaaartctyaagattgctcatgtggatgaaaagatgggtgcyctttctatgaatgcmggcgtcttccrcttcgatgaaacaagtgctgataataccattgccctyaacatccgctatccaaaaggaacaagtccagaacaaatcaagtcaatcctwgaaaacttgccagttgyttctgtyagyctrtcwgaacayggtcayacscctcactatgtgccaatggaagatccacttgtgcaaaccttgttgaatrtctatgaaaaacaaacwggcytwmaaggtcatgaacaagtcatcggtggtggaacctttggtcgcttgytagarcgcggagttgcctayggtgctatgttcccagactcrattgataccatgcaccaagccaatgaatttatygccttggaygatctyttccgagcagcagcaatytatgccgaagctatttacgaattgatcaaataactaat

SEQ ID NO: 1899 - DNA, 359 bp, Streptococcus pneumoniae
  misc_feature (1)..(359): tiling:Spneumo1:WAN024F8D; Cluster includes WAN0244SJ spr0 031||15902075|NP_357625.1|30700..31053|-|354 bp|Hypothetic al protein|S.pneumoniae|R6|NC_003098.1|ORF|121
atgaytstmmgwcatcygggmattagcccraccaatgacttgrtwgctaagaaaatmttyagcaatccagaaatyacttgtcaatttattcgcgatatgctggayttgccagcmmaaaatgtgaccattttggagggwagcratattcacgtattactctccatgccttactcrgtgcaggatttttataccagtatagacgtcttggcggagttggataacggtactcaagtaattattgagattcaagtccatcatcagaattttttcatcaatcacttgtgggcttacctgtgcagtcaggttaatcaaaatcttgaaaaaattcrtcagcgagaaggtgatactcactarctaat

SEQ ID NO: 1900 - DNA, 1920 bp, Streptococcus pneumoniae
  misc_feature (1)..(1920): tiling:Spneumo1:WAN024CRL; Cluster includes WAN0244PY spr0 124|gidA|15902168|NP_357718.1|132343..134256|+|1914 bp|Glu cose inhibited division protein A|S.pneumoniae|R6|NC_00309 8.1|ORF|221
atgayttatcattttactgaagaatacgatattattgtaattggtgcgggacacgctggggttgaggcttccttggccgctagccgtatgggctgtaaggtcctgcttgcgaccatcaatattgaaatgctggctttcatgccttgtaatccctctatcggtggttctgcyaaggggattgtcgtrcgtgaagtcgatgccctcggtggcgagatggccaaracyattgacaagacttacatccagatgaagatgctmaacacagggaagggsccagcygtycgtgcycttcgtgcgcaggctgayaaggaactttactctaaggaratgcgcaagacrgttgaaaaycaagaaaatctgacccttcgtcaaaccatgattgatgagattttggtggaagatggcaaggytgtcggtgtgcgtacagccacccatcaagaatatgctgctaaggctgttattgtgacgacagggactgctctccgtggggaaattatcatcggagacctcaagtactcatcaggtyctaaccacagcttggcttctattaayctagctgacaatctcaaggaactgggyctcgaaatcggtcgtttcaagacaggaacccctccacgygtcaaggcytcttctatcaaytacgaygtgacrgaratycarccaggagaygaagyrcctaatcayttctcmtacacttcacgtgatgaggattatgtcaargaycaagtrccatgctggttgacctayaccaatggtaccagtcatgagattatycaaaacaacctccaccgtgcgcctatgtttacaggtgtggtcaagggagtgggrcctcgttactgtccrtcgattgargacaagattgtgcgctttgcggacaaggaacgtcaccaactcttccttgagccagaaggrcgcaatacwgaggargtctatgtbcaaggactttcaaccagtctgcctgaggatgtccarcgtgacttggtkcattccatcaaaggtytggaaaatgcagagatgatgcgracaggttatgctattgagtatgayatgrtcttgcctcaycagttgcgtgcgactttggaaaccaagaaaatctcaggwctyttcactgctggtcagacaaatggaacrtcaggttaygaagargcwgcwggccaagggattatcgcrggkatcaatgcggctctgaaaatccaagryaarcctgarttgattytraarcghagtgayggttayatyggggtsatgatygaygayttggtgaccaagggaaccatygaaccytaccgtctcttgaccagtcgtgctgaataycgtctcattctycgycatgacaatgctgatatgcgcttgactgagatgggmcgygagattggccttgtggaygatgaacgctgggctcgttttgaaatcaagaaaaatcaatttgataatgagatgaarcgyctagacagtatcaaactyaagccagtcaaggaaaccaatgcyaaggttgaggaratgggcttcaarccsttgacmgatgcrgtgacagccaargaattccttcgccgtccagaagtttcttaccaagatgtggtrgccttcatcggaccagctgcagargahttrgatgayaagattatcgaattgattgaaacagaaatcaagtaygaaggstatatttcmaaagccatggaycaggttgscaagatgaaacgyatggaagaaaaacgcattccrgccaatatygactgggatgacatygattctatygsracsgaagcycgtcagaagttcaaactyatcaatccagaaaccatcggscaagccagycgtatttcgggrgtwaacccagcagatatttctattttgatggtgtatctkgaaggtaaaaatcgtagtatttctaaaactcytcmaaaatcaaaaykaactaat

SEQ ID NO: 1901 - DNA, 996 bp, Streptococcus pneumoniae
  misc_feature (1)..(996): tiling:Spneumo1:WAN024FQ3; Cluster includes WAN023PPR pne1 9_19||||13173..14168|+|996 bp|Type 10C capsule operon, Gli mmer 2.02 orf prediction|S.pneumoniae||WAN01UCJ7|ORF|000
atgcaaaaaaataggratattagcctagatttattaaaagtgcttgcgtgtattggggtcattttactccatacaacaatgggyggatttaaagagacaggatcatggaatcttttggcatatttatattatttaggtacctactccattcccttgttttttatggtcaatggttatttattgttaggcaaaagggaaataacttatccttacatacttcaaaaagtcaaatggattctaataacagtgtcattatggaacattatcgtttggctttttaaaagagactttgcggttaatccaattaaaaaaattgtaggctctctgttacaaaaagggtatttctttcagttttggtttttcggtgccttgatactgatttatttatgtttgcctgttttgaaaacagttataaattcaaaaagaaaatatgtatacattctatctttattggtggcaattgggtttatagttgaattagcaaatattttccttcagatgcctatacaaactcatgttatgcaaacttttagattatggacttggtttttctactatcttttaggtggttatatagcacaattcaatgtagrcaacctcaaatatagatttaaaaattggatgaaaatagttagcatacttttgttattgatttcaccaataatattattcttcatagcgaagactacatatcataatctatttgctgaatatttttatgatactttatttgtaaaagtcagtactctaggaatttttctaactatcttcacgcttacgttgaatgaaaaccgaaacaaatggattgttttcctttctaatcaaacaatgggagttttcataatacacacttatattatgaaattgtgggaaagaatatttggttttaattttgtaggagcatatttactttttgctctatttactttgagtgttagttttattattgttggaatgttaatgaagattccttacttcaatcgaatcgtcaaatta

SEQ ID NO: 1902 - DNA, 627 bp, Streptococcus pneumoniae
  misc_feature (1)..(627): tiling:Spneumo1:WAN024CZD; Cluster includes WAN0243DD spr1 876||15903917|NP_359467.1|1845833..1846453|-|621 bp|Hypoth etical protein|S.pneumoniae|R6|NC_003098.1|ORF|111
atgcaaaaaacagcttttatttgggatttagacgggactttattggactcttacgaagcgattttatcagggattgaggagacttttgctcagttttctattccttatgataaggagaaggtgagagagtttatcttcaagtattcggtgcaagatttgcttgtgcgggtggcagaagatagaaatctggatgttgaggtgctaaatcaggtgcgtgcccagagtctggctgagaagaatgctcaggtagttttgatgccaggtgcgcgtgaggtgctagcttgggcagacgaatcaggaattcagcagtttatatatactcataaggggaacaacgcttttaccattctcaaggacttgggggtggaatcctattttacagagattttaaccagtcagagtggctttgtgcggaagccaagtccagaagcggctacctatctgctagataagtatcagttgaattctgataatacttattatataggggatcggactctggatgtggaatttgcccagaatagtgggattcaaagyatcaactttttagagtctacttatgaagggaatcacaggattcaagcgttagcagatatttcccgtatttttgagactaagykaactaat

SEQ ID NO: 1903 - DNA, 536 bp, Streptococcus pneumoniae
  misc_feature (1)..(536): tiling:Spneumo1:WAN024D8G; Cluster includes WAN0243SU spr1 317|ogt|15903360|NP_358910.1|1305516..1306046|-|531 bp|O6- methylguanine-DNA methyltransferase|S.pneumoniae|R6|NC_003 098.1|ORF|111
atgcaaaagaagtatgtaaaaatmctctactcctcaccaattggtattctatcacttgtagctgatgaccattatttgtatggaatttgggttcaggagcagaagcattttgagaggggactaggagatgaaacgatagaagaagttgtwagtcatcctattttagacccagttattgctwrctwakatgattactttaaaggcaagcctcaggatttatccaacttgctcttggcgccaatcggaacgaattttgaaaagagagtttgggactatttacagggcattccttatggtcagacagtgacctatggacaaattgctcaagacctgcaagtggcttctgctcaagcaattggtggagcagtgggacgcaatccttggtctatcctagtaccttgtcatcgtgtgttgggagcaggcaagcgtctgacaggytatgctgcaggagtggaaaagaaagcttggctcttggagcatgaaggmgtagattttaaagatakaarcaawagaaggagaagcacatgttarctaat

SEQ ID NO: 1904 - DNA, 1005 bp, Streptococcus pneumoniae
  misc_feature (1)..(1005): tiling:Spneumo1:WAN024EYY; Cluster includes WAN0243WO spr1 179||15903222|NP_358772.1|1177462..1178466|-|1005 bp|Conse rved hypothetical protein|S.pneumoniae|R6|NC_003098.1|ORF| 200
atgcaaaagaatatctattttgttgtcttggacctgcatacgacggatagagataaaattatccagctattcaaggattggacggattatagtgccaagttggtcgagggggaattggttaaaaaagatggacagaatgctctctttcctccgagcgatactggtgagacagttgggctcaatcctcatcgtttgacgctgacttttggtgtatctgcaagtttcttgaaaaggatgaacttggaaaacaagcgccctcgactgttcagggatttacctctatttcctaaggagcaattacgtgaaaaatatactggtggagatattgtgattcatgcttgtgcagatgatgagcaaattgcctttcacgctattcgcaatctcatccgtaaggggagaaatgcggtgccccttcgttggagtcagtctggatttgcagctatcggggatcgaatggagactccgtggaacctctttggttttaaggatggaacagcaaatccaaccaaggagcaagactttgaccgcgttatctgggctgatagtaaggactggatggaaaatggttcttatatggcagttcgtcggattcagatgtttttagagacctgggaccgcactagtctcgaagaacaagaaaatacctttggtcgttacaaggaaagcggtgccccctttggtaagaaaaatgagtttgatgaagtggatttgagtctcttacctgatgattcgcatgtttgtttggccaaagaagtggataagccacttttacgtcgttcttattcttactcagatggcattgatgaaaagactggtcagtttgatacgggattgctcttcatttctttccagaaggatcctgataactttgttaaggttcaaactaacctaggtgctactgataagatgaatgaatacatcactcacataggtagtggactttttacttgctttggtggtgtggagaaaggaggctacattggtcagaaattattggaaggctaa

SEQ ID NO: 1905 - DNA, 1638 bp, Streptococcus pneumoniae
  misc_feature (1)..(1638): tiling:Spneumo1:WAN024EV4; Cluster includes WAN024300 SP03 28||15900260|NP_344864.1|301055..302401|+|1347 bp|IS1380-S pn1, transposase|S.pneumoniae|TIGR4|NC_003028.1|ORF|091
  misc_feature (20)..(20): n is a, c, g, or t
  misc_feature (88)..(88): n is a, c, g, or t
atgcaaaaggaaggacagtnatcacgtcaattcktgawgagtmakytywtgactawcmtgkkrgyygawrywgtaaaaccccaattantcaccccaaatctaaaaaccatccagaatccttgccttagcttagatcctggatggtttcttttttcacccaatgggtgttttttactagacaaaaaagagtttcccctttatggtataagtgtagaaaaaaacacaaaaagaaaggaaactcacatgaacagtttaccaaatcatcacttccaaaacaagtctttttaccaactatctttcgatggaggtcatttaacccagtatggtggtcttatcttttttcaggaacttttttcccagytgaaactaaaagagcggatttctaagtatttagtaacgaatgamcaacgccgctactgtcgttattcggattcagatatccwtgtccagttcctctttcaactgytaacaggytatggaacggamtatgcttgyaaagaattgtcagctgatgcctactttccaaaattrttggaaggagggcagcttgcttcacagccaaccttatcccgwtttctttccagaactgacgaggaaacagtccatagtttgcgatgcctcaamcttgaattggkcgaattctttttacagtttcaccagctaaaccaactcattgtagatatcgattctacccatttcacaacttatggcaagcaagaaggtgttgcttataacgcccactatcgtgctcatggctatcatcctctttaygctttcgaggggaagacaggttattgtttcaatgcccagcttcgtcctggtaatcgttattgttctgaagaggcagacagctttatcacacctgttttagaacggtttaatcaacttctctttcgaatggatagtggctttgcgaccccaaaattatacgatttaattgaaaaaacagggcaatrctacctcataaaactcaagaaaaatactgttctgagccgtcttggagacctttccctcccttgcccacaggatgaggacttaaccatcttgccccactccgcctactcagaaactctctatcaagcaggatcttggtcgcacaagcgtcgtgtctgccagttctctgaacgaaaagaaggaaacttgttctacgatgttatttctctcgttacaaatatgacgagtggaacaagccaagaycagtttcagctttatcgtggacgtggtcaagccgagaatttcatcaaggagatgaaggagggattttttggcgataaaacggatagttcaaccttaatcaaaaacgaagttcgtatgatgatgagctgtatcgcctacaatctctatctttttctcaaacatctagctggaggtgacttycmaactttaacaatcaaacgcttccgccatctttttcttcacgtggtrggaaaatgtgttcgaacaggacgcaagcagctcctcaaattgtctagtctctatgcctattccgaattgttttcagcactttattctaggattagaaaagtcaacctgaatcttcctgttccttatgaaccayctrgwwgaaragcrtmgtkaatgatgsrttwrmtraktttaatgagattattggtcgcttccagtttggcgttagaatag

SEQ ID NO: 1906 - DNA, 284 bp, Streptococcus pneumoniae
  misc_feature (1)..(284): tiling:Spneumo1:WAN024D2G; Cluster includes WAN0243FR spr1 789|acyP|15903831|NP_359381.1|1761235..1761513|+|279 bp|Ac ylphosphate phosphohydrolase|S.pneumoniae|R6|NC_003098.1|O RF|111
atgcaaaaggttagaatgattgcccaaggtagggtrcagggagtcggctttcgttggggtgtttayagcytggcmcttgaaatyggtggcatcacaggtcgrgtatggaataacgacgatggcacagtggaaatcttagcccaagcagactcatcwgctatyatggcaaaatttatccaagaaatccgaaaaggaccgacacctttttcaaaagtmarytamttagatgtcaaactragcaactttcctccctacyctgactttaaaatcgcaaattarctaat

SEQ ID NO: 1907 - DNA, 644 bp, Streptococcus pneumoniae
  misc_feature (1)..(644): tiling:Spneumo1:WAN024G2V; Cluster includes WAN0243Z5 spr1 090|udK|15903133|NP_358683.1|1085437..1086075|-|639 bp|Uri dine kinase|S.pneumoniae|R6|NC_003098.1|ORF|111
atgcaaaatagaccaatcattattggagtgacaggtggttctggtggtggtaaaaccagtgtttcaagagccattttatcgcattttcctgatgaaaagatttccatgattgagcatgattcatactacaaggatcagtctcatttgacctttgaagagcgtgtcaaaaccaactatgaccatccttttgcctttgatacagacttgatgatcgagcagattaaggaattgttggcagggcgtccggtggacatcccgacctacgactatacagagcatacacggagtagcaagacctatcgtcaggarcctcaagatgtctttatcgttgagggyattttggtcttggaggacaagcgtctgcgcgatttgatggatatcaagatttttgtggatacggatgackawgtgcgyattatycgtcstatcaagcgtratatggagragcktggccgtagccttgatagcgttattaaccagtacttaggtgtggtcaaaccaatgtaccaccagtttatcgagtcaactaagcgttatgctgatatcgtcattcctgaaggggttagcaataccgtggctatcgacctgttgacgaccaagattgcaaagattttggaagaagctcgaaacagcaaataactaat

SEQ ID NO: 1908 - DNA, 1460 bp, Streptococcus pneumoniae
  misc_feature (1)..(1460): tiling:Spneumo1:WAN024FTE; Cluster includes WAN0243V0 spr1 239|amy|15903282|NP_358832.1|1237343..1238797|+|1455 bp|Al pha-amylase precursor|S.pneumoniae|R6|NC_003098.1|ORF|111
atgcaaaatcaaacactcatgcaatactttgaatggtatctgccccacgacggtcaacactggacgcgtctggctgaaaatgctccacacctagctcatctggggatcagtcacgtctggatgccaccagccttcaaggcaaccaacgaaaaagatgtcggctatggggtctatgacttatttgacttaggagagttcaaccaaaaagggactgtccgcaccaagtatggtttcaaagaagactatcttcaagccattcaagcccttaaagmrcagggaattcaacctatggccgatgtagttctcaaccacaaggctgctgcygatmacagggaagcctttcaggttatygaagtkgatcctgtagaccgtacagttgaacttggagaacccttcaccatcaatggctggactagttttaccttcgatggtcgccaagatacctayaatgrcttccactggcaytggtaccacttcacmggtacagactaygatgccaaacgcmgtaaatcygggatttayctratccaaggrracaacaagggctgggcyaacgaggaattggtcgataacgaaaacggaaactacgactacctcatgtatgccgacctagactttaaacatcctgaagtcatccaaaacatctatgactgggctgattggttcatggaaacgactggtgtagctggtttccgtttggatgccgttaagcatattgactctttctttatgcgcaayttcatccgcgatatgaaggaaaaatacggtgacgatttctatgtttttggtgaattttggaacycagacaaggaagccaatctggactatctcgaaaaaacggaagaacactttgaccttgtcgatgttcgtctccaccagaatctctttgaagccagtcaagctggcgcaaactatgaccttcgtggcattttcacagatagcctggttgaactcaagcctgacaaggctgtgacttttrtcgacaaccacgatacccaacgaggacaagcccttgagtctaccgttgaagaatggttcaagccagcagcctatgccctcattttgttacgccaagacggccttccatgtgtcttttacggagactactatgggatttcaggscagtatgctcaasaagatttcaaagaaatccttgaccgcctcctagccatccgaaaagayttggcctatggagaacaaaatgactactttgaccatgctaactgtatcggttgggtacgttcaggtgctgaaaatcaatccccaatcgcagtccttatctcaaatgaccaagaaaacagcaagtcaatgtttgtcggtcaagaatggactaatcaaacctttgtagatttacttggtarccaccaaggtcaagttacaattgatgaggaaggttatggacaattccctgtctcagctagatccgtaagtgtctgggcagtcaataccatctaactaat

SEQ ID NO: 1909 - DNA, 1013 bp, Streptococcus pneumoniae
  misc_feature (1)..(1013): tiling:Spneumo1:WAN024DBZ; Cluster includes WAN02443E spr0 936|ABC-MSP|15902980|NP_358530.1|922261..923268|+|1008 bp| ABC transporter membrane-spanning permease - iron transpor t|S.pneumoniae|R6|NC_003098.1|ORF|111
atgcaaaatttaattataggtattcaaaaaagaaaaaatagaataacactattttcctcactatttttattaataataatcagtctatcatttttcattttacttatcggagatgaaagttattctttttcaactttgattaaagtcttaaatagtgaaactgttcctggagctagtttttcgattatggaaattagattaccaaaattattagcaggaattatagctggctggtcttttggattggcaggatttatctttcaaactatgttaagaaatcctcttgcaagtcctgatataatcggtgtcacaagttcttcatctattgcagcggtcttttgcatattggtattaaaawcaaatagtttaactastggaattatttcaataacttgtggactaacatcatctttaatattatttttactagctaaaaaagatggtttttcagcagcaagactgataatattaggtattggttttcaagctgtcacaagagcaggcacctcatttttattgttgaaagtagcaagatatgaattacaagaagttatgagatggctcagtggctctttatcttttacaaagttagatgacatacctcttgttctaatagtaagtattattgctactatattagttttattttttaataaaagactagaaattattgaacttggtgaagaaatagcaatcggacttggagcaaatcccgagctttcaaggcttgttttaattttttgcgctgtatctttaactgctttttctacttcaattacaggaccaatagcttgtatatcttttttagctggtcccatagccttaaatattggcaagaaaagaagcccaatattagctggattggttggaattttactagttttgttatcagacatattctctcaaaatattttaccagctagatatccagtaggtgttgtaactggcttgttaggttcaccatacttaatatacttactaataaaaatgaacaggagraatatataactaat

SEQ ID NO: 1910 - DNA, 1268 bp, Streptococcus pneumoniae
  misc_feature (1)..(1268): tiling:Spneumo1:WAN024FCK; Cluster includes WAN0243J9 spr1 663|pbuX|15903705|NP_359255.1|1635901..1637163|+|1263 bp|N ucleobase:cation symporter for xanthine|S.pneumoniae|R6|NC _003098.1|ORF|121
atgcaaactcaagaaaaacactcgcaagcagccgttctkggcttgcagcacttactagccatgtactcaggatctatcctggttcccatcatgattgcgacagcccttggctattcagctgagcagttgacctacctgatttctacagatatcttcatgtgtggggtggcaaccttcctccaactccaactcaacaaatactttgggattggactcccagtcgttcttggagttgcattccagtcggtcgctcccttgattatgattgggcaaagccatggtagtggcgctatgtttggtgcccttatcgcatctgggatttacgtggttcttgtttcaggcatyttctcaaaagtagccaatctcttcccatctatcgtaacaggatctgttattaccacgattggtttaaccttgatccctgtcgctattggaaatatgggaaataacgttccagagccaactggtcaaagtctcttgcttgcagctattactgttctgattatcctcttgatcaacatctttaccaaaggatttatcaagtctatctctattttgattggtctggttgttggaactgccattgctgctactatgggcttggtggacttctctcctgttgcggtagctccacttgtccatgtcccaaytccactctactttgggatgccaacctttgaaatctcatctattgtcatgatgtgtatcatcgcaacggtgtctatggttgagtcaactggtgtttatctrgccttgtctgatatcacaaargatccaatcgacagcacgcgccttcgcaacggwtaccgcgcagaaggtttggcsgtacttctcggaggaatctttaacaccttcccttacaccggattttcacaaaacgttggtttggttaaattgtcaggcatcaaaaaacgcctgccaatctactacgcagctggtttcctggttctccttggactgcttcctaagtttggygcccttgcccaaatcattccaagctccgtcctcggyggtgccatgctggtratgtttggttttgtatcwattcaagggatgcaaatcctmgcccgwgttgactttgctaacaatgaacacaacttccttatcgcagctgtttcaatcgctgcaggtgtcggtctcaacaacagtaatctctttgtcagcatgccgacagccttccaaatgttcttctcaaacggaatcgtcgtakccagcctactcrcyattgtcctcaatgccgtattaaatcataaaaagaaataactaat

SEQ ID NO: 1911 - DNA, 2387 bp, Streptococcus pneumoniae
  misc_feature (1)..(2387): tiling:Spneumo1:WAN024GO3; Cluster includes WAN0244JB spr0 363|recD|15902407|NP_357957.1|361275..363641|-|2367 bp|Exo nuclease V|S.pneumoniae|R6|NC_003098.1|ORF|341
atgcaaaggaattttatggaagtttatttttcaggaacyattgaacggattatttttgaaaatcccagcaatttttatcgcatcctcctcctagaaatcgacgatacggacgcagaggattttgatgaytttgaaatcattgtcacaggaaccatggctgatgtaattgagggcgaagactatactttttgggggcaaattgtccagcactccaagtatggagaacaactgcaaatcagtcgttatgatcgcgcaaaaccaactagtaagggcttggtcaagtacttttcaagtagccatttcaaggggattggtctcaagacagctcagaaaatcgtrgatacctatggcgaaaataccattgaygaaattttgcaacacccagaaaagttagaaggcatcgcaggactctctgccaaaaatcgcgaggctttcgtctccactctccgtctcaactacggwacggagatgrttttgkccaaactagccaactacggcattcccaacaaactagcctttcagattcaagacttttacaaggaagaaacccttgatgtggttgaaaattatccctaccagctrgttgaggatatcaagggtttgggctttaccattgctgaccaactagctgaggaactaggcatcgaaagtcaggctcctgaacgcttccgcgccggtctagttcacagtctttttcaggcctgtatggaaacaggggacacctatgttgaagcacgggatttgctggaacaaacccttactctccttgagtcttcccgtcccgtggaactagaccccagycaagttgcccaagagctctcctacctgatcgaagaagacaaggttcagcagattgataccaagatctttgacaacagcctctttttcgctgaggaaggyatccgcagtcacttgrttcgtatccttgaaaaaggaraacagaagagwcawsatttagaaacyattcaaaarcatatcactactrtcgagsaagarctgggrattgagtatgataacattcaaaaacargctatytgtgaygctatccagaayaaggtctttatcctgacaggtggrcctggtactggtaagacaactgttatcaatggratcatygctgtttaygccctkttagarggacttgacytcaggaagaaaagcaayctgcccattcttcttgctgctccaactggwcgagcygctcgycgcatgaatgaattgacaggtttgcctagcgcgaccatacaycgccacttgggaatgacaggtgacgatgataccagtcatctggaagattacctagatgctgastttatcatcgtggatgaattctctatggtrgatacttggctgkccaatcaactcttctccaatatctcttctaacagtaagatcctcatcgtaggtgacagtgatcagctaccttctgtcagtcctggacaggttctagcggatctrcttcatattcctttgattcctcagactcgcttggaaaaaatttatcgacaaagcraagaatcaaccatcgtcaccctagctagtcagattcgacagggcatcttgccagctgatttcaccmaaaaaaaagctgaccgttcctactttgaaattgctagtggccatattcctgccaccattgaaaaaatcttaggtgcygccctcagaaatggtattccygcccgtgatatccaagttctggctcctatgtaccgagggacggcagggattgatgctatcaatcagctcatgcaagacctgctcaatcccccacaaaaagatcaactcagttttgaagctcctcagtgycactatcgtaagrgagacarggtcattcatttggttaacgatgctgaaatcaatgtctttaatggggatttaggagctatcacagacctgattcctggtaaatacaccgaatcgaaacaagacgagattgtcattgattttgatrgtaatgaagtctcttacccccgtaacgaatggtacaarattcgcttggcctatgccatgagtattcataagtctcagggaagtgagttcccagttgtcatcctmccgattactagtgctagccgacgtatgctggagcgaaatctcatctacacagccattacacgtgccaaaagcaaactcatcttactaggcgaattacaagccttcgacyatgctayccaacacatcggaactgcccgaaaaacctatctgattgaacgcttcagtgatctactggagaatgttgaagaaaagcaacaagctgtctctgaaacagtcacatcaagtgcctctgaacaatcctacatcctaaccgaagaaaactggracmgcatyccagccatgattgggattacagacacagacctcaaagagatttttggaaaatarctaat

SEQ ID NO: 1912 - DNA, 339 bp, Streptococcus pneumoniae
  misc_feature (1)..(339): tiling:Spneumo1:WAN024FRK; Cluster includes WAN023L57 3138 23_2389||||1277013..1277351|+|339 bp|EGAD orf prediction|S .pneumoniae|R6|NC_003098.1|ORF|220
atgcaaatcttcaatataggtttcaaaatgacggaaacctggaccataaaactcaacttggtccccttcgttaatgacrtttcgttgacgaatdgttgctgtttgtrccgcatcatcataagaaaccacttcagcgacaaacttgtactcaggrattttacgrcgagcaccaaacaactgctcattttcagatggtrtaccrtagtaraawcctgtwgccarttcacgttgggcaaccttccacatctcgtccaccaagtcttgtttgatagcttcaaacttttcaggactttcaagataggcatccacagccgccttgtagcagttggttactgttra

SEQ ID NO: 1913 - DNA, 443 bp, Streptococcus pneumoniae
  misc_feature (1)..(443): tiling:Spneumo1:WAN024D6N; Cluster includes WAN0243OE spr1 477||15903520|NP_359070.1|1457206..1457643|-|438 bp|Conser ved hypothetical protein|S.pneumoniae|R6|NC_003098.1|ORF|1 11
atgcaaattccaagtagatttaccattgcractcatatgctgataatcattgccctcgaggggaaggaaagcaaggtgaccagtgattttctggctgctagtgtyggggtcaatcctgtcattatcagaaagatcttgtcccagttgaagaargcagagctgatttcagtagcgcgtggaacgggcggaacagagattgtcaaggaccttaaggatattagtcttttagatgtttatcaggcggtcgaatgtcttggtaagacaggtcaactcttcagtttccatgacaatccgaatccaaattgccctgtaggagctcatattcatgatgttttggatcaaaaattggagagaattcagttgactatggaggcagaacttggtcaraccagtctagaaaaagtcgtggccgatgcagagagtcagatgaaggattaactaat

SEQ ID NO: 1914 - DNA, 462 bp, Streptococcus pneumoniae
  misc_feature (1)..(462): tiling:Spneumo1:WAN024GHA; Cluster includes WAN0244EW spr0 522||15902566|NP_358116.1|522381..522836|+|456 bp|Hypothet ical protein|S.pneumoniae|R6|NC_003098.1|ORF|111
atgcaaattttatgttattttactataacagttgttgctaakccaaataatagtggggaagttcatttagaygtaagcattgaagataatcagggaggtagtgggyataatttcagttctgtttcaagtagctcacaaacagctaaatatgaagrarytgkttataataacaattyatcattatatayaacgattgataaaacgtctgatgcaacagctcttttgaaattaaagttgaataatgttrataatcaacctgctactgaagttcctagttcaggaattactgtaaaattaaatrctaaagataatgctggaaactggacaagtgcttcgaataaaaaagaartaacagtaaaaattgtttctgctaaaccgacatatccagacaaaatyttagtgaaaaatcctgatamtataaaagatacagaaaaaatgccattattgaaaaatykaactaat

SEQ ID NO: 1915 - DNA, 333 bp, Streptococcus pneumoniae
  misc_feature (1)..(333): tiling:Spneumo1:WAN024CCN; Cluster includes WAN023Q7W cont ig_1255_4||||943..1275|+|333 bp|Glimmer 2.02 orf predictio n|S.pneumoniae|670|WAN01UEGK|ORF|001
atgcaacaaattactgaaatcattactaatggagcaatcagcatcctagtcattttagcaggggtggtagttagggcagtcaaggactacctggttcaaaaaggtggagaaaagaccatcaaaatcgttgaaatcttggccaagaacgcagtaaatgccgttgagcargtwgcytcagagactggctwtaarggcgawgaaaagctggagcaggctcgtgctaaagtccgtgctgagcttacaaaatacaatattagyatgactgacaaagacttagacaccttcgtagagtcagcagtgaagcagatgaatgacgcatggaaaggacragag

SEQ ID NO: 1916 - DNA, 809 bp, Streptococcus pneumoniae
  misc_feature (1)..(809): tiling:Spneumo1:WAN024F67; Cluster includes WAN0244FO spr0 494||15902538|NP_358088.1|495460..496263|+|804 bp|Hypothet ical protein|S.pneumoniae|R6|NC_003098.1|ORF|111
atgcaaccaacttacaacattgacaatccaaacttgtcttatgaagckaagcgtgatttatggcggataggttttggtctgcagaaagttgacaatctagtgccatcagcktatatggaatctttggctgagaaacagkcycggggwgaactgacttatgagcaggtttatgaggatgcamcggcttatcaycatayyattgatgcragtacrgargaggcagacttggtttctctacgyattgtagaactattgtctcgaagaggctttagcttyagtcctgcgaycttacttgctattcataaggagttgtttcaagatatatttgaaccctckattccggtrggkcaatttcgtcagacyaatatcacaaagaatgaacctgttttgaatggtgaaagtgttgtgtactctgattactccatgattcaaatgacmttrgattatgattttaatcaggaaaaacaagttgcatatgcgacactaacycaggcggatrtggttaaamaaatccagcattttatttcaggaatctggcagattcatccatttcgcgaaggaaacrctcggacrgtaacggtmtttttgattcagtatcttcgtgagtttggttttgatattgataatayaccatttcagcaacattccaartattttcgtgatgccttrgtrttagataatgcaaagattttacagcgacgtyctgagtttttaacagctttttttgaaaatctcttgctcggtggtcaaaatgatttgtcttcagaaaaaatgtatctagatttagacctcgatytttcataactaat

SEQ ID NO: 1917 - DNA, 1614 bp, Streptococcus pneumoniae
  misc_feature (1)..(1614): tiling:Spneumo1:WAN024CPO; Cluster includes WAN0244KS spr0 310|dexB|15902354|NP_357904.1|310667..312274|+|1608 bp|Alp ha, 1-6-glucosidase|S.pneumoniae|R6|NC_003098.1|ORF|111
atgcaagaaaaatggtggcayaatgccgtagtctatcaagtctatccaaagagttttatggatagtaatgragatggarttggygatttgccaggwattaccagtaagttggactatctagcyaagytaggaatcacakcratttggctttctcccgyttatgacagccctatggatgataatggctaygatattgctgattatcaagcgattgcggctatttttggaaccatggaggacatggatsarctgattgcagaagctaagaagcgtgayatycgtatcatcatggacttggtggtyaatcatacctcrgatgarcatgcytggtttgtmgargcctgtgaaaatmctrayagccctgagcgagactactatatctggcgsgatgarccyaaygayytagattctatytttagtggrtctgcttgggaatacgatgaaaartcwggtcaatactatctccactttttcagcaaraaacagccggatctcaaytgggaaaatgaaaaacttcgccagaaaatttatgagatgatgracttctggattgataarggtattggtggtttccgtatggatgttattgacatgattggcaaaattcctgacgagaaggtagtcaataatggtcctatgctccatccctatctcaaggaaatgaatcaggcgacctttggagataaggatctcttgacagtaggggagacttggggagcaackccagagattgccaarytctaytctgatccaaaggggcaagaattgtctatggtcttccagtttgaacatatcggtcttcagtatcaggaaggtcagcctaaatggcactatcaaaaagagctgaatatcgctaagttaaaagaaatcttcaacaaatggcagacagagttaggagttgaggayggytggaattccctcttctggaacaaycatgacctccctcgtatygtctcaatctggggaaatgaccaagaataccgcgaaaaatctgccaaagcctttgcaatcttrcttcatctyatgagaggaactccttatatctaccaaggtgaggagattgggatgaccaactatccgtttgaaacwctrgatcaagtagaagatattgaatctctcaactatscscrtgaggctcttgaaaaaggtgttccgatksaagaaatcatggacagtatccgtgttattggacgtgacaatgcycgtacccctatgcaatgggaygagagcaaaaaygctggtttytcaacagrtcaaccttggttggcrgttaatccaaattacgagatgatcaaygtmcaagaagcgctggcraatccagattctattttctatacctatcaraaactggtccaaattcgcaaggagaatagytggctarttcgagctgactttgaattrcttgatacggctgataaggtytttgcttatatacgtaaggatggcgaccgtcgcttcctagtygtggctaayttrtccaatgahrarcaaracttdwcagtagawggaaamgtyaratctgtcttgattgaaaacacysyrgctmaagaagthyttgaaaaacarrtcytrryyccatgggatgctttctgtgtggaawkactratarctaat

SEQ ID NO: 1918 - DNA, 906 bp, Streptococcus pneumoniae
  misc_feature (1)..(906): tiling:Spneumo1:WAN024ESO; Cluster includes WAN0243OV spr1 460|galE|15903503|NP_359053.1|1440727..1441746|-|1020 bp|U DP-glucose 4-epimerase|S.pneumoniae|R6|NC_003098.1|ORF|111
atgcaagaaaagattttggtaactggtggtgccggttttattggaacccacactgttattgaattgatccaagcaggycatcaagttgttgtggtggataatcttgtcaatagcaatcgtaagagtttagaagttgttgaargaatcacaggagttgagattcctttctatgaggcagatattcgtgacacagmtaccctcagagatattttcaagcaggaagaaccgactggtrtcattcactttgctggtttgaaggctgttggcgaatcaacacgtatccctcttgcctactatgacaacaatatcgctggaactgtcagccttttgaaagccatggaagaaaacaactgtaaaaacatcatcttcagttcttctgcgacagtttacggggatccgcacacagtgcccatcttggaagatttcccactttcagtgaccaacccatacggtcgtactaagctcatgctagaggaaattttgacygatatttacaaagcagactcagaatggaatgttgtcttgcttcgttactttaacccaatcggagcccatgagagtggtgatttgggagaaaatccaaacggtattccaaacaatctcttgccatatgtgactcaagtagccgttggaaaattagagcaagtgcaagtgtttggagacgattacgatacggaagatggaacaggtgttcgtgactatatccacgttgtcgatttggctaagggtcacgttgcagctttgaaaaaaatccaaaaaggttcaggactaaacgtttataaccttggaactggtaaaggttactcagttcttgaaattatccaaaacatggaaaaagcggtgggmygtcctattccttaccgcatcgtagaacgtcgcccaggtgatatcgctgcctgctactca

SEQ ID NO: 1919 - DNA, 549 bp, Streptococcus pneumoniae
  misc_feature (1)..(549): tiling:Spneumo1:WAN024CX6; Cluster includes WAN02438T spr2 040||15904081|NP_359631.1|2032457..2032999|+|543 bp|Conser ved hypothetical protein|S.pneumoniae|R6|NC_003098.1|ORF|1 11
atgcaagaaagtaacaaacgcttaaaaacaaagcgaactattgaaaatgctatggtacaattactgatggaacagccatttgataaaatttctactgtcaaattagtagaaaaagccggaattagtcgttccagcttctatactcactataaggataagtatgatatgattgagcactatcaaagcaagctattccatacatttgaatatatttttcaaaaacatgctcatcacaaaagagacgctattttagaagtttttgaatatctagagtcagaaccacttctggctgyccttctttctgaaaatgggactaaagaaatccaaaatttcttacgaaataaacttcatatcatgcttagtacagatttacaaaagcgatttatgcaactgaatctaaataccacygaattagaatatagtagcatctatctaactcatgcactttttggtgtctgccaaacttggattgcacatggaaaaaaagaaagttctcaagaaataacagacttccttatgaaaatgcttggtgatacaaatykaactaat

SEQ ID NO: 1920 - DNA, 318 bp, Streptococcus pneumoniae
  misc_feature (1)..(318): tiling:Spneumo1:WAN024FQD; Cluster includes WAN023PPW pne1 9_14||||9749..10066|+|318 bp|Type 10C capsule operon, Glim mer 2.02 orf prediction|S.pneumoniae||WAN01UCJ7|ORF|000
atgcaagagtgtttattgacaattgtaatgcctagttataatattcaggactatatttccaaaggaatcgagtcattccagcaagtacacccggattataaaaataaatttgaagtactggttgtcaatgatagaagtacagacgatacggctttagtagcagaaaaaatattagccaaagattcgttgctggatggccgtgtcattacaaaagaaaacggcggtcatggttcgacaatcaatcgcggtattcaagaagcaaagggaaaattttttaaagtgattgatggggatgactgggttatccccatcagaaat

SEQ ID NO: 1921 - DNA, 1002 bp, Streptococcus pneumoniae
  misc_feature (1)..(1002): tiling:Spneumo1:WAN024FQE; Cluster includes WAN023PQY pne1 7_15||||10104..11105|+|1002 bp|Type 10A capsule operon, Gl immer 2.02 orf prediction|S.pneumoniae||WAN01UCJH|ORF|000
atgcaagagtgtttattgacaattgtaatgcctagttataatattcaggactayatttccaraggaatcgartcattccagcaagtacayccagattacaaacaaaaatttgagrtcttaattgtgaatgatggaagtacggacgacacagccaaagtagcagaagaggycctaagaaaagattcrttkytgaatggtcgtattatcacaaaggaaaatggaggycatggctcaacwattaatcgtggtatccaggaagcaaaggggaarttctttaaagttattgatggggatgactgggttatcccrtcagagtttgaaaartttttagatrccctwwcagttrctgrwgtggatatgrttytkacrgattttacagaacarcatgtttayaacaatactactgttcgaaatgattttrttgaaaartatgagrttggtraggaatattctggaattccagagaracggatyccaatgcactcrgtaacytatagaacatctatcctagtygasaatrgaattcgtttaagtgaaaagacrttttatgttgacattcagtacactctwtttcctttagagtatgttcatagtttckgttattggaattatgatgtwtaccaatactatatcggacgacccgagcagagtatgaatattgagagtatgaaacgaaatgttcgtcaycatttgaytgtaacaaattctgtgctrrsttwtttytcaaaaattkcrgrkgatcctgtyttaaagaaagtggttgcagatactttrgkytatcttatyagtttrcagrtwgatttgtcatggatggttgaggaytcaaagacactatcagaagaattatacagacaaattgagcagagttcttatgagtatatccctacgaaaaaatttgatagattgtcttatttgaactataartytcactattttctagrctttrtyttcaatycartattgaaaaaatattctaaaaagaaagaaaaagagagaggartt

SEQ ID NO: 1922 - DNA, 378 bp, Streptococcus pneumoniae
  misc_feature (1)..(378): tiling:Spneumo1:WAN024F88; Cluster includes WAN023L8Q 3151 40_2252||||1208467..1208844|+|378 bp|EGAD orf prediction|S .pneumoniae|R6|NC_003098.1|ORF|110
atgcaagatttttgcaaactttttttaaaatttttcgtgatttttcttttaaagttctactgtcaggacttgaccttgcttaacaacctgttctccggcgatataaacatcatctacatcactagatttaactgcataaaccaggtgagacagcatattttcctgaggttggagatgaattttcccttgtggttgaatgaccagaaaatctgcttgcttgccgacttccagacttcctatctgattttccattccaaggrccttagccccttcgattgtcagtaccttgagagctgtttcgattggaaactggctggcatccccacttttcatcttctgaagaagagctgcagtccttccttcctcaaacatatctag

SEQ ID NO: 1923 - DNA, 2552 bp, Streptococcus pneumoniae
  misc_feature (1)..(2552): tiling:Spneumo1:WAN024CWS; Cluster includes WAN02449S spr0 706|pepN|15902750|NP_358300.1|704637..707183|+|2547 bp|Ami nopeptidase N|S.pneumoniae|R6|NC_003098.1|ORF|221
atgcaagcagttgaacattttattaagcaatttgttcctgaacattatgatttatttttagatttgagtcgtgagaccaagactttttctgggaaagtgaccatcactggtcaagcacagagtgaccgcatctccctccaccaaaaagayttggaaatcacctctgtagaagttgcaggtcaagctcgtccatttacagttgaccatgacaatgaagcccttcatatcgaattggctgaggctggtcaagttgaattggttcttgccttttctggtaaaattacagacaacatgacagggatttacccttcttattatacagttgatggagtcaagaaggaggtcttgtctactcagttcgagagccattttgcgcgcgaagctttcccatgtgtggatgagcctgaagcyaaagcaacttttgacctctctcttcgctttgaccaagcagaaggtgaattggccttgtcaaacatgccagaaatcgatgttgaaaaccgtaaggaaacaggtatctggaagtttgagacaacacctcgcatgtcttcttacttgttggcctttkttgctggtgatttgcaaggggtgaccgctaaaactaaaaatggtaccctggtaggtgtctactcaaccaaagcacatccactttcaaatcttgatttctcactggatatcgctgttcgctctatcgagttttacgaagattactayggwgttaartayccaatycctcaatctctccacatcgcccttcctgacttctcagctggtgctatggaaaaytggggtcttgtgacctaccgtgaagtttacttggttgtcgatgagaactctacatttgctagccgtcaacaagttgcccttgttgtggcccatgaattggctcaccaatggtttgggaacctcgtgactatgaaatggtgggatgacctttggctcaatgaaagtttcgctaatatgatggaatacgtctgtgtggataccatcgaaccaagctggaatatctttgaagatttccaaacaggtggagtacctcttgctcttgaacgtgacgctactgatggcgttcagtctgtccacgtcgaagttaaacatccagatgaaatcaatacactctttgacggcgctatcgtctatgccaaaggaagccgtctcatgcacatgcttcgccgttggctaggagatgctgattttgctaaaggtttgcaygcctactttgaaaaacaccaatacagcaacaccattggtagtgacctttgggatgcccttggtcaagcgtcaggacgtgatgtcgcagccttcatggattcttggttggaacagcctggttacccagttcttactgtyaaagttgaaaatgatgtcttgaagatttcacaaaaacaattcttcatcggtgagaacgaagacaagaaccgtctctgggtggtgcccctcaatagcaactggaaaggcttgcctgatacactcgaaactgaaagtatcgaaatccctggctacgcagctcttcttgctgaaaatgaaggagctcttcgtctcaacactgaaaatactgcccactatattaccgactatcaaggagacttgttagmagctgttcttgctgagctagagacacttgataacacaagcaaactgcaaattgttcaagaacgtcgtttgttggctgaggcagggcacatttcttatgcagacttgcttccagttcttgataaacttgctaaggaagagtcttatctggtggtttcagctgtttctcaagtgatttcagcccttgagcgctttattgatgaaggaacggatgctgaaacagccttcaaaggactggttgctaaattggctcgtcataactatgaccgtcttggttttgaagctaaagacggagaatcagatgaggatgaattggttcgtcagctggctgtttcgatgatgattcgctcaaatgatgcagaagctmgtcaagtcgctagccaaatcttcgcaacacacaaggagaatcttgcagractcccagcagctattcgytcacaagttctgattaatgagatgaaacatcatgagactaaagacttgttagcactttatcttgatacttatactcacgcaacagatgctgtctttaaacgccagttgrcagcagctcttgcatacagtacagatgcggataatatycaaaacytgattacttcttggaaggacaaatttgtggtcaaaccacaggacttgtctgcttggtattaccaattcctagctcatcaagcaactcagaaaacagcttggtcttgggcgcgtgaaaactgggcttggattaaggcagcccttggaggagatatgagctttgatagctttgttatccttcctgctcatgtatttaagactcagcaacgcttggcggaatacaaggagttctttgarccgcaactttctgaccttgctcttagccgtaacatcggtatgggaatcaaggaaattgcagcrcgtgttgacttgattagccgtgaaaaagctgcagtcgaagcagttgttcttcaatacggaaatgcataactaat

SEQ ID NO: 1924 - DNA, 204 bp, Streptococcus pneumoniae
  misc_feature (1)..(204): tiling:Spneumo1:WAN024FKR; Cluster includes WAN024200 SP17 23||15901556|NP_346160.1|1627107..1627304|-|198 bp|hypothe tical protein|S.pneumoniae|TIGR4|NC_003028.1|ORF|011
atgcaagccytttatrttaaaaaagagraaaaactgtcaaasgattatcatraaataaatacaggaaatcaatcaaatttttacgaaaatgtgaaagataatgaaataaaakactttttaaccaaggtttcaaacttatttttcaagraattcctgatgaaacagtcaaaaacaatcaatctaaarcttgcccacctaactaat

SEQ ID NO: 1925 - DNA, 836 bp, Streptococcus pneumoniae
  misc_feature (1)..(836): tiling:Spneumo1:WAN024D5J; Cluster includes WAN0244HF spr0 431|ABC-MSD|15902475|NP_358025.1|431859..432689|+|831 bp|A BC transporter membrane-spanning permease - unknown substr ate|S.pneumoniae|R6|NC_003098.1|ORF|111
atgcaagctaaattaatcggttaccagcatagagatactgtgattcatcgcttgtcaggmgctgggaaactyctctttttcattctrgtrtcattggcggccatgattagctatgataccagamtgctyktkctgattgccatcttttcrgtctttctcctctattwrtcagaaatycrytttaaagatgtytcctttgtagcygtttttgcgacgrtatttgccgttttaaacgttttgatggtctatctcttttctcccgagtatggggttggactttayggagagagaagtgtgatttggcagggaatcggtgyctacactctraccagycargagctcttttatctgctaaatttggcyattaagtayctttgcacyattcctctggctattatctttttgatgacaacccaycctagtcagtttgcttccagtttaaatcaaattggtgtgccytayaagattgcytattctgtcagyctraccttgcgctatattccagatttgcaggaagaattctttacyatcaagatgtctcaggargcgcgtgggatggaattatccaagaaagcttctcttatgcaacgaatcaaaggcaatctgctcattattacgcccttgatttttagctcgctagaacgcattgataccatygcgacygccatggagcttcgccgmtttgggaaagagaaaaaacgcacatggtatagttatcaggcctykaamwaakgagactatattaccttgctcttggcaaccttgtttttagtagttagtttactacttatcttgcagaatcagggacgattttacaamccttggaaatarctaat

SEQ ID NO: 1926 - DNA, 344 bp, Streptococcus pneumoniae
  misc_feature (1)..(344): tiling:Spneumo1:WAN024GCG; Cluster includes WAN0244AA spr0 688||15902732|NP_358282.1|689648..689986|+|339 bp|Hypothet ical protein|S.pneumoniae|R6|NC_003098.1|ORF|221
atgcaagtaatcaaacgtaatggcgaaattgctgaatttaatccagataagatttaccaagccatcttgaaggcagcccaaactgtttatgttttgacagatgatttgcgtcaaaatcttgctcaagtcactaagaaggtagttttggatttacaagaagccaaggtggaacgtgcgactatcagtatgattcaatctatggttgaacatcgtttattgggcgcaggttacattaccattgcagaacactayatttcctatcgtttacaacgtgacttggaaagaagtggttatggagatcatatygcagttcatttacattttgaacaaattcgctaactaat

SEQ ID NO: 1927 - DNA, 264 bp, Streptococcus pneumoniae
  misc_feature (1)..(264): tiling:Spneumo1:WAN024GGZ; Cluster includes WAN023LX4 3143 39_1012||||528376..528639|-|264 bp|EGAD orf prediction|S.p neumoniae|R6|NC_003098.1|ORF|110
atgcaagtccgcaataacagtcaagagatgctggtagaggctattgatttgttccttgagattacctatctcatccttagaatccacgcgcaatcgcacttgggaatccaggtccatcatccgacgggtcacccgcttgatttccaaaatcggtgcaacaatagtccgagcgtagatgtaggccaccaaragggaaatcagaaaggaggccagcaaggtatagggaagaaactggagactgatttgctccgcttccttttgtaa

SEQ ID NO: 1928 - DNA, 845 bp, Streptococcus pneumoniae
  misc_feature (1)..(845): tiling:Spneumo1:WAN024FGH; Cluster includes WAN0243N2 spr1 525|ABC-MSP|15903568|NP_359118.1|1501259..1502098|-|840 bp |ABC transporter membrane-spanning permease - sugar transp ort|S.pneumoniae|R6|NC_003098.1|ORF|211
atgcaatctacagaaaaaaaaccattaacagcctttactgttatttcaacaatcattttgctcttgttgactgtgctgttcatctttccattctactggattttgacaggggcattcaaatcacaacctgatacaattgttattcctcctcagtggttccctaaaatgccaaccatggaaaacttccaacaactcatggtgcagaaccctgccttgcaatggatgtggaactcagtatttatctcattggtaaccatgttcttagtytgtgcaacctcatmwctaryaggttatgtattggctaaaaaacgtttctatggtcaacgcatyctatttgctatctttatcgctgctatggcgcttccaaaacaagttgtccttgtaccattggtacgtatygtcaacttcatgggaatccaygatactctctgggcagttatcttgcctttgattggatggccattcggtgtcttcctcatgaaacarttyagtgaaaatatycctacagagttgcttgaatcagctaaaatcgacggttgtggtgagattcgtaccttctggagtgtagccttcccgattgtgaaaccagggtttgcagcccttgcaatctttaccttcatcaatacttggaatgactacttcatgcaattggtaatgttgacttcacgtaacaatttgaccatctcacttggggttgcgaccatgcaggctgaaatggcaaccaactatggtttgattatggcaggagctgcccttgctgctgttccaatcgtcacagtcttcctwgtcttccaaaaatccttcacacagggtattactatgggagcggtcaaaggataactaat

SEQ ID NO: 1929 - DNA, 288 bp, Streptococcus pneumoniae
  misc_feature (1)..(288): tiling:Spneumo1:WAN024DZV; Cluster includes WAN023KII 3130 73_3428||||1838233..1838520|+|288 bp|EGAD orf prediction|S .pneumoniae|R6|NC_003098.1|ORF|110
atgcaatgtaccttcaatgttgttgtccatcacatctacacctgcatatccatgaatatgagtatccacaagacctggggcaatgctataacctgtatagtcaatcacctcagccccttcaggaatctgctctacatgtttcccaaacttgccgtccacaagttccaagtaaccacctcgacgaactccgtgtgggtagaaaaactgatccgctttaatatagttaggcataatgttaacctccttaaaagattgattctacaatttattatgtcaattacattataa

SEQ ID NO: 1930 - DNA, 882 bp, Streptococcus pneumoniae
  misc_feature (1)..(882): tiling:Spneumo1:WAN024ERX; Cluster includes WAN0243ES spr1 824|rluD|15903866|NP_359416.1|1799011..1799886|+|876 bp|Ri bosomal large subunit pseudouridine synthase D|S.pneumonia e|R6|NC_003098.1|ORF|111
atgcaattcacatttacattacccgcctctctacctcaaatgacrgtaaagcaattacttgaggaacaactcctcatccctagaaaaatccgtcattttttgagaatcaagaaacatattttgataaatcaagaagaagtccrctggaasgaaatcgtaaatcctggagatgtttgccagttgacttttgacgaggaagattatycccaaaagacgatcccttggggcaacccagacttagtgcaggaagtttatcaagatcaacacttgattattgtaaacaaaccagaggggatgaaaacgcatggtaatcaaccaaacgaaattgcycttcttaaccatgtcagtacctatgttggccaaacctgctatgtcgttcatcgtctggacatggaaaccagtggcttagttctctttgccaaaaatccttttatcctgcccattctcaatcgcttattggagaaaaaagagatttctagagaatattgggctctagttgatggaaatatcaacagaaaagaacttstwytmakagacaaaattggacgtgatcgccatgatcgtagaaaaagaatagttgatgcaaaaaatgggmaatatgctgaaacgcatgtaagcagrttaaagcaattctcaaacaagacttccttggctcrttgcaagctaaagacagggcgaacccatcagattcgtgtgcacctttygcatcataatcttcctatcctgggmgaccctctctataatagtaaatcaaagacaagycggcttatgcttcatgccttccgactttcctttacccacccacttactttagagargctaactttcactaccctttcaaatacatttgaaaaagaattaaaaaagaatggaykaactaat

SEQ ID NO: 1931 - DNA, 396 bp, Streptococcus pneumoniae
  misc_feature (1)..(396): tiling:Spneumo1:WAN024CTS; Cluster includes WAN023LVI 3140 62_1088a||||574466..574861|-|396 bp|EGAD orf prediction|S. pneumoniae|R6|NC_003098.1|ORF|110
atgcaattggaagcgaaccagattattagcagttggaaccacattcccctggctgtcaacaatttcatagtagatgtaagtcaagtcttttccatctgctgcaatcgcatggtcttccttaataagacgaactgccgctggcttaccagcagtcgtaatcttatctcgagcaatttccttgccagattcatcacgagcaattgcttccaaggtacctggttgataggcaactttccattcaagataaagttcattagcatttgcaccttcttggtaagtccgcccatcgctggtttgttttttattgaaagtcttaagaccaagagattttccattcaagaacaattctacactagaagcattcgaataagcacgaactggaatcttaccttctga

SEQ ID NO: 1932 - DNA, 1311 bp, Streptococcus pneumoniae
  misc_feature (1)..(1311): tiling:Spneumo1:WAN024D8X; Cluster includes WAN0243UH spr1 258||15903301|NP_358851.1|1257080..1257475|-|396 bp|Hypoth etical protein|S.pneumoniae|R6|NC_003098.1|ORF|212
atgcaatttccagaaggatttgttgaaaaatataaagaratactaggagatgaggcaagarattttcttgcctcttttgaggaggaagcggtttcggcctttcgggtcaatcccttaaaagaagagcaactttccttttctgatgccattactcaaaccccttggggccactatgggaaggtttcagggaaatcgcctgagcatgctacaggtttagtttattcgcaagaacctgctgctcaaatggtggctcaagtagcycaacccagtcctggtatgaaggtcttggacttggctgctgcaccggggggcaaatcaactcaactggcagcctatytagcaggkgaggggctacttgtttccaatgaaatttcaagcaaacgggctaagattttggttgaaaacatggagcgttttggagcgacaaatgtcgtggtgaccaatgaatctgccgaccgcttggtcaaggtctttaaaggctattttgacttaatcgttcttgatgccccttgctctggtgaaggaatgtttcgtaagcaacctgatgctatggactattggagcttagattatccgagtcaatgtgctagcttgcaaagagaaattctggaggatgcagtgaccatgttagctgaaggtggtcrtctggtttattcgacctgtacctgggcacccgaggaaaacgaagagattgtcaattggttgctggaagagtatgattttgacttgttgccagtagagcatatcaatggaatggtagctggtattgacctrccagaaacggctcggatgtaycctyatyagtttaagggagagggtcagtttgttgcccatctacagtttaagggtaacaatccagctcctaaatttaaggcaagtaagagtaacctcagccgtgaacaagttgccttgtggcaggaatttgcccaaaaccatttgaaggtcaatctaccgggtatcttgcagayttttggagaccagctttatctcttgccagaacttttgccagatttakggaagctcaagattgctcgcaatggactgcatctgggyacttttaagaagaaacgctttgagcccagtttcgctcttggtttagccttgaaaycgagtcaggtcgaacagtcggttgaaattggccaagaagcgtttgtcaagtatgcggctggagaaaycgttcagctggcagaaagtctgccaaatggttggtaccaagttttggttaaaggcaatggcttgggctttgcaaaggttactggaaatgttttgaaaaattattttccaaaaggcctcagattcaaaykaactaat

SEQ ID NO: 1933 - DNA, 150 bp, Streptococcus pneumoniae
  misc_feature (1)..(150): tiling:Spneumo1:WAN024BHK; Cluster includes WAN023RWZ cont ig_1609_4||||1660..1776|+|117 bp|Glimmer 2.02 orf predicti on|S.pneumoniae|670|WAN01UDCD|ORF|001
atgcaayatcatcattttgtcgtagtatttggcagtgatggwaywgatgakgattcttctaaagttttaggagttrccttatctaaatcatctaacccagatttccaaacctgyacttggttgaccaataacttaccaggtagtttagaa

SEQ ID NO: 1934 - DNA, 684 bp, Streptococcus pneumoniae
  misc_feature (1)..(684): tiling:Spneumo1:WAN024FHS; Cluster includes WAN0243OH spr1 474|rr01|15903517|NP_359067.1|1454838..1455515|-|678 bp|Re sponse regulator|S.pneumoniae|R6|NC_003098.1|ORF|221
atgcacaagattttattaatagaagatgatcaggtcattcgtcaacagrtygggaaaatgctctctgaatggggatttgaagtggtcctggtagaagactttatggaagttttgagtctatttgttcagtcggaacctcatctggtcctcatggatattggtttgcccttgtttaatggttatcactggtgtcaggaaatccgcaagatttccaaggtacctatcatgtttctttcttcgagagaccaggctatggatattgtcatggcaatcaatatgggggcggatgactttgtgaccaagccttttgaccagcaggttcttttagcyaaggttcagggcttgttgcgtcgttcctatgagtttgggcgtgatgagagtttgctggaatatgctggtgttatcctcaataccaaatccatggatttacattatcaagggcaagtyttgaatttgaccaagaatgaattccagattttacgcgtgttatttgagcatgcaggcaacatcgtagcacgtgacgacctgatgcgggaactttggaacagtgactttttcattgatgataataccctctctgtcaatgtggctcgtttgcgtaaaaagttggaggagcagggattggtaggatttatcgagaccaagaaaggaatagggtacggattgaagcatgctykaactaat

SEQ ID NO: 1935 - DNA, 273 bp, Streptococcus pneumoniae
  misc_feature (1)..(273): tiling:Spneumo1:WAN024FBJ; Cluster includes WAN023KOW 3138 83_3121||||1661847..1662119|+|273 bp|EGAD orf prediction|S .pneumoniae|R6|NC_003098.1|ORF|110
atgcacaagctccgcatcttcgtaaatcaactctgtcggcgctttggaataatactgggcccgttcttggtgcttggcttccaagtgctcacccaagagcttgaacttgcgatattcttcgatttgagagaggaggtcctgctccaggtcatcccccaagtctgtcacttctgctaccttcggaaggagtttacgactcttaatcagcatgagctgactagccatgaccatgtactcacccgtcacttccagacgcatggcctgcagggttga

SEQ ID NO: 1936 - DNA, 207 bp, Streptococcus pneumoniae
  misc_feature (1)..(207): tiling:Spneumo1:WAN024AZR; Cluster includes WAN023RT0 cont ig_1602_6||||1100..1306|+|207 bp|Glimmer 2.02 orf predicti on|S.pneumoniae|670|WAN01UDDM|ORF|000
atgcacacccctataggatctaatgaaaatcacaacaggctcattcatagatggttacctaagcctaagggaactaagaaaacgactacmaaggaagtcgcattcatcgaaaagtggattaacaactatcctaaaaaatgcttgaactacaagtcccccagagaagacttctggatgactaacttgaacttgaaatttagcaataat

SEQ ID NO: 1937 - DNA, 456 bp, Streptococcus pneumoniae
  misc_feature (1)..(456): tiling:Spneumo1:WAN024C5C; Cluster includes WAN023M57 3143 71_595a||||306580..307035|-|456 bp|EGAD orf prediction|S.p neumoniae|R6|NC_003098.1|ORF|110
atgcacatctgttactggatgttgagccgccaagtgagcagccgttacatcgacaaggtcaatagccttatctggcaagctacgttgaggaatgtattgaacagaataatccaccgctgctttcaagacttcgtctggcaagatgacattgtggtgttgttgatagaggtcacgaattccttgaagaattttaaaagtattctctgccgaaggagcattgaccttcacttcgttgaaacgacgagcaagagcagcattcttcaagatggtgttacggtattcgtcttgagttgttgccccaatcactgtcaattctccacgagagagagctggcttgagaatatccgcaagtcctttagaaccactgtctccaccagtgctaccagcaccaagaatttggtgaatttcatcaaagaagaggataatattccctgcttctttcacttcattgactaa

SEQ ID NO: 1938 - DNA, 1262 bp, Streptococcus pneumoniae
  misc_feature (1)..(1262): tiling:Spneumo1:WAN024DXS; Cluster includes WAN0243CF spr1 910|tyrS|15903951|NP_359501.1|1888643..1889899|+|1257 bp|T yrosyl-tRNA synthetase 1|S.pneumoniae|R6|NC_003098.1|ORF|2 21
atgcacatttttgatgagctaaaagagcgtggtttgatatttcaaacgactgatgaagaagctttgcgtaaagccctagaagaaggtcaagtttcttattatactggctacgatccaactgctgacagccttcacctaggccaccttgtcgcaatcttgacaagtcgtcgcttgcaactagcaggtcacaaaccttatgcgctcgttggcggtgctacaggtctcatcggagatccgtccttcaaagatgctgaacgtagtctccaaacaaaagacacagtagatggctgggtcaagtctatccaaggacaactttctcgttttcttgactttgaaaatggcgaaaacaaggctgtcatggtcaacaactacgactggtttggcagcatcagcttcattgacttcctccgtgayattggaaaatacttcacggtcaactacatgatgagtaaggaatctgttaaaaaacggatcgaaacaggaatttcttacactgagttcgcttaccaaatcatgcaagggtaygacttcttcgtccttaaccaagaccataatgtcactcttcaaatcggtggttctgaccagtggggaaatatgacagctggtaccgaattgcttcgtcgtaaggcggacaagactggtcacgttatcactgttccactaatcacagatgcaactggtaaraaatttggtaaatcagaaggaaatgccgtctggctcaatcccgaaaagacttctccatacgaaatgtaccaattctggatgaacgtgatggacgctgacgctgttcgcttcttgaaaatctttactttcttgtcacttgatgagattgaagatattcgyaaacaatttgaagcagcrccacacgaacgcttggctcaaaaagtcttggctcgtgaagttgttacacttgttcacggagaagaagcctacaaagaagcacttaacatcactgagcaactctttgcaggaaacatcaaaaacctttctgtcaaagagctcaaacaaggacttcgtggtgtgccmaactaccaagtacaggcagacgaamacaacaatatcgtggaactgctcgtctcatctggtatagttaactcaaaacgccaagcccgtgaagacgtccaaaacggagccatctacgtaaacggcgaccgcatccaagascttgactatgtcttgagtgacgctgataagttagaraatgaactgactgttatccgtcgtgggaagaaaaaatactttgtattgacttactaactaat

SEQ ID NO: 1939 - DNA, 821 bp, Streptococcus pneumoniae
  misc_feature (1)..(821): tiling:Spneumo1:WAN024CHQ; Cluster includes WAN02446U spr0 812|ABC-NBD|15902856|NP_358406.1|813563..814378|+|816 bp|A BC transporter ATP-binding protein - unknown substrate|S.p neumoniae|R6|NC_003098.1|ORF|111
atgcactatgatgcaagctacatttcatttgatgggatattaagaaaggagattctcatgacacttttagatgtaaaacacgttcaaaaaatttataaaacacgttttcagggcaaccaagtagaagccctcaaggatattcactttaccgtmgaaaagggtgactaygttgccatcatgggtgagtctggttctggtaaatcmactcttctcaatatyctagctatgytggayaaaccaagtcgtggtcaggtttacttraatggaactgayacmgcaacyattaaaaattcacargcytctagyttccgkcgtgaaaagytrggmtttgtcttccaagactttaacttgctagatactctrtctgtwaargacaatatcttgcttccrcttgtcttgtcaagaagacctatwacrgaratgatgaagaaattggtggtgacagctgaraatctgggwathaaccaattrcaagagaagtacccttacgaratttcwggtggbcagaaacagcgtgtagcagtagcmcgcgccatcatcacwgamcctgaaattctccttgcggacgarccracaggagcycttgaytccaagtcatctgcagccttacttgatgtctttratgaaatcaatgagcgyggscaaaccatyctcatggtaacccactcaacagcagcwgctagcagrgcyaarcgtgtwctctttatcaaagacggcattctttacaaycaaatctaccgtggagagaagacagarcgtcagatgttccaagaaatctctgayaccttgactgtcatggcaagcgaggtgaattarctaat

SEQ ID NO: 1940 - DNA, 1565 bp, Streptococcus pneumoniae
  misc_feature (1)..(1565): tiling:Spneumo1:WAN024D9M; Cluster includes WAN0243X6 spr1 161|ABC-NBD|15903204|NP_358754.1|1162971..1164497|+|1527 b p|ABC transporter ATP-binding protein - unknown substrate| S.pneumoniae|R6|NC_003098.1|ORF|111
atgcactatsracattctagaaagggmaatmrtatgataaaaatcaatcayctraccatcacacaaaacaaagatttacgagaycttgtmtctgacctaascatgaccatmcaagacggggaaaaggtwgctattattggygaagaaggaaatggyaaatcaaccttacttaaaaytttaatgggggaagmtttgtctgatttcactatcaagggaracatccartctgaytatcagtcactggcctacattcctcaaaaastyccygaggasctraaaaagaaaactttacacgactacttctttttagattctattgatttagactacagtatcctctatcgtttggcggaggaattgcattttgatagcaatcgtttcgcaagtgaccaaragattggcartctatcagggggmgaagctttgaaaattcagcttatccatgagttagccaaaccctttgagattctatttttagatgaaccttcaaatgacctagaccttgagacagttgattggytaaaaggccarattcaaaagaccaggcaaaccgttattttcatttcccatgatgaagactttctttctgaaacggcagacactattgttcacttgcgactggtcaaacaccgtaaagaagcggaaacgctagtagagcatttagactatgatagctatagtgagcagagaaaggctaattttgccaaacaaagtcagcaagctgctarcaaccaaagagcctacgataaaaccatgraaaaacatcgsagagkyaagcaaartgtagaaactgcgcttcgagctaccaaagatagtactgccggtcgcctattggctaaaaagatgaaaactgtcctctcacaagaaaaacgctacgaaaagrcagctcagtccatgactcaaaarccacttgaagaggaacaaatccaacttttcttttcagacatccaaccattaccagcttctaaagtcttagtccaactggaaaaagaaaatttgtccattgacgaccgagttttggttcmaaaactacaactaactgtccgtggscaagaaaaaatcggtattatcgggccaaatggtgttgggaaatcaactctgttagccaarttamagmracttctgaatgataaaagagagatttcmcttggttttatgccacaagattaccacaaaaaactgcaattggatttatcmccaatagcytatmtcagyaaaactggggaaaaagaggaactwcagaaaatccamtctcacctagcyagtctcaatttcagttatccagaaatgcagcatcaaattcgctccttatctggcggacaacagggaaaactcctgcttttggatytagtcctgcgcaaaccaaactttctcctgctggatgaacccacacgaaacttttctcccacttctcaaccccaaatcagaaaactctttgchacytatccwggcggtctcatcactgtttcgcatgaccgtcgtttcttaaaagaartctgctcgatcatctatcgcatgacagaacacggtttgragytagttaatttagaagatttataactaat

SEQ ID NO: 1941 - DNA, 345 bp, Streptococcus pneumoniae
  misc_feature (1)..(345): tiling:Spneumo1:WAN024GFY; Cluster includes WAN023LVT 3142 40_1071||||559550..559894|-|345 bp|EGAD orf prediction|S.p neumoniae|R6|NC_003098.1|ORF|110
atgcactggtcgcaacaaacgcatgataatggagccatccttgacctcctccccaatcataaaggacgaatcggatctagtcagaagattggtcacaaaactcatgatgatgtagagggtgatatccgccatactgaagccctgaatcaaagactcttgcgaagaatcaaagacagccttccagagataaaaggccacaaaagcccccatgacatcgccaatccgatagagaataaagttgactcggtaagtaatcaactcctgaacccctgcattgataaagggtttataacgtctccacaatttgatcatcctagagctcctttcggtagaagcgacggataa

SEQ ID NO: 1942 - DNA, 600 bp, Streptococcus pneumoniae
  misc_feature (1)..(600): tiling:Spneumo1:WAN024EUH; Cluster includes WAN0244PQ spr0 132|IS1167-truncation|15902176|NP_357726.1|140042..140428| -|387 bp|Degenerate transposase (orf2)|S.pneumoniae|R6|NC_ 003098.1|ORF|111
atgcacttaacccatcgggaagtacgagataagctgctttcttactctgagggattacaggttyactacgaactctatcaactcctgctctttcattttcaagagaagaatgccgaccatttctttggattgattgagcaagaactgccaacggttcatccgctttttcaaacggtcttttggacttttttaagrgatagagataagattatcaacgcacttaagctgccttattccaacgctaaacttgaagcgaccaataatttgattaagrttatcaagcgcaaagcctttggtttccggaactttaacaattttaaaaaacggattttgatgactttgaacatcaaaaaagagagtacgaatttcgtactctccagattgyagcttttcgcctacccactacacttgacaaagagccactctttattccatggtatcaaaggcaagacttggtttggcattgaggtcccagcctgcgaagttttctttgttccactcgctgacgctggcataggcaatcatacctgcattgtctccgcagagtcgcagaggggggatgataaccttgacatctgtgatttcggctgcctarctaat

SEQ ID NO: 1943 - DNA, 120 bp, Streptococcus pneumoniae
  misc_feature (1)..(120): tiling:Spneumo1:WAN024DSY; Cluster includes WAN02433P SP01 90||15900127|NP_344731.1|181261..181380|+|120 bp|hypotheti cal protein|S.pneumoniae|TIGR4|NC_003028.1|ORF|120
atgcagaagcacgtttgcgtgcagctctataaacatcaaggctgggagcacttcccagtcttattctattttaatttcaaaaagaaagaagaaagaaatgaaaaaaatagttcttgttag

SEQ ID NO: 1944 - DNA, 1822 bp, Streptococcus pneumoniae
  misc_feature (1)..(1822): tiling:Spneumo1:WAN024FCS; Cluster includes WAN0243JG spr1 656|ABC-N/P|15903698|NP_359248.1|1628490..1630241|-|1752 b p|ABC transporter ATP-binding/membrane spanning protein - unknown substrate|S.pneumoniae|R6|NC_003098.1|ORF|221
atgcagaataarcaagaacartggrctgtattgaagcgcttgatgtcytatctcaagycttatggactcctkacctttttggcactcagttttctcctagcgacgacggtcattaaaagtgtcatwcccctygtggcttcccactttatcgaccagtatctcagcaatmtyaaccaactagccgtkaccgttttgctggtctactatggtctctacatcctacaaactgtagttcagtatgtcggcaatcttctctttgcgcgcgtgtcttacagtattgttagggatattcgtcgggatgcctttgccaatatggagaaactgggcatgtcttactttgacaagacgccagcaggttctatcgtttctcgtttgaccaacgataccgagacgattagtgatatgttttckgggattttatcyagctttatctcagcagttttyatctttctgacaaccctttataccatgttggtrytggattttcgtttgacrgcwttagtcttgctctttctyccyttgattttccttttggtcaatctctatcgraaaaartcagtgaaaatcatygagaaaaccagaagtctcttgtcagatatcaatagyaagctggcwgaraayatcgagggaatcagratwatycaggcytttaatcaagagaagcgcctgcaggcagaatttgatgaaatcaaccaagarcacttggyctaygccaaccgttctgtagccttggatgccctctttttgagacctgccatgagtttgytgaaacttctaggytatgcwgtyttgrtgrcctaytttggctaycgtggtytttctatcgggataacggycgggaccatgtatgcytttatccagtacatcaaccgcctytttgacccyttgattgaggtgacgcaaaacttttcaacwctgcaaacgkctatggtttctgcaggycgtgtctttgccytratmgaygagaggacctatgarccycttcaagaaaatgggcargcyaaagtcmaagaaggcaatatccgttttgaacatgtgtgtttctcrtatgacggtaaacatccgattytggatgacatttctttctctgttaataagggtgaaaccattgcctttgtaggtcatacaggttcagggaaatcgtctattatcaatgtyctcatgcgcttttatgaattccagtcagggagagttctcttggatgatgtggatatcagggatttcagtcaagaagagctgagaaaaaacatcggtttggtyttrcaggaacccttcctctatcatggaactattaagtccaatatcgccatgtaccaagaaaycagtgatgagcaggttcaggctgcggcagcctttgtggatgcagattcctttattcaagaacttcctcaggggtacgactcccctgtttccgagcgtggttcgagcttctctactgggcarcgccagcttcttgcctttgctagaacagtcgccagccagcctaaaatcctgattttggatgaagcgacagccaatattgactctgaaacagaaagyttggttcaagcttctctggcgaagatgagacagggccgaacaactattgctatcgctcaccgcctttctactattcaagaygccaactgcatctatgtcttggataagggacgcatwatcgagagtggaacccatgaggaactcttgrctctgggaggaacctatcacaagatgtatagtttgcaggcaggggccatggcckatactcttykaaaatctctttaaaccatgtcagctttatctgcaatctcaaagctgtactttgattttcattgagtactag

SEQ ID NO: 1945 - DNA, 1266 bp, Streptococcus pneumoniae
  misc_feature (1)..(1266): tiling:Spneumo1:WAN024D3D; Cluster includes WAN0244A3 spr0 695||15902739|NP_358289.1|695084..696343|+|1260 bp|Conserv ed hypothetical protein|S.pneumoniae|R6|NC_003098.1|ORF|11 1
atgcagaatctgaaatttgccttttcatctatcatggctcacaagatgcgttctttgcttactatgattgggattattatcggtgtttcatcagttgttgtgattatggctttgggtgattccctatctcgtcaagtcaataaagatatgactaaatctcagaaaaatattagcgtctttttctctcctaaaaaaagtaaagayggktcttttactcagaaacaatcakcttttacggtttctggaaargaarargaarttcctgttgaaccgccaaaaccgcaagaatcctgggtycaagaggcagctaaactgaagggagtggatagttactatgtaaccaattcaacgaatgccatcttgacctatcaagataaaaaggttgagaatgctaatttgacaggtggaaacagaacttacatggacgctgttaagaatgaaattattgcaggtcgtagtctgagagagcaagatttcaaagagtttgcaagtgtyattttgctagatgaggaattgtccattagtttatttgaatctcctmaagaggctattaacaaggttgtagaagtcaatggatttagttaccgggtcattggggtttatactagtccggaggctaaaagrtcaaaaatatatgggtttggtggcttgcctattactaccaatatctcycttgctgcgaattttaatrtagatgaaatagctartattgtctttcgagtgaatgataccagtttaaccccaactctgggtccagaactggcacgaaaaatgacagagcttgcaggcttacaacagggagaataccaggtggcagatgagtccsttgtatttgcagaaattcaacaatcgtttagttttatgacgacgattattagttccatcgcagggatttctctctttgttggaggaactggtgtcatgaacatcatgctggtttcggtgacagagcgcactcgtgagattggtcttcgtaaggctttgggygcaacacgtgccaatattttaattcagtttttgattgaatccatgattttgaccttgttaggtggcttaattggcttgacaattgcaagtggtttaactgccttagcaggtttgttactgcaaggtttaatagaaggtatagaagttggagtatcaatcccagtygccctatttagtcttgcagtttcggctagtgttggtatgatttttggagtcttgccagccaacaaggcatcgaaacttgatccaattgaagcccttcgttatgaaykaactaat

SEQ ID NO: 1946 - DNA, 1407 bp, Streptococcus pneumoniae
  misc_feature (1)..(1407): tiling:Spneumo1:WAN024CW5; Cluster includes WAN0242ZD SP03 54||15900283|NP_344887.1|328055..329455|+|1401 bp|hypothet ical protein|S.pneumoniae|TIGR4|NC_003028.1|ORF|010
atgcagacaaagtatatttgtagagtgacactagtgacattaagttttatatttgctttctgttacttgttctggactctcgataattggaataatggttttcttatatctaattatgttccgtctatatttatatgggtttgctttctaattatttttcaaattactggttttattttacaaaaagttagtatatatgatttttctgtatggtatctgattttatcttatttttttatgtttggattaattttcaatgagtatatggggtttcaaacaactctgctgtggagccctagtaacttctataataatgaagaattatttcattcatatatttttataatttggattttgttttgttattctgtaggctatttatttttttatagtgatggaaaggtacattatcattcagaagtacaaaattatcaggaaaatgaagagaaaattttgtacaatgcgggtaggattttaacaggagtgggctttatttctagggtaataactgattctaaaacagtactagcagttagagcggcgaatagctattcagcatattcagaggcagctagttcaggaataatagatgatttaggagtacttatgcttcctggtgtgttctccttgttttattcagataagctgtcccgagttataaagcgtactattttttgggtaatgttgttttacctaattttgataatgatcctaacaggaagtcgtaaaatccaggtgttttcaatcttggcgttggttttagtatacacacaatctttagggattactttttcgaagaaaagagtacttgtatttttaatagtaactgtatttctattaaatgtattagttgttattagggggcaccgtttcgacttgaatactataggtatatacttatttgattccttttcttcattagattttgtaaagaatatactaggggaagtattttcagagtcgggactgaccagcctaacagtagcttctgctgtaactgttgtgcctagtagcattccatatgaatatgggatgacatttctacgcactatcctatcaatttttcctattggatggttagttggtgatttttttgataaagcatcagcgacggttgttattaataaatttttggggttacctgtaggctcttcttttgtggaagaattattttggaactttggttactatggtggtgttttttggagttttgttttgggaatatttagtggatggcgattaaatttcagagcttttcaaacaagtaaaatctcaaaagttatttatttttcggtaatttctcaactattgcttttagtgagaagtagttcaatagatgtttatcgtcctattatgtatagtttgattatgatatttatttttaggaggttgaaaaaactarctaat

SEQ ID NO: 1947 - DNA, 237 bp, Streptococcus pneumoniae
  misc_feature (1)..(237): tiling:Spneumo1:WAN024F3Q; Cluster includes WAN023M2P 3142 73_737||||384779..385015|-|237 bp|EGAD orf prediction|S.pn eumoniae|R6|NC_003098.1|ORF|110
atgcagacctgttttttcacgcatagatgccagtttcttttggtaaccagggaaatgcaagggatccttgctttcaatccctgtaaacaattctttgaaggttcccatatcaatcgtcaaagccaagcgttcttgggcagaaatacgaaaggtatagctacagtgcggacagatacgttcacttcccagatccttctgatagatggtatgcttacagcctggacactgggaaaataa

SEQ ID NO: 1948 - DNA, 963 bp, Streptococcus pneumoniae
  misc_feature (1)..(963): tiling:Spneumo1:WAN024D45; Cluster includes WAN0243IN spr1 685|fatC|15903727|NP_359277.1|1656987..1657943|+|957 bp|AB C transporter membrane-spanning permease - ferric iron tra nsport|S.pneumoniae|R6|NC_003098.1|ORF|111
atgcagactaaaagcaaacataccaagctcttctggattctcattattcttgccatcggagcttgtcttctctacttttggcccatcactcacttgtcagcctttgcttggaagttgcgttcccaaaagatyatcgtttatctcttggtagccatcgcgactgggatttcgaccattagttttcaaaccctgacggaaaatcgcttcctgacgcctagtattttgggaattgaatccttctacgtcctactacaaaccctactactggtttttgaaagcaagtttcttcaacttggcaaatcccctatcttagaattcctagtcttacttcttgtccagtccctcttctttctcrccttacaaggttacttgaagacactgatgaagcaagacctggtcttcrtcctgctgatctgtctagcgctcagaagtctctttcgaaatatcagyaccttccttcaagtcctaatggatccaaacgaatacgataaactgcaaaatagtctttttgcctcctttcaacatctcaacacttccatcctagccatcggktctctgatcatcctcgctttgacaatctttttctttcgaaaagcagtcgttctagatgtcttgcacctgcaaagagaaacggctcagatattgggactcgatgttgaaaaagaacagaaagarctcctctggggaatcgtgcttttgacctcaacggccactgccttggtaggacctatggccttcttcggctttatrctggccaacctcacctacctgattgtcaaagactatcagcacaagttactctttatagtggccattctgrttggatttattagcttaaccttggggcaagccttgattgaacgagtctttgcactggaaattcgtatcagtatgatcattgagagtgtgggtggcttcttattctttatcttactatataggaggkctcgtcagykaactaat

SEQ ID NO: 1949 - DNA, 394 bp, Streptococcus pneumoniae
  misc_feature (1)..(394): tiling:Spneumo1:WAN024F2B; Cluster includes WAN023LSK 3137 70_1241||||657306..657620|+|315 bp|EGAD orf prediction|S.p neumoniae|R6|NC_003098.1|ORF|220
atgcagacttcccgccacccagccggtacagagggcagaagtgatgttaaagccacccgtgtgggcattgatatccataacttcgcctgcaaagtggaggccaggtaccagcttactttcaagggttttaggattgatttccttgagactgactccacccttggtaacaaaggactttgcaagggacatttttccagttacaggaattttaagttctttaatggactggacaagttgttctcgttccttttcagtcagytgtttgactttttcaggatatccttgtacaaaaaattcggccaagcgttctggtaacaaggtttttaaagcgtttttcaaggatttttcccgattttcttctagaaatgtaaccaagtccttctcagaaagttga

SEQ ID NO: 1950 - DNA, 120 bp, Streptococcus pneumoniae
  misc_feature (1)..(120): tiling:Spneumo1:WAN024CN2; Cluster includes WAN02436R SP00 72||15900017|NP_344621.1|79434..79547|+|114 bp|hypothetica l protein|S.pneumoniae|TIGR4|NC_003028.1|ORF|020
atgcagattgcaggaatcatcttcaactcatcaacgaccaatggtgacaaggtggatttcaatcccacagaaaatgttgatttgagaaataactttgctagtctagtaaaactaactaat

SEQ ID NO: 1951 - DNA, 93 bp, Streptococcus pneumoniae
  misc_feature (1)..(93): tiling:Spneumo1:WAN024DPA; Cluster includes WAN0242GL SP10 91||15900959|NP_345563.1|1026937..1027029|-|93 bp|hypothet ical protein|S.pneumoniae|TIGR4|NC_003028.1|ORF|120
atgcagattttttacatcaaaactaagatttttcttagttttttcttatttttgttgattttttcacaatgtttctataaaatagaagaatag

SEQ ID NO: 1952 - DNA, 201 bp, Streptococcus pneumoniae
  misc_feature (1)..(201): tiling:Spneumo1:WAN024EXR; Cluster includes WAN0243NN spr1 504||15903547|NP_359097.1|1483442..1483642|+|201 bp|Hypoth etical protein|S.pneumoniae|R6|NC_003098.1|ORF|110
atgcaggactcacaccatctcctgctcgctggraatataaggataagatattgttctcagaatatttcttataaaattgtaacagattcttgcggtgcttcaaatcccggtrytgaatcaacagtttctgtagctggtgttggacctrtcggatgcaytggagctacttctggttcttcatacattgggccaactggatga

SEQ ID NO: 1953 - DNA, 2469 bp, Streptococcus pneumoniae
  misc_feature (1)..(2469): tiling:Spneumo1:WAN024GO7; Cluster includes WAN024185 |gyr A||AAO16801.1|||2469 bp|GyrA|S.pneumoniae||AY157689|ORF|00 0
atgcaggatagaaatttagtgaatgtcaatctgacaaaggagatgaagacgagytttatmgattacgccatgagtgttatcgtagcgcgggctcktcctgatgttcgagatggcttgaaacctgttcaccgtcggattctctatggaatgaatgaattgggtgttactccagacaaaccccataaaaaatctgctcgtattacaggggacgtcatgggtaaataccacccacacggggattwctctatctatgaagcmatggtccgcatggctcaatggtggagctaccgttacatgcttgtagatgggcatggaaactttggttccatggatggagatggtgctgccgcccarcgttayactgaggcacgtatgagcaagattgctytrgaaatgcttcgwgatatcaataagaatacggttgatttcgttgataactatgatgcyaatgaacgkgaacccttggtcttgccagctcgttttccaaaycttttrgtyaatggagcaactggtattgccgttgggatggswaccaayattccycctcayaatctrggtgaraccattgatgcagtsaagytsgtcatggacaatcctgaagtgactaccaaggacttgatggaagtcttgcctggtccagattttccaacwggtgcccttgtcatggggaaatcaggyatycataaggcttatgaaacaggtaaaggttctattgtccttcgttctcgtactgaaattgaagaaactaagactggccgtgagcgcatcgttgtracggaatttccttayatggtcaayaaaaccaargtrcatgagcatattgttcgtttggktcaggaaaaacgkattgagggcatcacagcagtwcgtgatgartcaaaccgtgaaggtgttcgatttgttatygaagtyaagcgmgatgcctcagccaatgttatcctcaataacctcttyaagatgacccagatgcaaaccaactttggtttyaatatgytkgckatccaaaatggkgtaccgaagattttgtcycttcgtcagattttggatgcttatatcgarcaccaaaaagaagtggttgttcgtcggacacgttttgayaaggaaaaagcggaagcwcgygctcatatcttagaaggtctsttrattgcsctagaccatatcgaygaagtgattcgyatmatccgtgctagtgaaacrgatgcrgaagcacaagctgagttgatgagtaagtttaagctttctgaacgtcaaagtcaggcyatyytwgatatgcgtcttcgycgtttgacaggtttggaacgcgataagattcagtcwgagtatgatgacytsttggctctgattgcrgatttagcagatattctwgctaarccwgaacgtgtttctcaaatyatcaargawgaattrgatgaagtyaagcgtaartttggsgaccaacgtcgtacagarttgatggtcggtgaagtwtkgagtcttgaagatgaggatttgattgaagaatcggatgtyttrattacgctttctaayaagggatacatcaaacgtytggaccaagctgartttactgctcaaaaacgtggkggccgcggygttcaagggacaggygttaaggatgacgattttgttcgtgagttagtgtcaactagcacccatgatcacctgctcttcttyacaaataaaggacgtgtctatcgtctkaaaggttatgaaattcctgagtatggtcggacggcyaaaggwctaccagtwgtcaatctcttgaaattggaygaaggygaaagtattcagacgattatcaatgttgagtctgaacgcagtgatgatgcttacctcttcttyacaacycgtyatggtattgtgaagagaaccagygtyaaggaatttgctaacattcgtcaaaatggtctcaaagcactgaatctaaaggatgaagatgagytrattaatgtcttgttgacggaagaagatacggatattattattggtaccaagtttggttatgcagttcgctttaatcaatcagccgttcgcggcatgagtcgtatcgccacaggtgtgaaaggtgtgaayctccgtgagggagacacagtrgttggtgctagtgtgattacagatcaagacgaggttcttatcatcacagaaaaaggatatggtaagcgtacagtcgcgactgaatatccaacaaaaggtcgtggtggtaaagggatgaagacggctaatgtggctgaraaaaatggtcctctatcaggtctcttgactgtgaaaggtgatgaagacttgatgattatcactgatacaggtgtcatgattcgaaccaatgttgccaatatttcacaaacaggacgctcaactatgggagttaaagtaatgcgyctrgatcaagatgcyaaaattgtgacctttacaacggttgcagcggcagaaaaagaagaagttgggacagaaaacgaaacagaaggtgaagcataa

SEQ ID NO: 1954 - DNA, 683 bp, Streptococcus pneumoniae
  misc_feature (1)..(683): tiling:Spneumo1:WAN024GE7; Cluster includes WAN0244C3 spr0 623|glnP|15902667|NP_358217.1|631044..631721|-|678 bp|ABC transporter membrane-spanning permease - glutamine transpo rt|S.pneumoniae|R6|NC_003098.1|ORF|211
atgcaggattcgggaatccaagtactctttcaaggaaataatctcctgasaatcttacagggrttgggcgttacgattgggatatccatcctgtctgtcctcttatccatgatgttcrgaacagtcatgggaatcatcatgacctcccattctagaatcatacgatttttaacacgattgtatctggaatttatccgtatcatgccccagctggtgctactcttcatcgtttactttggcttggctcgaaactttaatatcaatatctcaggtgagacttcagctattatcrtttttaccctctggggaacagctgaaatgggagacttggtacgtggagctatcacttctctccctaaacatcagtttgaaagtggacaggcactcggcttgactaatgttcaactttactaccacatcatcatcccacaagtcttragaagactgctaccgcaggctatcaatcttgtcactcggatgattaaaaccacttcattagttgttttgattggggttgtggaagtgaccaaagttggacaacaaatcatcgatagcaatcgcctgaccatcccaactgcttcattttggatttatggaaccattctartcttatatttcgcagtttgctaccctatttccaaactatccactcacttagaaaaacattggagaaactaactaat

SEQ ID NO: 1955 - DNA, 315 bp, Streptococcus pneumoniae
  misc_feature (1)..(315): tiling:Spneumo1:WAN024C7P; Cluster includes WAN023M83 3143 90_444||||228088..228402|-|315 bp|EGAD orf prediction|S.pn eumoniae|R6|NC_003098.1|ORF|110
atgcaggccatcctctgtgtaggcagcttcttcgacatttccaccttcaagtacttcgacgattggaaggtcaaattgtttggcaaattcccagtcacgttggtcgtgggcaggcacagccataaccgcacctgttccataactagcaagracatagtcygcaatccagattggcatttccttaccattgacagggttgatggcatargcaccwgtccaaacmccwgttttttcyttagcaaggtctgtacgarccaagtcagacttaaggctggcttggtgtttatagtctgctacagcttctgcttgctctga

SEQ ID NO: 1956 - DNA, 81 bp, Streptococcus pneumoniae
  misc_feature (1)..(81): tiling:Spneumo1:WAN024DZY; Cluster includes WAN023SHT NC_0 03098.1_2372||||1837192..1837272|-|81 bp|Glimmer 2.02 orf prediction|S.pneumoniae|R6|NC_003098.1|ORF|110
atgcagggtactttactggtaaataaaaagttaaaaaaatcacaaaaaaagcttgaagaaacaaagaaaaaggcttacaat

SEQ ID NO: 1957 - DNA, 666 bp, Streptococcus pneumoniae
  misc_feature (1)..(666): tiling:Spneumo1:WAN024FWQ; Cluster includes WAN02416X |cps 9vM||AAM62297.1|||666 bp|putative O-acetyltransferase Cps9 vM|S.pneumoniae||AF402095|ORF|000
atgcaggttcgacatttattaacttatctgatttcgctacctaaaacaatcttttttaattttaagtgtttaccaattaatcaggcaattcaccttccaatacttgtagcatataatgtcaagttgttaaatttgaaaaagaatgtaattggtatagaaactgtagtaaaatttggtttagttcgaattggtttctcaggtacggagataatatcctctaatcgatcgctcataaacttgagacaaggaaaagttatttttaaagggaagtcagtgatcacaaaaggttgcacaattagtgttacaggaggaaccatcattttgggcgataacttttatgcgaatagaaattgtcttatatcatgtactgataggctcattgttggtaataatgtacttttaggttggaatgttattctttttgactcagctggtcatacactaagctacgatggtaagaaaaagataaaaatgacagaagaaattgtaattggtaaccatgtatggatttgtgctgaagcacacttattgaaaggaagtaagattgcagatggttctgtagtagcttattctagtttagttacaggttatttcgcagaaaagaattgcttgattggaggaatacctgcaaaaacacttagaaaaggagtaagttgggaaaagtaa

SEQ ID NO: 1958 - DNA, 1220 bp, Streptococcus pneumoniae
  misc_feature (1)..(1220): tiling:Spneumo1:WAN024CSK; Cluster includes WAN02447M spr0 784|thiI|15902828|NP_358378.1|782134..783348|+|1215 bp|Thi amin biosynthesis protein|S.pneumoniae|R6|NC_003098.1|ORF| 221
atgcagtattcagaaattatgattcgctacggwgagytgtcaaccaagggyaaaaaycgtatgcgtttcatcaataaacttcgyaataatatttcrgacgttttgtctatctatmsccaagttaaggtaacagcagatcgcgaccgtgcccacgcttacctcaatggagcwgattacacagcagtwgcagaatckctcaaacaagtwtttggaattcaaaacttttcycctgtttataaggttgaaaaatctgtagaagttytgaagtctkctgtccaagagattatgcrggacatctacaaggaaggyatgacctttaaratytctagcaagcgtagcgwccacamctttgaaytkgayagtcgtgaactcaaccaaacrcttggargggctgtattcgaagccattccaaaygtrcaagytcaaatgaaaagtcctgacatcaatcttcaggtggagatwcgtgaagaagcagcctatctttcttatgaaaccrttcgwggggcwggtggwttrccagtkggaacttcwggtaarggsatgctcatgttgtcaggrggratygaytcmcctgtagcwggytatctwgckcttaarcgwggggtrgatatmgaggcagttcactttgcyagyccaccwtayackagtcctggtgcyctyaaraaagcscargayttgacycgtaaattraccaartttggsggaaatatccagtttatmgargtkcctttyacagagattcaagaggaaatcaaagccaaagcgccagaagcytayytkatgacyytrackcgtcgytttatgatgcgkattactgaccgtattcgtgaggtacgaaatggtttrgttatcatcaatggggaaagtctaggtcaagtagccagccaaacccttgaaagtatgaaggctatcaatgctgttaccaacactcccatcattcgtcctgtggttaccatggacaagttggaaatcattgacatcgcccaggaaatcgatacctttgacatttcaatccaaccgtttgaagactgttgtacyatttttgcaccagatcgtccaaaaacaaatcctaaaattaagaatgcggagcagtacgaagcgcgtatggatgttgaaggcttggttgagcgagcagtggctggaatcatgattactgaaatcacacctcaagccgaaaaagatgaagttgatgacttgattgacaatctgctctaactaat

SEQ ID NO: 1959 - DNA, 875 bp, Streptococcus pneumoniae
  misc_feature (1)..(875): tiling:Spneumo1:WAN024D69; Cluster includes WAN024464 spr0 838||15902882|NP_358432.1|838148..839017|+|870 bp|Conserve d hypothetical protein|S.pneumoniae|R6|NC_003098.1|ORF|111
atgcarattcaaaaaagttttaaggggcagtctccctatggcaagctgtatytagtggcaacgccgattggcaatctagatgatatgacytttcgwgctatccagaycttgaaagaagtrgaytggattgctgctgaggatacgcgcaatacaggkcttttgctcaagcattttgacatttccaccaagcagatcagttttcatgagcacaatgcmaaggaaaaaaytcctgatttgattggtttcttgaaagcagggcaaagtattgctcaggtctctgatgccggtttgcctagcatttcagaccctggtcatgatttrgttaaggcagctattgaggaagaaattgcagttgtkacwgttccaggtrcctctgcaggaatttcygccttgattgccagtggtttagcgccrcagccacatatcttttacggytttttaccgagaaaatcaggycarcaraagcaatttttygrctykaaaaaagaytatcctgaaacwcagattttttatgaatcrccycatcgtgtrgcagayacrttggaaaatatgytagaagtctacggtgaccgctcsgttgtyttggtcagggaattgaccaaaatctatgaagaataccaamgaggtacwatytctgarttrytrgaaagcatykctgaaacgycwctcaagggygaatgtcttctsattgttgarggtgccagymargrtgtggargaaaargrygaggaagacttgttcktagaaatycaarcymryatycagcaaggyrtgaagaaaaaycaagctatyaaggaartmgctaagatttaccagtggaataaragtcarctctacgctgcctaccacgactgggaagaaaaacaataactaat

SEQ ID NO: 1960 - DNA, 996 bp, Streptococcus pneumoniae
  misc_feature (1)..(996): tiling:Spneumo1:WAN024FQ4; Cluster includes WAN023PIO pne3 3_21||||14631..15626|+|996 bp|Type 16A capsule operon, Gli mmer 2.02 orf prediction|S.pneumoniae||WAN01UCI4|ORF|000
atgcataaaactcggaatattaatttagaactattaaaagtacttgcatgtgttggagttgttctacttcatacaacgatgggtgggtttaaagagataggttcatggaatcttttgacatatttatattacttaggaacctattctatccctctattttttatggttaatggttatttattgttaggaaagagagagataacatatccctatatactgcataaagtaaaatggattctaataacagtgttgtcatggacccttatcgtttggtttttaaaacgggattttacagttaatccagttaaaaaacttataggctcgttggtgcaaaaaggttatttctttcagttttggttttttggttcgcttatacttatttatttatgtctacccattttgaaaaaaattcttaattcaaaaagaagatatttttatattctatctttattggtagttattggtttgatttttgaactgataaattactcacttaaaatgccagtgcagttttatattatacaaacatttagattatggacttggcttttctattatcttttaggtggttttatagctcactttgatatagatattatcaaaaataggtttaagagatggatgaaattagttgtagtacttttattcttgatttcgcctttaatattatttttcatagcgaagactgcataccataatctttttgctgaatatttttatgatattttatttgtaaaagttgtaagcttgggaatttttctaactatcctcacgcttactttgaatgaaaaacggagcgaatgtattgtttccctttctaatcaaaccatgggagtttttataatacacacatatattatgaagatatgggaaaagctatttggttttagtttcgtaggatcatatttactttttgctatatttactttaagtgttagttttattattgttggaatgttaatgaaaattccttatttcaatcgaatcgttaaatta

SEQ ID NO: 1961 - DNA, 996 bp, Streptococcus pneumoniae
  misc_feature (1)..(996): tiling:Spneumo1:WAN024FQ5; Cluster includes WAN023OSL pne7 4_15||||12658..13653|+|996 bp|Type 35F2 capsule operon, Gl immer 2.02 orf prediction|S.pneumoniae||WAN01UCCV|ORF|000
atgcataaatttaaagatattaacttggatttactaaaagtaattgcatgtgttggagttgttttactccatacagagatggggggatttaaagagacaggttcatggaatttttcgacatatttatactacttaggaacctattctatccctctattttttatagttaatggttatttattgttagggaagaaagagattacctattcctacatattacagaaagtaaaatrkattctaataacagtgctgtcatggaccyttatagtttggytatttaaacgggatttttcagttaatccaataaaaaaacttataggatcattggtgcaaaaaggttatttctttcagttttggttttttggtgcgcttatacttatttatatatgtctccccgttttgaaacaatttcttaattcaaaaagaagttatttatactttttatctgtattgctagttattggtttratttttgagttaacaaatattgtrcttcaaatgccaatacaarcatatgtaatacaaacttttagattatggacttggcttttctattatattttagggggctttatatctcagtttgataaaaataccatcaaaaatgggtttaagagatggatgaaagtaattgcagtacttttattattagtttcgccatttatattatttttcatagcaaagaccacttacyataatttttttgctgaatatttttatgatattttattagtaaaagttgtaagcgtagggatttttctaactattttctcamttgtattgaatgaaaatagcaacaaatggattatttttctttctaatcaaactatgggtatctttataatacacacttatattatgaaggtatgggaaaaastryttggttttarttttrtrggwkcatatttactttttgctmtatttactttaagtgttagttttatyattgttggratgttaatgaarattccktayttyaatcgaatcgtcaaatta

SEQ ID NO: 1962 - DNA, 501 bp, Streptococcus pneumoniae
  misc_feature (1)..(501): tiling:Spneumo1:WAN024CZ9; Cluster includes WAN023KZ1 3151 77_2666||||1418728..1419228|+|501 bp|EGAD orf prediction|S .pneumoniae|R6|NC_003098.1|ORF|110
atgcataagaactttgtagtcgtagtcaccaattttttcacggccgttcaattcatccaattcaacaaggaaggcacaacctgccataacaccaccaagtttttcaatcatctcgatagttgccttaacagttccacctgtcgccaaaaggtcatctacaataagaacacgttgacctggcttaatggcatccgcgtgcatagtcaaggtatcgacaccgtactctttttcatagtcagcagaaataacttcgcgtggcaatttacctggcttacgaacaggcgcaaaaccaattcccaactcaaaggcaactggacaacccacgataaatccacgagcttcaggtcccacgatcatgtcgactttcttgtcagtagcatactgaacgatttcacgaacagcgtagctataagcatttccatcagccatcaaaggactaatatcacggaaggtaatgccttcctttggataattttcaattgttgcaatgtaatcttttaa

SEQ ID NO: 1963 - DNA, 1722 bp, Streptococcus pneumoniae
  misc_feature (1)..(1722): tiling:Spneumo1:WAN024GF9; Cluster includes WAN0244D8 spr0 582|pabB|15902626|NP_358176.1|597147..598868|+|1722 bp|Par a-aminobenzoate synthetase|S.pneumoniae|R6|NC_003098.1|ORF |200
atgcatagaaaaacagtgattgattttagggctttgggggagagatacatctttaccaagccgattaaagagttgaaaacgagaaatttaacagaagtggcagatttgctggcacaagtggaaagctatcaagagcaaggctattatgtggtgggttatgtcagctacgaggctgcacctgcttttgaggaaaaattagcagttcataaggctcctctactgggcgagtacttgctttactttactgttcatgatagggtagaaacatcccctattcctctgacttatgatgaggttgatttgccttcaaattggcaggaagtaacgtctgcagcagactatgaaaaggctattgcacagatacatcatcatctacggcagggtgatacctatcaggtcaactacaccgtccaactcaaacaagatttaagcgccaatccttttgctatctacaatcgcatggtggtagagcaggaggcgggctacaatgcctatgtggaacatgacgatatggcagtaatttccatgagcccagagctcttttttgagcaaaatgaccgcgaattgacaacgcgaccaatgaagggaacgactcagcgtgccataactgaccaagaagacttggagcaggccagttggttggaacaggattccaaaaatcgctctgaaaatatgatgattgtggacctcttgcgcaatgatatgaatcgtatttctgaggtggggagtgagcacgtggagcgtctctgccaagtggagcagtattcaactgtttggcagatgacttcgactatcaagagtcagttacgagcagatgttgatttagttacaatttttcgctctctctttccttgtggatctataacgggagctccgaaaattgcgactatggagattatcaaggacttggagccacaaccgcgtggagtctactgtggaacgattggtctcttgcatccaaatggacgacggatttttaatgttgctatccgaactattcaactgcatcaaggggaagccatctatggagttggcggaggtattacatgggatagcacctggcaatctgaataccgcgaggttcatcaaaaggcagctgttctctatcgtaaacaagctcgtttccagctgattactactggaaaaatcagccagaagaacttgctgtttgaagaacaacatttggaaagactgagaacagctagtcgatattttgcctttccttatgatgcagaagacttaagacaaaagatagaggcggagtgtcagtcttgtgacattgatcaagactatcgcttgcgaatttctctcagtaagtctggagagatagaacttagtcgacaaatcttaacacctcttagtctacatttttgtcaggccaaactttgtcttcaggaagccaatttgcaacaagcctttacctattttaaaacgacttacagaccgcatttaaacctaggggaacaagagattatttaccacaataagtcaggagaactgcttgaaacctctatcggaaatttggttttgaaaattgctgggaaactctacacaccgcctatcagacttggtatcttgccaggaatttatcgccagtatttactagaaacaggacaagtagaagagaaagtcttgaccttgacagattttgcccaagcagaagctatttatggctgtaatgcagtgagaggcttgtatgaattaagcctagaggaaaattag

SEQ ID NO: 1964 - DNA, 1728 bp, Streptococcus pneumoniae
  misc_feature (1)..(1728): tiling:Spneumo1:WAN024GFB; Cluster includes WAN0242RI SP06 65||15900566|NP_345170.1|640560..642281|+|1722 bp|chorisma te binding enzyme|S.pneumoniae|TIGR4|NC_003028.1|ORF|021
atgcatagaaaaacagtgattgattttaggrctttrggggagagayayayctttacymagcctatyaaagagttraaaacsagaratktarmagaagtrrcagmyttrytggcacaagtggaaagctaccaagagcaaggttattatgtggtggggtatgtcagctacgaggctgcacctgcttttgaggaaaaattagcagttcacaaggatcccctactgggagagtacctgctttaytttactgttcatgatakcgtagaaacttccyctattcctctgacttatgaggatattgatttgccctcaaattggcaggaagtaacgtctgcagcagactatgaaaaggccattgcccaaattcaccatcatttacggcagggagatacctatcaggtcaactacaccgtccaacttaagcaaaagttaaatgccaatccttttgccatctacaatcgtatggtggtagagcaggaggcgggctacaatgcctatgtggaacatgacgagatgrcagtgatttccatgagcccagagctcttttttgagcaaaatgatcgcgagttgacaacacgaccaatgaaggggacgactcagcgtggggtaactgaccaagaagatcttgaacaggccagttggttggaacaggatcccaaaaatcgctctgaaaatatgatgattgtggacctcttgcgcaatgatatgaaccgtatttctgaagttgggagcgagcacgtggagcgtctgtgtcaggtagagcagtattcaactgtttggcagatgacttcgaccatcaagagtcagttgcgagaggatgtggaccttgttgaaatcttccrctcactctttccttgtggttccataacgggtgcaccgaaaattgcgacaatggagattatcaaggacttggagcctcaaccgcgtggagtctactgtggaacgattggtctcttgcttccaaatggacgacggatttttaatgtggccattcgtaccattcaacttcacaaaggtcaagccatttatggagttggcggagggattacttgggatagcacwtgggaatctgaataccgwgargttcatcaaaaggcagcagttctytatcgtaaacaagctcgcttccaaytrattacracwggrraaatcagccaraarmamctghtgtttgaagawcaacatctggaaagrctgagaaaagcyagtcgktattttgcytwtccttttgayscagaarwyttgrgacamaagattgargmagagtgtcagrmttgtgawgctaatcragattaccgcttgcgaatywsyctyagcaartctggagagatagaaktcartcgtcaartmttaacmcctctyagtmcaagyttttgtcaggccmaastytgyctkcargaagckrmtttgaatcaatcctttacctaytttaaaacsactyacmgaccgcatttgarcmtagrrgaacaagagaagatttaccayaatrrrwmaggagaactkcttgaaacctctatmggaaatttggttctgaaaatcgmtggraaactmtacacaccgcctatccgacttggaatcttgccaggaatttaycrycagyatttrctagaaacaggacaggtagaagagaaagtcttgaccttggcagatttwrcccaagcagaagctatttacggctgtaatgcagtgagaggcttgtatgarytaagyswtgaggakwrcctarctaat

SEQ ID NO: 1965 - DNA, 251 bp, Streptococcus pneumoniae
  misc_feature (1)..(251): tiling:Spneumo1:WAN024F2W; Cluster includes WAN0244DN spr0 567||15902611|NP_358161.1|579666..579911|-|246 bp|Hypothet ical protein|S.pneumoniae|R6|NC_003098.1|ORF|111
atgcatattcactataacacaaatcaaacaactttaccactagaaatcagttccttcttrccacaagaycatctcgtytttactattgaaaaagtggtgaataccttggaggawyrtcayttcyacrcctyctatcatgcctttgatcgccygtcttatcaccytaaaatgcttgtatctactcttctatttgcctattcacaagggattttctctggtcgaaaaattgaaaaatggaagagttarctaat

SEQ ID NO: 1966 - DNA, 342 bp, Streptococcus pneumoniae
  misc_feature (1)..(342): tiling:Spneumo1:WAN024GAA; Cluster includes WAN02447K spr0 786||15902830|NP_358380.1|784329..784664|+|336 bp|Hypothet ical protein|S.pneumoniae|R6|NC_003098.1|ORF|110
atgcatattgaacatcttagccactggagtggtcatcytaaccgtgaaatgtaccttaaccgttatggacatggtgggattccagttgtggtctttgcttcatcaggtggtagtcacaacgaatactatgattttggcatgattgatgcctgtgcttcctttatcgaggaaggccktgtccagttctttaccctatctagtktggatagtgagagctggttggctacttggaaaaatgctcatgaccaagcggaaatgcaccgtgcctacgaacgttatgtgattgaggaggccattcttttatcaagcacaagacaggttrgttkgatggcaykaactaat

SEQ ID NO: 1967 - DNA, 1026 bp, Streptococcus pneumoniae
  misc_feature (1)..(1026): tiling:Spneumo1:WAN024G7I; Cluster includes WAN02443F spr0 935|ABC-MSP|15902979|NP_358529.1|921242..922261|+|1020 bp| ABC transporter membrane-spanning permease - iron transpor t|S.pneumoniae|R6|NC_003098.1|ORF|111
atgcatgcaaaaatgcgaaataaaaaacaaataaacctaggcataatttttrtaatctgcctaggtcttcttattacaatatttttgtcattaaagcttggaacaaaagaaattaatatcagagattttttagcagcttttggaatgggyaatacaaatgatgattttattaaatcaattatatataaaagaatacctagaactatttttgcaattttagcaggttctagtcttgccataagcggtgtattgatgcaatcagttactagaaacccaatagctgatccaggtatactcggtataaacacaggagcaagtcttagtgtagtaattggtctttcttttttaggaatttcatcaagcataagccatataagttttgcaatcattggtggcttagtaagtgyaatttttgtatacgcgattgctgtaagcggaaaagcaggccttacccctataaaactwgccttatcaggaacttgtgttagtatggctttaagcagttttgtaagttttttaattttaccgaataataacgtcttagacaaatttagattttggcaaataggtagccttggagcagctacattatcttctatatctacactactaccttttataattttaggtcacttgatagctatatttatttcatcagatttaaacgctttagctatgggtgatgaaatggctgttggtcttggagttaatgttaataggataagatcacttgcaataattgcaagtgtgcttttatgttcaagtattactgcaattggtggacctattggcttcgtaggtcttatagttcctcacttttgtggcttatttataagcaaagatatacgcacaatgaccatttcttcakcttttataggtgcagagctcttgcttatatgtgatataatcggccgtatgttaggtaaaccaggtgaaattgaagtrgggataattactgcaataatcgggggtccagtacttatttatgtaactatgaaaaatagaggggttaataacctaactaat

SEQ ID NO: 1968 - DNA, 119 bp, Streptococcus pneumoniae
  misc_feature (1)..(119): tiling:Spneumo1:WAN0249IQ; Cluster includes WAN02471N-rc R 6.IG_203||||191059..191171|-|113 bp|Between spr0182 (+ str and) and spr0183 (nrdD) (+ strand)|S.pneumoniae|R6|NC_0030 98.1|IG-rc|110
atgcatgctcttttctaaaatgttctttctaaaaagtattataccactctaaaaagaaaaatcaatatcttgtgttaaaaatcctaaaatttttaaaaatacacaagatattgatttgg

SEQ ID NO: 1969 - DNA, 234 bp, Streptococcus pneumoniae
  misc_feature (1)..(234): tiling:Spneumo1:WAN024CS7; Cluster includes WAN023LO0 3146 60_1499a||||797694..797927|-|234 bp|EGAD orf prediction|S. pneumoniae|R6|NC_003098.1|ORF|110
atgcatggcagaggcatcctttttccccatagcccgacgcaaaatatcggctttcccaagactaaatccggcaartcgctgggcaacctgcataacctgctcctgatagagcattatgccgtaggttggagccaaaatatcctccagtactggatccagaacagtcacttcttcctgcccatgctttcttgccacaaaattattgatatagtcactagcacccggtcgatttag

SEQ ID NO: 1970 - DNA, 1224 bp, Streptococcus pneumoniae
  misc_feature (1)..(1224): tiling:Spneumo1:WAN024FYR; Cluster includes WAN0240C5 |cap 33fK||CAA07404.1|||1224 bp||S.pneumoniae||AJ006986|ORF|000
atgcatgttagattagatggtttgctggactatatatttctatttagtgtgattattacttgtaatactatgtattcaactagtcmaggatttgatggactagggaaatgggcgactctgttacttgtggtatcagttwttctgaaattgcttatctctagratatctatgaaggcaatcaatgtgattgtgtcgcgttctttaatatttatattaattattctactcatagtaatattaaatggttttaagatttctgagacaagtttcgtctattattttgtattatttccgatttttatgatgattttgcagatgtactatgatgttaatgaaatcgcaaatctgatacggaaatttgttcgtataatatttcttttagcaattggctctctcctattttggcttattggtagtgtatttcatattatatccccaacggtttatgtgttgaattattggaatggtgggggaatagtagaagggtactataatcttcattttgaagcacaaaaaatagagattttgggggcgatactgataagaaatacggggatttttgctgaagcacctatgtggagtttggtattgagccttgcattgatatttcaaacgcttcatataaaaaaatggaatttcacaacttggaytcttattattacaattatgacaactacgtcaacaacaggggtttatataataggtttgattttcctatatgttttattttcaaaaacaagtggtgtgaagagatatgtttctagtttatttattttagcgaytatatgttgtttttcaatattatgggataataaatctggaactggttcagcaactatacgctttgatgattataaggctggttttttggcatggcagaaaagtcctatttggggattaggtatttcagacggtcttagarccattgaacaacatatggatagaactgttagatataatcttgggtatagcaatagcttttttgttgttttagctcaaggagggataatgttggcttcgtattacttttatccagtaattaaaattattttgaataaatttagttcgaatgatttgaagttttctgcgctattaataattttccttatgataactactatatttatagagacctatatgtttttatttgtcatttctttatactattctcttgattttggggacgatagagattgtcatgagaaacagtacattactaattaa

SEQ ID NO: 1971 - DNA, 141 bp, Streptococcus pneumoniae
  misc_feature (1)..(141): tiling:Spneumo1:WAN024CRS; Cluster includes WAN023R3N cont ig_1458_3||||1769..1873|+|105 bp|Glimmer 2.02 orf predicti on|S.pneumoniae|670|WAN01UDSQ|ORF|000
atgcattattccaagaccagcaatcaaatgcggtccaagcgtggtatccaaaacagtgacttccctcttcaatggctttatgtagccatcttaaatgttcttcataaaattcaatacgatacacgtcatcgactaactaat

SEQ ID NO: 1972 - DNA, 90 bp, Streptococcus pneumoniae
  misc_feature (1)..(90): tiling:Spneumo1:WAN024GHS; Cluster includes WAN023SLU NC_0 03098.1_637||||505457..505546|-|90 bp|Glimmer 2.02 orf pre diction|S.pneumoniae|R6|NC_003098.1|ORF|110
atgccaaaaactccactcggagcgttgacacgcggtaccatccgttttcatctgacaagtcagaccttcatttctaaatccatgcgcaag

SEQ ID NO: 1973 - DNA, 206 bp, Streptococcus pneumoniae
  misc_feature (1)..(206): tiling:Spneumo1:WAN024DCT; Cluster includes WAN02445G spr0 862|rpmI|15902906|NP_358456.1|855881..856081|+|201 bp|50S Ribosomal protein L35|S.pneumoniae|R6|NC_003098.1|ORF|120
atgccaaaacaaaaaacacaccgcgcatcagctaaacgtttcaaacgtacaggttctggtggacttaaacgtttccgtgcttacacttctcaccgtttccacggaaaaactaagaaacaacgtcgtcatcttcgtaaagcatctatggtgcattcaggagattacaaacgtatcaaagcaatgcttactcgcttgaaataactaat

SEQ ID NO: 1974 - DNA, 252 bp, Streptococcus pneumoniae
  misc_feature (1)..(252): tiling:Spneumo1:WAN024GGU; Cluster includes WAN023LX1 3149 84_1018||||530573..530824|+|252 bp|EGAD orf prediction|S.p neumoniae|R6|NC_003098.1|ORF|110
atgccaaaattccatcgttcctgtcttatttcatttggctataaaaaactctcctgggaaatyccaggagagtatgattacttatttgaacttgaatccttcgtaaataagctctgtttttggattttgtttcttaatctgtttggcaagtgccttcatcatagaaataggaccacacatatagacggttgcatgttcgggcacttctttttgttcaaaattaagatagccgtctttcgtactgtcgattag

SEQ ID NO: 1975 - DNA, 1097 bp, Streptococcus pneumoniae
  misc_feature (1)..(1097): tiling:Spneumo1:WAN024E2P; Cluster includes WAN0243EA spr1 842||15903884|NP_359434.1|1818041..1819132|-|1092 bp|Conse rved hypothetical protein|S.pneumoniae|R6|NC_003098.1|ORF| 111
atgccaaacgtcaaagaaattacaagagagtcatggattttagccactttcccagagtggggaacatggttgaacgaagaaatcgaagaagaagtcgtacctgaaggcaaytttgccatgtggtggctaggcaactgtggtacttggattaagacaccagctggtgctaacgttgtcatggacctttggtcaaaccgtggaaaatcaaccaaaaaagtgaaagatatggttcgtgggcaccaaatggcaaatatggcaggtgttcgtaagytgcaaccaaacttgcgtgttcagccaatggttatcgatccatttgctatcaacgaactagactattacttastttcacacttccacagtgatcatatcgacccatacacagctgcagcaattctcaayaatcctaagttagagcatgttaagtttatcggtccttaccactgtggacgaatctgggaaggatggggtgttccaaaagaacgtatcatcgttgttaaaccaggtgacactatcgaattaaaagatatgaagattcatgcagtagaatcatttgaccgtacttgcttggtaactctcccagtgaacggtgctgatgagacaggcggtgaacttgctggmttggctgttacagatgaagaaatggctcaaaaggctgttaactatatctttgaaacaccaggtggaaccatctatcatggtgcagattctcacttctcaaactattttgcaaaacatggtaaagactttaaaattgatgttgctttgaataactatggtgaaaatccggtaggtatccaagacaaamtgacatctatcgaccttcttcgtatggcagaaaatctgcgtaccaaagtcattatcccagttcactatgatatctggtctaacttcatggcttctactaatgagattctagaactttggaaaatgcgaaaagatcgcttgcaatacgatttccatccatttatctgggaagttggcggtaagtacacttatcctcaagatcaacacttagtagaataccatcatccacgtggttttgatgattgttttgaacaagactctaacattcaatttaaagctttgctataactaat

SEQ ID NO: 1976 - DNA, 300 bp, Streptococcus pneumoniae
  misc_feature (1)..(300): tiling:Spneumo1:WAN024FO3; Cluster includes WAN023L40 3144 62_2450||||1307409..1307708|-|300 bp|EGAD orf prediction|S .pneumoniae|R6|NC_003098.1|ORF|110
atgccaaatcatgtggaaataaggttttttcttggcataaaatccagctccaactgtataacagagtccgccagttaccatgagactccagaaaacgggtgtcgtttgactgataatggcaggaatgatagccagaaccaaccagcccataatcaggtaaagagcaaggctaaatttctcattgacctttttagcaaagattttatagagaataccaaagatggtcgttccccattggatgacaataatcagatagccaaaccagttattcatcaaggtcaagacaacgggcgtgtatga

SEQ ID NO: 1977 - DNA, 699 bp, Streptococcus pneumoniae
  misc_feature (1)..(699): tiling:Spneumo1:WAN024FWE; Cluster includes WAN023P69 pne5 4_7||||4093..4773|+|681 bp|Type 25A capsule operon, Glimme r 2.02 orf prediction|S.pneumoniae||WAN01UCGY|ORF|000
atgccaacattagcaatagaacaaaaacgtttagattttgcgaaaaaagcagaagagaattacaatgctttgcgaacaaatattcaattgagtggtgataatctgaragttctttccatctcgtctgttaaacctggtgaggggaaatcgryaacatcaatraatattgcttgggcctttgcgcgtgcaggctataaagctttattggtggatgcggatattcgtaattctatcatgtcaggagtctttaaatcaagagaaaaaattactgggctaacggattttctggcaggtaccactgacctttctcatggactttgtgatacaaatattgaaaatttatttgttattcaggcaggacctgtatcccctaacccaacagcacttttacagagtgaaaactttgccactatgattgatactatgcgtaagtattttgaytatgtcattgtcgatactgcaccgattgggatggtcattgatgctgctattatcacacaaaaatgtgatgcttctattttggtaacagcagcgagggaaacaaagcgtcgtgatattttgaaagcaaaggaacagttagaacagacaggagtaccttttttaggagttrttctaaataaattcaayacagaagttgaaaaatatggagcttatggtgkytatggarmttatrgkttmtakggaaattataggaaggra

SEQ ID NO: 1978 - DNA, 681 bp, Streptococcus pneumoniae
  misc_feature (1)..(681): tiling:Spneumo1:WAN024BI5; Cluster includes WAN023PR5 pne1 7_8||||4390..5070|+|681 bp|Type 10A capsule operon, Glimme r 2.02 orf prediction|S.pneumoniae||WAN01UCJH|ORF|000
atgccaacattaraaatcacacagaaaaaattggagatcgtaaaaaaggcagaggagtactacaatgccttgcgtacaaatatacagttaagtggagataatttgaaagtcatctctattacttcagttaagccgggagaaggaaagtctacaacmtctactaacattgcttgggcttttgcgcatgcaggctataaaaccctattaattgatgcggatattcgtaactcggtcatgtcaggtgtttttagatctagtgagaagattactggcttaacagagtttttatcaggtacaacagacttgtcacaaggtctatgtgataccaatgttgaaaatctctttgtcattcaggcgggttccatttcaccaaaccccacagctcttttacaaagtgagaatttcagaacgatgatagataccctgcgtaaatattttgactatatcattgtggatactgctcccataggtatcgtgattgatgcagttattgtgacacagaaatgtgatgcttctgttttgattacggcagttggtgaagtacatcgccgtgatgttcaaaaggcgaaagaacacttggaacaaacaggcaagccgtttttaggagttgtgctaagtaaactgaatacttcaatagagaaatattcttcttatgggggatatgggaactatggaaataaa

SEQ ID NO: 1979 - DNA, 690 bp, Streptococcus pneumoniae
  misc_feature (1)..(690): tiling:Spneumo1:WAN024BI6; Cluster includes WAN0240Y7 |cps 6bD||AAL68407.1|||681 bp|putative regulatory protein|S.pne umoniae||AF246897|ORF|000
atgccaacgttagaaatctcacaggygaaattagaacttgygaaaaagrcagaggaatattataatgctttgtgcacgaaccyacagttaagtggagatgatttgaaagtrttttctatyasttctgtgaaascaggagaaggaaaaacaacgacttccaccaatatcgctygggcttttgcgcrtgcaggttacaaaacgytkctgattgatgcagacatgcgtaactccgtkatgtcaggtgtctttaaaycaagggaaaggattacyggrctaacagaatttctatcagggacwacagacctgtcacagggrctttgygataccaatrttgagaatctctttgtgattcaggctggctctgtgtcaccaaatccgayagcccttcttcaaagtargaatttcasyacaatgcttgraaccktgcgtaaatattttgactatatcgtcgtagacactgcycctrtcggyrtygtgattgatgcggctatcattaygcagaaatgtgatgcttctattttagtgacgaaggcaggygaaacaaarcgacgggawmttcaaaaagcgaaagaacagwtrgaacaaactgggaagycgtgtttaggagttgtgttgaataaaytcgatacttcagtagasraatacggttyttatggragttatgggarwdasarraaaharaaaaaatag

SEQ ID NO: 1980 - DNA, 288 bp, Streptococcus pneumoniae
  misc_feature (1)..(288): tiling:Spneumo1:WAN024CDJ; Cluster includes WAN023MCB 3131 10_196||||95840..96127|+|288 bp|EGAD orf prediction|S.pneu moniae|R6|NC_003098.1|ORF|110
atgccaagtaaaactagcgaagaagcaccgatagccagtaaaccagaaccaaaaatcaagataaaggctgatttggcttgggcgaggacagtgaaactttcaactaaaaataggaatccgccgatgatacccagtatggaaactgcaaagaaagccagaatgacagtcaaagcggctacaagrattgcgaacagggtcacgaggatggcgattcccagaggaatgccgataggtgctgcaaggagggctaacaaggcgatatgtaaaatttgtcggttatttttttga

SEQ ID NO: 1981 - DNA, 1352 bp, Streptococcus pneumoniae
  misc_feature (1)..(1352): tiling:Spneumo1:WAN024D4N; Cluster includes WAN0244H2 spr0 444|glnA|15902488|NP_358038.1|448511..449857|+|1347 bp|Glu tamine synthetase type 1|S.pneumoniae|R6|NC_003098.1|ORF|2 21
atgccaatcacagctgcagatattcgtcgtgaagtcaaggaaaaaaatgtwacctttattcgtcttatgwtctcagatattttgggaaccatgaaaaacgtcgaaattcctgmtacagatgaacagttagataaggtcttgtcgaacaaggttatgtttgatggatcttctattgaaggttttgtacgtatcaatgagtcggatatgtacttgtacccggacttggatacatggacagtcttcccttggggagatgaaaatggaagtgttgcaggtctgatctgtgatgtytatacaacagaaggtgaaccatttgcgggtgaccctcgtggtaatttgaaacgagctcttcgtcacatggaagaagttggattcaaatccttcaaccttggtccagagccagaattcttcctatttaagttggatgaaaatggggacccaacacttgaagtgaatgacaagggtggctactttgayttggcacctactgaccttgcggacaacacacgtcgtgagattgtgaatgtcttgaccaaaatgggatttgaagtagaagcgagtcaccacgaggttgcggttggacagcatgagattgactttaagtacgatgaagttctccgtgcttgtgataagattcaaatctttaarcttgttgttaaaaccattgctcgcaaacacggactttacgcaacatttatggcgaagccaaaatttggtattgctggmtcaggtatgcactgtaatatgtccttgtttgatgcagaaggaaataacgccttytttgatccaaatgatccaaaaggaatgcagttgtcagaaacagcttaccatttcctaggcggtttgatcaagcatgcttacaactatactgccatcatgaacccaacagttaactcatacaaacgtttggttccaggttatgaagcgcctgtttacattgcttgggctggtcgtaaccgttcgccacttgtgcgcgtacctgcttcacgtggtatgggaactcgtcttgagttgcgttcagtggatccaatggcgaacccttacgttgctatggctgttcttttggaagttggtttgtatggtattgaaaataaaatcgaagcaccagctcctatcgaagaaaatatctacatcatgacagcagaagagcgcaaggaagctggtattacagaccttccatcaactcttcacaacgctttgaaagctttgacagaagatgaagtggttaaagctgctctcggagatcacatctayactagcttccttgaagccaaacgaatcgaatgggcaagttatgcaaccttcgtttcacaatgggaaattgataattatttagacctttactaactaat

SEQ ID NO: 1982 - DNA, 84 bp, Streptococcus pneumoniae
  misc_feature (1)..(84): tiling:Spneumo1:WAN024EVE; Cluster includes WAN023SJW NC_0 03098.1_1438||||1145073..1145156|+|84 bp|Glimmer 2.02 orf prediction|S.pneumoniae|R6|NC_003098.1|ORF|100
atgccaatctcacgagctctttttatcattttccataatatcctgactcaaatgtctactgatatctctcatcagttycatttc

SEQ ID NO: 1983 - DNA, 746 bp, Streptococcus pneumoniae
  misc_feature (1)..(746): tiling:Spneumo1:WAN024D3Z; Cluster includes WAN0243IG spr1 692|xerD|15903734|NP_359284.1|1662245..1662985|-|741 bp|Re combinase, site specific|S.pneumoniae|R6|NC_003098.1|ORF|1 11
atgccaatgagagacagratttcagcctttttagaggaaaarcagggcttgtctgtcaattccaagcagtcctataagtatgatttggagcaatttttagacatggtaggtgagcggatttctgagaccagtctcaagatttaccaagcccagctagccaatctaaaaatcagcgcccagaagcgaaagatttcggcctgtaaccaatttctmtactttctctatcaaaaaggagaggtggacagcttttaccgcttggaattagcyaaacaagctgaaaagaagacggaaaagccagagattctatacctagactctttttggcaggaaagcgaccatccagagggccgcttgctagcgctcttaatcctagaaatggggctcttgcccagtgagattttagccatcaaggttgcggacatcaatctggattttcaggtgytgcgaatcagcaaggcttcccaacagaggattgtcaccattcccayggccttgctttcagaattggaacccttgatggggcrgacctatctttttgaaagaggagrgaaaccctattctcgtcagtgggcctttcgtcagttagaatcttttgtcaaggagaaaggttttccatccttatcagctcaagtcttacgtgaacagtttattctaagacaaatagaaaacaaggtcgatttgtacgaaattgcaaaaaaattaggattaaaaacagtcctgaccttagaaaaatatagataactaat

SEQ ID NO: 1984 - DNA, 264 bp, Streptococcus pneumoniae
  misc_feature (1)..(264): tiling:Spneumo1:WAN024CCK; Cluster includes WAN023RM3 cont ig_1575_10||||2902..3015|-|114 bp|Glimmer 2.02 orf predict ion|S.pneumoniae|670|WAN01UDHA|ORF|000
atgccaattgaagaagctgaaaaaatcgctcaaagtcaggtagcttgggcgattttgtttatcttgcttttttttattatcattcgatatcttatcaagacttcggacaagcgagagaagaagattatggatttgcacgagcaatcaaaggccgactctaatagacgagaagagcgtttgatgactcacctagaaaagaccactacagaattaaccacaatcactcacacggggtcggagacattcaaaaagaaatggttcgca

SEQ ID NO: 1985 - DNA, 1315 bp, Streptococcus pneumoniae
  misc_feature (1)..(1315): tiling:Spneumo1:WAN024FDH; Cluster includes WAN0243KK spr1 616|cshA|15903658|NP_359208.1|1589003..1590274|+|1272 bp|C hromosome segregation helicase|S.pneumoniae|R6|NC_003098.1 |ORF|331
atgccagacaatctcgcgcttcgcatgcgccctaaaaccatcgaccaggtcatcggtcaggagcatctggtcggacctggaaaaatcatccgccgcatggtggaagccaaccgcytgtcctccatgattctatayggccctcckggaatcggcaaaaccagtattgcctctgccatcgctggaacgaccaagtatgcctttcgaactttcaatgcracagttgatagtaaaaagcgactgcaagaaatctcggaagaagctaaattttctggtggtctcgtcctattrctagacgaaattcatcgactagataagaccaagcaagacttcctcttgcctctcttggaaagtggactggtcatcatgattggagcaacgactgaaaatcctttcttctctgtcactcctgccattcgtagccgwgttcaaattttcgagttggaacctctgtctaaccaagacgtcaaagaggccctgcagatagctctaagtaaccctgaacgtggttttgattttccaatagaactagatgaggatgcgctggatttcatcgcaacctctacaaacggagaccttcgctctgcctttaactcactggacttrgctgttctmtctacccctgagaatgacgagggcattcgccacatcaccttagacatcatggaaaatagtcttcagagaagctacatcactatggacaaggatggagacggtcactatgatgttctatctgccctgcaaaagtctatycgtggctcagatgtggatgccagtctccactatrctgcccgcttgattgaggctggggatctgcctagtctcgctcgtcgcttgactgttatcgcctatgaagatatcggcttagccaatcctgaggcccagattcataccgtgactgctctggatgctgcmcarargattggkttyccmgaagcccgcattctcatygccaatgtcgtgattgatttggcmctttctccaaaatccaactcagcctatgtagctatggataaggcacttgctgacctcaaaacatcagggcacttgcctattccgcgacacctrcgtgatgggcactacagtggaagcaaggaactggggaatgcccaagactatctctatccacacaactatcctggaaattgggtmaagcaagactatctgccagaaaaaattcgtaatcatcactatttccaagcagaagatactggtaaatatgaacgggctttggctcaaagaaaggaagctwtcgaccrtttgcgaaaaatcykaamtmmttttcaaaaaattgcactttcctcttgattttttttra

SEQ ID NO: 1986 - DNA, 318 bp, Streptococcus pneumoniae
  misc_feature (1)..(318): tiling:Spneumo1:WAN024CAT; Cluster includes WAN0242F9 SP11 41||15901007|NP_345611.1|1070346..1070657|+|312 bp|hypothe tical protein|S.pneumoniae|TIGR4|NC_003028.1|ORF|010
atgccagagtttattattgttgaaggaaacaatgacttaggggaatttttccaaatagatggcgagctatttagtgataatgaacttttagaaaaccttaaaaaatggcgtgagtgggaagtgccagttattattgatgattggtgcaatcgtatcctaaacgaggatgaaacggaaatactatactttcctactcatgaggataagatgaactatattagggtggaaaaagatttagaacctttgtatcatacatcgaacaagatctatgcaactatttctaaaagtgagtggttagaattgttaaatykaactaat

SEQ ID NO: 1987 - DNA, 470 bp, Streptococcus pneumoniae
  misc_feature (1)..(470): tiling:Spneumo1:WAN024FJ6; Cluster includes WAN023KZK 3151 75_2641||||1408468..1408713|+|246 bp|EGAD orf prediction|S .pneumoniae|R6|NC_003098.1|ORF|210
atgccagctcagatggtgttggcccaggatttcttcttttactgctactgtgaaactcattttttcacctgtataatgcgcatcaactcgtccacaatcaaatctccatcgtggaaggcaccgccattttccagacgaaggaagttagatgaaatcacgcgcgaaacttgcttacaaagacctacaaaatcgtgttccacttgcacyaagtattcatcaaaacggttggaattcatgtattcctgaggcactttttcaatattcaccaagacagtgtcgataaaagggcgaccaaggtgacgatgcaagacttccacgtggttgctatctgtaaagtgttccgtctccccacgttgggtcatgatattgcagacataggcaatttctgccttggtttccaaaagagcccgcccaatttccttaatcacgatattgggcaaaatagaggtaaagagggaacctggccctag

SEQ ID NO: 1988 - DNA, 342 bp, Streptococcus pneumoniae
  misc_feature (1)..(342): tiling:Spneumo1:WAN024FNC; Cluster includes WAN023P7J pne5 3_5||||1741..2082|+|342 bp|Type 25F capsule operon, Glimme r 2.02 orf prediction|S.pneumoniae||WAN01UCCQ|ORF|000
atgccagctgatagaggctatgatttgagctttgatggttgggtgggtgactatcaggatccatcaacttatctcaatcctttcaatgcagagaatggcttctatctcaaaatttttggaccggatgccaaggaagataaggaaaaaatcactagcctaggtcttgatacctacactaagatgctcaaagatgcagatagtgaaaacaaagatgtagccaaacgctatgaaaaatatgctgaagcacaggcttggatgattgacaattctctcattatgtcagctatgtcaagtggtggcacagcatctgtaaccaaagtgatgccatttacaagagggcat

SEQ ID NO: 1989 - DNA, 702 bp, Streptococcus pneumoniae
  misc_feature (1)..(702): tiling:Spneumo1:WAN024AWU; Cluster includes WAN02431Y SP02 55||15900190|NP_344794.1|227447..228142|+|696 bp|acetyltra nsferase, GNAT family|S.pneumoniae|TIGR4|NC_003028.1|ORF|0 10
atgccagtaaatgaatatggtcaaatgattggggagtcaatggaagcttatactccaggtgaattgccttcttttgatttcttagaagggcgttatgctaggatagaggctctttcagtggaaaagcatgcggaggatttattagctgtttatggccctgatacgcctcgggagatgtggacctacctctttcaggagtcagtagcagacatggaggaactggtcagccttttaaatcagatgttggctcgtaaggaccgtttttattatgcaatcatagacaaggcaactggtaaggctttgggaactttttccctcatgcgaattgatcagaataaccgagtaatagaagtgggagctgtcactttttctccagagctcagggggacacggataggaacagaagcccagtatctcttggcttgctatgtctttgaggagcttaactatcgtcgctatgagtggaaatgcgatgctcttaacctgccatccagacgagcagcggaacgtttgggatttatttatgaaggaaccttccgtcaggcagtggtttataaggggcgtacaagagatacggattggttgtctatgattgataaggactggcctcaagtcaaagctcgattggaaatatggttgcgtcctgaaaactttgataaaaatggacgacagcacaagagcttgagagaacttctaactaat

SEQ ID NO: 1990 - DNA, 696 bp, Streptococcus pneumoniae
  misc_feature (1)..(696): tiling:Spneumo1:WAN024AWV; Cluster includes WAN0244MU spr0 236||15902280|NP_357830.1|229964..230659|+|696 bp|Conserve d hypothetical protein|S.pneumoniae|R6|NC_003098.1|ORF|101
atgccagtaaatgaatatggtcaratgattggkgagtcaatggaaggttatacaccmggtgmactgccttctattgatttcttagaagggcgttatgctaggatagaggctytytcrgtrgaaaarcatgcggaggatttgctagctgtttatggscckgatackcctcrggagatgtggacctayctttttcaggagccagtagcagatatgggggagctggttagccttttamatcagatgttggctcgtaaggaccgtttttactatgcaatcatagacaaggcgactggtaaggctttgggawctttttctctcatgcgcattgaccagaataaccgagtaatagaagtcggagcagtcactttttctccagagctaaggggtacacggataggaactgargctcagtatctcctagctcgctatrtttttgaggagctaaactatcgtcgctacgagtggaaatgcgatgccttaaatctgccatccagacgagytgcggagcgtttgrgmtttrtytatgaaggaaccttccgycaggcrgtggtttataagggrcgtacgagagatacggattggttgtctatgattgatawggactggcctcaagtcaaagatcgtttggaaacatggytgcgtcctgaaaattttgataaaaatggacagcagtacaagagcttgagagaactttaa

SEQ ID NO: 1991 - DNA, 1630 bp, Streptococcus pneumoniae
  misc_feature (1)..(1630): tiling:Spneumo1:WAN024G2J-5; Cluster includes WAN0243YU sp r1101|spnII-interrupted-C|15903144|NP_358694.1|1099497..11 02751|-|3255 bp|Uncharacterized restriction enzyme, interr upted-C|S.pneumoniae|R6|NC_003098.1|ORF|220
atgccagtagaaattaaaaccactaaagaaattcatcctaaaatctatgcctacaccacaccgacagtaaccagtaatgaaggctggattaagattgggtatacagaacgtgatgtcacacaacgtatcaaggagcaaacgcatacagctcatatagctacagatgtcttatggactggtgatgcagcttatacagaagagcctgataaggggaaaactttcaaggaccatgatttccaccatttcctttctttccatgatgtagaacgtcgtcccaagacggaatggttctattttaatggaactcctgaaaaatcaaaaaatctttttgataagtttgttcagcatgatttgtctggttatcagcctggaaaaggacaggactatactctgcgacaagagcaagaagaagcagttgctaagacattagcttatttccaagaacaygctggaggcaagtttctctggaatgccaagccacgctttggtaaaaccttgtctacctatgacctagctcgacggatggaagctgtcaatgtcctaattgtaacaaaccgccctgccattgctaactcatggtatgatgattttgaaacattcatagcaggtcaaacgacttacaagtttgtttctgaatcagatagccttaagagtcgtccaatcttgtcacgacaagaatttcttggtattttagctgacgatgtaagacaacttgcttttatcagtctccaagacttgaaaggatctgtttatttaggtggagagcacgataaactcaaatgggtaactgatctgcattgggacttgttggttattgacgaggctcatgaaggagttgataccttcaagactgaccaagcctttaataagattcgacgaaattttactctgcatttgtcaggtacatcatttaaagcattggctaaaggagattttacagaggaacaaatctacaactggtcttatgctgatgagcaggctgctaagtattcgtggtctcttgagcaagaagaggaaaatccttatgaaagcttgcctcagttgaatctctttacctatcaaatgtctcagatgattggcgaaaagttagaaaaaggcgctcagatcgatggtgaaaatattgactatgtttttgacttaagtgaatttttcgctacagatgataaagggaaatttattcatgagcatgatgtcagaaattggttagatactctatcaagcaatgaaaaatatccattttcaaccaaagaactccgtaatgaactcaagcatactttttggcttttagaacgtgtcgcttcggccaaagcattaaaagccctactagaagaacacccaatctatgaaaactatgagatcgttctagctgctggtgacggacgtatgtccgaagaagacgataaagtcaaactcaaatccttggacttggttagaaaagcgatagcagagaatgacaaaaccattaccctatccgttggtcagctgacgacaggtgtcactatccctgaatggacaggtgtattgatgttatcaaatttgaaatcaccagctctttatatgcaggccgccttccgtgctcaaaatccttactcatggagcgataacaaaggaaatcaytttcgcaaagaaa

SEQ ID NO: 1992 - DNA, 255 bp, Streptococcus pneumoniae
  misc_feature (1)..(255): tiling:Spneumo1:WAN024FEW; Cluster includes WAN023KT6 3151 97_2914||||1553353..1553607|+|255 bp|EGAD orf prediction|S .pneumoniae|R6|NC_003098.1|ORF|110
atgcccagcaagccatgcacaaagacggccgcagccttactctggtcaattcctgactcggtmgccacaatgaccatgtcaacttcttgtctttcttgctcagttaaaatagagtcactagcactggccgccaaggtcacgatrtcctcagttaggggcgcaatactcaattccttgagtaagagtcctttacttaatttttcagggtcaattcccctcgcttctgctaagtcttgtaatttcaagacatattga

SEQ ID NO: 1993 - DNA, 315 bp, Streptococcus pneumoniae
  misc_feature (1)..(315): tiling:Spneumo1:WAN024B5N; Cluster includes WAN023LQC 3140 45_1372a||||727475..727789|-|315 bp|EGAD orf prediction|S. pneumoniae|R6|NC_003098.1|ORF|110
atgcccatcttctcacgcatggcaaacaggtcattcttcttgtccgtaatatcgactccctcaaagataaccttccccttggttgcttcytccaacaaattcatagagcgaagcaaggtagatttcccrctccctgaaggaccgatgataacgacaacttctcctcttttaatctcgaggttgatgcccttcaatacttcattctttccaaargatttatgtaaattttcaatttttatcaaggtttctgtcattatttcttatctccttgtcccatatgtttttcaaaagctttcaaggctactgtcagaatag

SEQ ID NO: 1994 - DNA, 321 bp, Streptococcus pneumoniae
  misc_feature (1)..(321): tiling:Spneumo1:WAN024D5N; Cluster includes WAN023LT3 3143 26_1214||||643285..643605|-|321 bp|EGAD orf prediction|S.p neumoniae|R6|NC_003098.1|ORF|110
atgccccaaattgatgaagagagcctgactttgcttagtaaaatcaagaacttcacgggaatcatctgccatgacaggtttgcatcccagagccaaaatcccatttgccagcatctcacaagaaatctcattggtaatgcagtgaatgagggaactagagcctataggaaagggatttgtaaattcctgcatcagtctatcctttcactaaagaaatatccctgcacttttttaaagaattcctgcttgattaaaaatcgaaaggcaataaaggaaatcgctgtaccaatcaaggttgctccgaaaaatcgaggcgtgtag

SEQ ID NO: 1995 - DNA, 507 bp, Streptococcus pneumoniae
  misc_feature (1)..(507): tiling:Spneumo1:WAN024G2X; Cluster includes WAN023LEB 3137 95_2016||||1084608..1085114|+|507 bp|EGAD orf prediction|S .pneumoniae|R6|NC_003098.1|ORF|110
atgccccacactagagataactggcaaacgagattcaaaaatagctcgtaccacaatttcttcgttaaaggcccagagatcctcaatagaaccacctccacgaccaataatgagcaaatccaaatcgtcccgttgattagcacgcgcaatatttctagcaatttcctccgcagccccttcaccttgaaccttggtcggataaagaaggatgtcaacacctgggaatcgcctgctgacggtcgtgataatatctcgaataacggctccactacggctggttactacmccaattctcttagaaaattggggcagagcttgcttgaagcgttcttgaaacaggccttcttctgtcaattttttcttaagttgttcaaactgaatcgcaagcgccccaaccccatcaggctcarctttttcaatgatgatggagtagctaccacttggttcatagacctgtacacgcccaatcacattgatcttcattccttcttccaggtcaaaccctaa

SEQ ID NO: 1996 - DNA, 234 bp, Streptococcus pneumoniae
  misc_feature (1)..(234): tiling:Spneumo1:WAN024FNV; Cluster includes WAN023L3Y 3149 02_2454||||1308989..1309222|+|234 bp|EGAD orf prediction|S .pneumoniae|R6|NC_003098.1|ORF|110
atgcccgattctgaccttagccattactggaatactaaccgcttcttggatttccttaatcatctttgggtcgctcatgcgggaaactcctccagctgcacgaatatcagccggaattcgttccaaggccatcacagctgccgcaccagcagcttctgcgatacgagcctgttcaggattctgcacatccataataacaccacccttgagcatctgtgccaagtttttatttag

SEQ ID NO: 1997 - DNA, 293 bp, Streptococcus pneumoniae
  misc_feature (1)..(293): tiling:Spneumo1:WAN024DEX; Cluster includes WAN02449P spr0 709||15902753|NP_358303.1|709324..709611|-|288 bp|Hypothet ical protein|S.pneumoniae|R6|NC_003098.1|ORF|111
atgcccgtaagaaaattacaatcctatgaggtagactatcaagaagaattaaaccagcagcttcctcattaccaagcttatacacctgaagcgcaatctgatgccaatctcaaggaaatcctattttttattaatatcgctgttttttgtatctgtattgctatctttagttttatctttttagcattaaaattatcaactgctcttgcctttgccgcagcaatcggattcagcttacttgttttaaaagttcaacggtctattatcaaacgaaaacgtagaagataactaat

SEQ ID NO: 1998 - DNA, 992 bp, Streptococcus pneumoniae
  misc_feature (1)..(992): tiling:Spneumo1:WAN024CYW; Cluster includes WAN0243C3 spr1 922|malR|15903963|NP_359513.1|1904668..1905654|+|987 bp|Ma ltose operon transcriptional repressor|S.pneumoniae|R6|NC_ 003098.1|ORF|111
atgcccgttacgattaaagacgtggccaaggctgctggtgtttcgccttcaaccgtaacccgtgttattcaaaataaatcaaccattagcgacgaaacaaaaaaacgygttcgcaargctatgaaggaactcaactaccacccaaacctcaacgctcgtagcttggtaagcagctatactcaggttatcggattrgttcttcctgatgactcagacgccttctaccagaatcctttctttccatcggttctacgtggcatctctcaagtcgcatctgaaaaccactatgccattcagatagcaacagggaaagatgagaaggagcgtctcaacgctatttcacaaatggtctacggcaagcgtgtagatgggctaatytttctctatgcccaagaagaagaccctctcgtaaaactcgtcgcagaagaacagttccccttccttatcytaggtaaatctctatctcctttcatcccacttgtcgacaacgacaatgttcaagctggttttgatgcgactgaatatttcatcaaaaaaggctgcaaacgcattgcctttatcggaggaagtaaaaagctcttcgtgaccaaagaccgtttaacaggctatgaacaggcgcttaaacattacaaacttaccrctgacaacaatcgcatctactttgccgacgagtttctggaagaaaagggctataaatttagcaagcgattattcaagcacgatccacaaattgaygctatcatcacaaccgatagcctcctagctgaaggtgtttgtaactatattgccaaacaccagctggatgtccctgttctcagctttgactcggttaatcccaagctcaacttggcagcctatgtcgatatcaatagtttagagcttggtcgtgtttcccttgaaactattctccagattattaatgataataaaaacaataaacaaatttgttaccgtcaattgatcgcccacaaaattatcgaaaaataactaat

SEQ ID NO: 1999 - DNA, 102 bp, Streptococcus pneumoniae
  misc_feature (1)..(102): tiling:Spneumo1:WAN024CNL; Cluster includes WAN0246SC 5613 45-70-8||||||102 bp|DNA Streptococcus pneumoniae phage Dp- 1 open reading frame 266|S.pneumoniae||WAN0246SC|ORF|000
atgcccgttcttccaagcagttgcaagcattttatcaatagtccacgacttaccttgtccaggtcgagccattatgacaatcaaatcctcaccaggaagtaa

SEQ ID NO: 2000 - DNA, 476 bp, Streptococcus pneumoniae
  misc_feature (1)..(476): tiling:Spneumo1:WAN024CSJ; Cluster includes WAN02447W spr0 774|nifU|15902818|NP_358368.1|768403..768843|+|441 bp|NifU protein|S.pneumoniae|R6|NC_003098.1|ORF|111
atgccctacaaaagacaaaggagtttttcaatggcactttctaaactagatagcctttatatggcagtggtagcagaccattcgaaaaatccacatcaccaagggaagttagaagaygctgrgcaaatcagtctcaacaatccgacttgtggrgatgtcatcaayctctctgtcaagtttgatgcagaggaccgtttggaagatattgcttttctaaattcaggatgcacgatttcaactgcttctgctagtatgatgacagatgycgttttaggaaaaaccaaacaagaaattttagaactggcgactattttttctgaaatggttcaagggcaaaaagatgagcgtcaagrccaacttggagacgcggcattcttgtcaggtgttgccaaattccctcaaagaatcaagtgtgcaaccctarcttggaatgcccttaagaaaacaattgaaaatcaagaaaaacagtaactaat

SEQ ID NO: 2001 - DNA, 237 bp, Streptococcus pneumoniae
  misc_feature (1)..(237): tiling:Spneumo1:WAN024BDY; Cluster includes WAN023KQ8 3133 34_3060||||1632251..1632487|+|237 bp|EGAD orf prediction|S .pneumoniae|R6|NC_003098.1|ORF|110
atgcccttgtttactgaggttatcaagcaaccactcttcgctacgaccaatcgattccaagacatctacttgaatcacaccgtcagtcacaactggatacttaggattttcatctcccatttgcacaacgatragttgcccattttgctcttgcacagctcgtttgacttgcttcatctggaaaatcccttggctacgaagtttgagggmtacatccgatgcagacaaaccaactga

SEQ ID NO: 2002 - DNA, 255 bp, Streptococcus pneumoniae
  misc_feature (1)..(255): tiling:Spneumo1:WAN024EWO; Cluster includes WAN023KR5 3151 99_3019||||1607584..1607838|+|255 bp|EGAD orf prediction|S .pneumoniae|R6|NC_003098.1|ORF|110
atgccctttaaagaaaacctcatctgtcaacaccgaaatcatcactgctccgttttcttcataagtctgggcctgttgcacaatatccacatcgagattgatatctcccaaactagggctagctttcttgacctcagcgattacctgcaagcrgtcctgatgattcttcaaaaattctgccaagcgataggtctggcgcagaggctggatttgctccagcttcatctgctccacctcacgcgccttctgctctaa

SEQ ID NO: 2003 - DNA, 689 bp, Streptococcus pneumoniae
  misc_feature (1)..(689): tiling:Spneumo1:WAN024BI7; Cluster includes WAN0242ZI SP03 49||15900278|NP_344882.1|322965..323648|+|684 bp|capsular polysaccharide biosynthesis protein Cps4D|S.pneumoniae|TIG R4|NC_003028.1|ORF|010
  misc_feature (361)..(361): n is a, c, g, or t
  misc_feature (615)..(615): n is a, c, g, or t
  misc_feature (648)..(648): n is a, c, g, or t
  misc_feature (659)..(659): n is a, c, g, or t
atgccgacattagaaatagcacaaaaaaaactggagttcrttaagaaggcagaagaayattacaatrcyttrtgtacaaatatacagttgagcggagataaactaaaagtaatttccgttacttctgttarycckgrggaaggaaaaacaactacttcyrtaartatagcawkrtcrtttgcgygtrcaggytataaaactcttttghtygatggygataytcgamawtcrgtyatrtyaggaktttttaaatckcgtgaaaaaattacagrgctaacrgaatttttatctggsacagctgatttatctyrcggyttatgtgatacaaayaytgaaaatttatttgtarttcaatcgggvnctgtatcaccaaaccctacrgccttgtyacarrgtaaaaattttaatgatatgattgaaacrttgcgtaaatattttgmytatatmattrttgatacascrcctrttggaattgttattgatgcggyaattatcactcaaaagtgtgatgcgtycatcttgrtaacagcaaymggtgakrygaataaacgtgatryccaaaaagykmaacaacaattaraacaarcarrrraactgttyytrggdgtyrttytnaataaattdgatrtctcrswtrawaartatggndbwtacgstknstahrkwrrttayrgdaarrrataaytaat

SEQ ID NO: 2004 - DNA, 240 bp, Streptococcus pneumoniae
  misc_feature (1)..(240): tiling:Spneumo1:WAN024BDZ; Cluster includes WAN023MFG 3148 32_64||||34659..34898|+|240 bp|EGAD orf prediction|S.pneum oniae|R6|NC_003098.1|ORF|110
atgccgataagggtctgcataccaagagtggtgaggatgatggcaatccagcagatggctccaagaagaatggattttccactggatttgaccatagcgaccagattggttttgagaccgatagcactcatggccatgacaataaggaatttagagagttstttgagaggrgtaaagaaactactggacacacctagagaggtgagtagtgtagtgaggagagaggcaaggataaagtaa

SEQ ID NO: 2005 - DNA, 255 bp, Streptococcus pneumoniae
  misc_feature (1)..(255): tiling:Spneumo1:WAN024CQ4; Cluster includes WAN023IO8 8594 0_2769b||||1573510..1573764|+|255 bp|EGAD orf prediction|S .pneumoniae|TIGR4|WAN01UC25|ORF|040
atgccgattcagatgcactggttgaggccgacgcacttgtcgacgctgaggctgaagcactggtacttgctgaggctgacgcactggtacttgctgaagctgaggcgcttgtcgatgctgaggctgacgcactggttgatgcagattcagaagctgatgtgcttgctgaggctgacgtactcgttgatgctgactcagacgcactcgttgacgctgaagccgaagcacttgttgacgctgatgctgaggcgctag

SEQ ID NO: 2006 - DNA, 950 bp, Streptococcus pneumoniae
  misc_feature (1)..(950): tiling:Spneumo1:WAN024D75; Cluster includes WAN0243PL spr1 434|metA|15903477|NP_359027.1|1417596..1418540|-|945 bp|Ho moserine O-succinyltransferase|S.pneumoniae|R6|NC_003098.1 |ORF|111
atgccgattcgaattgataaaaaattgccagctgttgagattttacggacagagaatatctttgtcatggatgatcaacgtgctgcccaccaagatatccgtcctttgaagattttaattttaaatctcatgccacagaaaatggtcacagagacccagttgttgcgccacttggctaatacacccctacaactggatattgattttctctatatggagagccaccgttctaaaacaactcgttcagagcacatggagaccttctataaaacttttcytgaagtcaaggatgagtattttgatgggatgatcatcacgggtgctccagttgagcatttaccatttgaggaagtggactattgggaggaatttagacagatgcttgagtggtctaagactcatgtctattcgacccttcatatctgttggggrgctcaggctgggctttatctgcgctatggtgtagaaaaataccagatggacagtaagctatcaggtatttatcctcaggacaccctaaaagagggtcaccttctatttagaggctttgatgatagctatgtatcycctcattcacggcacacggagatttctaaggaagaggtcttaaacaagacyaatctcgagattttatcagaaggacctcaggttggggtttctattwtggccagtcgtgatttacgagaaatttatagttttggtcatttggagtatgaccgtgatacyttggcaaaagagtattttcgagatcgtgatgcaggttyyracccacatattccagaaaattactttaaagatgatgatgttaatcaggtaccttgtctttgttggtcttcatctgcagccctctttttcagtaattgggtaraccatgcggtctatcaggagacgccttttgahtggagaaagatagargatgatgcatctgcatatrggtatttataactaat

SEQ ID NO: 2007 - DNA, 1164 bp, Streptococcus pneumoniae
  misc_feature (1)..(1164): tiling:Spneumo1:WAN024FUW; Cluster includes WAN0240H3 |cap 8K||CAB43614.1|||1164 bp|polysaccharide polymerase|S.pneum oniae||AJ239004|ORF|000
atgccgtatctaaataatgtaccgcaaaataaattttctataagattatttgatattgctatagttttattgactttaaagatgttagtttcttcgattccagtttttgactttgtgtttcctcaaaaatttcaaaatatccttgttattttaggttatatattgatttttttacatatttttgagaaaagaaagtacacattacaatttataattagtataattctaattactacattactgctttatactagtatacaaatgcaaaattatgtttactttacgagttggtttatgttgattggtacgattcattatgatttaagaagagtaataaaaattatatttattgtatcattaagtattatgttcatatcaatttttatatcacttcttatgtatataattgattataaacgagaaattcttattaatatccgaagaaacgaaactgtcagagcatttacatttggttttatacatcccaataaatttactattgtactatctaacttatgtcttatgtttatttggttaatcaaagatcgtttgaaatattatcatgtaactttttgtctttttattcagttattcttttattttttcacgcagactagaacagctctactagtatctatagtaatttttgctcttttatatatttatatgtttgttgaaaatcttgaacttagatggataggatactcattcttttgtatttctacttttttaggagttttggcatttcaattttatccttctaataataagttttcaatttttattgataatatcctgactggacgtattaaattagctgcatacgcaagaaccttttttggttatacattctggggtcaatatgttgataaagaaattgtttgggatcctatttggggattaactagtttcacttttgattcgttttattccttcttgatgagtaatgctggcatcatatggctacttatcttatcagtcttatttgtaaaactacaaaaatatttagacaataaaagtttgattttattattagcttggtctatgtatgcggtaacagaaactgatttaatatttccaagttatggattccagttcttatttttaagtatactttttactaatactagtacatgttctacaataatgttaaagaataattaa

SEQ ID NO: 2008 - DNA, 1591 bp, Streptococcus pneumoniae
  misc_feature (1)..(1591): tiling:Spneumo1:WAN024FYQ-5; Cluster includes WAN0243XE sp r1153|carB|15903196|NP_358746.1|1154749..1157925|-|3177 bp |Carbamoylphosphate synthase (ammonia), heavy subunit|S.pn eumoniae|R6|NC_003098.1|ORF|221
atgcctaaacgtactgatattcaaaaaattatggtgattggttctggtccgattattattggtcaggctgctgagtttgaytacgctgggacycaggcttgcttktcgttgaaagaggaaggttatgaggttgttttggttaactcaaatcctgcaaccatcatgacggacaaggaaattgctgayaaggtttacattgaaccgattacacttgagtttgtgacacgtattcttcgtaaggaasgtccagatgccttgctaccaacactcggtggtcagacaggtctcaacatggccatggaattrtctaaaaatggyatcytagaygagcttggygtwgarcttctsggtacyarattrtctgccattgaccaagcggaggaccgtgayctctttaaacaattgatggaagagcttgarcaacccattccagaatctgaaattgttaacacagtagaagaagcarttgcctttgcagcgacaattggctacccagtcatcgttcgtccagcctttacccttggtggtactggtggtggtatgtgtgccaacgagaaagaattgcgtgaaatcactgaaaatggtttgaaattgtcacctgttacccaatgtttgattgarcgttcgattgccggtttcaaggaaattgaatacgaagtgatgcgtgactcagctgacaatgccttggttgtttgtaacatggaaaactttgacccagttgggattcacacaggggattccattgtatttgcccctgcgcaaaccatgtcagactatgaaaaccaaatgcttcgtgatgcgagcttgagcattattcgtgccctcaagattgaaggtggatgtaatgttcagctagctcttgatcctaacagyttcaagtattatgttatcgaagtaaaccctcgtgtatcacgttcgtcagcccttgcttctaaagcgacaggatatccgattgctaagttggctgccaagattgcagtaggtttgaccttggatgaggttataaacccagttacaggttcaacctatgccatgtttgaaccagcccttgactacgtagttgctaagattccacgtttcccatttgacaagtttgaaaagggtgaacgccgtctcggtacacaaatgaaggcgactggagaagtcatggcaatcggtcgtaacatcgaggaatctcttctcaaggcctgccgmtcccttgaaattggggtgcaccacaatgaaatacctgaacttgcagcagtttctgatgatrccttgattgaaaaggttgtcaaagcccaagatgaccgtctcttctaygtrtcagaagcmattcgycgtggytacacacctgaagaaattgcagagcttacaaaaattgatatcttctatcttgataaactcttgcatatctttgaaattgagcaagaattgggtgctcatccacaagatytagaagttttgaaaayagccaaacttaatggtttytcagaccgtaagattgctgaactctggggaacgactgatgatmaagttcgccaacttcgyttggaaaacaagattgtyccagtytataagatggtagayacttgtgcggcagagttcgayt

SEQ ID NO: 2009 - DNA, 1157 bp, Streptococcus pneumoniae
  misc_feature (1)..(1157): tiling:Spneumo1:WAN024DZX; Cluster includes WAN0243DM spr1 867|nagA|15903908|NP_359458.1|1837312..1838463|-|1152 bp|N -acetylglucosamine-6-phosphate deacetylase|S.pneumoniae|R6 |NC_003098.1|ORF|111
atgcctaactatattaaagcggatcagtttttctacccacacggagttcgtcgaggtggttacttggaacttgtggacggcaagtttgggaaacatgtagagcagattcctgaaggggctgaggtgattgactatacaggttatagcattgccccaggtcttgtggatactcatattcatggatatgcaggtgtakatgtgatggacaacaacattgaaggtacattgcatactatgagtgaaggacttcttagtaccggtgttaccagtttcttacccacaactttaacagccacttatgagcaattgcttgcagtcactgaaaatcttggaaaccattataaagaagcaacaggtgctaagattcgtgggatttattatgaaggtccatatttcacagaaacttttaagggggcacaaaatccaacttatatgagagacccgggtgttgaggagtttcattcttggcaaaaagcggcaaatggcttgcttaataaaattgcccttgcaccagaacgtgatggggtggaagactttgttcgtacagttacgggcgaaggtgtgacggttgctcttggacattcaaacgcgacttttgatgaagccaaaaaagcartcgatgctggagcgagtgtttgggtgcatgcctacaatggaatgcgtgggttgactcaccgtgaattgggkatggttggagccatgtaccaattgccacatacctatgcagagttgatctgtgatggtcaccacgtagatccaaaggcttgcgaaattcttatcaaacaaaaaggaacagaaaacatcgctcttatcacagactgtatgacagctgggggattggaagacggagattatatgttgggagaattcccagttgtcgttgcaaatggaactgcacgcctcaaatcgacaggtaacttggcaggttctatcctcaaactcaaagatggtttgaagaatgtggtcgaatggggaattgcgaatccgcatgaagcagtcatgatggccagcttcaacccagctaaatccgttcacatcgatgacgtctgtggccaaatccgtgaaggctacgacgctgacttcatcgtattagataaagatttggaattggtagcaacctayctagatggcgtaaaacgttatcaagcataactaat

SEQ ID NO: 2010 - DNA, 968 bp, Streptococcus pneumoniae
  misc_feature (1)..(968): tiling:Spneumo1:WAN024ES8; Cluster includes WAN0243F4 spr1 812|ansB|15903854|NP_359404.1|1782113..1783075|+|963 bp|L- asparaginase (L-asparagine amidohydrolase)|S.pneumoniae|R6 |NC_003098.1|ORF|111
atgcctaagaaaatccttgttttacatacgggtggaactatttccatgcaggccgatgcttctggcgctgttgtgacgagttcagataatcccatgaaccatgtgtccaacccacttgaaggaatccaagtccacgccttggacttttttaaccttccaagtccccatatcaaacccaaacatatgctggtcctctaccagaaaattaaagaggaagcagataactacgatggagtggtgatcacacacggaaccgatactttagaggaaacagcctatttccttgataccatggaagttccccatatgcctatcgttctaacaggagccatgcgtagctccaatgarctcggtagtgatggtgtttataattacctaagtgctttacgagtggccagygatgacagggctgctgacaaaggagttttggtcgttatgaacgatgaaatccacgctgccaagtatgtcaccaaaacacatacgactaatgtcarcaccttccagactccaacacatggccccctyggtctcatcatgaaacaggaaatcctctacttcaaaacagctgamcctcgtgttcgctttgaccttgatcacatacaaggtttagtccctatcatctcggcttatgctggtatgacagatgagctgattgatatgctggatttagaacacttggacggtttgattatccaagccttcggagctggtaatattcccaaagaaacggctcaaaaattagaaagccttctgcaaaaaggaatyccagtcgctctggtatcacgatgctttaacggtattgccgagcctgtttatgcmtaccagggtgggggcgtacagttgcaaaaagcaggcgttttctttgttaaagaactcaaygcccaaaaagcycgcttgaaactcctcatcgccctcaatgccggactaacaggacaggctttgaaagactatatggaaggctaactaat

SEQ ID NO: 2011 - DNA, 782 bp, Streptococcus pneumoniae
  misc_feature (1)..(782): tiling:Spneumo1:WAN024AZN; Cluster includes WAN0243K5 spr1 631|trpA|15903673|NP_359223.1|1604542..1605318|-|777 bp|Tr yptophan synthase alpha chain|S.pneumoniae|R6|NC_003098.1| ORF|111
atgcctaagacactaacaraaaaattraatgctatwaaagyarctggaaaaggaattttygttccctatatcatggctggwgaccacgaraaaggtttggayggwctwgswgaaacaatycactttytagaagatttgggtgtctctgcaattgaagtgggtattcccttttcagaccctgttgcagatggacctgttatcgaagaagctggcttgcgcagtttagcccacgggacctctacccaggctttagttgaaaccttgaaaaccattraaacagagattccactggtcatcatgacctacttcaayyccctctttcagtacggtgtggagaactttgtcaaagatctggctgatacagctgtgaargsyttgattatcccagayytgcctcatgaacatgccaactttgtagaaccatttttggcaratacagatatcrccttgattcctttagtaagcttgaccacaggaattgagcgccagaaagagttgattgmaggsgcggagggattcrtctatgccgttgccatcaatggrgtracagggaaatcaggcaattaccgtgcagatttggacaagcacttggcgcaacttcatcaagtggccgacatcccagtcttgacaggttttggtgtatctagtcaagyygatctggaacgcttcaatgcggtgtcagatggtgttatcgtcggttcgaaaatagtaaaagctctccaccaaggagagccgattcaggaytttatcaracaagcagtagcttaccaaaaataactaat

SEQ ID NO: 2012 - DNA, 419 bp, Streptococcus pneumoniae
  misc_feature (1)..(419): tiling:Spneumo1:WAN024C7A; Cluster includes WAN0244MI spr0 248|rpsL|15902292|NP_357842.1|247561..247974|+|414 bp|30S Ribosomal protein S12|S.pneumoniae|R6|NC_003098.1|ORF|110
atgcctacaattaaccaattggttcgcaaaccgcgtaaatcaaaagtagaaaaatctaaatcaccagctttgaacgttggttacaatagtcataaaaaagttcaaacaaacgtttcttcaccrcaaaaacgtggtgttgcaactcgtgttggaacaatgacacctaraaaacctaactcagcccttcgtaaattcgctcgtgtacgtttgagcaaccttatcgaagttactgcctacatcccaggtatcggacacaacttgcaagagcacagcgtggtgcttcttcgyggtggacrtgtaaaagaccttccaggggtacgttaccatatcgtccgtggtgcacttgatactgcaggtgttaacgatcgtaaacaaggccgttctaaatacggtactaaacgtccaaaagcataactaat

SEQ ID NO: 2013 - DNA, 583 bp, Streptococcus pneumoniae
  misc_feature (1)..(583): tiling:Spneumo1:WAN024B5M; Cluster includes WAN023PMD pne2 7_18||||18836..19126|-|291 bp|Type 14 capsule operon, Glim mer 2.02 orf prediction|S.pneumoniae||WAN01UCIR|ORF|041
atgcctactagaattctccttagaaagcgtcgctttaagtgctatcactgttcaaaaatgatggtcgctgaaacttctatcgtcaagaaaaatcaccaaattcctcgtattatcaaccaaaaaattgcgcaaaagttaattgaaaagaattctatgaccgatattgcccatcagctggccatctcaacttcaactgttattcgtaagctcaatgattttcactttaaacatgatttttcttgtcttcctgagattatgtcttgggatgagtatgcttttacaaakgragatgagcttyattgcgcaagattttrahaakytyratatyatcactgttcttgarggyagaacacaagctrycatycgarakcaytttcttmrmtaygatagaryygtccgatgtcgcgtcaaaatyattactatggmtatgtttagyccttactatgacttrgctaracarcytcgctttcaaatttctaggctcaggctgaaacagtctcccagrctgtttcactcccgaatgctraaatcgttcttgawcgctttcayattgtacaacatcttagycgtgctaykaactaat

SEQ ID NO: 2014 - DNA, 102 bp, Streptococcus pneumoniae
  misc_feature (1)..(102): tiling:Spneumo1:WAN024CNV; Cluster includes WAN0246SG 5613 45-66-2||||||102 bp|DNA Streptococcus pneumoniae phage Dp- 1 open reading frame 262|S.pneumoniae||WAN0246SG|ORF|000
atgcctattcaactccaggcggaaagatgtggaagcatgcttgtgcagttcgacttaaatttagaaaaggtgactaccttgacgaaaacggtgcatcattga

SEQ ID NO: 2015 - DNA, 470 bp, Streptococcus pneumoniae
  misc_feature (1)..(470): tiling:Spneumo1:WAN024G4E; Cluster includes WAN024404 spr1 054|mutX|15903098|NP_358648.1|1050341..1050805|-|465 bp|8- oxodGTP nucleoside triphosphatase|S.pneumoniae|R6|NC_00309 8.1|ORF|111
atgcctcagttagcgacgatttgytacattgataatgggaaagaactgctcatgctccatcgtaataagaaacccaatgatrtccatraagggaaatggattggtgtgggtggtaagctagagagaggagagacgccccaggaatgcgcgryrcgtgaaatccttgaagaaacagggctcaaagccaagccagttctaaaaggtgtcatcacttttcctgaatttacaccagatttagactggtacacctatgtttttaaggtgacggagtttgagggcgacttgattgactgcaatgaggggaygctagaatgggttccctatgaygaggttttgagcaagccgacytgggaaggtgaccacacctttgttgagtggcttttagaggataaacccttcttttcagccaagtttgtttatgatggggataaattgttggatacccaagttgatttctatgaataactaat

SEQ ID NO: 2016 - DNA, 831 bp, Streptococcus pneumoniae
  misc_feature (1)..(831): tiling:Spneumo1:WAN024EZH; Cluster includes WAN024456 spr0 872|mutM|15902916|NP_358466.1|864795..865619|+|825 bp|Form amidopyrimidine-DNA glycosylase|S.pneumoniae|R6|NC_003098. 1|ORF|111
atgcctgaattacctgaggttgaaaccgtttgtcgtggcttagaaaaattgattataggaaagaagatttcgagtatagaaattcgctaccccaagatgattaagacggatttggaagagtttcaaagggaattgcctagtcagattatcgagtcaatgggacgtcgtggaaaatatttgcttttytryctgacagacaaggtcttgatttcccatttgcggatggagggcaagtatttttaytatccagaccaagkrcctgaacgcaagcatgcccatgttttcttycrktttgaagatggkggcacgcttgtttatgaggatgtwcgcaagtttggaaccatggaactcttggtgcctgaccttttagacgyctactttatttctaaaaaattaggtcctgaaccaagcgaacaagactttgatttacaggtctttcaakctgcccttgccaagtccaaaaagcctatcaaatcccatctcctagaccagaccttggtagctggacttggcaatatytatgtggatgaggttctctggcgagctcaggttcatccagctagaycttcccagactttgacagcagaagaagcgacwgcyattcatgaccaraccattgctgttttgggccaggctgttgaaaaaggyggytccaccattcggacttataccaatgcctttggggaagatggaagcatgcaggactttcatcaggtctatgataagactggtcaagartgtgtacgctgtggtaccatcattgagaaaattcaactaggcggacgwggmacccacttttgtccaaactgtcaaaggagggacykaactaat

SEQ ID NO: 2017 - DNA, 162 bp, Streptococcus pneumoniae
  misc_feature (1)..(162): tiling:Spneumo1:WAN024FD2; Cluster includes WAN0243JU spr1 642||15903684|NP_359234.1|1614153..1614308|+|156 bp|Hypoth etical protein|S.pneumoniae|R6|NC_003098.1|ORF|100
atgcctgcaggctgggatttgctccctctctctaaaccaattatactaccaatgactactgataaaacaatcctgacaactatttcaatatttgataacccaagactagtggctgtcatgattatttccttactttacgccccggtctttgtgykaactaat

SEQ ID NO: 2018 - DNA, 266 bp, Streptococcus pneumoniae
  misc_feature (1)..(266): tiling:Spneumo1:WAN024FGV; Cluster includes WAN023KWA 3138 48_2794b||||1489113..1489373|+|261 bp|EGAD orf prediction| S.pneumoniae|R6|NC_003098.1|ORF|110
atgcctgccttttcttccgcttgggaaatggctgacttgatagcagttgctgctgcatcaatatcaacaataattccatcctttacacctttacttttggcattactcacgccaattacatttaattcaccatttctctgctcggccacaagcaccttgacagagcttgttccaatatctagacctgtaaaaaagccttctctagccattacatcgcttcctctctatcttccaagtttcgcacttcgtattattccatarctaat

SEQ ID NO: 2019 - DNA, 228 bp, Streptococcus pneumoniae
  misc_feature (1)..(228): tiling:Spneumo1:WAN024FHG; Cluster includes WAN023KWR 3144 41_2768||||1471680..1471907|-|228 bp|EGAD orf prediction|S .pneumoniae|R6|NC_003098.1|ORF|110
atgcctgtatcgatagaaggaacgacactcaagacttttttcttgccatcaaaatcagccagagattttttagaaagatctgttgtagtaagagaaaaatcaagcgccttgtcgccgacttgtagttgtttacctgtaaagctcacaggatttccgagaaaagttaccataggatactccaatcttttttcttccattktakctgaaacagtcrgaattttccaatga

SEQ ID NO: 2020 - DNA, 342 bp, Streptococcus pneumoniae
  misc_feature (1)..(342): tiling:Spneumo1:WAN024C8Q; Cluster includes WAN023M8U 3153 64_393||||203724..204065|-|342 bp|EGAD orf prediction|S.pn eumoniae|R6|NC_003098.1|ORF|110
atgcctgtattagaacggaatacgttcaaacgtgggcgatcagcagttccagagagttttccgcgaacgcgacggtggcgtttttggcggagtttgtttttatctggttttgaaatcacagttttcacctctttagttttaaatcgtgtgctatgcacaaagttggaaaataggttggtggttgatgatcaaccactcaacattatttacctgttttaccttctttacgrcgaacgaattcaccaacgtaacggatacctttacctttatatggttctggtgaacgaaggctacgtacgtaagcagctgtttgaccaactacttcttttgaaattccgctaa

SEQ ID NO: 2021 - DNA, 1013 bp, Streptococcus pneumoniae
  misc_feature (1)..(1013): tiling:Spneumo1:WAN024G7V; Cluster includes WAN02443L spr0 929||15902973|NP_358523.1|914516..915523|+|1008 bp|Hypothe tical protein|S.pneumoniae|R6|NC_003098.1|ORF|111
atgccttccyaytatacgaggamtaaaacttttatggayatttatattaagaaagccattattcaccagttcagtccggatgataccgarctgttcttagcagataagtttctcaatattactccaaaaatcgaagaatacctrcgtaaaaaaattgaacatgtgtattcagatgaagccaagactgggattttcgaagaagaaaatcccttcttcaatcatattacagacgatttgttggagacatcagtaacgctggctaatctctggaaagaggagtttagcatttctgaaaatctcaagaccaatgacttgatttttgtkcaattttctaaagaaggtgtagaacatttcgctttcttgcgaattgccctgcgggagaccttgacccacctcggaggagaagttgataatccaatcaagctractcagaataacctgcctggatttggaacrggwgctgaygaggccttggtggtcaatcttcagagtmgcaagtatcacctgattgaaaaacgaatcaagtacaacgggacttttttgaactatttttcagataatcttcttgctgtcgctcctaagatttctcctaaaaaatctatcaaggaactggaaaaaacagcccagagaattgctraatcttttaacacagatgattttcaatttcaatccaaggtcaaatcagckattttcaacaacctagaagaaagcaatgaattgtcacctgagaaattggctaatgacctttttgacaacaatctgacggctcgtttgagctttattgaccaagtcaragaagccgtaccagaacctgttcaatttgatgaaattgatgymagtcgccaattaaagaaatttgaaaaccaaaaactctccttatcaaatggaattgagctcatcgttcccaataacgtctatcaagacgccgagtctgttgagtttatccaaaacgaaaatggaacctactctatcttaatcaaaaatatcgaggatatccaaagtaaataactaat

SEQ ID NO: 2022 - DNA, 291 bp, Streptococcus pneumoniae
  misc_feature (1)..(291): tiling:Spneumo1:WAN024FCM; Cluster includes WAN023KQ5 3129 93_3066a||||1635301..1635558|-|258 bp|EGAD orf prediction| S.pneumoniae|R6|NC_003098.1|ORF|110
atgccttcgttcatggtgatgttcttagcttttttggcgaaaatcatgggaacgtttaaggcttcagctgtaaaaacggctggggcaatacccgacgcttcaatggttacgaccttggtaatgccagtagyagcaaatttttccgcaaaaaccttaccaatctctcgcatcaagctaaagtcaacttggtgggttaaaaaggaatctaccttgaggatgttatcayccaagatatgcccatccttgaggatgcgctcttctaataatttcataagacctcctaaagtctaa

SEQ ID NO: 2023 - DNA, 258 bp, Streptococcus pneumoniae
  misc_feature (1)..(258): tiling:Spneumo1:WAN024CDN; Cluster includes WAN023MCF 3147 63_193||||94530..94787|+|258 bp|EGAD orf prediction|S.pneu moniae|R6|NC_003098.1|ORF|110
atgccttcttttcttctatttytgttctcgcttcactgtcttcaggagyttcaattttctcttcttgctggctttccaattcgacttcagcttgagrgacttcctcctctaactgagtatttttttcaattggtgtatcgagatcggctatcgtttcttcagccttgtctgcaacctcttgagcttgctcttcaggcttgttcttgcttgttgtttttacaaaatcattactttcaaaccattcttgtttcatggtag

SEQ ID NO: 2024 - DNA, 807 bp, Streptococcus pneumoniae
  misc_feature (1)..(807): tiling:Spneumo1:WAN024C6O; Cluster includes WAN0244M1 spr0 265||15902309|NP_357859.1|267187..267897|+|711 bp|Conserve d hypothetical protein|S.pneumoniae|R6|NC_003098.1|ORF|210
atgccttgtttatccttaactacatcagcatggccttataatagaatgacccagggggatttccccccttttttaatacaaaaggagataggtgatgaaagagaaaaatatgtggaaagaattgttgaatcgtgcaggctggattttggtctttttacttgccgtccttttatatcaggttcccctagtggttacctctattttgactttaaaagaagtagccctgctacagtcagggctgatagttgctggcctttcaattgtggttctggykytatttattatkggagctcgtaaaaccaagttrgcwagttttaatttttctttttttagarctaargatttggcacgtttgggcttgagttatytagtyattrtckgktcaaatatacttggttcyatyttrttgcaactgtcaaatgagacgacaacagctaaccagtctcagattaaygatatggttcaraatagttckytgatttcyagyttcttcttgctagccttgcttgctccratttgtgaggaaatcttgtgycgtgggattrttcctaaaaagattttccgaggcaaggagaacttgggatttgtagtcggtacgattgtgtttgctttattgcatcaaccaagtaatttaccttctttattgatttatggaggtatgtcgacagttctatcttggacrgcctacaagacccaacgtttggaaatgtcgatcttgcttcacmtgattgttaatgggattgctttctgtttgttggctcttgtggtgattatgagtcggacattaggaatttctgtktaactaat

SEQ ID NO: 2025 - DNA, 471 bp, Streptococcus pneumoniae
  misc_feature (1)..(471): tiling:Spneumo1:WAN024CCF; Cluster includes WAN023KAP 8227 4_19b||||8560..9024|+|465 bp|EGAD orf prediction|S.pneumon iae|TIGR4|WAN01UC25|ORF|010
atgcctttaaagcatccattgaaaaatagaaagaaggaaaagaacatgagtaaagaaaaagtaattttggcctattctggcggtttrgacacatcagttgctattacctggytraagaaagactatgatgttgttkcagtttgtatggatgtgggtgaagggaaagacttagatttcatccatgataaggctcttaaggttkgggcagtmgaatcttatgtcattgatgttaaggacgaatttgctacagattatgtgctagtrgctcwycagtcacatgcctaytatgaacaaaagtaycycttggtatctgccttgagccgccctctkatttctaaaaaattggttgaaatagcgcatcagayaggagcgactacaattgctcatggttgtacmggtaaggggaatgaccaagtcgaataccagattgcagtcgctaagaaagcgaatgaagctaaaaagykaactaat

SEQ ID NO: 2026 - DNA, 180 bp, Streptococcus pneumoniae
  misc_feature (1)..(180): tiling:Spneumo1:WAN024BDM; Cluster includes WAN023W1R AX57 0615.1_1||||1..180|+|180 bp|Glimmer 2.02 orf prediction|S. pneumoniae||AX570615.1|ORF|001
atgccttttatgatggaaaaatcttctaatactcttcgaaaatctcttcaagccacgtcaacgtcgccttaccgtaggtatatgatactgrctctgtcaattctatccacaacctcaaaacagtgttttgaggttgtggatagcttcctagtttgctctttgattttcattctaactaat

SEQ ID NO: 2027 - DNA, 111 bp, Streptococcus pneumoniae
  misc_feature (1)..(111): tiling:Spneumo1:WAN024COS; Cluster includes WAN0246T4 5613 45-42-4||||||111 bp|DNA Streptococcus pneumoniae phage Dp- 1 open reading frame 238|S.pneumoniae||WAN0246T4|ORF|000
atgcctttttgcggtcgatacaagttgcgcaagttccacaactttcagcgtcactttcataacatgaacgagtcaagaaataaggaacatctaaatcaattccccatttaa

SEQ ID NO: 2028 - DNA, 537 bp, Streptococcus pneumoniae
  misc_feature (1)..(537): tiling:Spneumo1:WAN024GCT; Cluster includes WAN0244AN spr0 675||15902719|NP_358269.1|680803..681333|+|531 bp|Hypothet ical protein|S.pneumoniae|R6|NC_003098.1|ORF|111
atgcgaaaagaaattgcacctgaattatacaactataacaagtttcctggtccggagttccatttacacggggacaaggtcgaaacggaagggatagctttttccttggttgaaaatatcaaggatgcctttgatgtgacgacttttaatcagcgtttttcagaagtmttaaccaagtttgattatatcgtgggggactggagcaacgaacagcttcgyctacgaggtttttacaaggatgaccgaacagaagaaaaacttgaaaaaatcagtcgtttacaagactaccttttagagtattgtagttatggttgtgcctattttgtcttagaaaatgaagcccctaagcgagcatcatttgacaagaaaatgcgtaagacggaagaagaaacaccttctagaaaaggaaagaaaccgactcaaacyaaacgaaagtcgaatgcagataagaaaaatagacgtcgtcagaaagaccagcattctcagaaagaggacaaggracaacgtcattttgtcattcgtcagaagykaactaat

SEQ ID NO: 2029 - DNA, 1331 bp, Streptococcus pneumoniae
  misc_feature (1)..(1331): tiling:Spneumo1:WAN024CUO; Cluster includes WAN024424 spr0 982||15903026|NP_358576.1|967907..969232|+|1326 bp|Conserv ed Hypothetical protein|S.pneumoniae|R6|NC_003098.1|ORF|11 1
atgcgaattggtttatttacagatacctattttcctcaggtttctggtgttgcgaccagtattcgaaccttgaaaacagaacttgaaaagcagggacatgctgtttttatctttacgacgacagataaggatgtcaatcgctacgaagattggcaaattatccgcattccaagtgttcctttctttgcttttaaggatcgtcgctttgcctaccgaggttttagcaaggcacttgaaattgctaaacagtatcagctagatattatccatactcagacagaattttctcttggcctgttggggatttggattgcgcgtgaattgaaaattccagtcatccatacctatcacacccagtatgaagactatgtccattatattgctaaggggatgttgatccggycgagtatggtcaagtatctggttagaggtttcctgcatgatgtggatggggttatttgycctagtgagattgtccgtgacttgctatctgattataaggtcaaggttgaaaaacgggtcattcctactgggattgaattagccaagtttgagcgtccsgaaatcaagcaggaaaatttgaaagaactgcgtagtaaactagggattcaagatggtgaaaagacgttgcttagtctttcgagaatctcctatgaaaaaaatattcaagcagttttagyagcctttgctgatgttctgaaagaggaagacaaggttaaactggtagtagctggggatggcccttatctgaatgacctcaaagagcaagcycagaacctagagattcaagactcagtyatctttacagggatgattgctcctagtgagacggctctttactataaagcggcggatttcttcatttcggcatcgacaagcgaaacgcaaggtttgacctacttggaaagcttagccagtggaacacctgtcattgctcacggaaatccttatttgaacaacctcatcagtgataaaatgtttggarccttgtactatggagaacatgatttggctggtgctattttggaagccctgattgcaacaccagacatgaaygagcataccttatcagagaaattgtatgagatttcagctgagaactttgggaaacgagtgcatgagttttatctggatgccattatttcaaataacttccagaaagatttggctaaagatgatacggtcagtcagcgtatctttaagacagttttgtatcttcmgcaacaggtggttgctgtaccygtaaaaggmtctagacgcatgttgaaggcttcaaaaacacagttgatcagtatgagagactattggaaagaccatgaagaatarctaat

SEQ ID NO: 2030 - DNA, 240 bp, Streptococcus pneumoniae
  misc_feature (1)..(240): tiling:Spneumo1:WAN024GB8; Cluster includes WAN023LPN 3133 09_1412||||745675..745914|-|240 bp|EGAD orf prediction|S.p neumoniae|R6|NC_003098.1|ORF|110
atgcgacagggcaaaccaaccactgagaatccaacctgccaaagcctgaccaggaagtccgacgttaaagaaaccagctcgactggcaacsgcaaaaccaagaccaatcaagaccagaggacccatagcacggaagatttctccaatcccacgcagactgccaaaggctgtatagaacaattcttcgtagccccaaatagcatcataaccgaagatccacatgacaatggctccgagtaa

SEQ ID NO: 2031 - DNA, 255 bp, Streptococcus pneumoniae
  misc_feature (1)..(255): tiling:Spneumo1:WAN024G96; Cluster includes WAN023LML 3140 31_1574||||837791..838045|-|255 bp|EGAD orf prediction|S.p neumoniae|R6|NC_003098.1|ORF|110
atgcgacggacactttcacgaacatgcttggccttgacaggagcatctgcttccacctcacccaagcgttctcgcaacttaswattttccaarcgaagagctgtattttcctctaccaggctcttgagatttttcttgatggcttccacatcggcyaaggttaccaataaytgttgggaaaaatcatccagcgcgtcaaataattcttttttgtccataaaacagccctttcctttctttatcattcatttttga

SEQ ID NO: 2032 - DNA, 707 bp, Streptococcus pneumoniae
  misc_feature (1)..(707): tiling:Spneumo1:WAN024GEC; Cluster includes WAN0244CD spr0 613|pyrF|15902657|NP_358207.1|624413..625114|+|702 bp|Orot idine-5'-decarboxylase|S.pneumoniae|R6|NC_003098.1|ORF|111
atgcgagaacatcgtccartcattgctcttgattttcctagttttgaggcggtcaaggaatttttagctcttttyccagcagaagaaagcctttatctcaaggtagggatggagctttattacgcagcggggcctgagattgtgtcctacttaaaaggtttgggtcatagtgtctttttggatctcaaacttcatgacattcctaatacagtcaagtcagccatgaagrtcytrtctcagcttggtgtsgatatgacyaatgtycatgcggctggtggtgtagagatgatgaaggckgcgcgtgaaggycttggragtcaagcyaaattgatcgctgtaackcagctsacatcaacgtcagaagcycagatgcaggagtttcaaaatatccaaaccagtctgcaagagtctgtgattyactatgccaagaagacagctgaagctggcttggatggtgttgtttgctcggctcaggaagtacaagtcatcaagcaggctaccaatccagattttatctgtctgacaccagggattcgtccagctggtgytgcagttggagatcaaaaacgagtcatgacacctgctgatgcctatcaaatcggcagtgactatatcgtagtgggacgtcccattacccaagctgaggakcctgttgcagcttatcatrccatcaaggatgaatggacacaggactggaattaactaat

SEQ ID NO: 2033 - DNA, 262 bp, Streptococcus pneumoniae
  misc_feature (1)..(262): tiling:Spneumo1:WAN024G42; Cluster includes WAN023LFG 3148 69_1962||||1060880..1061137|+|258 bp|EGAD orf prediction|S .pneumoniae|R6|NC_003098.1|ORF|210
atgcgcaatcacaatcacttcttcattgatagaagctgggtttggcaattttttaccaagaaggtttgccaatacacgttttgtcacgtcgcggatatccgctgcgcgttcttgcatgtatgggttgtcttccatgccttcaaagatagtgataaacatatctgtaacttctttcagacctgcttctgcattcactttcttcgcacggatagtttccttgatttggctgatcatttctgggtcagcaagaaccattaagtga

SEQ ID NO: 2034 - DNA, 467 bp, Streptococcus pneumoniae
  misc_feature (1)..(467): tiling:Spneumo1:WAN024D57; Cluster includes WAN0243L0 spr1 600||15903642|NP_359192.1|1577455..1577880|+|426 bp|Conser verd hypothetical protein|S.pneumoniae|R6|NC_003098.1|ORF| 111
atgcgcaatcatcttgtgacgcagagactgcccgttaatggactttcttctatttatgactctaaaaagaaaggagacactatgacctatttggaaaaatggtttgacttcaatcggcgtcagaaagaaattgaaagtctcttggaagagaccattgcccaacagagcgagcaaagtctgaccttgaaagagttctacctgctctactatctggacttggctgaagaaaaatctctacgccagattgacctgccagataagcttcatctgagcccgagcgcagtttctaggatggtggctcgcttggaagctaaaaattgcggtytactcagtcgcatgtgttgccatcaagatagacgctctagttttatctgcctgacaaatgatgggcaaaagacactggcctcgctacaaaagactgtcgaagaaagcttrgaagcaggtttggatttcttgatttaactaat

SEQ ID NO: 2035 - DNA, 1823 bp, Streptococcus pneumoniae
  misc_feature (1)..(1823): tiling:Spneumo1:WAN024DZT; Cluster includes WAN0243DL spr1 868||15903909|NP_359459.1|1838616..1840433|-|1818 bp|Hypot hetical protein|S.pneumoniae|R6|NC_003098.1|ORF|521
atgcgcattaaatggttttccttgrttaggattayaggtttactwytggtactcttgtatcayttctttcagacsatctttcctggaggatttttcggggtagatgtctttttcacattttcaggtttcctgattacrgctctactcatygaagaattttctaaraaymatgagattgayttgataggattttttagragacgcttttatcggattgtgccacctgtggttttgatggtcttggtgaccatgccytttactttctwggttcgscaagaytatgtkgctggaattggkggycagattgcgrgygtcttaggctttatgaccaacttctatgaactyctaacaggtgggarttatgaatctcagttcattccwcatttgtttgttcataattggagyttggcwgttgaggttcactactatattctwtggggattggcagtttggttcttatccaarcarkctaratcaaatggtcagttgarrgggatggtctttctcttatctgctrytgccttcttgatyagyttcttctccatgtttatyggtagttttctagtracctcttattcytctgtttatttctccagtttaactcatgtctatccattctttttrggaagtatsytagcaackattgtaggcgttcgtcagacgacttccctmgtyaagcarttggataaaatctgggatttacgmaagacyytkktagtttttgsaggaggytttggyttcytastymttttgacyttcttygtcaaattyacytatctytttgcctatcttatyggcttcttrcttgccagtcttgcagcycttgcyatgattctggcggcgcgtgtcttacatgaaaagacacmtmayrtrcaggagycraagatkatyagctttttagcrgatactagctatgcrgtttatctyttccattggcctttctatatcattttctcacagttgacatcaaatcttcttgctgtattactgactctgatttgttcttatggctttgccagtctktcattttatgtrttggaaccttggattgcaggmaagaacacacctrttktmcaaacysttcgtcccctgccttatattcacgcaattcttgcarcargtacaggaatcttgryywtcattgtytkcwyrgtgacyttrttggcaccacaagtgggagcgtttgagacagacttractgtcaatggcttgaagcaagctgcwaswaatattgsccaracmaargtgatggcagaacgrgcagawgcwrayagtttgggrattgctgatggyactatgttaattggtgaytcagtggctttaagggcaaatacagcmctrcagacagctcttcctggagcacarattaacgcgcaggtcagcrkaacaaccaagacygcmaatgaaatcatgctaaayaatagccagaataaatttttacctaagayggtggtcattgcgactggggtaaataatcctgaraattacaaggawgactgggacagtatygtraaaaatcttcctaagggacaccatatgattttrgtsactccttatgagggrgataagacaaaagagacctatgccatcgttgagaaggctgctgcctatatgagagaattggcagagaagacaccttayatyacrrtwgcwgattggaatcaagttgcgaaagagcatccagaaatttgggcwggaacagaccargtycatttcggragtgasastagcactatygaagcaggagcaaaattgtatgcagakacsattgccacagcyttgcaracagctcaagacaagccggttaaatcaaaataactaat

SEQ ID NO: 2036 - DNA, 303 bp, Streptococcus pneumoniae
  misc_feature (1)..(303): tiling:Spneumo1:WAN024FER; Cluster includes WAN023KT2 3149 35_2922||||1555787..1556089|+|303 bp|EGAD orf prediction|S .pneumoniae|R6|NC_003098.1|ORF|111
atgcgcgaaatattggtattttcaatagagaaaaagatagcggcaggcatggcaaggacattgcaatccacaatcccctgcgaatgcgcgattcgaatcatggtatcttctacacgatggatttctgagccacttttaaggagaatagtccccgctagcataatcacatcaatgacggcatttaattcttttgattcttccatgctttcctccttttatcaactccctctattctatcacaaatcyggactcaaaaaaaatctttgccatgaaatcatgacaaagattgattactcattttga

SEQ ID NO: 2037 - DNA, 890 bp, Streptococcus pneumoniae
  misc_feature (1)..(890): tiling:Spneumo1:WAN024FSS; Cluster includes WAN0243UK spr1 255|pstA|15903298|NP_358848.1|1253837..1254721|-|885 bp|AB C transporter membrane-spanning permease - phosphate trans port|S.pneumoniae|R6|NC_003098.1|ORF|111
atgcgcgctaagaaattakataaacttgcaacagctgtcctctatacgattgctagcatcattgtgacaatcttggcttccttrattctctatatcttggttcggggcttgccccatatctcttggtctttcttgactggaaggtcttctgcttttcaagcaggtggtgggattggcattcagctttacaattcctttttcctattggtcattaccttgattatttctgtacctctttctatgggagctgggatttacttggctgaatatgctaaaaaaggtcctgttaccaactttgtgcgracttgtattgaaatyttgtcctctttaccatcagtggtggtgggtctctttggttacttgatctttgtagtccagtttgagtatggrttttcaatcatttcaggtgcyttggccttgacagtctttaacttgcctcagatgacgcgtaatgtagargatagtttgaaacacgttcaccatacccaacgtgaggctggtctggctcttgggatttctcgctgggagacagtggttcatgttgttattccrgaagcgcttccaggtattgtaacgggtgtcgtcttggcatctggtcgtatctttggcgaagctgcagctctgatctatacagcagggcaatcggcgccagctcttgactggtctaactggaatatcctcagtgtgactagccccatctctatcttccgtcaagcagaaaccttggctgtccatatctggaaagtcaatagtgaaggcactattccagatggaaccattgtatcagcaggttctgccgctgtgctcctgatctttatcctgatttttaactttggagctcgtaagttcggaagctatctacacaagaaattaaccgctgcctaactaat

SEQ ID NO: 2038 - DNA, 156 bp, Streptococcus pneumoniae
  misc_feature (1)..(156): tiling:Spneumo1:WAN024CYJ; Cluster includes WAN0243BH spr1 944|rpmG|15903985|NP_359535.1|1925154..1925303|+|150 bp|50 S Ribosomal protein L33|S.pneumoniae|R6|NC_003098.1|ORF|12 0
atgcgcgtaaatattacacttgaacacaaagaatctggtgaacgcttgtaccttacttctaaaaacaaacgtaacactccagaccgccttcaattgaagaaatactcaccaaaacttcgcaaacacgttgtgtttacagargtkaarstaactaat

SEQ ID NO: 2039 - DNA, 321 bp, Streptococcus pneumoniae
  misc_feature (1)..(321): tiling:Spneumo1:WAN024B8M; Cluster includes WAN023MCV 3153 76_166a||||77874..78194|-|321 bp|EGAD orf prediction|S.pne umoniae|R6|NC_003098.1|ORF|110
atgcgctctgcgtggtcatcaatagcgataatattcatatcctgcttggctagggcagctaggacactgctcccaaaaattcccaagcccaaaattccaatcgtacgatctgacatgctctttcctttcttaaccaatactaatatctgctttcatatagtgaatcatatctttcttttctggatggtaatctgccaagctaacaaacaaggtcaagggaccaattcgtcccataaacataagtggcatgataacactgagagccaatttcccaaggtcaggagtcagatttgccgttacaccaactgtactaagagctga

SEQ ID NO: 2040 - DNA, 866 bp, Streptococcus pneumoniae
  misc_feature (1)..(866): tiling:Spneumo1:WAN024D3M; Cluster includes WAN0243HQ spr1 718||15903760|NP_359310.1|1698873..1699733|+|861 bp|Conser ved hypothetical protein|S.pneumoniae|R6|NC_003098.1|ORF|1 11
atgcgcttgatttttaatggtattttttgtttcactttcagattcatacccctatcttatcacattttgagttataatagagctatgaaaatcacaaaacttgaaaagaaaaaaagactctayctgatggagcttgataatggcgacaaatgctatatcaccgaagayacaattgttcgttttatgttatcgagagataaggtgataagcgaagaggaattgaaagagattcaagactttgctcaattttcttatggtaagaatctsgcyctctaccacttatcctttaaagcacgyactgaaaaagargtcagagaatatctgaaaaaataygatattratraaaacatcgtttctcaagtyattgctaatcttaaagaagakaagtggattaatgatrgycagtacgcttatgctatcatcaatrccaatcaactttcaggagacaagggwccttatgtrctgactcagaaaytakcwcaaaaaggratttcaaaatctactatagaagarawcttgaawgawtttgatttttckgaagttgctcaacgtgtagcyaataaactattgaaaaaatatgagggaaaacttccagctcgtgccytgcaagataagattatccagaacttgactaacaagggcttctcttattytgatgctaaaattgcctttgacgamttrgatagycaagttgaysaagaaacgactcargaactcatcttcaaggaacttgataagcaatatactaagtatgcycgaaagtatgaaggatacgaactgaagcagcgtttaactcaagttttagcacgaaagggctacgatttttcggatatagcaagcgctcttagagaatatctttaactaat

SEQ ID NO: 2041 - DNA, 78 bp, Streptococcus pneumoniae
  misc_feature (1)..(78): tiling:Spneumo1:WAN024DN6; Cluster includes WAN023SHL NC_0 03098.1_2445||||1903730..1903807|-|78 bp|Glimmer 2.02 orf prediction|S.pneumoniae|R6|NC_003098.1|ORF|111
atgcgcttwatttcaagtctaggagaaaaattgcttgctacaaggatattatttacagtgacaatygctaatartcaa

SEQ ID NO: 2042 - DNA, 423 bp, Streptococcus pneumoniae
  misc_feature (1)..(423): tiling:Spneumo1:WAN024C89; Cluster includes WAN023M8G 3153 60_420||||212613..213035|-|423 bp|EGAD orf prediction|S.pn eumoniae|R6|NC_003098.1|ORF|110
atgcggatgcatgccattaatcagataaacaatggttccaatagtcattccatggctgacaacaagggcgttacctccaccttgatcttccatttcttttgcaatcatttcaaagccttccttgattcggccactgagtttttcccagccttcagcccaaccagctgtatcgacctctaccaagccctcagccagttcagcataagacaattggtgaacgtggtccacattaaagatacgaggaataatgcccatgaaaagatcgccatcataggctccatcaaaactaccgaaacaccattctctgatacgcttgtccatgcgataagggatttycccctgcaagccaagttcttcaaggataattcccatggtctgaatggtacgaccagaatcactcgaataagcrcgctcaaactgtag

SEQ ID NO: 2043 - DNA, 206 bp, Streptococcus pneumoniae
  misc_feature (1)..(206): tiling:Spneumo1:WAN024DHY; Cluster includes WAN0244GV spr0 451||15902495|NP_358045.1|459085..459285|+|201 bp|Hypothet ical protein|S.pneumoniae|R6|NC_003098.1|ORF|121
atgcggatgcttcctattttgcttctctttttagctctactaccgtttttctcaaagtttgtcactggaggtagttctttcagttgggragtrtttttgattttcataatagattgggttttattratagtttttgcgattcagatttcttatattttttggagattgagtcaaaagtggaaagaattatctaataaataactaat

SEQ ID NO: 2044 - DNA, 333 bp, Streptococcus pneumoniae
  misc_feature (1)..(333): tiling:Spneumo1:WAN024F2I; Cluster includes WAN023KM8 3152 13_3265||||1746061..1746393|+|333 bp|EGAD orf prediction|S .pneumoniae|R6|NC_003098.1|ORF|110
atgcggtcaagtagggcagaagtttctgtcgtacggaaacgtttgaagatttcagcgatgatatttccraggtttttcttcttgaatggagggttgagctcaagattgctgatagcttccttgatakctccaccaagtggcaagaagtatttagctggaacaccttctgtcaagttggcattgtttggttcttgcaagtatggtagcccctctggcatgatatcgttgaagagaattttaccaactgttgtaagcaagaccttatgtctttgctcttctgtccaaggcttgttgaggctgtctgttgcgataccaacacgtgagtggaggtga

SEQ ID NO: 2045 - DNA, 288 bp, Streptococcus pneumoniae
  misc_feature (1)..(288): tiling:Spneumo1:WAN024DWB; Cluster includes WAN023KDZ 3140 66_3613||||1940697..1940984|+|288 bp|EGAD orf prediction|S .pneumoniae|R6|NC_003098.1|ORF|110
atgcggtttgattttcttcatcgttatatatctccttctttwgcaacttctcttrttcacaarrttatccacaggttgtggataataaaccatgatctaacagycagctctttccaactccaactggtaggctcaggatttttctcctcaatrttccctcttcaaacagctctgtcatatggttctgctaacacctctcagaatgctactctccataattattctcaggcttctttcaggtcattgtgtgaagaccattcactatccagacttttccacagattgtga

SEQ ID NO: 2046 - DNA, 351 bp, Streptococcus pneumoniae
  misc_feature (1)..(351): tiling:Spneumo1:WAN024CFD; Cluster includes WAN023RWC cont ig_1609_29||||17671..18021|+|351 bp|Glimmer 2.02 orf predi ction|S.pneumoniae|670|WAN01UDCD|ORF|001
atgcgtaaaaaagaagataaatatgattttagagcctttggtttagccattaaagaagctcgattgaaacgaggtttaactcgtgaacaagtgggagcattgattgaaattgacccacggtacttaactaatattgaaaataaagggcaacaccccagcatacaagttctttatgaccttgtatcgttacttcatgtttccgttgatgaatttttcttacctgctaataacttggtaaaaagcacccgacgattacagatagagaaatacatggatagctttacagacaaagaactatccttaatggaatctttagccagcggtatcaacgaagcaagaaacatcgaagac

SEQ ID NO: 2047 - DNA, 1275 bp, Streptococcus pneumoniae
  misc_feature (1)..(1275): tiling:Spneumo1:WAN024DMP; Cluster includes WAN0244T5 spr0 009||15902053|NP_357603.1|9001..10338|+|1338 bp|Conserved hypothetical protein|S.pneumoniae|R6|NC_003098.1|ORF|111
atgcgtaaattcttaattattttgttgctaccaagttttttgaccatttcaaaagtcgttagcacagaaaaagaagtcgtctatacttcgaaagaaatttattacctttcacaatctgactttrgtatttattttagagaaaaattaagttctcccatggtttatggagaggttcctgtttatgcgaatgaagatttagtagtggaatctgggaaattgactcccaaaacaagttttcaaataaccgagtggcgcttaaataaacaaggaattccagtatttaagctatcaaatcatcaatttatagctgcggacaaacgatttttatatgatcaatcagaggtaactccaacaataaaaaaagyatggttagaatctgactttaaactgtacaatagtccttatgatttaaaagaagtgaaatcatccttatcagcttattcgcaagtatcaatcgayaagaccatgtttgtagaaggaagagaatttctacatattgatcaggctggatgggtagctaaagaatcaacttctgaagaagataatcggatgagtaaagytcaagaaatgttatctgaaaaatatcagaaagattctttctctatttatgttaagcaactgactactggaaaagaagctggtatcaatcaagatgaaaagatgtatgcagccagcgttttgaaactctcytatctctattatacgcaagaaaaaataaatgagggtctttatcagttagatacgactgtaaaatacgtatctgcagtcaatgattttccaggttcttataaaccagagggaagtggtagtcttcctaaaaaagaagataataaagaatattctttaaaggatttaattacgaaagtatcaaaagaatctgataatgtagctcataatctattgggatattacatttcaaaccaatctgatgccacattcaaatccaaratgtctgccattatgggagatgattgggatccaaaagaaaaattgatttcttctaagatggccgggaagtttatggaagctatttataatcaaaatggatttgtgctagagtctttgactaaaacagattttgatagtcagcgaattgccaaaggtgtttctgttaaagtagctcataaaattggagatgcggatgaatttaagcatgatacgggtgttgtctatgcagattctccatttattctttctattttcactaagaattctgattatgatacgatttctaagatagccaaggatgtttatgaggttctaaaaykaactaat

SEQ ID NO: 2048 - DNA, 1697 bp, Streptococcus pneumoniae
  misc_feature (1)..(1697): tiling:Spneumo1:WAN024FD4; Cluster includes WAN0243JT spr1 643|ABC-MSP|15903685|NP_359235.1|1614274..1615965|-|1692 b p|ABC transporter membrane-spanning permease - unknown sub strate|S.pneumoniae|R6|NC_003098.1|ORF|311
atgcgtcataaattaaatttaaaagattggcttattcgtttagggttaatctggttcttagtaacatttattatttatccaaactttgatctagtagtgaatgtatttgtaaaaggaggagaattttcccttgatgctgtacatcgtgttctaaaatctcagagggcacttcagagtattatgaacagttttaagttagcattttcactcattattacagttaatgtcgtaggtattctttgygttctatttacagagtactttgatattaaaggtgctaaaattttaaaattaggttatatgacctctttaatttatggaggagtggttttagcgactggatataaatttgtctatggtccwtatggattgattacaaaatttttacaaaatgttatcccttctttagacyctaactggtttattgggtatggtgcagtcttattcattatgacattttcaggaactgctaatcatacattgtttttaacaaatacaattcgaagcgttgactatcacactattgaggctgctcgaaatatgggagcaaaaccatttactgttttccgaaaagtagtgttaccaaccttaattccaactctatttgcacttactattatggtttttcttagtggtttatctgcagtagcagcacccatgattgttggtggtaaagaatttcaaactataaatccaatgattattacatttgcagggatggggaattctcgtgatttagctgccytacttgcaattattttaggtattgcaactacaattttgcttactatcatgaataagatagaaaaaggtggaaattatatttctatctctaagactaaagcgcctcttaaaaaacaaaaaattgcgtctaagccttggaatatcattgctcacattgtagcatatggattgttcacagttttcatgcttccactaatttttatagtattatactcatttacagatccagttgcaattcaaacaggtaacttaacattatcaaactttactttagaaaattatcgcttattctttagtaatagtgcggcattctctccattcttggtcagctttatttattctattattgctgcgacaacagcaacaattctcgcagttgtatttgctcgtgttgtcagaaaacataaatctcgttttgatttcttatttgaatatggtgctctacttccttggttactaccaagtacacttttagcagtaagtttattatttacttttaatcagccacaatttcttgtcttgaatcagattttggtaggtagtttggtaattctacttattgcatatatagttgtaaaaatcccattttcttatagaatggtacgtgctattttatttagtgttgatgatgagatggaagatgcagcaagaagtatgggtgcttcacctttttatactatgatgaaggttatcattccatttattttaccggttgttctctctgttattgctttaaactttaactctttattaactgacttcgacttatctgtattcctttaccatcccctagctcaaccattaggtattacgattcgatctgcaggtgatgaaacagcaacatctaatgcacaagctctggtatttgtttatacaattgttctgatgatyatttctggaacggtattatacttcacacaaagaccggggcgtaaagtaaggaaataactaat

SEQ ID NO: 2049 - DNA, 397 bp, Streptococcus pneumoniae
  misc_feature (1)..(397): tiling:Spneumo1:WAN024G6U; Cluster includes WAN0242H9 SP10 65||15900935|NP_345539.1|1000382..1000603|-|222 bp|hypothe tical protein|S.pneumoniae|TIGR4|NC_003028.1|ORF|220
atgcgtctgtggaactcaaaaggttcggggaaccttttgaggattaattgcgtttmtctaacaaactcacacattcaacgtggcatgactgatgaagtcatcataagaatttcacttgctgctcttttacgktggcagsctgaacggtcagaagtatcattgtatatcatttgtatcatggcatataaagtatcgctctattttattgatgrttttwawrtcgctcttatcatggcgarccattcaaawytgctccacaaatgaggaaagtaccattttrgrctattyarttgtcaaagrrccaaataaaataatctcctcattttcamactctatgaaattgaggagattattttctaaagcgaattttatcaggaaaatctgtcaattccaatag

SEQ ID NO: 2050 - DNA, 365 bp, Streptococcus pneumoniae
  misc_feature (1)..(365): tiling:Spneumo1:WAN024AVA; Cluster includes WAN0243XR spr1 140||15903183|NP_358733.1|1141242..1141601|-|360 bp|Conser ved hypothetical protein|S.pneumoniae|R6|NC_003098.1|ORF|1 10
atgcgtmttatctatctratwattggttttttatcrctgrccttggctattgttggggttgttttacccttgttgcckacaacrcctttccttttgttgtctattgcttgtttctccagaagttccaagcgwttcgaagaytggctttatcataccaagctctatcaarcatatgtagctgattttcgygagacyaagtctattrcgcgtgaacgaaagaaaaaaatcatcgtctctatctacgtcttgatgggaatttctatttattttgcacctcttttaccagtcaaaatcggtytgggtgctttgaccatctttatyacttattatctyttcaaggtcattccagacaaagaatarctaat

SEQ ID NO: 2051 - DNA, 294 bp, Streptococcus pneumoniae
  misc_feature (1)..(294): tiling:Spneumo1:WAN024FZG; Cluster includes WAN023KU6 3138 60_2878||||1536240..1536533|+|294 bp|EGAD orf prediction|S .pneumoniae|R6|NC_003098.1|ORF|110
atgcgttccatgacccgtctggcttcccaggtttcgtcatttccatgtttcactttcgcaaaatgcttctccaaatcttcaaagttgaagttggatgtgaaaaaggtcggtaaattttcctgcatccgatattggagaatgacctgcaggatttcgtcacgcacccaaacggttgattgctcggcgccaatatcatctaaaatcaggacctcagacagcttaatctcatccaccaaggtcttaacattgccatcactgatagcatttttgacatcaatgacaaagctaggatag

SEQ ID NO: 2052 - DNA, 731 bp, Streptococcus pneumoniae
  misc_feature (1)..(731): tiling:Spneumo1:WAN024GEQ; Cluster includes WAN0244CT spr0 597|rsuA|15902641|NP_358191.1|608867..609592|-|726 bp|Ribo somal small subunit pseudouridine synthase A|S.pneumoniae| R6|NC_003098.1|ORF|111
atgcgtttagataatttattagcycaagaaaaaatcagccgaaaggccatgaarcaagcactcctcagagggraaattctagtcgatggttgcccagcccgctccctagctcaaaatatcgatacaggactacaagaactcctttttcaggatcgaatcattcaaggctatgaacacacctatcttatgcttcataaacctgctggtgycgttacagccaacaaagacaaggaacttccgaccgtcatggacctgcttccatctracatccagtctgacaagctctatgccgtyggccgactggaccgagatacaacrggactcctyctcttgaccgataacggtcccttgggcttycarctcctccatccccaatatcatgtcgataagacttaycaagtysaggttaatggacttctaacacctgaccatatccaarcctttcaaaarggaattgtctttttagatgryactrtctgtaaaccygcaaractagagattctatcwgcaagtcsytcchtcagtcaagcctctatcaccatttcagaaggaaaatttcatcaaatcaagaaaatgttcctctcggttggtrttaaggtgactakcctcaaragaatccaatttggggacttcacattgaacccagatttagcagaargtaactaccgccctttgaaccaaaaagagttacaaatcattaaaaactatttagagatgagtcgataactaat

SEQ ID NO: 2053 - DNA, 270 bp, Streptococcus pneumoniae
  misc_feature (1)..(270): tiling:Spneumo1:WAN024FRR; Cluster includes WAN023L5O 3148 99_2370||||1266608..1266877|+|270 bp|EGAD orf prediction|S .pneumoniae|R6|NC_003098.1|ORF|110
atgcgtttgactgtcaaatggagtrccaggctcattaaagccgatatgcccattgcgaccgattcccaagatttggaggtcaactggatggtcagccaaaatttggttgtagcgttcaacttcagcttcagcattgtccttaacaccacgaggcaagaaactttctttaaatggtttttggttgaacaagttttcttgcatgaagtaacgataagactgtggattgtccccatcaaggcccacatactcatcaaggttgacactggttag

SEQ ID NO: 2054 - DNA, 72 bp, Streptococcus pneumoniae
  misc_feature (1)..(72): tiling:Spneumo1:WAN024A9L; Cluster includes WAN024EH2-rc R 6.IG_1031||||977769..977839|-|71 bp|Between spr0992 (map) (+ strand) and spr0993 (+ strand)|S.pneumoniae|R6|NC_00309 8.1|IG-rc|110
atgcgttttattatgaaaagatctactggattttttatcaaaataaacttccagtagtcttttcacttttta

SEQ ID NO: 2055 - DNA, 182 bp, Streptococcus pneumoniae
  misc_feature (1)..(182): tiling:Spneumo1:WAN024D23; Cluster includes WAN0243EV spr1 821|secE|15903863|NP_359413.1|1796338..1796514|-|177 bp|Pr eprotein translocase secE component|S.pneumoniae|R6|NC_003 098.1|ORF|121
atgcgttttattggagatatttttagacttcttaaagacacaacrtggccaactcgcaaggaaagctggagagattttcgttctatcatggaatacacagctttctttgtagtaattatttacatttttgaccagttgattgtttcaggtttgattcgatttattaacattttttarctaat

SEQ ID NO: 2056 - DNA, 237 bp, Streptococcus pneumoniae
  misc_feature (1)..(237): tiling:Spneumo1:WAN024EVQ; Cluster includes WAN023KCA 3148 23_3690||||1993316..1993552|+|237 bp|EGAD orf prediction|S .pneumoniae|R6|NC_003098.1|ORF|110
atgcgtttttccatattttcctggtcaaaacgaatatccttagccccaaaaccaacagtcttatcatcacgaagggcagtcgcacctagattcgatgtcataatgataatggtatttgaaaaatcgaccttgcgtcccttgctatctgtcaagacaccgtcatccagaacctgcaagagaacattaaagatatctgggtgggccttctctacctcatcaaagaggagaacggaatag

SEQ ID NO: 2057 - DNA, 834 bp, Streptococcus pneumoniae
  misc_feature (1)..(834): tiling:Spneumo1:WAN024EUZ; Cluster includes WAN0243UU spr1 245|potB|15903288|NP_358838.1|1244624..1245451|-|828 bp|AB C transporter membrane-spanning permease - spermidine/putr escine transport|S.pneumoniae|R6|NC_003098.1|ORF|111
atgcratcgaggaggaaagagatgaagaaaacaagctctaaactctttgtagtrccctacatgctttggattgcsctctttgtattggcacccttggtcttgattttcggwcaatcctttttcaacatygaaggccagttyagtttagaaaattayaaatcttactttgcgtcacaaaacttgacctayctyaaaatgagtttcaactcagtgctttatgcaggsattgtgacctttgtgrcmytgcttatcagytatccracrgccctctttttgacccgtctcaarcaccgtcaactctggctcatgctgattatccttcctacctggatcaatttgctccttaaagcctatgcttttatcgggatttttggtcaaaatggctctattaaccaattcttggaatttatcggaattggttcacaacagttgctttttaccgatttttcctttatctttgtcgcaagctacatcgagctcccctttatgattttgccgattttcaatgtcttagacgatatggataataatctcatcaatgctagttaygaccttggtgcaactaagtgggagaccttccgtcatgtcatcttccctctatctatgaacggtgtgcgaagtggggttcagtcggtctttatcccaagtttgagtctcttcatgctgacccgtttgattggtgggaaccgcgttatcaccttggggacggctattgagcagaattttctaaccaatgacaactatggtatgggttcaacyatcggtgtgattctcatcctgaccatgttcatcaccatgtgggtgacyaaggaaaggagagaacgaykaactaat

SEQ ID NO: 2058 - DNA, 2219 bp, Streptococcus pneumoniae
  misc_feature (1)..(2219): tiling:Spneumo1:WAN024C9V; Cluster includes WAN0244OB spr0 183|nrdD|15902227|NP_357777.1|191172..193385|+|2214 bp|Rib onucleotide reductase, class III, anaerobic|S.pneumoniae|R 6|NC_003098.1|ORF|221
atgcrtatgattgcactagaagaaaaaattacaattttgccaactctcttcgtcgaraaacgagatgggagacgtgttgtatttgatgtggacaagattgacaaggctctcyacamggcrgctgacaaggttatggatgtgacacccctggttgaaaaaygcctcaatgatctgactgagmgaattattacagaaattcatagtcgctttccacagggaattaagatttacgaaattcaaaatatcgtagaacatgaactccttgaagccaaagaatatgcgctggctgaggagtatattacttatcggacacagagggattttgagcgctcaaaagcgacggatatcaactttagtattcataaacttctcaacaaagaccagacagttgtcaatgaaaaygctaataaagacagtgatgtctttaacactcagcgtgatttgacagcagggattgttgggaaatcaatcggactgcaaatgcttcctaagcacgtagccaatgcccaccaaaagggggatatccactatcacgatttggactacagtccctatacccctatgaccaactgytgtttgattgattttaagggtatgttggaaaatggttttaagattggaaatgcagaggtagagagtcccaagtctatccagactgcgacagcacagatttctcaaatcattgccaacgttgcttctagccagtacggtggctgttcagctgaccgtatcgatgaaattttggcgccttatgcagagaagaaytatcaaaaacatctcaaagatgcagaagagtgggtattgcctgaaaaayrggaagattacgcttggaagaaarcgcaaaaggacrtctacgatgccatgcaatctctygagtatgaaatcaatactctcttcacttcaaatggacaaacaccttttacttcgytaggttttggtctgggaaccagtcgttttgaacgagaaattcaaaaagctattttaaacattcgcatcaagggtcttggttcagaacaccgtacggctatctttcctaaacttatyttyackctkaaaagaggcctyaayttagaggaaggaactcccaactaygacatcaagcagttggctctwgagtgtgcaaccaarcggatgtatccagaygtyttrtcttaygataagattgttgayttgacaggwtcyttcaargtkcctatgggytgccgttctttcctycaaggrtggaaggatgaaaatggtgtagaagtcaattcaggtcgcatgaatctgggtgttgtgacggttaatctgcctcgtattgctcttgagtctgaaggtgatatgaataagttctgggaaatcttcaacgagcgaatgaatatcgcagaagatgctcttgtttaccgtgtcgaacgcactaaagaggcgacaccagcraatgctcctatyctttatcagtacggtgcttttggccatcgtctaggtaaagaagaaagtgttgaccagctctttaagaatcgtcgkgckaccgtttcgctgggctatatcggcttgtatgaagtagcgacagttttctttggtaacagctgggaaagtaatccagatgctaaggaattcacgctagacatcattcacgatatgaaacgccgtgtagaagagtggtcagaccaatatggctaccatttctctatctactcaacaccatccgaaagtctgacagaccgtttctgccgactagatatagacaagtttggctctattcctgatatcacagacaaggaatactacaccaaytctttccactacgatgttcgtaaaaatccaacaccgtttgaaaaattrgactttgagaaagtctatccrgaagcaggtgcgtcaggtggtttcatccattattgtgagtatccagtccttcagcaaaatccaaaggccttggaagctgtctgggattatgcttatgaccgtgtaggctatctaggcaccaatactccgattgaccgttgctacaagtgtgactttgaaggggattttgaaccaactgagagagggtttgcttgtccaaactgtggcaatagcgaycctaaaacagtagaygtkgtkaarcgracttgtggctayctwggyaatcctcaagcragaccratggtyaacgggcgtcacaaggaaatcgctgcgcgtgtcaaacatatgaatggttcaacgattaaaatagctgggcatcaagtaacaaattarctaat

SEQ ID NO: 2059 - DNA, 1536 bp, Streptococcus pneumoniae
  misc_feature (1)..(1536): tiling:Spneumo1:WAN024CK6; Cluster includes WAN0242WR SP04 61||15900377|NP_344981.1|436302..437831|-|1530 bp|transcri ptional regulator, putative|S.pneumoniae|TIGR4|NC_003028.1 |ORF|010
atgctaaacaaatacattgaaaaaagaattacagataaaattaccattttaaatatattattggatattcggtctattgaactagatgaactgtctactttaacttcattacaatctaaaagtctcctaagcattttgcaggaattacaagaaacattcgaggaagagttgacatttaatttagatacgcaacaagttcaattaatcgaacaccattctcatcaaacgaattattacttccatcagctttataaccaatcaactattttaaaaatactccgcttctttctactacaaggtaatcaaagctttaacgaatttacacaaaaagagtatatttccatcgcaacaggctaccgcgtacgacaaaagtgtggcttgttactacgttcagtaggtttggaccttgtgaaaaatcaagtagttggtcctgaatatcgcattcgttttttaattgcactcctccagtttcattttggtattgagatttatgatttgaatgatggaagtatggattgggtcacacatatgattgtgcagtctaattctcaactcagtcatgaactgttagaaatcacacctgacgagtatgttcattttagcatactagtggcactcacttggaaacgtcgggaatttccacttgagttccctgagtccaaagagtttgaaaaattaaaaaacctctttatgtatccgattttgatggaacattgccaaacttacttagagccacatgccaacatgacttttactcaggaagaactggattatatctttttggtttattgttctgctaattcttcgttttccaaggacaaatggaatcaagaaaaaaagactcatactattcaactgattcttcagcatacaagaggaaagcatctactatccaagttcaagaatatcttaggaaatgacatttcgaattctctttcttttttaacagcactgactttcttaacaagaacgtttttgtttggtttacaaaatctagttccctattataattattacgaacattatgggattgaaagcgacaagccactgtatcatatttcgaaagcaattgttcaagagtggatgactgagcagaagattgaaggagttatcgaccagcatcggctgtaccttttctcactctacttgacagaaaccatcttttcctcactacctgctatcccgatttttatcattttaaataatcaagcagatgtaaacttaataaagtccattattttacggaattttactgacaaagttgcctctgttacaggatacaatattctaattagtcctcctccttcagaggagcatttgacagagccattgattattattacaacgaaagaatacctgccttacgttaaaaagcagtatcccaaagggaaacatcactttttgacgattgccttagatttgcatgttagccaacagcgtctcatctatcagacaattgtagatatccgaaaagaggcttttgacaaacgggtcgcaatgattgctaaaaaggctcactatttgttactaactaat

SEQ ID NO: 2060 - DNA, 643 bp, Streptococcus pneumoniae
  misc_feature (1)..(643): tiling:Spneumo1:WAN024CEC; Cluster includes WAN023RVA cont ig_1609_70||||58178..58819|-|642 bp|Glimmer 2.02 orf predi ction|S.pneumoniae|670|WAN01UDCD|ORF|001
atgctaacatatatagtargatgttagcattttrtttcyaagaaaggagaatgatatggttgataaaagagaraaactgatgaactctttcaatcagtatggttttttaacttttaaacaagtaatagatgaaaatttacactacaaaaccttattraaaatgsttrcagaaggaaaaatcgatgctgaagaaaaaggsttatatcgcttacctgatatttatttagatgagtggtttgtccttcagtatcgatttccaaagggaatcttttctttggagacagcactttggttacatggtttatctttgactatcccttttaayatgacgatgagttttccttatggtacgaataccaaaaacattaaggaagcagatatatgtcctattattttacgytctcactatagtgarggaattattgaaatwgagcgycttcctggtcaatttattaaagtttatgaagttgaacgagttttggtygartgtctawgmccagytmwtcaggtggatcttcaaattattgcaccagcrtttaaraaatattttcaacaraatmaaattcatttacacaaattattttattatgcccagytatttaaagtaactgataagttacaatcttatacggaggtrctatct

SEQ ID NO: 2061 - DNA, 144 bp, Streptococcus pneumoniae
  misc_feature (1)..(144): tiling:Spneumo1:WAN024DL3; Cluster includes WAN0244OD spr0 181|orf47|15902225|NP_357775.1|189340..189483|+|144 bp|orf 47|S.pneumoniae|R6|NC_003098.1|ORF|101
atgctaactaaggaagaagtgaatgatatgattgagttcaaacagacacatttacaccgctttcgggaaattgaaacctttgtgaaactatgcaaaaaatcactcaaacagccatcgcaagctgacaatcctaggactttttga

SEQ ID NO: 2062 - DNA, 438 bp, Streptococcus pneumoniae
  misc_feature (1)..(438): tiling:Spneumo1:WAN024DC3; Cluster includes WAN02443N spr0 927||15902971|NP_358521.1|912753..913223|+|471 bp|Conserve d hypothetical protein|S.pneumoniae|R6|NC_003098.1|ORF|111
atgctaagagatttrmragaaacwgatgtgaaagckatatgtgacatcaaccaagagrctttgggttatacttttagtccagaggaaacggctagccaactagctagactgtctcaggattcccatcatttcctacttggctatgaggatgcagctaatcatgtcttacttggatatgtccacgctgaagtttacgaatcactctattccaaagcaggatttaatatcttagctttagcagtttcacctcaagcgcaaggtsaaggtatyggtaaaagtttactacaagggttggaasaagaagcmaaaagatgtggttatgggtttatccgcttaaattctgccaatcatcgtctgggtgctcatgcattttatgaaaaagttggctatacttgtgataaaatgcagaaacggtttattcgcatctktytarctaat

SEQ ID NO: 2063 - DNA, 1385 bp, Streptococcus pneumoniae
  misc_feature (1)..(1385): tiling:Spneumo1:WAN024C7I; Cluster includes WAN0244MM spr0 244|bglA|15902288|NP_357838.1|238727..240106|+|1380 bp|6-p hospho-beta-glucosidase|S.pneumoniae|R6|NC_003098.1|ORF|11 1
atgctaagatttccaaaggattttgtctggggatcctctacttctggaccgcagacagraggacgtgtagctggtgacggtaagggagacaatctctgggatkactggktccaagtggagccaaatcgytactataatgggattggttcagataagacatcgactttttatgaaaattgggagcgggatattgagcttttgttagagactggtcacacagyctttcggacttctattcagtggtcacggatttttccacaaggctgtggaaaagtcaacmctcaaggtgtggatttttatcgtaaggtctttgaggctattaaggctaaaggaattcgtctgttagtcaatctctatcattttgatttaccttttgcccttcaagagkatggtgatggttgggaaaataaggcgacagtctcagcctatgaagactatgctcgtttttgttttgagacttatggagatttagtggatcaatggattacctttaacgagcccatcgttcctgtagaatttggttatttttatgatgcccattatccacataaggtggatgcagaggcagctgttaaggtagcctatcatacacaattggccagcagccgggctgttaaggcttgccatgaacttttgcctgattccaagattgggattgtcctcaacttgacaccggcttatccacgtagccagcatcctgctgatgtcaaggcagctcgtattgcggcmctttttcaggcccaatctttcttagatccatctgtcttggggacttatccacaggagttggtagaaatcttgcatgaacacggtcttttacctgatgctacagaggaagagttggaactcattcgtgataatacggtggacttccttggtgtgaactactatcaacctttgcgtgttatggctcctcgatttgctaagcatccagakagtccactcttaccagaacatttttacgagccttatgtgatgcctggacgtaaaatcaattctcaycgtggttgggagatttatgagcaagggatttatgacatcgcccaaaatatcaaggaaaattatggcaatattgagtggatgttgactgagaatggtatgggtgttgaaggggaagaaaaattccgtcaagatggaatgattcaagatgattaccgtattgactttgtaaaaggtcatcttcgtgaacttcaccgtgccattgaagatggtgccaactgtaagggctacttgatttggacctttattgactgctggtcatggctcaacagctataaaaatcgctatggtttggtcgaattagacttggaaacgcaagaacgtcgtctgaagaaatcaggccactggttcaaagaattaagcgataataatggattttaactaat

SEQ ID NO: 2064 - DNA, 114 bp, Streptococcus pneumoniae
  misc_feature (1)..(114): tiling:Spneumo1:WAN024BDC; Cluster includes WAN023SHD NC_0 03098.1_2489||||1929592..1929720|-|129 bp|Glimmer 2.02 orf prediction|S.pneumoniae|R6|NC_003098.1|ORF|100
atgctacasttaaaattagtaaaacaagaaatagaagctgaaaagccagcatctgtagaagcttggatcatttccgtcaaattaaaaaaggttgctaccgacatatatagattc

SEQ ID NO: 2065 - DNA, 125 bp, Streptococcus pneumoniae
  misc_feature (1)..(125): tiling:Spneumo1:WAN0249XI; Cluster includes WAN024EB5-rc R 6.IG_1491||||1430518..1430642|-|125 bp|Between spr1444 (co bQ) (+ strand) and spr1445 (pepQ) (+ strand)|S.pneumoniae| R6|NC_003098.1|IG-rc|110
atgctaccttctttctacccctctattttggcaaaaaatgagagaaaatgcaagggagaagggtaaaagaaaagacaaaaaactccgacaagataacggagttctttgatatcattttcctttgt

SEQ ID NO: 2066 - DNA, 1275 bp, Streptococcus pneumoniae
  misc_feature (1)..(1275): tiling:Spneumo1:WAN024CYF; Cluster includes WAN024405 spr1 053|pyrC|15903097|NP_358647.1|1049060..1050328|-|1269 bp|D ihydroorotase|S.pneumoniae|R6|NC_003098.1|ORF|111
atgctactaatcaaaaatggtcrtgtaatggatccyaagtctggtttggatcaagwytgtgatgtyttagttcaagatgggaaaattatcaaaattgcgyctgagatcacggaagaaggagcagaaacgattratgctactggtcwtgtggttgctcctggyttggtcgatattcatgtkcatttccgtgaacctggtcaaacacataaagaagacattcataytggtgccmtrgcagccgctgcaggtggttttamtacygtygtcatgatggctaataccagtccaaccatttcagacgtggagactttgcaagcagttctccagtcagctgccaaagagaagattaatgtcaagacagttgcgaccattactaaaaactttaatggtaaaaacttgactgactttaaggcrctcttagaagctggtgcggttggtttctctgatgacggtattccgcttgagagcagtaagattgtcaaggaagccatggaggaagccaaaaaactcaatacctttatcagccttcatgaggaagatccaggtttgaacggtgttcttggctttaatgaaaatattgctagagaacatttccatatctgcggtgctactggggtggctgagtacgctatgatggcgcgtgatgtcatgattgcctatgcaactaaagcccatgttcacatccagcatttgtctaaggaagaaagtgttaaagtagtggagtttgctcaggggttaggtgcagaagtcacagcagaagtagcgccacagcatttctctaagacagaagcacttcttttaacacaaggtagcaatgctaagatgaatccaccgcttcgtttggaatcagaccgtcgtgccgttatcgaaggtctcaaatcaggtgtcatcacagttattgcgactgaccacgcgcctcatcatgtagatgaaaaaaatgttgaggatattaccaaagcgccatctggtatgactggcttagaaacatccctgtctctcrgcttgacctatttrgtagaagctggtgagttgagcttgatggaattacttgaaaaaatgacatacaacccagccaagctttacaactttraagcaggttacttggctgagaatggtccagcagatatcactatttttgatgccaaggctgaccgcyttgtggactcccattttgcttccaaagcagctaattcaccattcatcggtgaaaccttaaaagggcaggttaaatataccatctgtaagggacaaatcgtctatcaagctykaactaat

SEQ ID NO: 2067 - DNA, 900 bp, Streptococcus pneumoniae
  misc_feature (1)..(900): tiling:Spneumo1:WAN024F8M; Cluster includes WAN0243M1 spr1 562|natA|15903605|NP_359155.1|1542329..1543222|-|894 bp|AB C transporter ATP-binding protein - Na+ export|S.pneumonia e|R6|NC_003098.1|ORF|121
atgctagaagtaagaagtctagagaaaagttttggmtccaagcaagttttgtttggtattgactttcaagcgcgaccaggtcgtattttgggactagtcggaaaaaatggtgctggaaaaacaacgattttccatagtattttraaattcctagaatatcagggagaaatcggtctggatggtcaggatattcgtcaggagayctatgctcggattggttatctgcctgaagaacgcagtctcatgcctaaattgacagttcttgaacaagttcgctacttggcgactctaaaaggcatggatgccaaagaagtcaaagaaaaactccctcaatggatgaagaggttgraagtraaaggaaagctgacagataaaatcaagagtctgtcaaaaggaaatcagcagaagattcagctcattattactctgattcatgaaccagacctgattatcttggatgagccttttagtggattggacccagttaatacagaattgctcaaacaagtcatttttcaggaaaaagagcgcggagcaaccattatcttttctgaccatgtcatgaccaatgttgaggaactttgtgacgatattctgatgatycgagatggccgtgtggtcttgcacggaccagttcaggatgtccgcaatcaatacgggaaaacgcgtctctttgtttcaagtgaacgaagcaaggaagaattggaaaatcttcctcatgtcaaacaggtgagcttgaccaaacaaggcagttggaaattgattttggaggatgagagcgctggaagggaactcttcycaatcttgactcaaggtcaatatatcgcaacatttgaccaacaagcgccaactatcgatgaaatctttaaactagaatcaggagtggaagtaykaactaat

SEQ ID NO: 2068 - DNA, 81 bp, Streptococcus pneumoniae
  misc_feature (1)..(81): tiling:Spneumo1:WAN024GGL; Cluster includes WAN023Y1Z AL44 9935.1_95||||77260..77340|-|81 bp|Glimmer 2.02 orf predict ion|S.pneumoniae||AL449935.1|ORF|000
atgctagacagaagaatggggaacttggataggaaaaatagattgagaaaggaggttagaagagatgattattacaaaaat

SEQ ID NO: 2069 - DNA, 203 bp, Streptococcus pneumoniae
  misc_feature (1)..(203): tiling:Spneumo1:WAN024B4I; Cluster includes WAN0243GW spr1 748||15903790|NP_359340.1|1718982..1719179|-|198 bp|Hypoth etical protein|S.pneumoniae|R6|NC_003098.1|ORF|101
atgctagagatatggaaatatcgtccttttgtatctgagttttggaatgattttaaaaataatcatgataaacaatttgtagatycgatttctctttatttgaccttaaaagatgatgatgacccacgtatagaggaagagagtgaagcactagaaaatatgatattacagtatctgggagaagatgatgccagctaactaat

SEQ ID NO: 2070 - DNA, 1457 bp, Streptococcus pneumoniae
  misc_feature (1)..(1457): tiling:Spneumo1:WAN024CRU; Cluster includes WAN0243EJ spr1 833|bgl2|15903875|NP_359425.1|1807407..1808858|+|1452 bp|B eta-glucosidase|S.pneumoniae|R6|NC_003098.1|ORF|111
atgctatactttatgtatagaataatagaaaggaggttgagcatgaaaaaaaagttagtatttcctaatctgttttggtggggrgcwgcttctagcggacctcagacagaaggtcaatatggaaaagtacatgaaaatgtgatggactactggttcaaaacgcatccagaarattttttcgataatgtcggacctcttgtagccagtaacttttttcatacttacaccgaagatttccacttgatgaaggaaattggagttaattctttccgcacttccatccaatggagtcgactcatcaagaatttagagacaggtgagcctgatccaaaaggtattgctttctacaatgccatcatkgaagaagctaaaaagaaccagatggatcttgtgatgaatttacatcattttgatttaccagtggaacttcttcaaaaatacggtggttgggaaagcaaacatgtagtggagttattcgtgaagtttgccaagactgctttcacatgctttggagataaggttcattactggacaactttcaatgagccaatggtcattccagaagcaggrtacttatatgctttccattatccaaatctaaaaggaaagggaaaagaggccgtacaartcatctataatctaaaccttgctagtgcaaaagtgattcaactatatcgctcattagracttgatggaaagattgggattattttaaacttgacacctgcttatccaagaagtaattctccagaagacttagaagcaagtcgatttacagatgacttctttaacaaagtcttcttgaatccagctgttaaaggaactttcccagaaagattggtaaaacagctagagagagatggcgtgttatggagtcataccgaaaaagagcttcaactgatgaaatcaaatacggttgattttcttggagtaaactactaccatccaaaacgtgttcaagcacaagcaaatcctgaggaatatcagacgccctggatgccagaccaatacttcaaagagtatgaatggcyggagcgtcgcatgaatccatatcgtggttgggaaatttttccgaaagccatttatgatattgctatgattgtgaagraagaatatgrtaatatyccatggtttatcagtgaaaackgaatgggtgttgaaaacgaagcacggtttatcgrtgaaaatggagttatcgatgacgtgtatcgtattgaattttatgaagaacatttaagatggctacataaagccattgaagagggaagtcactgttttggataccacgcttggaccgcatttgattgctggtcttggaataatgcatataagaatcgttacggatttatctccgttgatttagaaacgcaaaagagaaccatcaagagmtcaggaagatggtatcgcaaagtaagtgacaataacggttttgaagtagaaattgaggagtaactaat

SEQ ID NO: 2071 - DNA, 252 bp, Streptococcus pneumoniae
  misc_feature (1)..(252): tiling:Spneumo1:WAN024GBX; Cluster includes WAN023LQD 3150 07_1371||||726473..726724|+|252 bp|EGAD orf prediction|S.p neumoniae|R6|NC_003098.1|ORF|110
atgctatcaaacgtatacgtttcgcgatcttctacgtcacgaagggtaaagattgggccgttttcttcgtcgtggctgtacgcaacttctgcaacaacaactccttcgcgttcaaaattacgttttaaatttccgccatcgtttgccattgcttcaaggcggttgatgattctaaccaaatgtgattccattttgattctccttcatttcttatcgttactattttaccataaaggaggccaacttgactag

SEQ ID NO: 2072 - DNA, 216 bp, Streptococcus pneumoniae
  misc_feature (1)..(216): tiling:Spneumo1:WAN024CM2; Cluster includes WAN0242OO SP07 74||15900668|NP_345272.1|731417..731626|-|210 bp|hypotheti cal protein|S.pneumoniae|TIGR4|NC_003028.1|ORF|021
atgctatccgtgaatactattttagaaaaattttataaagaacaccaagtcaaacccttcatatcgcctgaacgagakttggatacttggcttctaagtcccaagcccgttcccaagcgaaatatggacttattagtagatgattcactagcaggagatatcattttactatggagaatccagtttggtacttttaccactgaaacaykaactaat

SEQ ID NO: 2073 - DNA, 597 bp, Streptococcus pneumoniae
  misc_feature (1)..(597): tiling:Spneumo1:WAN024BEI; Cluster includes WAN0244PD spr0 145||15902189|NP_357739.1|153770..154366|+|597 bp|Hypothet ical protein|S.pneumoniae|R6|NC_003098.1|ORF|110
atgctatggctggattcttttcagtctacttatactcttcgaaactctcttcaaaccacgtcagcttcaccttgccgtagtacggttactgacttcgtcagttctatccacaacctcaaaacggtggttcaagctcctgtggcagctattgctatgacggtttttctaatcaacttgcgtctctttttgttgagtttacacgcatcgacttatttccgtcataccagtctttggtacaatatcggtatgtctagtatcttgacagatgagacctatggcgttttgatgggtgaattggcccatacagacaaggtaaatcctatgtggatgcacggaaacaatcttaacagctatgtggcttggtttgtggggacagtagtcggaacggctctgggtggcctgctaccaaatccagaaatctttgccttgattctttcaagcgtagtgacaggtaaggttgggagccttcctcaaattaaatggctrgacttcttagccgtctttccaacagcttgggtagcctttcgctaccgcaatctagtcggaacagttctctttggagtggtcttgattgccatcttgcgtttggtcttttaa

SEQ ID NO: 2074 - DNA, 1961 bp, Streptococcus pneumoniae
  misc_feature (1)..(1961): tiling:Spneumo1:WAN024DJ3; Cluster includes WAN0244JH spr0 357||15902401|NP_357951.1|355553..357508|+|1956 bp|Conserv ed hypothetical protein|S.pneumoniae|R6|NC_003098.1|ORF|11 1
atgctattaaccaaacgagaagaacaattattgaaggctttcctacatgtagggaagctttcaatgcaagatatgactgaaatcttacaggtttcatctagaacaatttatcgaactttatcagatttgacagatagcatggagcaatatggaatcgaaataacraagcatgggaaatactatattttgactggagagttggatgatttgccgacagaacttgaagtgttagttgagtatagtccccaagaaagacaagagttgattacctatcgccttctgactgagagyggttttgtcaccaatgaagcattgcaagagtgcacgaaagtcagtaatgtaactattattcaggatatttcagatattgataagcgtcttttagactttgatctgaaaattgaacgacaaaaaggttatcggatttctggtgattcagttggtaagagaagatttttggctattttactgacaaactgtatctcagtagcagatttttcaaccggtaattttgggagctttgatattttagaagcagatagaactrggctggccagtcagattgttaataagcaactgtcaggttttccagatatggatgctaggatgaagatgttttttgcgatcttgttatctcttataggtcaggagcaaaacattgaaaattcacctaatactagtaagcaggctttggaaatttctcaaaaaatttttcaarcttactctaagcagactgcacaattttatagtattcaggaaattatctattttgcgagcatcttggatgaattaatcattaaacgtcaggacaatccgctctttacggagaaatttgatggtgaatttttctacaatatttcaaatctgattgatacggtttccatgtataccaagattgacttttttaaggacaaggttttattcaattttcttttccatcatattcggctcagtttaggcgtccctatcctttttcagggtgaaaatttgccagaatctrtccagattttagttgaaaggaataaatttctttatacagtcatcagtcttttagtgaatgatatttttccgaaatatcttcatacagagtatgagtatggcatgattgccctacattttatctctagcttaggccgtagtccagagatttatccagtccgtgttttgcttttaacggatgaacgtcgggtcactagagatttattagtcagtaaaattaagagtgttgctccttttgtagagttgatagatattcartctctagtagattaccacagtattgatctcagtcagtatgattatattttatctaccaagccgctgastaatcaggaaatcgrtgtaatttctagttttccaaccgtcaaagaattgcttgaattacaggaacgacttcagtatgtacaggcacatcgtacaattgtcgcgcgtgatgctatcgctccagagaaaagttatgacttgcaagattatttaatatctagtagtcagcttttgagtcaattygagttggttcaattggagaataatcaatcatttgagcacacggtagaacaaatcatccaatatcagaagaatgtgagtgacagagmttacctaacaagaaaattgttatctcacttccagaatagtcctatggctattcctaatactggtctggtgcttttacatagtcagtctagcaaagtaacaacaaatagttttactatgtttgaactcaaactacctatctccgcattgtcaatgaaacgagagraagaagaggtcaaaaggtgtctgctaatgctaatgtctaaagaagctagcgaggaagckagagatttaatgacagctatyagtcagtcgattattgaaaatcatctttatacagagatttacaagacgggaaatcaatccattatttatcagatgctaaatactatttttaacgaaaaaattaagaaattggagaactaactaat

SEQ ID NO: 2075 - DNA, 780 bp, Streptococcus pneumoniae
  misc_feature (1)..(780): tiling:Spneumo1:WAN024DVS; Cluster includes WAN0243AT spr1 968|PTS-EII|15904009|NP_359559.1|1959729..1960502|-|774 bp |Phosphotransferase system sugar-specific EII component|S. pneumoniae|R6|NC_003098.1|ORF|111
atgctattcacacaagcattactggtgacattagttgggattattgccactattgactataatggaccgttatttatgattcaccgtccgttagttacaagtgcaatggttggcttagtmttaggagatttcacccaaggtgttcttattggttcagctcttgaattaacttggctcggtgtaacaggtattggaggttayactccaccagatactatttcaggtgcgattattggtactgcatttggtattttrtctggtcaaggagaaactgctggtatcgctatagcagttccaattgcagttgctacycaacagttggatgttcttgcaaaaactttagatgtttattttgtgaaaaaagctgataatgatgctaaaaacggagattattcaaagatcggtttttatcattattcaagtttggttttaatcackttatttaaaattgtaccaattttcctagctattatgcttggaggggaatatgtggcagacttgtttgctaaggttccaccaatcgttatgcagggacttaactctgcaggtgctttactaccttcaattggttttggtatgcttttaaatatgatgctcaagaaaaatatgtgggtattcttgttgattggattcatttgttctgtgtatggaggaatgtcaaccattgggatctcactagttggtattgcggtagcatacttctacgatatgattggaagyaaaccacaagaaacaacttcaagtagtgatgttgaggaggatcttgatctaykaactaat

SEQ ID NO: 2076 - DNA, 330 bp, Streptococcus pneumoniae
  misc_feature (1)..(330): tiling:Spneumo1:WAN024CP5; Cluster includes WAN023LFO 3132 86_1956||||1057257..1057586|+|330 bp|EGAD orf prediction|S .pneumoniae|R6|NC_003098.1|ORF|110
atgctcactggcattgccccatccatcattagaatgtggacgttcgtcagggtgttctacgtagtacttaatcgtcgcaaacaaatcttccaaggtatagccatttggagctttgtatgtgtgatcatcaaaccaagcaaatttaatattatggtaatgatccttatgaggaataatcaaattaccgtttttaacctcaactgtatgctcaaccatatatggaagtcgaacgagtggaattcgtttttcccctttcacacgattgtaaatagctgctgcactatctccagttggatttgctttaacatctgcgtctggagatggaggtag

SEQ ID NO: 2077 - DNA, 174 bp, Streptococcus pneumoniae
  misc_feature (1)..(174): tiling:Spneumo1:WAN024F2Y; Cluster includes WAN0242S7 SP06 35||15900541|NP_345145.1|599591..599758|-|168 bp|hypotheti cal protein|S.pneumoniae|TIGR4|NC_003028.1|ORF|010
atgctcagaatgattgtctctaaacaatacctgctcttttacctcattcatgaaaaagaagtccataccctgagaattatcaactcacgcatcgactacctaaaccaactcgaccacctctttcgtacatgtaggaaactattttcctcacaaataatctcattactaactaat

SEQ ID NO: 2078 - DNA, 318 bp, Streptococcus pneumoniae
  misc_feature (1)..(318): tiling:Spneumo1:WAN024C9Y; Cluster includes WAN023M9L 3143 95_338||||179641..179958|-|318 bp|EGAD orf prediction|S.pn eumoniae|R6|NC_003098.1|ORF|110
atgctcagagaacaacaactcmgagtcgtccatggtgtcgataatgacataaccttctgcaatacgaagggcagcctcaatggaatcaaagagacgactacgaatgccctccttgataacaatacggtcaaccacgacatcgatattgtgttgcttgctcttagacaactctggcacttcggtcacatcatagacttccccatccacacggacacgaacatacccgtctttctgaaccttctcgataacactcttatgttggccttttttcttgcggatgacaggagccaagatctgcaagcgctggcgttcaggtaa

SEQ ID NO: 2079 - DNA, 1325 bp, Streptococcus pneumoniae
  misc_feature (1)..(1325): tiling:Spneumo1:WAN024FWH; Cluster includes WAN0243W2 spr1 201||15903244|NP_358794.1|1196371..1197690|-|1320 bp|Hypot hetical protein|S.pneumoniae|R6|NC_003098.1|ORF|221
atgctcagattagtttactatcaatttttacataataagaaacaatggttaggcgtttcaccagtaatttttgtttcgagtttagttatgggattggctgttaatggggtaattaatgttgagaataattcgcaagtatttgtcggacttccagatcctaaaccaatttttatgtttccgatagtattcggaggagtaacattattctttgtgctctctaacataataaatatgttggttgaaatttttagagatgattacgaacttytggaggtgttgggagcaagtckccttcaactatcatttcttgtggggggacagatttttatcatttcctcgattattagttttattgcatatctatgctctatatttgttacgtcaaattattattattttttacaatactttttcggggaaaatatattacctgatatccaatttcaaacgagtgctgttggatgtatcattacagtagtgttgatttcatttttagcctttctaagtggttgcttttatacgttcaagaagattagaaataggaagagttctaaaataaggcatgttctttcaatagtaaaaagaatactgctattggctggttttagtgttatctggttgctttctttgcaacaaattttccaagatagcacaattttagcgaaggcccagataatattcaatattgtaatcttagatattgtgattatttatcaattatctccttttatacagtcatgttttatcaaactactttctataattatatttagaaataattttatgttcattgtttcgaagtggaatttactatatygtaagycttatataaaatctatcagtgctgcaattacaggagctatattactaatttctagttttcaaatgatttctcagaatatactatctcaatttcaagatgacagtgatttagagctaaaagtrgcatttattgtctatgtaggagcaccaattttgatagtacttgcaaatattatttcaattgcatttttgtcatcgcatcaagaaaggattgagattcagcaatttgaaattttaggaacttctaattaccagatggttaagattaaagttggtgaggctatatttttgacatttgttacttcattaattgcatttttacttaacattaaaattatggctttaatatactactctttagaggatattttaatagatgatatgaatcttttggggttaatacttccaaattttatagtrtctattattttatttattttaatatttattactaaaagttcctattttatctttaagaatgcaaaaattatttcttaactaat

SEQ ID NO: 2080 - DNA, 303 bp, Streptococcus pneumoniae
  misc_feature (1)..(303): tiling:Spneumo1:WAN024FIC; Cluster includes WAN023KYK 3144 70_2682a||||1428737..1429039|-|303 bp|EGAD orf prediction| S.pneumoniae|R6|NC_003098.1|ORF|110
atgctcatatttgaggatgccttggcagtcaggacagagaatcccttcggtattgtagtgagccagttgggctggtccyttttccaagtcaaaaccaaaatactctatagggtttggaatagttggcttgtagaaaagtggactgtctccgttaaggagaacagtagcagttggaactttycgaatggcatccaatatcatgttataggtagtatagatttcaccgaaacggtccatctggtcacggaagatattagtaatgacaaaaagactaggctggatatagtcacagatacgagatag

SEQ ID NO: 2081 - DNA, 267 bp, Streptococcus pneumoniae
  misc_feature (1)..(267): tiling:Spneumo1:WAN024CHX; Cluster includes WAN023MFN 3144 19_56||||31678..31944|-|267 bp|EGAD orf prediction|S.pneum oniae|R6|NC_003098.1|ORF|110
atgctccagcaagagcttaatacccgtcttttcaccgactttggtcaccccagggatattatccgacttatcacccatgagcgccttgagatcgataaactgagctggtgtgaggcccatttcttccatgaggtaatctggcgtaaaggcctcaaactcagccacacctttcttggaaatttcaaccaccgtatgctcatccgtcagctgaatcaaatccttgtccccactgacaatrgtaatatcaaaaccatcctgctctgctag

SEQ ID NO: 2082 - DNA, 75 bp, Streptococcus pneumoniae
  misc_feature (1)..(75): tiling:Spneumo1:WAN024DPV; Cluster includes WAN023SL9 NC_0 03098.1_939||||736215..736289|-|75 bp|Glimmer 2.02 orf pre diction|S.pneumoniae|R6|NC_003098.1|ORF|100
atgctcgctagaccaactatctttttcccactgcttttagggtgggktcaattcctttctttcttaattttgatt

SEQ ID NO: 2083 - DNA, 1265 bp, Streptococcus pneumoniae
  misc_feature (1)..(1265): tiling:Spneumo1:WAN024F65; Cluster includes WAN0244MO spr0 242|eep|15902286|NP_357836.1|235502..236761|+|1260 bp|Dete rminant for enhanced expression of pheromone|S.pneumoniae| R6|NC_003098.1|ORF|111
atgctcggaattttaacctttattctggttttygggattattgtagtggtgcacgagttcggkcacttctactttgccaagaaatcagggattttagtacgtgaatttgccatcggtatgggacctaaaatytttgctcacattggcaaggatggaacggcctataccattcgaatcttgcctctgggtggctatgtccgcatggccggttggggtgatgatacaactgaaatcaagacaggaacgcctgttagtttgacacttgctgatgatggtaaggttaaacgcatcaatctctcaggtaaaaaattggatcaaacagccctccctatgcaggtgacycagtttgattttgaagacaagctctttatcaaaggattggttctggaagaagaaaaaacatttgcagtggatcacgatgcaacggttgtggaagcagatggtactgaggttcggattgcacctttagatgttcaatatcaaaatgcgactatctggggcaaactgattaccaattttgcaggtcctatgaacaattttatcttaggtgtygttgttttttgggttttaatctttatgcagggtggtgtcagagatgttgataccaatcagttccatatcatgccccaaggtgccttggccaaggtaggagtaccagaaayggcacaaattrccaagrtyggctcacatgaggttrgcractgggaaagcttgatccaagctgtggaaacagaaaccaaagataagacggcaccgactttggatgtgactatttctgaaaaggggagtgacaaacaagtcactgttacacccraagatagtcaaggtcgttaccttctaggtgttcaaccgggggttaagtcagattttctatccatgtttgtaggtggttttacaactgctgctgactcagctctcsgaattytytcagctctgaaaaatctgattttccaaccrgatttgaacaagttgggtggacctgttgctatctttaaggcaagtagtgatgctgctaaaaatggaattgaraatatcttgtacttcttggcaatgatttccatcaatattgggatttttaatcttattccgattccagccttggatggtggtaagattgtgctcaatatcctagaagccatccgccrcaaaccattgaaacaagaaattgaaacctatgtcaccttggccggagtggtcatcatggttgtcttgatgattgctgtgacttggaatgacattatgcgactcttttttagataactaat

SEQ ID NO: 2084 - DNA, 848 bp, Streptococcus pneumoniae
  misc_feature (1)..(848): tiling:Spneumo1:WAN024GB5; Cluster includes WAN02444P spr0 889||15902933|NP_358483.1|878485..879327|-|843 bp|Conserve d hypothetical protein|S.pneumoniae|R6|NC_003098.1|ORF|221
atgctctcatggttagcacgcgttattaaagggattgtaattgctcttggatttatcctaccgggaatttccggaggggttctagcagcaatcttaggaatctatgaacgaatgattggctttctggcccatccctttaaagacyttaaagaaaatgttttgtactttattccagttgccatcggtatgcttctgggaatcggcttattttcctacccgattgaatacctgcttgaaaattatcaggtytttgtattatggagctttgcgggagctattatcggtacagttcctagcctcctcaaagaatcaactcgagaatctgaccgagacaagattgatttagcttggttatggacaacctttatcatttctggattaggactctatgccttaaattttgtcgttggaaccttaagcgccagctttcttaacttcgtcctagcaggcgcactattggcccttggcgtcttggttcctggcctcagyccatcraayttacttttgattttgggactmtatgctcctatgttgactggttttaaaacttttgatytcttgggaaccttctttccgattggaattggtgcaggtgcaactctcatcgttttttcaaaattgatrgattatgccttaaacaactaccactcacgygtctatcatttcatcatcggtatcgtcctatcaagtacccttttgatcttaattccaaatgcaggaaacgctgaaagtatccaatacacaggactttcacttgtcggttatgtcatcatcgccttcttctttgcgctgggaatctggcttggtatttggatgagtcaattggaggataaatataaataactaat

SEQ ID NO: 2085 - DNA, 285 bp, Streptococcus pneumoniae
  misc_feature (1)..(285): tiling:Spneumo1:WAN024GOG; Cluster includes WAN023LPE 3146 69_1427a||||753693..753977|-|285 bp|EGAD orf prediction|S. pneumoniae|R6|NC_003098.1|ORF|110
atgctctccgatgtccttccaacgaatatctgccaactcatggattggtctgtagatgacatttccaagacttgtgaacatcaagaggtgctgggttgtcttggcagattgaacaaaaatcaaacggtcatcatcacgcttgccaatttcttccaaggtggaagccgcaaaggaacgtggactggtacgcttgatgtaacctgccttggtcacgctgacgtaggtatcttcctcagcgataagactagctgtatcaatctcaattgctttcgcagtgtcttctaa

SEQ ID NO: 2086 - DNA, 267 bp, Streptococcus pneumoniae
  misc_feature (1)..(267): tiling:Spneumo1:WAN024GH8; Cluster includes WAN023LXB 3142 50_999||||522632..522898|-|267 bp|EGAD orf prediction|S.pn eumoniae|R6|NC_003098.1|ORF|110
atgctctccttcacctttagcaaaggttggagctcctgctggatgatttttatttgcctctttcaatttttcaataatggcattttttctgtatcttttatattatcaggatttttcactaagattttgtctggatatgtcggtttagcagaaacaatttttactgttacttcttttttattcgaagcacttgtccagtttccagcattatctttagcatttaattttacagtaattcctgaactaggaacttcagtagcaggttga

SEQ ID NO: 2087 - DNA, 246 bp, Streptococcus pneumoniae
  misc_feature (1)..(246): tiling:Spneumo1:WAN024GL7; Cluster includes WAN023M0W 3142 65_833||||445487..445732|-|246 bp|EGAD orf prediction|S.pn eumoniae|R6|NC_003098.1|ORF|110
atgctcttgacgatgaaaggcaaccttttcctcttgaacttccaatttaggagccttttgttgatcagaagycggttgataagtaggttttggaaggactktgttttgtggtgctggtttagcaggttgtggtttttcagcagattcataaacaaaggcataatgagtaaagtgwggtgctgtaaagataacatgactatccgtttgttcaaaagccaattctactgccyctttgccttcaggtaa

SEQ ID NO: 2088 - DNA, 390 bp, Streptococcus pneumoniae
  misc_feature (1)..(390): tiling:Spneumo1:WAN024C5T; Cluster includes WAN023M5N 3153 50_566a||||293457..293846|-|390 bp|EGAD orf prediction|S.p neumoniae|R6|NC_003098.1|ORF|110
atgctctttcttgcccaagtctccccaagcttgaataaaaccacctttttcttgatagcgttcaatcaacttatctgcagctttcaaggttgcttctctagcctctccatctccatttatcttatattcagccatacaagacggtgtgtacaagaagccgagatcatggtgatccaattctactctcttattgacacgatccaggaaagaaagaacatttttatgagcgatgtttttaaatgcatcctgttgactgtattcataagccaaccacagttctcctgtccagaaaccattggtccattccgtgttatccatgattggatagacattatcaaaggtagctggcgtcgggaaatcttccttgaaatagtcaaggttgagttctaa

SEQ ID NO: 2089 - DNA, 698 bp, Streptococcus pneumoniae
  misc_feature (1)..(698): tiling:Spneumo1:WAN024F4V; Cluster includes WAN0243JH spr1 655||15903697|NP_359247.1|1627625..1628356|-|732 bp|Conser ved hypothetical protein|S.pneumoniae|R6|NC_003098.1|ORF|1 11
atgctgaaatgggaagacttgcctgtggaaatgaaatcaagcgaggttgagtcttactaccagcttgtctctaaaaggaagggttcgctgattttcaagcgttgcttggactgggttttggccttggtcttactggttctracytctcccatctttctcatcttgagcatttggatcaagttggatagcaargggccagtgatttacaagcaagagcgtgtgacccagtacaaccgtcggttcaagatttggaagttycgtaccatggtgacggatgcggataaaaaaggaagtctggtgacttctgctaacgatagccgyattaccaaggttggaaatttcatccgacgtgtccgtttggacgaactgcctcarttggtcaatgtccttaaaggtgagatgtcctttgtcggtacacgacctgaagtgccacgttatacagagcagtatagccctgaaatgatggcaaccttgctcttgcaagcaggrattacctctccagccagcatcaactacaaggatgaggacacmatyatcagtcaaatgacggagaaaggtctgtcagttgatcaggcctatgtggagcatgttcttcctgaaaagatgcgctataacctcgcctatctccgagagtttagtttctttggggacatcaaaatcatgtttcaaaccgtgtttgaggtactaaaataactaat

SEQ ID NO: 2090 - DNA, 279 bp, Streptococcus pneumoniae
  misc_feature (1)..(279): tiling:Spneumo1:WAN024FOU; Cluster includes WAN023L4A 3141 94_2435a||||1301003..1301281|-|279 bp|EGAD orf prediction| S.pneumoniae|R6|NC_003098.1|ORF|110
atgctgaacaacaatggagttgtagcctttgagtttgatacggtgtttttctccatctttgtcaaagtagtcaacagtaacgcgggcatggcgaacaacatagccaggcacgttacggtcaacagacaggcaaccttctccttcgccaagagcagcatcttgaacagagtgagagacgatttttggattgtacataatggcttccaaatcgtaggcttcctgtggagtttcgccttcttcaacaatattaggtaccaaaacagcgataatgcgttttga

SEQ ID NO: 2091 - DNA, 156 bp, Streptococcus pneumoniae
  misc_feature (1)..(156): tiling:Spneumo1:WAN024FEH; Cluster includes WAN023QLP cont ig_1313_1||||456..611|+|156 bp|Glimmer 2.02 orf prediction |S.pneumoniae|670|WAN01UEA3|ORF|000
atgctgacatatccaatgactaaaccaatgatgacggcaaaaacagcaatcgcaagcgacatgatttccatgtttttacctcattttattgttattccgaatgacatacattcttttacattctaccataaaaaagtgattttcacaaacctaaaa

SEQ ID NO: 2092 - DNA, 1173 bp, Streptococcus pneumoniae
  misc_feature (1)..(1173): tiling:Spneumo1:WAN024CC6; Cluster includes WAN023RIH cont ig_1565_4||||5079..6251|-|1173 bp|Glimmer 2.02 orf predict ion|S.pneumoniae|670|WAN01UDIJ|ORF|000
atgctgagtctagatcaaatacatttactattgaatactcctgaagatgagtttcatgattttaaacaaaaatggcatcattctaaaactgaattggtgcgtgatatcttaaattttgtcaatacatcacatcatgaagattgttatatcatctttggaattgataatatcactttagatataatcggtgtaaacaatgatgataatagaagaaatgaagaagatctaacagatttactacataaactctttatatcaacaaataatcaaattagaattagcatacaaactgaaactatagacaacaaagaaattgacatcttaattattcatgatacagataaagttcctgtatttttaacaaaagattataagcctaagaaagatactgcattacaaaaaggattaatatatgctagaaatggctctataaatactcctaaagactcctctgctccatttgagttaataaataagttgtttcaaaagtttaatcataccgacttaaatatcaaagagcagtattttcatgttttaaaagactataaaaattggttcttcgttgaaaatgaagacggaagattttttatttataatcctaatcccgatttttatattaaacttaccgacgatgatgcaaatcgtttcaaaactatgccttatagtttaaatcaataccaaaccaatgttgattggcaattagtacaacttcgttatcgacaccttacaattatcgactttatggctttatatttagatcagggaaattgtctagtgccctcccctgatttagaagattttgaatgtggttattctgacactatttattaccactgtttatacaaaaatactttaaaataccaattgctgaaagttttctcttcaatatctggtctcgaaaaatatcctttagatagatttaaaaataatatagtaatttatgatgataaaatagaattggaaaagactcacaacttaataaaaagtaatttttcaacagaagagataatgaagcaacttgaagttacagaaaaagatttcgatttttactataaaaaagctagacawaaaaatcctgattatagtatccaagaaaatcaagtaaatctaactgaattaaacttagttaggttattgaaaagttttcaaaaaacatatcttgataacccacta

SEQ ID NO: 2093 - DNA, 921 bp, Streptococcus pneumoniae
  misc_feature (1)..(921): tiling:Spneumo1:WAN024CVB; Cluster includes WAN0242WM SP04 66||15900382|NP_344986.1|444857..445696|+|840 bp|sortase, putative|S.pneumoniae|TIGR4|NC_003028.1|ORF|010
atgctgataaaaatggtaaaaacaaaaaagcaaaaacgaaataatctcctattaggagtggtatttttcattggaatggcggtaatggcgtatccgctggtgtctcgcttgtattatcgagtggaatcaaatcaacaaattgctgactttgataaggaaaaagcaacgttggatgaggctgacattgatgaacgaatgaaattggcacaagccttcaatgactctttgaataatgtagtgagtggcgatccttggtcggaagaaatgaagaaaaaagggcgagcagagtatgcacgtatgttagaaatccatgagcggatggggcatgtggaaatccccgttattgacgtggatttgccggtttatgctggtactgctgaagaggtattgcagcaaggggctgggcatctagagggaacttctctgccgatcggaggcaattcgacccatgcggtgattacggcacatacaggtttgccaacagctaagatgtttacggatttgaccaaacttaaagttggggataagttttatgtgcacaatatcaaggaagtgatggcctatcaagtggatcaagtaaaggtgattgagccgacgaactttgatgatttattgattgtaccaggtcatgattatgtgaccttgctgacttgtacgccatacatgatcaatacccatcgtctattggttcgggggcatcggataccgtacgtagcagaggttgaggaagaatttattgcagcaaacaaactcagtcatctctatcgctacctgttttatgtggcagttggtttgattgtgattcttttatggattattcgacgcttgcgcaagaagaaaaaacaaccggaaaaggctttgaaggcgctgaaagcagcaaggaaggaagtgaaggtggaggatggacaacagctarctaat

SEQ ID NO: 2094 - DNA, 249 bp, Streptococcus pneumoniae
  misc_feature (1)..(249): tiling:Spneumo1:WAN024DWH; Cluster includes WAN023KE5 3140 65_3606||||1936005..1936253|+|249 bp|EGAD orf prediction|S .pneumoniae|R6|NC_003098.1|ORF|110
atgctgcgaagatttcttgcacataacccaagactactacagcaaacatatttgacggaatcaagtaactatactggcaacagtcatcactcggacgaaaagctgaccaagtcatacctgtcactgcaaagtcaggtccaaagccatcatttaccaaggtgtcttccttacggtccgtatctcggacaaaacgataaggagagttcttgtggtcttgttcmacygtccayagatggagaatttccttag

SEQ ID NO: 2095 - DNA, 472 bp, Streptococcus pneumoniae
  misc_feature (1)..(472): tiling:Spneumo1:WAN024CYE; Cluster includes WAN023LG2 3148 64_1940||||1049639..1049911|+|273 bp|EGAD orf prediction|S .pneumoniae|R6|NC_003098.1|ORF|220
atgctggatgtgaacatgggctttagttgcataggcaatcatgacatcacgcgccatcatagcgtactcagccaccccagtagcaccgcagatatggaaatgttctctagcaatattttcattaaagccaagaacaccgttcaaacctggatcttcctcatgaaggctgataaaggtattgagttttttggcttcctccatggcttccttgacaatcttactgctctcaagcggaataccgtcatcagagaaaccaaccgcaccagcttctaagagtgccttaaagtcagtcaagtttttaccattaaagtttttagtaatggtcgcaactgtcttgacattaatcttctctttggcagctgactggagaactgcttgcaaagtctccacgtctgaaatggttggactggtattagccatcatgacgacagtagtaaaaccacctgcagcggctgcyagggcaccagtatga

SEQ ID NO: 2096 - DNA, 262 bp, Streptococcus pneumoniae
  misc_feature (1)..(262): tiling:Spneumo1:WAN024G3I; Cluster includes WAN023LEZ 3139 24_1988||||1074702..1074947|+|246 bp|EGAD orf prediction|S .pneumoniae|R6|NC_003098.1|ORF|110
atgctggattccagcagtgtattgrctgtctttaaaaaacagtcaattagtcctcacaaacmtaatatactactattgtttgaagaagtcaacagyttktgtttgtttttgttatttattttttactttttttataaaacttctatctcaaaccctaattcttcaacctgattggcttctaagagacaaacattcttcttatcttctaaatgatctccttcttcaaggratgttgacaagccagaccatggttcaaaggtaa

SEQ ID NO: 2097 - DNA, 87 bp, Streptococcus pneumoniae
  misc_feature (1)..(87): tiling:Spneumo1:WAN024CLY; Cluster includes WAN023SCZ NC_0 03028.1_1125||||838413..838499|+|87 bp|Glimmer 2.02 orf pr ediction|S.pneumoniae|TIGR4|NC_003028.1|ORF|011
atgctggatttgaatgagcacaagaaaataaatgaacagacaatattagaattctgtaatgcagaaactgatattgtctctttttat

SEQ ID NO: 2098 - DNA, 384 bp, Streptococcus pneumoniae
  misc_feature (1)..(384): tiling:Spneumo1:WAN024ERT; Cluster includes WAN023OYJ pne6 6_12||||7548..7922|+|375 bp|Type 12A1 capsule operon, Glim mer 2.02 orf prediction|S.pneumoniae||WAN01UCD4|ORF|010
atgctggatttgacgacacataaagtctgtcaaatggccttttctgacggacatacgcatgattttactctcttcaaagaaagtattggacaaagtttgcctgaaacgacgcttgcctttgttgacctaggttatttaggcatcttgaaatttcatgagaatactttcattcctgctaaaaattccaaaaatcgccgcctgagtgaggatgataagcagttaaataaagagatgtcagcgatacgaattgaaattgaacattttaacgctaaattcaagaccttccaaatcatgtcagtcccttatcgtaaccgcagaaaacgtttcgagttacgggcggaattaatttgtgccatcatcaattatgaagtgaacctarctaat

SEQ ID NO: 2099 - DNA, 286 bp, Streptococcus pneumoniae
  misc_feature (1)..(286): tiling:Spneumo1:WAN024GAC; Cluster includes WAN023LOD 3140 38_1481a||||783623..783850|-|228 bp|EGAD orf prediction|S. pneumoniae|R6|NC_003098.1|ORF|220
atgctggcagtctgcttttgtacgataggtctcatcgataaaaggcttgaccacctccatgacaaactcagcatactccacacccttaccaccaaactgctgccctgggataggagattcttggaacttccaagccgcatactcattcatccgccccataccatcattgtcaatagcaacgacaatcatgcgactgatatccggatttcgtttgatagctgggataatcttccatgaatgtccaatgaaagactctttgctattaaaaacattttgcccgtcatga

SEQ ID NO: 2100 - DNA, 228 bp, Streptococcus pneumoniae
  misc_feature (1)..(228): tiling:Spneumo1:WAN024C7G; Cluster includes WAN023M7K 3142 96_466a||||239195..239422|-|228 bp|EGAD orf prediction|S.p neumoniae|R6|NC_003098.1|ORF|110
atgctggctacgtggataagccggtgtcaagttgaggacaatcccaatcttggaatcaggcaaaagttcatggcaagccttaacagcccggctgctggccaattgtgtatgataggctaccttaacagctgcctctgcatccaccttatgtggataatgggcatcataaaaataaccaaattctacaggaacgatgggctcgttaaaggtaatccattgatccactaa

SEQ ID NO: 2101 - DNA, 246 bp, Streptococcus pneumoniae
  misc_feature (1)..(246): tiling:Spneumo1:WAN024GGR; Cluster includes WAN023LWS 3142 47_1028a||||536903..537148|-|246 bp|EGAD orf prediction|S. pneumoniae|R6|NC_003098.1|ORF|110
atgctgttcctgaaaaatggtcttcagctgagtaatatcctctggaatgttttttacgacaacagcttcactagccgcaagatttggcagttctccaggaaaatccaagactggaacaccttctggcaagactgcattttttccacgaatgttaaaaagttgaacaccttccactcgcgcatccaccatcatcaactggagrgcagtttggccattccattggttgacagacaatttaaccgctaa

SEQ ID NO: 2102 - DNA, 260 bp, Streptococcus pneumoniae
  misc_feature (1)..(260): tiling:Spneumo1:WAN024D5C; Cluster includes WAN0243LF spr1 585||15903627|NP_359177.1|1566450..1566704|-|255 bp|Conser ved hypothetical protein|S.pneumoniae|R6|NC_003098.1|ORF|1 10
atgctrctcaagtttacagaagatgcctgggcagattattgctactggcaaaaycargataaraaaacrytaaaaagaatcaataaaytaatcaaggatattcaacgygatccmtttacaggaataggwaaaccagarccactcaaatatgattaccaaggagcctggtcacggcgtattgatgcagaaaatcgcttgatttatatgatggatggasatagcgtggctttcttgtcctttaaagatcattactaactaat

SEQ ID NO: 2103 - DNA, 81 bp, Streptococcus pneumoniae
  misc_feature (1)..(81): tiling:Spneumo1:WAN024DND; Cluster includes WAN023SHZ NC_0 03098.1_2219||||1720265..1720345|-|81 bp|Glimmer 2.02 orf prediction|S.pneumoniae|R6|NC_003098.1|ORF|111
atgcttaaaaagagaaggaaaattggtgcaaattcattttcagactatcttcgtggaagtattcatcaaaatagacaaaaa

SEQ ID NO: 2104 - DNA, 719 bp, Streptococcus pneumoniae
  misc_feature (1)..(719): tiling:Spneumo1:WAN024DG5; Cluster includes WAN0244CF spr0 611||15902655|NP_358205.1|622965..623678|+|714 bp|Hypothet ical protein|S.pneumoniae|R6|NC_003098.1|ORF|110
atgcttaaacggtttctggctttggtatggttgcgttgtcaaatyatcctttccaataagagtattttattgcaagttttagtgccttttgctttcacatatttttataaatatcttatggaaacacaggggaaggtcaacgatcaacaggcattagttcttttgatgatgtgtttacctttttctttkkctttggctgttggaagtcctataactattatcttgtctgaagaaaaagaaaagtacaatttacaaactcttctgttgagtggtgttaaaggmtccgaatacattttatcaackatgtttcttccttttttgctaacttttgtgattatgggaactactcctcttattttaggagttacaattgtacatacttttaattatattacaatcgttcttctaacctctttatccatcattttattctatttattgataggtttaaccgcgaagagccaagtagtagctcaggttatcagtcttcctgctatgattttagttgctttcttaccgatgctatctrgtttggataagacagttgcgaagataacagattatagttttatgggactrtttactaagtttttcacaaaatgggaggrattttcatggaatraaactctaattcctaatctaacactacttatttggattgttcttctattaactttaattacgataactattaggaaaaagaaaatttcttaactaat

SEQ ID NO: 2105 - DNA, 669 bp, Streptococcus pneumoniae
  misc_feature (1)..(669): tiling:Spneumo1:WAN024CH4; Cluster includes WAN023MEF 3144 10_102||||50524..51165|-|642 bp|EGAD orf prediction|S.pneu moniae|R6|NC_003098.1|ORF|110
atgcttaaattctcgcgccaattgcgctcccattctcttacgtgccgtatggacattgacaccgtggatattagaatcagggcgagcaaagtagatatactccatagaacaaaccgccaactgggtatcatctgtatagctgtcatactgaatgccctcgtcatcaatgatcacaatctcacctggcttcaaatcacgaatccactcggcaccaatgacctcaaaagcacaggtttcagaagatacaacaactgctccattagccattttaccaatcgaaagcggtcggaatccatttgggtcaagagccgcaatcaacttgtcctcaaacagcaagatataggcaaaaccacctttgacaaggctgagcgcttccttgattttgcccatcaggctaggattatgactgcgacgaatgaggtgagccaagatttcagagtccgaagtcgcgctgaaaattgctcctctttgttccagttctttcttgagagaggctgcattggtcagatttccattatgagccaarccaaactgcatatcgtgaaaacggaagaggaagggctggatrttatctacagaagcttcgccagcagtcgcrtaacgcacatgcccaatcgcaccagytccygtcaatttatcyaaattagctggatttctgaaaacttctga

SEQ ID NO: 2106 - DNA, 2688 bp, Streptococcus pneumoniae
  misc_feature (1)..(2688): tiling:Spneumo1:WAN024G5J; Cluster includes WAN0242WQ SP04 62||15900378|NP_344982.1|438326..441007|+|2682 bp|cell wal l surface anchor family protein|S.pneumoniae|TIGR4|NC_0030 28.1|ORF|010
atgcttaacagggagacacacatgaaaaaagtaagaaagatatttcagaaggcagttgcaggactgtgctgtatatctcagttgacagctttttcttcgatagttgctttagcagaaacgcctgaaaccagtccagcgataggaaaagtagtgattaaggagacaggcgaaggaggagcgcttctaggagatgccgtctttgagttgaaaaacaatacggatggcacaactgtttcgcaaaggacagaggcgcaaacaggagaagcgatattttcaaacataaaacctgggacatacaccttgacagaagcccaacctccagttggttataaaccctctactaaacaatggactgttgaagttgagaagaatggtcggacgactgtccaaggtgaacaggtagaaaatcgagaagaggctctatctgaccagtatccacaaacagggacttatccagatgttcaaacaccttatcagattattaaggtagatggttcggaaaaaaacggacagcacaaggcgttgaatccgaatccatatgaacgtgtgattccagaaggtacactttcaaagagaatttatcaagtgaataatttggatgataaccaatatggaatcgaattgacggttagtgggaaaacagtgtatgaacaaaaagataagtctgtgccgctggatgtcgttatcttgctcgataactcaaatagtatgagtaacattcgaaacaagaatgctcgacgtgcggaaagagctggtgaggcgacacgttctcttattgataaaattacatctgattcagaaaatagggtagcgcttgtgacttatgcttccactatctttgatgggaccgagtttacagtagaaaaaggggtagcagataaaaacggaaagcgattgaatgattctcttttttggaattatgatcagacgagttttacaaccaataccaaagattatagttatttaaagctgactaatgataagaatgacattgtagaattaaaaaataaggtacctaccgaggcagaagaccatgatggaaatagattgatgtaccaattcggtgccacttttactcagaaagctttgatgaaggcagatgagattttgacacaacaagcgagacaaaatagtcaaaaagtcattttccatattacggatggtgtcccaactatgtcgtatccgattaattttaatcatgctacgtttgctccatcatatcaaaatcaactaaatgcattttttagtaaatctcctaataaagatggaatactattaagtgattttattacgcaagcaactagtggagaacatacaattgtacgcggagatgggcaaagttaccagatgtttacagataagacagtttatgaaaaaggtgctcctgcagctttcccagttaaacctgaaaaatattctgaaatgaaggcggctggttatgcagttataggcgatccaattaatggtggatatatttggcttaattggagagagagtattctggcttatccgtttaattctaatactgctaaaattaccaatcatggtgaccctacaagatggtactataacgggaatattgctcctgatgggtatgatgtctttacggtaggtattggtattaacggagatcctggtacggatgaagcaacggctactagttttatgcaaagtatttctagtaaacctgaaaactataccaatgttactgacacgacaaaaatattggaacagttgaatcgttatttccacaccatcgtaactgaaaagaaatcaattgagaatggtacgattacagatccgatgggtgagttaattgatttgcaattgggcacagatggaagatttgatccagcagattacactttaactgcaaacgatggtagtcgcttggagaatggacaagctgtaggtggtccacaaaatgatggtggtttgttaaaaaatgcaaaagtgctctatgatacgactgagaaaaggattcgtgtaacaggtctgtaccttggaacggatgaaaaagttacgttgacctacaatgttcgtttgaatgatgagtttgtaagcaataaattttatgataccaatggtcgaacaaccttacatcctaaggaagtagaacagaacacagtgcgcgacttcccgattcctaagattcgtgatgtgcggaagtatccagaaatcacaatttcaaaagagaaaaaacttggtgacattgagtttattaaggtcaataaaaatgataaaaaaccactgagaggtgcggtctttagtcttcaaaaacaacatccggattatccagatatttatggagctattgatcaaaatggcacttatcaaaatgtgagaacaggtgaagatggtaagttgacctttaaaaatctgtcagatgggaaatatcgattatttgaaaattctgaaccagctggttataaacccgttcaaaataagcctatcgttgccttccaaatagtaaatggagaagtcagagatgtgacttcaatcgttccacaagatataccagcgggttacgagtttacgaatgataagcactatattaccaatgaacctattcctccaaagagagaatatcctcgaactggtggtatcggaatgttgccattctatctgataggttgcatgatgatgggaggagttctattatacacacggaaacatccgctaactaat

SEQ ID NO: 2107 - DNA, 249 bp, Streptococcus pneumoniae
  misc_feature (1)..(249): tiling:Spneumo1:WAN024G69; Cluster includes WAN023LIX 3144 92_1819||||980317..980565|-|249 bp|EGAD orf prediction|S.p neumoniae|R6|NC_003098.1|ORF|110
atgcttaagtggtctagctgctcccgcaaatcaagcatcatattggcaaaatcccagatagattgggctgccttacccttgataccagacaacataatattagcagaagcatccagcatagacatattttgcaaatttgcaaaatcacggattttctcaactgtacctagaccaattccacgtttaggctcgttgataatacgctcaaaactaatattgtcactcaaattagcaataaggttgagataa

SEQ ID NO: 2108 - DNA, 291 bp, Streptococcus pneumoniae
  misc_feature (1)..(291): tiling:Spneumo1:WAN024FXA; Cluster includes WAN023L9S 3138 11_2204||||1181310..1181600|+|291 bp|EGAD orf prediction|S .pneumoniae|R6|NC_003098.1|ORF|110
atgcttaattcttattgtttttgtaaacaatcagcgaacccaatactattccattcaacaakcctaaagaaataccatattcaactggaaaatctaaaaaaattgcaaacactattccaatcatcacccctagtgaggctgttgttaaaattacatattcattttctttcttcattttctttacacctcatttcctttttgtatataagctgtagtactctccaccaagatccattaagtacttatgatttcctgactcaacaatcttaccacctttcattacaamaataa

SEQ ID NO: 2109 - DNA, 1988 bp, Streptococcus pneumoniae
  misc_feature (1)..(1988): tiling:Spneumo1:WAN024FHW; Cluster includes WAN0243OJ spr1 472|thrS|15903515|NP_359065.1|1451840..1453822|+|1983 bp|T hreonyl-tRNA synthetase 1|S.pneumoniae|R6|NC_003098.1|ORF| 441
atgcttagaaactatgaaataataaaaaaggagaacatcatgattaacattactttcccagatggcgctrttcgtgaattcgaatctggcgtaacaacttttgaaattgcccaatctatcagcaattccctagctaaaaaagccttggctggtaaattcaacggcaaactcatcgacactactcgcgctatcactgaagatggaagcatcgaaattgtgacacctgatcacgaagatgcccttccaatcttgcgycactcagcarctcacttgttcgcccaagcagctcgtcgtcttttcccagacattcacttgggagttggtccagccatcgaagatggtttctactacgatactgacmacacagctggtcaaatctctaacgaagaccttcctcgtatcgaagaagaaatgcaaaaaatcgtcaaagaaaacttcccatctattcgtgaagaagtgactaaagacgaggcacgtgaaatcttcaaaaatgacccttacaagttggaattgattgaagaacactcagaagacgaaggcggtttgactatctatcgtcagggtgaatatgtagacctctgccgtggacctcacgttccatcaacaggtcgtatccaaatcttccaccttctccatgtagctggtgcgtactggcgtggaaacagcgacaacgctatgatgcaacgtatctacggtacagcttggtttgamaagaaagacttgaaaaactaccttcaaatgcgtgaagaagctaaggaacgtgaccaccgtaaacttggtaaagagcttgacctctttatgatttcacaagaagtgggacaaggtttgccattctggttgccaaatggtgcgactatccgtcgtgaattggaacgctacatcgtaaacaaagagttggyttctggctaccaacacgtctacactccaccacttgcttctgttgagctttacaagacttctggycactgggatcattaccaagaagacatgttcccaaccatggacatgggtgacggggaagaatttgtccttcgtccaatgaactgtccgcaccacatccaagttttyaaacaccatgttcactcttaccgtgaattgccaatccgtatcgctgaaatcggtatgatgcaccgttacgaaaaatctggtgccctcactggccttcaacgtgtacgtgaaatgtcactcaacgacggtcacctattcgttactccagaacaaatccaagaagaattccaacgtgcccttcagttgattatcgatgtttatgaagacttcaacttgactgactaccgcttccgcctctctcttcgtgaccctcaagatactcataagtactttgataacgatgagatgtgggaaaatgcccaaaccatgcttcgtgcagctcttgatgaaatgggcgtggactactttgaagccgaaggtgaagcrgccttctacggaccaaaattggatatccagattaaaactgcccttggaaaagaagaaaccctttctactatccaacttgatttcttgttgccagaacgcttcgacctcaaatacatcggagctgatggcgaagatcaccgtccagtcatgatccaccgtggggytatctcaactatggaacgcttcacagctatcttgattgagaactacaagggdgccttcccaacatggctggcaccacaccaagtaaccctyatcccagtatctaacgaaaaacacgtggactacgcttgggaagtrgccaagaaactccgtgaccgcggtgtccgtgcagacgtagatgagcgcaatgaaaaaatgcagttcaagatccgtgcttcacaaaccagcaagattccttaccaattaattgttggagacaaagaaatggaagacgaaacagtcaacgttcgtcgctacggccaaaaagaaacacaaactgtctcagttgataattttgttcaagctatcctagctgatatcgccaacaaatcacgcgttgagaaataactaat

SEQ ID NO: 2110 - DNA, 509 bp, Streptococcus pneumoniae
  misc_feature (1)..(509): tiling:Spneumo1:WAN024GGD; Cluster includes WAN0244E1 spr0 553||15902597|NP_358147.1|553218..553721|+|504 bp|Hypothet ical protein|S.pneumoniae|R6|NC_003098.1|ORF|110
atgcttatcttaagagcacgttggtggactaatatgtgccttatttgtcagagaattgacctcatcaagaaggaagaaaatccttactttgtcaaagagttggaaacaggctatcttgtggttggagaccaccagtattttgaaggctatagtctctttctagccaaggagcatgtcagcgaattgcaccatttgaaaaaggagacaagactccgttttctagaagaaatgagtttagtccaagaggcagttgccaaggcctttgctgctgagaaaatgaatatcgaactgctaggaaatggcgatgctcatcttcattggcatctgtttccacgacggacaggtgatatgaatggtcatggtctcaagggtcgtggrccagtytggtgggttccctttgaagaaatgacagcagaaacytgccaagyaaaaccggawgagattaaaagattagtcraaygtttatcgtcagaagtagataaactattagaaataaaggagtarctaat

SEQ ID NO: 2111 - DNA, 1766 bp, Streptococcus pneumoniae
  misc_feature (1)..(1766): tiling:Spneumo1:WAN024FR2; Cluster includes WAN0243TM spr1 289|ABC-N/P|15903332|NP_358882.1|1283480..1285240|+|1761 b p|ABC transporter ATP-binding/membrane-spanning protein - unknown substrate|S.pneumoniae|R6|NC_003098.1|ORF|111
atgcttatgaagatttacaaaaaactatttgcttatgtccaagataagaaatatcttggggttttggccataattttttctgctatatctgctsyacttacagtatatggatattatttaatctacaaatttctagataagttaataattaattcaaayttatccggtgcagagagtatagcattaaaatctgttattacactaacaagtggagcgatattttattttgtctcaggaatgttttcacatatcttgggattyaggcttgaaacaaatttaagaaaaaggggaatcgatggtctggaaaaagcaagttttaggttctttgacttaaatccatctggtcaaataagaaagatyatagatgayaatgcwgcacaaactcatcaggtggtagcacacatgattcccgatagttctcaggcaataatcacacccgtacttgtacttgcacttggctttatagtaagtataagrgttggcataattttgcttgctcttactataattggyggcttaattttaggggcaatgatgggcgagcaagaatttatgaagatataccaagaatccctatctaaactaagtgctgaaactgttgagtacgtgagaggaatgcaagttgtaaaaatatttaaagcaaatgtagagtcttttaaaagcttttataaggcgataaaagattactcaaagtatgcttatgattattccctatcttgtaaaaggccttatgttttgtatcaatggttattttttggactgattgcaattttaattattcctatagtttattttatgactagcttagctagcgcaaaggtgattttacttgagcttatcatgattttatttttatcaggagttctctttgtttcattcatgagaatgatgtggtactccatgtatatttctcaaggaaattatgcagtagatactttagaggcgctttacgaagatatgcaaaaagacaaattagtgcatggtaatrtcaataattttaaaaactataatatagaatttgagaatgttagctttgcttataatgataaagctgtcattgaaaatttatcctttaatttagaagaaggaaagtcctacgcacttgtcggttcatctggatcaggcaaatcaacagtagcaaaacttatatcaggtttttayaatgttaataaaggaagcataaagataggcgggatagcaataagtgaatattctgacgaagccttaattaaagccatttcctttgtttttcaagattcaaaattattcaagaagagcatttatgataatgtagckttagctaataaagatgcgacgaaagatgacgttatgagagccttaaaattagcaggatgcgatttaatattagacaaattcccagaaagagaaaatacaatcataggctcaaaaggtgtttatttatccggtggagaaaaacaaagaattgcaattgctagagcaattttaaaggattccaaaattattattatggatgaagcatcagcatctattgacccagataacgagtttgaattgcaaaaagcttttaaaaatcttatgaaggataaaacagttatcatgattgcacacaggctatctacaattaaagaccttgatgaaattattgtcatggatagtggaaaaattatagaaagagggtctgacaaagaattaatgtcaaaagatayaaggtataagagcctgcaagagatgtttaacaktgcgaatgaatggagggtttcaaatgaaagagttttataactaat

SEQ ID NO: 2112 - DNA, 806 bp, Streptococcus pneumoniae
  misc_feature (1)..(806): tiling:Spneumo1:WAN024CYX; Cluster includes WAN0243C4 spr1 921|malA|15903962|NP_359512.1|1903858..1904658|+|801 bp|Ma lA protein|S.pneumoniae|R6|NC_003098.1|ORF|111
atgcttccatatccattttcctwtttttcaagtatttkggggkttcgtaagcccctgtccaaacgtttcgrgctcaactggtttcaacttctctttaccagtatcttccttatcagcttgtctatggtacccattgctatccaaaacagctcccaggagacctatccgctagaaacttttatcgataatgtctatgaacctctgacaratraggttgtccaggatctctctgaacatgctacaattgtcgatggcacattaacttatactggaacagytagtcaagccycttctrttgtgattggtccaagtcaaatcaaggaattacctaagracttgcaactgcatttcgatacaaatgagctagtcatcagcaaggaaagcaaggaactgacccgcatctcttaccgagccattcagactgagrgtttcaaaagcaaagacagcttgacccaagcaattymtaaagactggtaccaacaaaatcgtgtctatatcagcctcttcctagttctcggtgcgagcttcctctttggtttgaatttctttatcgtctctctwggagcwwgyyttctcctttatatcacyaararatcacgcctcttttcatttarwacctttaaagagtgctaycaytttatcttgaactgtttaggattgccgactctrattacacttattttgggattatttggccaaaatatgacaaccytgattactgtacaaaatattctttttgttctgtatctggkcactatcttttataaaacacatttccgtgatccaaattaccataaatarctaat

SEQ ID NO: 2113 - DNA, 225 bp, Streptococcus pneumoniae
  misc_feature (1)..(225): tiling:Spneumo1:WAN024DMW; Cluster includes WAN0241OS SP21 47||15901960|NP_346564.1|2061777..2062001|+|225 bp|hypothe tical protein|S.pneumoniae|TIGR4|NC_003028.1|ORF|112
atgcttctccaaaatctatcttcaaaagaatgttgcatctttttatcctttcacacaaacatttctctttatacagatccaagtgataaccagatgataattggacactttttgrtyatttgtrtattttttgaaaaattttttaaaaaaattttatatcctyttwatagaagtttatgcatttgtatmtatgtattcyatcctatgttrtgtataataacataa

SEQ ID NO: 2114 - DNA, 113 bp, Streptococcus pneumoniae
  misc_feature (1)..(113): tiling:Spneumo1:WAN0249ZT; Cluster includes WAN024ECH R6.I G_1376||||1319617..1319729|+|113 bp|Between spr1332 (- str and) and spr1333 (pgdA) (- strand)|S.pneumoniae|R6|NC_0030 98.1|IG|110
atgcttctccttctattttattcatcaattatagcataaaacattttttaagtagtactatattctgtaaaaaataagtctgtcaaatatctaacagacctattttttcttgc

SEQ ID NO: 2115 - DNA, 300 bp, Streptococcus pneumoniae
  misc_feature (1)..(300): tiling:Spneumo1:WAN024GBV; Cluster includes WAN023LQA 3146 83_1375||||728991..729290|-|300 bp|EGAD orf prediction|S.p neumoniae|R6|NC_003098.1|ORF|110
atgcttctcttattttctatccaatgtccgaagtgctgcttgataagtttgctccatcagcatrgtaatggtcataggaccgacacctccagggactggcgtratrtggctagcaagtggkgcaacygcctcataatcaacatcyccacagagcttmccattttcatckcgrttcatcccaacgtcaatgacwaccgcacctggtttgacaaagtcagcagtcacaaacttggcrcgrccgattgcracwacmagaatatctgctttwgcagccaccttggmaagattatgagtwcgtga

SEQ ID NO: 2116 - DNA, 1104 bp, Streptococcus pneumoniae
  misc_feature (1)..(1104): tiling:Spneumo1:WAN024D26; Cluster includes WAN0243F1 spr1 815|hk11|15903857|NP_359407.1|1785363..1786460|-|1098 bp|H istidine kinase|S.pneumoniae|R6|NC_003098.1|ORF|111
atgcttgaaagactgaaaagmatacattatatgttttggatcagtttaatttttatgrttttccccatcctrwctgtagtgactgggtggctttctgcctggcatttattgattgatattctatttgtagtggcrtatttgggtgttttaacaactaagagccagcgyctatcttggctatattggggcmtcmtgctgacttatgtagttgggaatactgcctttgtkgctgttaattatatctggtttttctttttcctatccaatctcttaagytatcatttcagcgtasgtrgtttaaagtctttacatgtctggacttttcttcttgctcaagtccttgttgtgggkcaactgttgatttttcagagaatcgaagttgagtttctattctatctacttgtaattcttrcttttgtcgatttaatgacttttggmttggttcggattcgwattgtsgaggatttgaaagaagcwcaggyyaagcaaaatgcycagataaatctattgcttgctgaaaatgaacgyartcgtatcggtcargatttgcatgatagtctgggrcatacctttgctatgctkagtgtyaaracwgatytagccttgcagttatttcagatggaggcttatccacaggtggaaaaggaattaaaagaaattcaccagatcagcaaggattccatgaatgaagtkcgaacyatygtggaaaatctkaartcwmgracyytrrcwtcmgarctwgaractgtsaaaaagatgytrgarattgctggrattgaggtksaarykgakaaycamytrgayamkkctagcytdacycargawktggagtcrayggctkcyatgattttgcttgarttrgtgaccaatatcatcaaacatgcyaaagcgtytaaagyytacttraaattagaacggacagagaargaactcattytaacagtragwgatgatggctgyggctttscytytmtaarmggrgatgagctccatacartycgaratcgtgttyttccattttcrggagaagtaarkgtaatyagtyrgaaacawccracdgaagtkcargttcgactacyttataaggagagaaasctarctaat

SEQ ID NO: 2117 - DNA, 438 bp, Streptococcus pneumoniae
  misc_feature (1)..(438): tiling:Spneumo1:WAN024EY3; Cluster includes WAN023KX7 3138 46_2752||||1463394..1463831|+|438 bp|EGAD orf prediction|S .pneumoniae|R6|NC_003098.1|ORF|110
atgcttgaccttgagrgtttctttattttcaaccttgacctcgccacctttgacaagctcctctgcctcagcyttggccttggcacgctcttcctcacggcgytccttttcagtcagacggttaaagacggtaatcgcaccgatttccccaaaaccaatggccgcaaagagggagtcttctgtcttgtaactggtcttttgcagaacttgatccatgtggcgcttgtccataaatttatttgccacatagccattttcttggaactgagccatcagcatctcacgacccttgttgacagacaattccttatcttggtttttaaagaactggcgaatcttattgcgcgccttgctagtcttgaccatattgagccagtcacggctaggtccaaaggagttcgggttggcgataatttcaacctgatcccctgtctttaa

SEQ ID NO: 2118 - DNA, 980 bp, Streptococcus pneumoniae
  misc_feature (1)..(980): tiling:Spneumo1:WAN024D6Q; Cluster includes WAN0243OI spr1 473|hk01|15903516|NP_359066.1|1453871..1454845|-|975 bp|Hi stidine kinase|S.pneumoniae|R6|NC_003098.1|ORF|111
atgcttgattggaaacaattttttctagcctatctgcgctcccgtagtcgtctttttrtctatctgctttctttggcatttctkgtcttactctttcagtttttatttgccagtctaggaatttacttcctctactttttcytcttgtgttgctttgtaaccatmttatttttcacttgggacatattggtggaaaygcaggtctatcgccaggaacttctctatggagagagggaagccaagtctcctttggaaatagctttagcagaaaaattagaagcgcgtgagatggaactctatcagcagaggtcaaaagcagaaagaaaactgacggatttgctggattactataccttgtgggtccatcagataaagacccccattgcagccagtcaactcttagttgcagaagtggtcgaccgccaactgaagcagcagctagaacaggaaattttcaaaatcgactcctataccaacctagttttacagtacctgcgtttagaaagtttccatgatgatttgstcttaaagcaggttcaaattgaggacttggtcaaggaaataattcgtaaatatgctcttttctttattcaaaaaggcttaaatgtcaatctacatgaccttgataaagaaatcgtgacggataaaaagtggctgctagtggttattgagcaaatcatctcaaacagtctcaagtacaccaaggaaggtggtctggagatttatatggatgaccaagagctttgtatcaaagatacgggaatcgggataaaaaacagtgatgtyctccgagtatttgaacgtggcttttcaggatacaatggccgtttgacccagcagtcctctggacttggcctttatctatctaagaaaatttctgaagaactggggcaycagattcgtatcgagtctgaggtcggraaaggaacgacagtgcggattcagtttgctcaagtgaacttagtccttgagtaactaat

SEQ ID NO: 2119 - DNA, 1355 bp, Streptococcus pneumoniae
  misc_feature (1)..(1355): tiling:Spneumo1:WAN024G2A; Cluster includes WAN0243YP spr1 106|hk02|15903149|NP_358699.1|1106262..1107611|-|1350 bp|H istidine kinase|S.pneumoniae|R6|NC_003098.1|ORF|111
atgcttgatttactgaaacaaaccatttttaccagagattttatctttatcctgattttgttaggtttcatccttgttgtgaccctcttattactggaaaatagacgtgataatattcagttgaagcaartcaatcaaaaggttaaagatttgattgcaggagattattccaaggttcttgatatgcaaggtgggtctgaaatcaccaatattaccaataatttgaatgacttgtcggaggttattcgtctcactcaggaaaatctagaacaagagagtaagaggctaaatagtattctgttttatatgacagatggggttcttgcgacyaaccgtcggggtcagattatcatgattaaygatacagccaagaagcaactggggttggttaaggaagatgttctgaatagaagyattttggaattgctcaagatagaagaaaactatgaattgcgtgatttgattacccaaagtccagaattgttgctagattcccaagatatcaatggygaatatttgaaccttcgagttcgctttgccttgatacgtcgagagtctggctttatttcaggtttggtggctgttttgcatgatacgacggagcaggagaaggaagaacgmgaacgaagactctttgtttccaatgttagccatgagttacggactcctctgactagcgtaaaatcctatcttgaagccttggatgagggggctttgtgtgaaactgtagcaccagactttatcaaggtttctcttgatgagaccaaccgtatgatgcgcatggtgacggatctcctccatctttcaygtattgataatgctaccagtcwcctagatgtggaactgattaacttcactgcttttattacctttatcctcaatcgttttgacaagatgaaaggacaggaaaaggagaaaaaatatgagytggtgagagattatcccatcaattctatctggatggaaattgatacagataagatgacgcaggttgtcgacaatattttaaataatgctattaagtattcgccagatgggggtaaaatcactgtcagaatgaagacaactgaagaccagatgattttatccatttctgaccacggtttggggattcctaagcaggatttaccacgtatctttgaccgtttctatcgtgtggatcgtgctagaagtcgtgcacaaggtggtacaggtctaggactgtctatcgctaaagaaattatyaaacaacataagggctttatttgggccaagagtgaatacggcaagggttcaacctttaccattgtrctcccttatgataaggatgcagtgaaagaagaagtatgggaggatgaagtagaagactarctaat

SEQ ID NO: 2120 - DNA, 252 bp, Streptococcus pneumoniae
  misc_feature (1)..(252): tiling:Spneumo1:WAN024CAQ; Cluster includes WAN023LLB 3140 24_1646||||873218..873469|-|252 bp|EGAD orf prediction|S.p neumoniae|R6|NC_003098.1|ORF|110
atgcttgcgaactgctgctaccaaattgtcataaacactttctggaacaaaattcgctgcgagggctgcatgacgagcactcttgtagttacgaactttagcacggtaattttgcaccttaacattggtttgcaaggttttggcataggtgtgttggaattgttcgtaagtcgcataaagagcttgataggcaccacggcgaacctcacgttttttagactccatcaaacgtgtgtaagtcccatgagatag

SEQ ID NO: 2121 - DNA, 615 bp, Streptococcus pneumoniae
  misc_feature (1)..(615): tiling:Spneumo1:WAN024CU6; Cluster includes WAN0244E6 spr0 548||15902592|NP_358142.1|549483..550061|+|579 bp|Conserve d hypothetical protein|S.pneumoniae|R6|NC_003098.1|ORF|110
atgcttggacttctttttggagggaaagtagatgtctcaaatcgaaagaatcaaacaggctatcatggcggattcrcagaatgccagctatacwrakcgtggcattgagcytctctttgcagcgccaaaaactgctcgcatcaatatcatcggtcaggctccgggacttaaaactcaagaagcaggcctttactggaaagataaaagtggtgaccgyttgcgggactggctaggtgtggatgaagataccttttacaattcaggttattttgctgttttgcctatggatttctactttccaggacatggcaagtcgggtgatcttccgcctcgtacaggttttgcagaaaaatggcatccgcagstcttacaggaattgcctgatattcagttaaccctcttgattgggcaatatgcccaagcctactatttacaggagaaaatcagtgggaaggtaacggagagggtgaaacactataaagmctatctgccagcctattttccgctagttcwcccatcaccrcgaaatcaaatctggatggccaaaaatccttggtttgaggcagaagtagtgccagatttgamammmagaattamwwccattttatarctaat

SEQ ID NO: 2122 - DNA, 354 bp, Streptococcus pneumoniae
  misc_feature (1)..(354): tiling:Spneumo1:WAN024CE2; Cluster includes WAN023MD3 3143 15_155a||||71690..72043|-|354 bp|EGAD orf prediction|S.pne umoniae|R6|NC_003098.1|ORF|110
atgcttgggactattgcctacataactatcaaagtcatcaaatcccaagataacattggcaaaatttccagccttgtcaggtgcgacatagcgcaagatrgtcgcaccataagtcataacctcaagttggtagccaccgtctgtctcaaatcgataggccaagacatcctcrccctcaacatttccaaatacacgctctgtgtatgctttcattctgttctccttttactatttctctcaagcaaacaaaccatagaaagcgtactgacaatctatggtttatctgataatttacaaatcctcttgtcaagaattcataaacactgtcttacttttgatattcgtgaattatga

SEQ ID NO: 2123 - DNA, 2411 bp, Streptococcus pneumoniae
  misc_feature (1)..(2411): tiling:Spneumo1:WAN024F37; Cluster includes WAN0244F9 spr0 509|pheT|15902553|NP_358103.1|507219..509621|+|2403 bp|Phe nylalanyl-tRNA synthetase beta chain|S.pneumoniae|R6|NC_00 3098.1|ORF|221
atgcttrtatcttataaatggttaaaagaattggtggacattgatgtgccatcacaagagttggctgaaaaaatgtcaactacaggratcgaggtagagggtgtcgaatcaccagctgctggtctctcaaaaattgtcgtcggtgaggtcttgtcttgcgaagatgtgccagagactcacctccatgtttgtcagrttaacgttggcgaagaagaagagcgtcagatcgtttgtggtgccccaaatgtgcgtgctgggatcaaggtcatggtggctcttccaggagctcgtatcgctgataactacaaaatcaaaaaaggaaaaatccgtggtttggagtcacttggaatgatctgttcacttggtgaattgggaatttctgactcagttgtgcctaaggaattcgcagatggcatccaaatcttgcctgaagatgccgtgccaggtgaggaagtcttttcttacctagacttggatgatgaaatcatcgaactktcyatcacaccaaaccgtgcagatgccctttctatgtgtggrgtkgckcacgaagtrgcagccatmtatgacaaggcagtcaacttyaaaraatttactytaacagaaacwraysaagytgcrgcmgatgccctttctgtsrgcattgagacagacaaggcrccttactatgcrgcycgtatcttggacaatgtgacyatcgcaccaagtccacaatggttgcaaaaycttctcatgaacgaaggmatccgtcccatcaataacgtwgtrgacgtgacmaactacatcctgctctaytttggtcaaccwatgcatgcytttgacttggayammtttgaagggactgacatccgtgtgcgtgaagcgcgtgmtggtgaaaaattrgtkaccytggacggtgaagaacgwgacttggmygwgamwgacctmgtsatyacwgtygcwgacaarccagtagcccttgcmggtgtyatgggtggtcargcwacagaaatytctgaaaaatctagtcgtgttrtccttgaagctgctgttttyaatggcaaatctatccgtaagacaagtggtcgcctgaaccttcgttctgagtcatcttctcgctttgaaaaaggaattaatgtggcaacagttaatgaagcccttgatgcggcagctagcmtgattgcrgarcttgcaggygcgacggtgcgtaagggyatcgtttcagcgggtgagcttgatacytcwgatgtrgaagtttcttcaacccttgctgatgttaaycgtgtcctcggaactgagctgtcttatgctgatgtagaagacgtcttccgtcgtcttggctttggtctttctggaaatgcagacagctttacagtcagmgtmccacgtcgtcgttgggatatcacaatcgaagctgayctctttgaagaaatygctcgtatctatggwtatgaccgcttgccaacyagyctwccaaaagacgatggtacagcwggtgaattgacwgysayacaaaaactccgccgtcaagttcgtacyattgctgaaggagcaggtttgacagaaatyatcacctatrctctracaactcctgaaaaagcagttgagttyacrgctcaaccaagtaaccttackgaactcatgtggccaatgactgtggatcgttcagtcctccgtcaaaatatgatttcaggkatccttgataccgttgcctacaacgtggctcrtaagaataaaaacttggccctttaygagattggaaaagtctttgaacaaacaggtaatccaaaagaagaacttccaaatgaratcaacagytttgcctttgccttgacaggcttggttgctgaaaaagatttccaaacagcagcagttccagttgatttcttctatgctaagggaatccttgaagccctatttactcgtttgggactccaagtaacctatacagcaacatctgaaatcgytagccttcatccaggtcgtacagccgtgatttcaytcggtgaccaagttcttggtttccttggccaagtgcatccagtcactgccaaggcttacgatattccagaaacgtatgtrgctgagcttaacctttcagcyatcgaagskgcgctycarccwgckrytccatttgtrgaaatcaccaaattcccrgcagtcagccgtgacgttgcccttctcctcaaggcagaagtgactcaycaagaagttgtagatgctatccaagctgccggcgtgaaacgtttgacagatatcaaactctttgacgtcttctcaggtgaraaaytgggacttggtatgaagtcmatggcttatagcttgaccttccaaaatccagaagayagcttaacggacgaagaagtcgcacgctatatggaaaaaatccaagcrtckctcgaagaaaaagtsaatgcagaagtgcgttaactaat

SEQ ID NO: 2124 - DNA, 602 bp, Streptococcus pneumoniae
  misc_feature (1)..(602): tiling:Spneumo1:WAN024FGU; Cluster includes WAN0243NB spr1 516|recR|15903559|NP_359109.1|1493609..1494205|-|597 bp|Re combination protein RecR|S.pneumoniae|R6|NC_003098.1|ORF|1 11
atgctttatccaacacctattgcyaagytrattgacagttattckaagttaccrggtatcgggattaagacggctacscgtytggccttytatackattggratgtctgmtgaygatgtcaatgaatttgcmaaaaayctcctttctgctaagagagarytgacmtaytgttcyatytgyggwcgyytgacwgaygacgatccttgytctatctgtacygatycgaytcgtgaccagacaacrattttrgtkctwgaggatagtmgwgatgtggcrgccwtggaaaatatccargaataccatggactctatcatgtcctkcatggyctcatttctcctatgaatggyatyagtccrgaygatatcaatctyaagasyctyatgactcgtcttatggatagtgargtttcagaagtratygtrgcractaatgcyacagcrgatggygaagcgachtccatgtatctttcrcgtttgctcaagccrgctggtatcaaggttacgcgtctagcacgaggtctcgctgtsggagyggacattgagtatgcggacgaagtgacactcttacgagcsattgaaaatcgracagagttgtaactaat

SEQ ID NO: 2125 - DNA, 597 bp, Streptococcus pneumoniae
  misc_feature (1)..(597): tiling:Spneumo1:WAN024FGT; Cluster includes WAN0240K0 |rec R||CAB64470.1|||597 bp|recombination protein|S.pneumoniae| |AJ243055|ORF|000
atgctttatccaacaccyattgcyaagctgattgacagttattccaagttaccaggtatcgggattaagacggctacgcgtctggccttttatacgattgggatgtctgatgaygatgtcaatgaatttgcwaaaaatctcctttctgctaagagagarytgacctaytgttctatttgtggwcgtttgacwgaygacgatccttgctctatctgtaycgatccaagtcgtgaycagacaacgattttrgtkctmgaggatagtcgwgatgtggcggyyatggaraayatycaagaataccatggactctatcatgtcytrcatggyctyatttctccyatgaatggcattagtccagaygatatcaatctcaagastctcatgactcgtctgatggatagtgargtttcagaagtaatcgtagcaaccaatgccacagcagatggggaagcgacttccatgtatctttcccgcttactmaagccagctgggatcaaggttacgcgcctggcacgwggcctcgctgtgggagcagatatygagtaygcrgaygaagysacmctcttacgggcyattgaaaatcggacagagttgtaa

SEQ ID NO: 2126 - DNA, 969 bp, Streptococcus pneumoniae
  misc_feature (1)..(969): tiling:Spneumo1:WAN024GME; Cluster includes WAN023VC8 AX57 1760.1_391||||322331..322486|-|156 bp|Glimmer 2.02 orf pre diction|S.pneumoniae||AX571760.1|ORF|001
atgctttatgtgggcattgatatcgctaaaaataaacacgatgttacagccttgaatgttccaggaaaaactgttcttaaaccactcactttttcaaataataaagctggttttgaactcttagatctgtctcttcgacagctcaaccaagactgtctcatcgctcttaaacttctttctgatcccaatcgtgaacaatttcaacacgataatcggcaagtagacctaaaaatactggctagacatattcatcgtctcaagaaaaaacagtctgattggaaagtacaatacactcgttgtcttgatatcatctttcctgagttggataaaatcgttggaaagcattcagaatatacctaccaactcttgacgcgctaccctaatcctcagaaaaggattgaggcaggatttgataagctgatagaaattaagcgattgaccgcttctaaaattcaggatatcctctcagtcgcacctcgttctatcgaaacaacatctcctgctcgtgaattcgaaatcatcgaaatcatcaaacattacaagaggctcattgacaaggcggaaacatgtgtcaatgacttgatggctgagttcaactcagtcatcacgacggttactgggattgggggtcgtttaggggcggtcattttagccgagattcgaaatattcatgcctttgataatcctgctcaattacaagctttcgctggactggattcttctatttatcagtcaggtcagattgatttagctggaagaatgrtcaaacggggttcccctcatctgcggtgggcactcatacaagctgccaaagcatgcsctcgcttttcacctgcttytaaggcctatcttaagactaagttagaacaaggaaaacattacaatgtagccatcatccaccttgcaaaaaaacttatccgaaccctgttttatatcctaaaaaagagctgccatttgacgaacaaaaag

SEQ ID NO: 2127 - DNA, 722 bp, Streptococcus pneumoniae
  misc_feature (1)..(722): tiling:Spneumo1:WAN024GMG; Cluster includes WAN02446P spr0 817|transposase F|15902861|NP_358411.1|820104..820340|-|23 7 bp|Degenerate transposase|S.pneumoniae|R6|NC_003098.1|OR F|111
atgctttatgtgggcattgatgtcgctaaaaataaacacgatgttacagccttgaatgttccaggaaaaactgttcttaaaccactcactttttcaaataataaagctggttttgaactcttagatctgtctcttcgacagctcaaccaagactgtctcatcgctcttgaaaataccggacattatgcctttaatctactgaacttcctgcatgaacaaggatataaagtttacacctacaatcctttgctcatcaagaaatttgccaaatcattatcacttcgcaaaactaaaacggataagaaagacgctcatggcatcgctcttaaacttctttctgaccccaatcgtgaacaatttcaacacgataatcggcaagtagaactaaaaatactggctagacatattcatcgtctcaagaaaaaacagtctgattggaaagtacaatacactcgttgtcttgatatcatctttcctgagttggataaaatcgttggaaagcattcagaatatacctaccaactcttgacacgctaccctaatcctcagaaaaggmttgaggcaggatttgataagctgatagaaattaagcgattgammrmtwctwwttcaagggctttttgccgtgctctaaaatcatcgccaaatcatcaaattgaaataagaaatagtttagataaaactattgacttttcttatagtttgtctttctcttaactaat

SEQ ID NO: 2128 - DNA, 1127 bp, Streptococcus pneumoniae
  misc_feature (1)..(1127): tiling:Spneumo1:WAN024GML; Cluster includes WAN0244HY spr0 412|transposase F|15902456|NP_358006.1|408542..409090|-|54 9 bp|Degenerate transposase|S.pneumoniae|R6|NC_003098.1|OR F|321
atgctttatgtrggcattgatrtcgctaaaaataaacacgatgttacagccttgaatgttycagraaaaactgttcttaaaccactcactttttcaaataataaagctggttttgaactcttagatctgtctmttcgacarmtcaaccaagactgtctcatcgctcttgaaratacyggacattatgcctttaatctactgaacttcctgcatgaacaaggatataaagtttacacctacamtcctttgctcatcaaggaatttgccaaatcattatcacttcrcmwgwctwwwacgrataasmaagackstcatggcatcgctcttaaacttctttctgaccccaatcgtgaacaatttcaacacgataatcggcaagtagamctaaaaatactggctagacatattcatcgtctcaagaaaaacagtctgattggaaagtacaatacactcgttgtcttgatatcatctttcctgagttggataaaatcgttggaaagcattcagaatatacctaccaactctykacacrmtaccctaatcctcagaaaaggmttgaggcargatttgataagctgatagaaattaagcgattgaccgcttctaaaattcaggatatcctctcagtcgcacctcgttctatsrgwwyrayawckcmtrmwcgtkwattcgwratmatcgaarwcatcaaacattacaagaggctcattgacaaggcggaaacatgtrtcaatgactygatggctgagttcaactcgrycatmacgacggttactgggattgrgrrtcgtttaggggcggtcattttarcyrakattcgaaatattcatgcctttgataatcctgctcaattacaagctttcgctggactggattcttctatttatcagtcaggtcagattgatttagcwggaagaatgrtcaaacggggttcccctcatctgcggtrggyactcatacaagctgccaaagcatgcsctcgcttttcacctgcttttaaggyctatcttaagactaagttagaayaaggaaaacattacaatgtagccatcatccaccttgcaaaaaaacttatccgaaccctgttttatatcctaaaaaagagctgccatttgacgaacaaaaag

SEQ ID NO: 2129 - DNA, 123 bp, Streptococcus pneumoniae
  misc_feature (1)..(123): tiling:Spneumo1:WAN024CPN; Cluster includes WAN023POY pne2 4_2||||109..231|+|123 bp|Type 12B capsule operon, Glimmer 2.02 orf prediction|S.pneumoniae||WAN01UCJ2|ORF|101
atgctttctgtgtggaattactataaatattttttgcagaaaaatttaaaattgaaatcatataaaaacaagggaggactgtataaaaagcagaaatcctttgttttttataaccaargttta

SEQ ID NO: 2130 - DNA, 105 bp, Streptococcus pneumoniae
  misc_feature (1)..(105): tiling:Spneumo1:WAN024CNU; Cluster includes WAN0246SN 5613 45-59-3||||||105 bp|DNA Streptococcus pneumoniae phage Dp- 1 open reading frame 255|S.pneumoniae||WAN0246SN|ORF|000
atgctttggtcttctcgacgaatgactctactacattccctgcagggtttcgagcagtacgggtcaatgatgcaccgttttcgtcaaggtagtcaccttttctaa

SEQ ID NO: 2131 - DNA, 1344 bp, Streptococcus pneumoniae
  misc_feature (1)..(1344): tiling:Spneumo1:WAN024CCZ; Cluster includes WAN024119 |cps 6aI||AAL68424.1|||1344 bp|putative polysaccharide polymera se|S.pneumoniae||AF246898|ORF|000
atgcttttaaatttcttattcatatytatttttctattaattatyattacatttatattatttgagggrgatttktttcaaccygcagtaattttaacamtyrcttattttatttcgattgcaagtgctctagttaatagaaatgtttggggaacagaactccatttcaaaacctttkrtttgatattgytaggggttgytacatttrttatagtttccttgttgacaaaattgtcgtacarrcctaaagtggagggaatttcgyatraagaattraaagaaataaatccttcaaagataatmtatgkcattcttctgaytctaaatcttgttatgytatttctttatayccrtgaaattcagaaagtrgtaytgttttcaggtagargtttttctaatattacagatttgataagtaactataggtacctatcttattattcaaatgaagtagaaratcgtgtaagtggaatgattaatcaactakctaaaattattccagcgactacayttrtttctttatatatatttatraataattattttataackaarcaaataaagaaaaayttcatttatttgattccaatagctatattctttgtctatgcaatcattagtggtggtagaytgccccttataaggktagttrttggadctctgttgatattgtatatatactctgtgtacgggagtcmtaaatctcaacttaccaraagttttaaaatgatyactcgctctctktttrcatttcttatkttgatagttttattctttcttttaaaatttgtattagggcgytcytctcaggaagattttatcagttacatcactcgttatatgggaggytcaattcaactatttgatttatttgttatagatccgatacgacgtaacaaagaactaggtgcagaaactttttcgggaatttatgagatgcttgcaaaattaggatttgayaataatattataaaaggcttagaatggagartrtckcctaattattattctttagggaatgtgtatactgcaattagacgytattattcagactttggtgtaattggtattgtaatttgtcagagttttacagcrtggttrtatactttaggttatgaaaaarttagacatyattctttagttacaaatgktcaaagatttaggttgatyctattagcagcttcattttatccawtatttttaaatrgtatcgaggatgtgttttatatttcaatggttaccattggatatggaatmcaaattgttatcttttatctggtyttttgggttcttctgaaagttcaggttgactttaacaaaggtaaattaasgataaatagatga

SEQ ID NO: 2132 - DNA, 102 bp, Streptococcus pneumoniae
  misc_feature (1)..(102): tiling:Spneumo1:WAN024CAV; Cluster includes WAN023SMV NC_0 03098.1_207||||165175..165276|+|102 bp|Glimmer 2.02 orf pr ediction|S.pneumoniae|R6|NC_003098.1|ORF|110
atgctttttatcatagaaatatttgctgaattttctcttgaaatgaaaccttatcttcatctcgcgcttgtcccttaccctgcttttccgattgcgagtgcg

SEQ ID NO: 2133 - DNA, 1022 bp, Streptococcus pneumoniae
  misc_feature (1)..(1022): tiling:Spneumo1:WAN024DYG; Cluster includes WAN0243CN spr1 902|gpdA|15903943|NP_359493.1|1879718..1880734|+|1017 bp|G lycerol-3-phosphate dehydrogenase [NAD(P)+]|S.pneumoniae|R 6|NC_003098.1|ORF|111
atggaaaaacaaaccgtcgccgtcttggggcctggttcttggggaaccgccctttcacaagtcttaaatgacaatggacacgaggtacgtatttggggaaatcttcccgagcaaatcaatgaaattaatacacaccatactaataagcactactttaaagatgtcgttctagacgaaaatatcattgcctacaccgacttagcagaaacattgaaaratgtggatgcgattttgtttgttgtcccaacaaaagtgacacgacttgttgcccagcaagttgcacaaaccttggaccataaggttatcatcatgcacgcatcaaagggattagaacctgatagccataaacgattatcaaccattcttgaagaagaaattcctgaacatctccgtagtgatatcgtcgttgtttcagggcctagtcatgcaraagagaccattgtgcgtgacctaactttaataactgctgcttctaaagatttacaaacagctcaatacgttcagragctatttagtaatcactacttccgactttataccaatacggatgttatcggggttgaaactgctggtgctcttaaaaatattattgctgtcggtgctggagctttacatggtcttggatttggtgataatgctaaggcagccatcatcgctcgaggtttagcagaaatcacccgcctaggggtagcactcggggccartccattgacctatagcggcttatctggtgtgggagatttgatcgtaacgggaacttccatccactctcgtaactggagagctggagatgctctcggacgaggagaatccctagctgatatagaakctaatatgggcatggtaatcgaaggaatttcaacgactcgakcagcctatgaactagcccaagaacttggagtctatatgcccattacacaggctatttaccaagttatttatcacggaaccaatatcaaagatgccatttatgacatcatgaacaatgaatttaaagcagaaaatgagtggtcttaactaat

SEQ ID NO: 2134 - DNA, 1218 bp, Streptococcus pneumoniae
  misc_feature (1)..(1218): tiling:Spneumo1:WAN024GFS; Cluster includes WAN0240P6 |mef E||AAB41436.1|||1218 bp|macrolide-efflux determinant|S.pne umoniae||U83667|ORF|000
atggaaaaatacaacaattggaaacgaaaattttatgcaatatgggcagggcaagcagtatcattaatcactagtgccatcctgcaaatggcgattattttttaccttacagaaaaaacaggatctgcgatggtcttgtctatggcttcattagtaggttttttaccctatgcgattttgggacctgccattggtgtgctagtggatcgtcatgataggaagaagataatgattggtgccgatttaattatcgcagcagctggtgcagtgcttgctattgttgcattctgtatggagctacctgtctggatgattatgatagtattgtttatccgtagcattggaacagcttttcataccccagcactcaatgcggttacaccacttttagtaccagaagaacagctaacgaaatgcgcaggctatagtcagtctttgcagtctataagctatattgttagtccggcagttgcagcactcttatactccgtttgggatttaaatgctattattgccatcgacgtattgggtgctgtgattgcatctattacggtagcaattgtacgtatacctaagctgggtaatcaagtgcaaagtttagaaccaaatttcataagggagatgaaagaaggagttgtggttctgagacaaaacaaaggattgtttgccttattactcttaggaacactatatacttttgtttatatgccaatcaatgcactatttcctttaataagcatggaacactttaatggaacgcctgtgcatatttctattacggaaatttcctttgcatttgggatgctagcaggaggcttattattaggaagattagggggcttcgaaaagcatgtattactaataacaagttcattttttataatggggaccagtttagccgtttcgggaatacttcctccaaatggatttgtaatattcgtagtttgctgtgcaataatggggctttcggtgccattttatagcggtgtgcaaacagctctttttcaggagaaaattaagcctgaatatttaggacgtgtattttctttgatcggaagtatcatgtcacttgctatgccaattgggttaattctttctggattctttgctgataaaatcggtgtaaatcattggtttttactatcaggtattttaattattggcattgctatagtttgccaaatgataactgaggttagaaaattagatttaaaataa

SEQ ID NO: 2135 - DNA, 156 bp, Streptococcus pneumoniae
  misc_feature (1)..(156): tiling:Spneumo1:WAN024EVD; Cluster includes WAN0243JY spr1 638||15903680|NP_359230.1|1610936..1611091|-|156 bp|Hypoth etical protein|S.pneumoniae|R6|NC_003098.1|ORF|111
atggaaaaattacagttctttctctcacagagagcttgtggttgctggaaacaagcagagaaagctgtaaagttgggttcatctgaaacgagagaagaaaacatcattctcaagggagtgccctttatcgcacagcctgttacaggagrtatctga

SEQ ID NO: 2136 - DNA, 972 bp, Streptococcus pneumoniae
  misc_feature (1)..(972): tiling:Spneumo1:WAN024FSZ; Cluster includes WAN02407T |cps 23fH||AAC69531.1|||972 bp|Cps23fH|S.pneumoniae||AF057294|O RF|001
atggaaaaattagttagtattattctgcccgtctacaatgtcgaacagtatataaaaaattgtttagaatcaattcaacaacaaacttatycaaatttggaagtaatcattgttaatgacggttcaaccgataaaagcgttgaatattgtgagcaaatttgyaagatagaytctaggttttctatcactcacaaagaaaatggtggactttccgatgcaagaaatgtcggtatagataaakccaagggagattacctcatttttgttgacagtgatgattttgtytctcaagatatggtatcttatttagtatcttgtatggagaacaatgaggcagacattgctatttgcgatcctgttcattattayagtgatcgtcaaaacaatgatcttaatattttttctccrgcatcaarcgttaaggtttacgaaacaacggaggctctatgtgagatgttttatcaaaaatcttttttggtgtctgcctgggccaaratatttaaaagagagttgtttgatgatataagatttcctgtaggtaagctatttgaagatagtgcgattatgtatttgctcytcgaaaartgtgaaacaattgcatactctgatgcgraattatatgcttatgtwcacagggataatagyatcacaacaaagaaattttcggatagagacttagatattttggagattacgaacacrattattaatcactatggtgataatttacgcgtgtatactgcagcggtgtcttataaggtatctgcatgtttcagaattctattaaactcaccttctgragaaaagtataaaaaagtacaaaaagaatgtytgagttatattttacaaaattggagaaacatattatttaataataatgttcgattgaagaacaagcttgccttaatttctataactattttcaatccttttgttaaattkatctatagtaaagtaaacagatgggaatga

SEQ ID NO: 2137 - DNA, 1260 bp, Streptococcus pneumoniae
  misc_feature (1)..(1260): tiling:Spneumo1:WAN024GN7; Cluster includes WAN023ZBZ AL44 9924.1_106||||74301..75560|-|1260 bp|Glimmer 2.02 orf pred iction|S.pneumoniae||AL449924.1|ORF|001
atggaaaaattattacaagaaaagttacttccagtagcggctagattgggtaataataaagcgttggtttctattcgagacggtattactctaactatacctttattgttgataggttcattactaatggttattgcaagttttcctattccaggatgggaamaatatctgggtgatattggtgttgctgactatttatggaagggtgttgatagtagttttggattacttggtcttgtagctagttttggtatcgcttactttatggctagacaatacaaagttgatggtattcctgctggtattgtgtcattatcatcttttattacagttacgcctttcattagaggagaggctggagcaggaatgcctaccgctttcatggcatcaaaaggtttatttgttgctatgattttaggattgattaatggctatatctaccaatggtttataaatcataatatacagataaaaatgccggatggtgttccaccagcagtatctaaaagctttagtgccattattcctggtgcagtgactattgttggttggttgattgtttatgcaactttagataaattaagtttacctaatcttcatgaaattgctcaagtarctttgggaggtccacttggacttttaggaaataatgttattggtcttcttatcttaattttccttaatagtagtttttggtttgtaggattacacggaggaaatgttgttaatgcagttatgaaaccgttatggttagctaatctagatgcaaataaagtagcttatcaaactggagaaactcttccaaatatttttactagcgtatttatggataattttgtattcataggtggcggtggtgcaaccataggtttagttcttgcgttaggatatttagcacataagaagaaagctagtaaacaactaaaaactttggcacctataactgttatacctggattatttaatataaatgaaccagcaatgtttggcgttcctattgttttgaacattttgttactagttccatttatcttagctccaatgtttaacttactagtagcgtggggagcaatggcatcaggtttggttccgctaacttatacagatccaggttggactatgccmcctgttataagtggtttacttgctacaggaagtatttctggttcattattacaaattgtattgattgktttggatgtcttactttatttaccatttgtaatagctattgaaaaacggtttaagttattggaggat

SEQ ID NO: 2138 - DNA, 764 bp, Streptococcus pneumoniae
  misc_feature (1)..(764): tiling:Spneumo1:WAN024CX2; Cluster includes WAN02438N spr2 046|spo0J|15904087|NP_359637.1|2037645..2038403|+|759 bp|C hromosome segregation protein|S.pneumoniae|R6|NC_003098.1| ORF|111
atggaaaaatttgaaatgatttctatcacagatatacaaaaaaatccctatcaaccccgaaaagaatttgatagagaaaarctagatgaactagcacagtctatcaaagaaaatggggtcattcaaccgattattgttcgtcaatctcctgttattggttatgaaatccttgcaggagagagacgctatcgggcttcacttttagctggtctacggtctatcccagctgttgttaaacagatttcagaccaagagatgatggtccagtccattattgaaaatttacagagagaaaatttaaacccaatagaagaagcacgcgcctatgwatctctcgtagagaaaggattcacccatgctgaaattgcagataagrwgggcaagtctcgtccatatatcagcaactccattcgtttactttccttgccagaacagattctytcagaagtagaaaatggcaaactatcacaagcccatgcgcgttccctagttgggttaaataaggaacaacaagactatttctttcaacggattatagaagaagatatttctgtaaggaarttagaarctcttctgacagagaaaaaacaaaagaaacagcaaaaaactaatcatttcatacaaaatgaagaaaaacagttaagaaaactactcggattagatgtagaaattaaactatctaaaaaagacagtggaaaaatcattatttctttttcaaatcaagaagaatatagtagaattatcaacagcctgaaataactaat

SEQ ID NO: 2139 - DNA, 1400 bp, Streptococcus pneumoniae
  misc_feature (1)..(1400): tiling:Spneumo1:WAN024DDY; Cluster includes WAN02440G-5 sp r1042|iga|15903086|NP_358636.1|1029961..1035852|+|5892 bp| Immunoglobulin A1 protease|S.pneumoniae|R6|NC_003098.1|ORF |111
atggaaaagtattttggtgaaaaacaagagcgtttttcatttagaaaattatcagtaggacttgtatctgcaacgatttcaagtttattttttatgtctgtattagctagttcatctgtggatgctcaagaaactgcgggagttcactataaatatgtggcagattcagagctatcatcagaagaaaagaagcagcttgtctatgatattccgacatacgtggagaatgatgatgaaacttattatcttgtttataagttaaattctcaaaatcaactggcggaattrccaaatactggaagcaagaatgagaggcaagccctagttgctggwgctagcttagctgctmtgggaattttaatttttgctgtttccaagaaaaaggttaagaataaaacggtattacatttagtattggttgcrggratrggaaatggtgtcttagtttcagtccatgctttagaaaatcatcttttgctaaattacaatacggactatgaattgacctctggagaaaaattacctmttcctaaagagatttcaggttacacttatattggatatatcaaagagggaaaaacgacttctgaktytgaagtaagtaatcaarararwtcagywgccactcctacaaaacaacaaaaggtggattataatgttacaccraattttgtagaccatccatcaacagtacaagctattcaggaacaaacacctgtttcttcaactaagccgacagaagttcaagtagttgaaaaacctttctctactgaattaatcaatccaagaaaagaagagaaacaatcttcagattctcaagaacaattagccgaacataagaatctagaaacgaagaaagaggagaagatttctccaaargaaaagactggggtaaatacattaaatccacaggatgaagtkytatcaggtcarttgaacaaacckgaactcttatatcgtgasgaaactatrgarayaaaaatagattttcaagaagaaattcaagaaaatcctgatttagywgaaggaaytgtaagagtaaaacaagaaggtrmattaggtaagaaagttgaaatcgtcagaatattytctgtaaacaakgaagaagtttcrcgagaaattrtttcracttcaacgactgcgcctrktycaagaatagtcgaaaaaggtactaaaaaarctcaagttataaaggaacaasctgagactggtgyagaacataaggamgtacagtctggagctattgttgaacccgcaattcagcctgaactaccagcagctgtattaaccgacaaaggtgagtcagcagtccaaccagagttgccagaagctgtagtaagtgataaaggcgtaccagaagttcaaccagcgttaccagaggcagtcatgactgacaaggg

SEQ ID NO: 2140 - DNA, 194 bp, Streptococcus pneumoniae
  misc_feature (1)..(194): tiling:Spneumo1:WAN024D6A; Cluster includes WAN0243NR spr1 500||15903543|NP_359093.1|1479193..1479381|-|189 bp|Hypoth etical protein|S.pneumoniae|R6|NC_003098.1|ORF|121
atggaaaataatgactcgtttactaaactaaaagagtcaactcaaaaattattcgatgcgcagaaaaaaaggttaaataatgaagatagaatagaaacarcyaaaaacaatgtgattgccaaacattgtcaaacagtcytttcctttttggttttgactagcttttttgtgaaaaattgtgtaaaatarctaat

SEQ ID NO: 2141 - DNA, 777 bp, Streptococcus pneumoniae
  misc_feature (1)..(777): tiling:Spneumo1:WAN024B22-5; Cluster includes WAN02418H-5 |||AAP94619.1|||780 bp|conserved hypothetical protein|S.pn eumoniae||AY336008|ORF|000
atggaaaatcctctgagaaaagtgtttgcccctctggacaactcaacctttttgaggaagatggagatgttcccagttgaaacagaggaaattaccyacaaacgtaagaaatctaaagggaaacgccaagctcttcttgcccaatttgattcagaagaagttcatcatcaagtagaagagagsatttgccctgattgtcagggagatctaaaagagattggagsrasycttcaasgacaagaattrgtctttattcctgcgcaattaaaacgmatagatcatatccaacacgcttayaartgccaagcatgcagtgataaaaatccgagtgataaaatcgtgaaagytsytrttsstmwrgycyctttrgygcatagctatggctcagtttctattatcgctcacaccatccatcagaagtttaatctgaaggtacccaattatcgccaagaagaagattgggctaagatgggtttaccaatcacacgcaaggaaatctctaattggcatatcaagacgagtcaatactatttggagcccctmtataacctcttgcgagagagactattgactcagcccttacttcatgcggatgaaacttcttatagggtgctrgagagtgatagtcagctgacttactattggacttttttgtcwggkaaakcwgagaaacaagggattacgctttaccaccatgatcagtgtcgaagtggttcagtagtacaagaattcctaggagattattctggctatgtgcattgtgatatgttgyggcag

SEQ ID NO: 2142 - DNA, 87 bp, Streptococcus pneumoniae
  misc_feature (1)..(87): tiling:Spneumo1:WAN024CMT; Cluster includes WAN023SG1 NC_0 03028.1_216||||160973..161059|+|87 bp|Glimmer 2.02 orf pre diction|S.pneumoniae|TIGR4|NC_003028.1|ORF|010
atggaaaattcatcaatcgatgtagatatgctgttggaagaattgacacaagaagcaatggtcgttgttgctgttgataaggactgt

SEQ ID NO: 2143 - DNA, 1418 bp, Streptococcus pneumoniae
  misc_feature (1)..(1418): tiling:Spneumo1:WAN024DIA; Cluster includes WAN0244HM spr0 424|lacG|15902468|NP_358018.1|422191..423603|+|1413 bp|Pho spho-beta-D-galactosidase|S.pneumoniae|R6|NC_003098.1|ORF| 110
atggaaaatttacagkttaaagccttaccgaaggagtttttattaggarctgctaccgctgcttatcaagtagagggtgcaactagggtagatggyaaaggaayaaatatgtgggatgtttatttgcaagaaaayagtccgttcttaccagatccagctagtgatttttattatcgttacgaagaggatatarctttggcggcagaacatggtttgcaggctttgcgtttatctatttcttgggttcgtatatttcctgatatagatggrgaksctaatrtattrgctgttcrttattaccatagagtytttcagtcttgcttaaaacataatgtgattccgtttgtttctttacatcattttgattcgcctcagaaaatgttagaaacaggggattggttgrayagagagaatattgatcrtttcmtackatatgctcgcttttgtttccaagaatttacagaagtcaagcattggtttacaatcaatgaactgatgtctcttgctgcaggtcaatatataggaggtcagtttcctccaaatcatcattttcaattatctgaagcaattcaagcgaatcataatatgttgttggcgcatgctcttgcagtcctcgaatttcatcaattaggrattgagggaragrtaggttgtattcatgctttaaagccaggctatcctattgatgggcaaaaagaaaatattttggcagctaaacggtatgatgtttataataataaatttctattagatggaacttttttgggctactacagtgaggacacgctttttcacttgaatcaaatattggaagctaataattctagctttattattgaagatggtgatttagaaattatgaagagagctgcacctcttaatacgatgtttgkgatgaattattatcgttcagaatttattcgtgaatacaaaggtgaaaatagacaagaatttaattcaacaggaataaaaggacagtcttcttttaaattaaatgctctaggtgaatttgtaaaaaaamctggtattccgacaacagattgggattggaatatttatcctcaagggttatttgatatgttgcttcgtatcaaagaagaatatcctcaacatccggtcatttatttaactgaaaatggtacagcccttaaagaagttaagccagagggcgagaatgatattattgatgacagtaagagaatccgttatattgagcaacatttacacaaagttttagaggctcgagatagaggagtcaatattcaaggctattttatatggtctttgcaagatcaattttcttgggcgaatggctacaataagcgatatggtcttttctttgttgattatgaaacacagaagagatatattaagaaaagtgctctttgggtaaaagggctaaaacggaattaactaat

SEQ ID NO: 2144 - DNA, 999 bp, Streptococcus pneumoniae
  misc_feature (1)..(999): tiling:Spneumo1:WAN024G4K; Cluster includes WAN024408 spr1 050|acoB|15903094|NP_358644.1|1045284..1046276|-|993 bp|TP P-dependent acetoin dehydrogenase beta chain|S.pneumoniae| R6|NC_003098.1|ORF|111
atggaaacaaaaacaatgtccttccgtgacaccattatccttgctatgtctgaggaaatgcgtcgcgatgaaaatgtgttcttgatgggagaagaygtcggtgtcttcggaggagacttcggtacttctgttggaatgcttgaagaatttggtccagaacgtgtccgtgactgtccgatttctgaagctgccatctctggagcagcagcaggagcagccatgacaggacttcgtccaatcgtcgatatgaccttcatggacttctctgttattgccatggacaatatcgtcaaccaagctgctaaaacacgttacatgtttggtggtaaaggtcaggttccaatgactgttcgttgtgcagctggtaacggagttggctctgccgcccagcactcacaatctctagagtcttggtttactcacattccaggacttaaggttgtggcacctggaacacctgcggacatgaaaggcctgcttaagtcttctatccgtgataacaacccagttattatacttgagtacaagtcagaatttaaccaaaaaggggaagtgccagttgatccagactacacaattccacttggggttggtgaaatcaaacgccaaggaacggatgtaacagttgttacttatggaaaaatgcttcgccgtgtggttcaagctgctgaagaattagcagaagaagraatttcagttgaaattgttgacccacgtacccttgttccgcttgataaggatatcatcataaactcagtgaagaagactggtaaggttrttctggtcaacgatgcccacaaaacaagtggctatatcggtgaaatttcagctattatttcagaatcagaagcatttgactatctagatgcaccaatwcgccgttgtkcaggagaagatgtgccgatgccttatgcacaaaacctagaaaatgcaatgattccaacagttgaaagtatcaaagatgcaatccgaaaaacttataayaaagamctarctaat

SEQ ID NO: 2145 - DNA, 1413 bp, Streptococcus pneumoniae
  misc_feature (1)..(1413): tiling:Spneumo1:WAN024FMX; Cluster includes WAN023P6V pne5 3_30||||17122..18534|+|1413 bp|Type 25F capsule operon, Gl immer 2.02 orf prediction|S.pneumoniae||WAN01UCCQ|ORF|000
atggaaacaaaagaaaaacgtttagtkmataatacgattatttttacaattggaagtttaggttcaaaatttatwcagtttttgttagtwcctttrtatacctatactttaacagctkctcagtttgggattaccgaaattttattaaccgctgtkaatcttttaatacctgtattttctatttccattgctgatggattattaagatttggattagataagaccttaagaagagaaaatgtcttgaaatcagcttttatcatttcgatacttgggactattttatccattatttcgattccaattttttcgctctatcctactttgtcagagtggatggtttattttatcatcattttgaacttgagaatgtatcgggatgtttttgcgattcaattgaaagttgaagggaaaaatacattatttgcttgcgatagtatgatttatacatttgttttatctttagcgagtattgtctttctagttcctttttctttaggcatttcaggttattttttcgcttatattgtcagtaatggaatttccattttctttatcttatttttcggaggagtctggaaaagttttactagcggaagatttgaaaaacaattgatgatacaactattgaaatattcagcacccatgattttaaatggtattgcatggtggattacaaatgcctcagatcggtttatgttgcaatggtttatggatgatagagcggtaggtttgtatggtgttgttgcaaagttacccttattaatcggaacgtttactggagtatttaatcaggcatggattatttcagcagtagaagagtttgaagaagaaaatgaagaatggttttatcaaaaagtttttcaccaatattatgcagcactctttttaagtgtttcagtatttttgcttctacttcaaccatttatgaaagtatatgttagtccaagcttttatgaagcatggcaatatgctccgtttttattattgtcaagtgtagtttcaggaatcgccgcatttatgacaggtttttatgttgcgcaaaagaaaaatttgaatattatatacacgacgattgctggtgcttttgcgaatattttgttaaatgcgatgtttattcctatgcttggagtattaggcgcttccattgcgacctttctatcatggtttgttattgcaatctatcgtatgaaagatgttgaaaactttgcttgttttccattagataaaaaagttttttggtatttatttctattatgtattcagaccattacgatgacttttctgccaatccttggcattgttttttcagtcgtattgattccttatttcttttaccaagaacaggaatttctagcagttttatttgataaaggaaggaaaaaagtatgttcattcaaaaaatcaaaaaga

SEQ ID NO: 2146 - DNA, 273 bp, Streptococcus pneumoniae
  misc_feature (1)..(273): tiling:Spneumo1:WAN024G6C; Cluster includes WAN023LJA 3132 04_1795a||||965445..965717|-|273 bp|EGAD orf prediction|S. pneumoniae|R6|NC_003098.1|ORF|110
atggaaacaaccaaacgaagattggcttccgcaagacgttgtttggcttcgatatcaccagcttcaacagccagtgccaactctttctcctcttcattggtcaagagaggaacgacccctatttctttcaagtacatacggacagggtcattgaccttagcagaagttgacccaatcaagtcctcatcgctgagttctggttcttcttcattgctragaacacgcgcacttggatttccttcgttatctgtgatagaaatscctgcatcctga

SEQ ID NO: 2147 - DNA, 674 bp, Streptococcus pneumoniae
  misc_feature (1)..(674): tiling:Spneumo1:WAN024CVM; Cluster includes WAN0244BY spr0 628||15902672|NP_358222.1|636656..637324|+|669 bp|Conserve d hypothetical protein|S.pneumoniae|R6|NC_003098.1|ORF|111
atggaaacacaagactatgcatttcagccaggtttgactgttggagaattattaaaaagcagtcagaaggattggcaggctgcaatcaatcatcgttttgttaaggaactttttgcggggacaattgagaataaggtcttaaaggactatctgattcaagattatcacttctttgatgccttcttatccatgctgggtgcctgcgtagctcacgcagataaacttgaatccaagcttcgttttgccaagcaactaggctttcttgaagcagatgaagatggttatttccaaaaggcttttaaagagttaaaagtagcagagaatgactayctagaagtgactttgcaccctgtaacaaaagcctttcaggatctaatgtattsggcrgtggcttcatcagactatgcccatcttttggtyatgctggtcattgcagaaggtctctatttagactggggttctaaagatttkgctytacctgaagtctatattcattcggaatggatcaatctccacagaggtcctttctttgcagagtgggttcaatttctggttgacgaactcaatcgtgtcggtaaaaatcgagaagatttgacagaacttcagcaacgmtggaatcaagcagtcgctttagaattagctttttttgatattggttacgatgtctarctaat

SEQ ID NO: 2148 - DNA, 294 bp, Streptococcus pneumoniae
  misc_feature (1)..(294): tiling:Spneumo1:WAN024CA5; Cluster includes WAN023R4A cont ig_1471_2||||110..403|+|294 bp|Glimmer 2.02 orf prediction |S.pneumoniae|670|WAN01UDRI|ORF|001
atggaaactagtatcagcatggctgacttttatggaaaataccaaaatgaaaatctagaacttatcgatgtccgtgaagcacatgaattccaagcaggacatgcaccaggtgccaaaaatcttccattaagtaccttagagcaaggctacaaagaactcaaacctgaccatgaatactatgtcatttgtcaaggaggagtccgctctgcatctacctgccagtttctcagctcccaaggcctcaccgttaccaacgtagaaggtggtatgaatgcttggcccggtcaagtagaa

SEQ ID NO: 2149 - DNA, 992 bp, Streptococcus pneumoniae
  misc_feature (1)..(992): tiling:Spneumo1:WAN024D99; Cluster includes WAN0243VG spr1 223|cps23FU|15903266|NP_358816.1|1220544..1221530|-|987 bp |Galactosyl transferase paralog|S.pneumoniae|R6|NC_003098. 1|ORF|111
atggaaactgcattaattagtgtgattgtgccagtctataatgtggcgcagtacctagaaaaatcgatagcttccattcagaagcagacctatcaaaatctggaaattattcttgttgatgatggtgcaacagatgaaagtggtcgcttgtgtgattcaatcgctgaacaagatgmcagggtgtcagtgcttcataaaaagaacgaaggattgtcgcaagcacgaaatgatgggatgaagcaggctcacggggattatctgatttttattgactcagatgattatatccatccagaaatgattcagagcttatatgagcaattagttcaagaagatgcggatgtttcragctgtggtgtcatgaatgtctatgctaatgatgaaagcccacagtcagccaatcaggatgactattttgtctgtgattctcaaacatttctaaaggaatacctcataggtgaaaaaatacctgggacgatttgcaataagctaatcaagagacagattgcaactgmcctatcctttcctaaggggttgatttacgaagatgcctattaccattttgatttaatcaagttggccaagaagtatgtggttaatactaaaccctattattactatttccatagaggggatagtattacgaccaaaccctatgcagagaaggatttagcctatattgatatctaccaaaagttttataatgaagttgtgaaaaactatcctgacttgaaagaggtcgcttttttcagattggcctatgcccacttctttattctggataagatgttgctagatgatcagtataaacagtttgaagcctattctcagattcatcgttttttaaaaggccatgcctttgctatttctaggaatycaattttccgtaaggggagaagaattagtgctttggcyctattcataaatatttccttataycgattcttattactkaaaaatattgaaaaatctaaaaaattacattarctaat

SEQ ID NO: 2150 - DNA, 968 bp, Streptococcus pneumoniae
  misc_feature (1)..(968): tiling:Spneumo1:WAN024DAH; Cluster includes WAN0243ZS spr1 066|nrdF|15903110|NP_358660.1|1064634..1065596|+|963 bp|on essential ribonucleoside-diP reductase 2, subunit beta, cl ass I, function un...|S.pneumoniae|R6|NC_003098.1|ORF|111
atggaaacttactacaaagccattaactggaatgccatcgaagatgtcatcgacaaatcaacttgggaaaaactgacggagcaattttggctcgatacacgtattcccttatcaaacgacttggatgactggagaaagctatctaacaaagagaaagacttggtcggaaaagtttttggtggtttaacccttcttgacactatgcaatctgaaastggggttcaagcccttcgcgmagacatccgtacaccacatgaggaagctgtyttcaataacatccaatttatggaatctgtccacgctaaatcttactcatcaatcttttctaccttgaatactaaggctgagattgaagaaattttcgaatggaccaataccaatccttacctacaaaagaaggctgagattgtcaacgaaatctacctaaacggcagcccacttgaaaagaaagttgccagcgtcttcctcgaaaccttcctcttctactctggtttcttcactcccctctactatctcggtaacaacaaactwgccaacgttgcagaaatcattaaattgattattcgtgacgagtctgttcacggaacctacattggttacaaattccaacttggtttcaatgaattrcctgaagaagagcaagaaaaactcaaagaatggatgtacgacctactctatactctttatgaaaatgaagaaggctacacagagagtctttatgacggtgttggttggactgaagaggttaaaaccttccttcgctacaatgccaataaagctctcatgaacatgggacaagatccacttttcccagattcagctgaagatgtcaacccaatcgttatgaacggtatttcaacaggaacttccaaccatgacttcttctctcaagtcggaaatggttaccttcttggcgaagttgaagccatgcaagaygatgactayaactacggtttrsactaactaat

SEQ ID NO: 2151 - DNA, 503 bp, Streptococcus pneumoniae
  misc_feature (1)..(503): tiling:Spneumo1:WAN024AVU; Cluster includes WAN0244DS spr0 562|PTS-EII|15902606|NP_358156.1|569431..569952|+|522 bp|P hosphotransferase system sugar-specific EII component|S.pn eumoniae|R6|NC_003098.1|ORF|121
atggaaagaagggaaaamcttatggtattagattatttctttgacaaaaaccttgtgttttgcttagaagcggatartcaagaayaactctttgatcaggtwgcaasyttrttggaagaacgagaaattgtcactccaacttatcgtgaagccttgatcacgcgtgaaaagtcatttccaactggtttakatatggaatttctaggaaagracttgccaaatgtarckawtcctcayacagatattgttcataatytrgctgaraaagtkgtgrtygttcgattagaraaaccrrtractttycayaatatgatwgckccwgataaggaagtagaagtatccytrctcttctttatyatyaayaaytcaagttcaagtcaaacraayattctkgctcagttratggacttyttcacaggaaatggwcatcttgaagayytatcaaaaatttcygaaccagaarmmctttatrcttacattgctgaagcmaycgcttaactaat

SEQ ID NO: 2152 - DNA, 249 bp, Streptococcus pneumoniae
  misc_feature (1)..(249): tiling:Spneumo1:WAN024FF8; Cluster includes WAN023KTV 3138 63_2894||||1545816..1546064|+|249 bp|EGAD orf prediction|S .pneumoniae|R6|NC_003098.1|ORF|110
atggaaaggacaaacacccttaaactctttttcaatatccattgggtgtctagcaacataataatgacccatttcagggtgacccacaccaccgataaactcaccacgttggatgacgcctgcaccgatacctgtaccgattgtgtagtaaaccaagttttcgatacgaccaccagcattgttacgggcaaccatttcaccgtaagcagagctgtttacgtctgttgtgaagtacattggcacgtttag

SEQ ID NO: 2153 - DNA, 993 bp, Streptococcus pneumoniae
  misc_feature (1)..(993): tiling:Spneumo1:WAN024DM2; Cluster includes WAN0244Q8 spr0 114||15902158|NP_357708.1|122441..123433|+|993 bp|Hypothet ical protein|S.pneumoniae|R6|NC_003098.1|ORF|100
atggaaagtagactaatgaaaaataagcgttatttttttgacacaattttaataattttactgcttataagcacgatattttgtgtcagcccagtatttataaaattggacatcttaggaactccctctcatgccatcttaacctttgtattggcgataccgttattctatattttgtctcaatgcttacatactttgctattactagtttcctcaatcttttgtaaattaagaccaatttattttyattttatatttgtgatcattataggagctaggaaatactatcgaattctctttcaccaactaatgggatttagtccaggartagcagtgttttataaggagagtcaaacaactaagaatctgtttaaattttactacttcttgtactttacaacactaatttcatactattttttctttacttttgtgtatgacaaaccgttgcttttgcctcttattycattttctattatcatagcattagtacaaaaactttatagaattgagaatcaacaattatttctgttaaaatcaaaggtactaacaatactggaatctaagargrattgtgagtttaatcttcaggattatcatgaaatttggaaattgcaatcaaaatctgarttgccatgcgtggctttatcttatatcagtttratcaagccatatctttcagagagygtgcgtgaacaaattgatttattagaagttaagcgatttaaaaaaataaatcatccaatatcactttatggtatgttggatgttataaaattaaatctatatttacggcattataatgaaaaaaataaatatgaatcaatgttaaakaaaattttagaggtaagaccagactttgttttaatcgagcagaatattgatgatagtttaaatagctcgcaaccattatctttatctttagccatttcagaaatccaacttttgcttgaagtgtatatggggatcaaacatgtttcaayyargagataa

SEQ ID NO: 2154 - DNA, 1458 bp, Streptococcus pneumoniae
  misc_feature (1)..(1458): tiling:Spneumo1:WAN024FLI; Cluster includes WAN023OV8 pne7 0_17||||14742..16199|+|1458 bp|Type 32F1 capsule operon, G limmer 2.02 orf prediction|S.pneumoniae||WAN01UCC2|ORF|000
atggaaagtcaaaaaaagagcgttgaaaagaattatatttataatttgatttatcaaatgctaactgtagttattccaattatcataacaccctatatttcacgtgttctaaacgctgatgggatagggatttttagctacacaacagcagtggtaggttattttgttttattgggtaatttaggaattgcaacttacggacaactacaagttgctaaataccaagaagacagatttaaattatccaaaatattttttgagttattgattttacgaactatattgcttttactagttttactgatatatcttgtatttatccaatttcaagatataatttataaatctatttattacgttttaataattcaaatactttgtagtttgctggatatttcatggtttttgcagggtcttgaagaatttaaaagtattgtgatgcgtaataccctaataaaggtgttaagtgtaatatctatcttgatttttgtaaaaaaagatacagatttgattttatatgctttgattatgaacgcatcaacactgcttggaaatatttctatttttgcatatgtacctaaatatgttcaaagagttaagttggctgagattaatttattaaagcatatttcacactgtttagtttactttataccaacaatagcaactacaatatatttaactttggataagacaatgataggttggttttccttaaatacttttgaaaatggttattatgagcaggctcaaaaaattgagcagatggttgtgacaatagttacatctttaagtgtagtaacgatgcctagaatgacttatttattgaataacaatcaatttcaagaatttaaagtgcgacttgaacaatcgataaggtttatcctttttttatccttacctatgagtttaggattagtagggatagcaaataattttatacctttgtttttaggtgtaggatttgaaaagtctatatcaatattaaagatttttagtctactagttatcattataggtttaaataatgcattagggaagcaaatacttatgccttcagggcagcaaagggcttataatattagtgtggtaataggtgctgttatcaatatagtcttcaatttaatattgataccgcaatttttttcactgggtgctgcgatttcttccgttcttgcagagtttgcaattttaataatatttctctattattctagaaattgtattcctcctaaatgggttattagaacagcagtgaaataccttggatctagtatagtaatgtttcttattattaggacaatagagctactatctcctccttcgtggacagttgttataatacaagtcattgttggagtcgcagtatatattctatcgttatatatattaaaagatcaaattgtaagaaaatactatctaagattgagaaaactaaatgttcttgcaaggaaagta

SEQ ID NO: 2155 - DNA, 903 bp, Streptococcus pneumoniae
  misc_feature (1)..(903): tiling:Spneumo1:WAN024FZI; Cluster includes WAN02420B SP17 11||15901545|NP_346149.1|1614780..1615676|-|897 bp|primoso mal protein DnaI|S.pneumoniae|TIGR4|NC_003028.1|ORF|011
atggaaagtgtcggagacgtactcaaacgtcaacccagccgtttttattatcaagatttggtccagaaaatcatgaaggaccctgatgttgcggcytttatccagcaagaatccttractccaraggaattaaatcgcagtatctccaagtttaatcagtacatcaccgagcgtgacaagtttctccgtggggatacggattatattgccaaaggctacaagccgattttggttaagaatcatggytatgcagatgtttcatatgaagaaactcctgagctaatcgcggctgaaaaagaagcggctattaagaaccgtctcaagttaatcaatctaccagccagtctcaagaaagctagtttggctcaagttgacttggatgatttggggcgcttaccagtttttgaaaagctactagccttcgtggagcaatatccagctattcgaaaaggtctttacttatatggagactttggtgtgggtaaaagtttcatggtggcggccttagctcatgatttatcagaaaaacgtggtgtttcatcaactctcctccactatcctagctttgtcattgatgtcaaaaatgctatcagtgatggcaatgttaagaccttggtggatgagattaagctgtctgaggtcctgattttagatgatattggcgccgagcaatcmaccgyttgggtgcgtgaygaaatcctgcaggtcattctccaatatcggatgcaggaaaatttaccgacctttttcacatccaacttcaactttgaagatttggagaagcattttgcgaaagtgaaacatggaaatgacgaaacctgggaagccagacgggtcatggaacgcatccgttatttggctgaggagactcgtttagaaggagtaaaccgtcgaykaactaat

SEQ ID NO: 2156 - DNA, 897 bp, Streptococcus pneumoniae
  misc_feature (1)..(897): tiling:Spneumo1:WAN024FZF; Cluster includes WAN0243M8 spr1 555|dnaI|15903598|NP_359148.1|1536191..1537087|-|897 bp|Pr imosome component (helicase loader)|S.pneumoniae|R6|NC_003 098.1|ORF|100
atggaaagtgtcggagatgtactcaaacgtcaaccaagtcgttttcactatcaagatttagttcagaaaatcatgaaggatcctgatgttgcggcctttgtccagcaagaatccctcaatcaggacgagttgaaccgtagtatttccaagtttaaccaatacatcactgagagagataaattcctccgaggagatacagattatattgccaaaggctacaagcctatattagtcatgaaccatggctatgcggatgtttcttatgaagaaactcctgaactaatcgcagctgaaaaagaagcggctatcaagaaacgtctcaacttaattaattttccatctagcctgaaaaatgtcagttttttagatgtttatcgtgatgatgttcagcgcttaactgttctaaaaagaatgatagaatttgttaacgattaccccaataatttgaaaggtctttacttrtatggagactttggtgtgggtaaaagtttcatggtggckgccytagctcatgatttatcagaaaaacgtggtgtwtcatcmactctcctccactatcctagctttgtcattgatgtcaaaaatgctatcagtgatggcaatgttaagaccttrgtggatgagattaagctktctgargtcctgattttagatgatattggygccgagcaatcmaccryttgggtgcgtgaygaaatcctgcaggtcattctccaatatcggatgcaggaaaatttaccgacctttttcacmtcyaacttcaactttgaagatttggagaagcatttygckaaagkgaaamatggaaatgacgaaacctgggaagccagacgsgtcatggaacgcatccgttatttggctgaggagactcgtttagaaggagtaaaccgtcgatga

SEQ ID NO: 2157 - DNA, 105 bp, Streptococcus pneumoniae
  misc_feature (1)..(105): tiling:Spneumo1:WAN024CNZ; Cluster includes WAN0246SR 5613 45-55-9||||||105 bp|DNA Streptococcus pneumoniae phage Dp- 1 open reading frame 251|S.pneumoniae||WAN0246SR|ORF|000
atggaaataattagtcttaccgtctgcgcctggcttcccgggtatcccttgagctccgtcattccccttccatttcgtccatgtataggctgcagggtcttttga

SEQ ID NO: 2158 - DNA, 782 bp, Streptococcus pneumoniae
  misc_feature (1)..(782): tiling:Spneumo1:WAN024DKJ; Cluster includes WAN0244N4 spr0 226|pflE|15902270|NP_357820.1|217611..218387|-|777 bp|Pyru vate formate-lyase 3|S.pneumoniae|R6|NC_003098.1|ORF|111
atggaaatatctaaaggaattatttttaatattcaacacttttcaattcatgacggyccgggtattcgtacaactgtttttttaaaaggatgtcctctgcgctgtccatggtgttctaatcctgaatctcaaagaatgaaacctgaaaaaatgaaagatgctcaacgagagaaattcaccttagtcggtgaagaaaagactgtagaagaaattattacagaggtattaaaagacaaagaattttacgaagaatccggtggaggtttaactttatcaggaggtgaaatatttgctcagtttgaatttgctaaagccatcttaaaatcagctaaagaacatcacatacacactgccattgaaactactgcctttgttgatcatgaaaaatttatygatttaattcaatatgtggattttatctacacagacctaaaacattataattctataaaacataaaaaagtgactggggtttttaatcaaatgattattaaaaacattcattatgctttttcwcaaaataaaactatcgttttaagaatcccagttattcctaattttaacaatagtttagaggatgcagaaaaattcgctactctatttaactcattaaatatcgaccaagttcaactactcccttttcatcaatttggtgaaaacaaatatcgtttattaaatcggaaatatgaaatggatggartcaacgcacttcatccwgaagatcttattgattatcaaaaggtatttctgaaccaccatattaattgttatttctarctaat

SEQ ID NO: 2159 - DNA, 456 bp, Streptococcus pneumoniae
  misc_feature (1)..(456): tiling:Spneumo1:WAN024ERE; Cluster includes WAN02422S SP16 19||15901456|NP_346060.1|1519744..1520193|-|450 bp|PTS sys tem, IIA component|S.pneumoniae|TIGR4|NC_003028.1|ORF|010
atggaaatcaaagatattcttaatgtgagtctgatccagacggatttacagatgcagagcaaagaagaggtttttgaggcattagctcaactattggttgagacgggttatgtgtctgatagagaccaatttatcgaaggtctttatcagagagaggcagaaggacagaccggtattgggaattatattgctattccccatagcaagagttctgctgtggagaaggcgggggtagtcatagctataaatcacaatgagattccttgggagaccattgatgggaaaggggtcaaagtaattgtactctttgcagttggtgatgatacagaagctgctagggagcatttgaagaccttatcactctttgctcgaaaacttggtaatgacgaagttgttgccaaattagttcgggctcagacatctgatgatgtgattgcagctttttgtctaactaat

SEQ ID NO: 2160 - DNA, 554 bp, Streptococcus pneumoniae
  misc_feature (1)..(554): tiling:Spneumo1:WAN024DI9; Cluster includes WAN0244HH spr0 429||15902473|NP_358023.1|429323..429871|+|549 bp|Conserve d hypothetical protein|S.pneumoniae|R6|NC_003098.1|ORF|111
atggaaatcaaatttacaattaaacaagttgttgctgtcggaattggcgctgccctctttgtcgtcatcgggatgatcaacattccaacccctgttccaaatacaagcatccagcttcagtatgcggtacaagcgctactttctattatttttggaccgattatcggtttgcttgtygggttgattggtcatgcaatcaaggactctcttgytggttatggtctatggtggacttggattatcgctagcggactctttggyytagttgtgggactttttagaaagtacgttcgmgtgatcaatrgtgtttttgactggaaagatattcttatttttaayctcattcaactacttgcaaatgcccttgtttggggtgtcttggcaccacttggagatgttgtgatttatcaagaagcggcagaaaaagtatttgcacaagggattgttgcgggaattgccaatggtgtatctgtagctattgcaggaactcttctcttacttgcctatgcaggaacccaaactcgtgcaggaagtttgaaaaaggactaactaat

SEQ ID NO: 2161 - DNA, 540 bp, Streptococcus pneumoniae
  misc_feature (1)..(540): tiling:Spneumo1:WAN024FEJ-5; Cluster includes WAN0243LG sp r1584||15903626|NP_359176.1|1564646..1566259|-|1614 bp|Con served hypothetical protein|S.pneumoniae|R6|NC_003098.1|OR F|231
atggaaatcatgtcgcttgcgattgctgtttttgccgtcatcattggtttagtcattggatatgtcagcatctcagctaagatgaaatcatctcaggaagctgcrgagttgatgcttttaaatgctgaacaagaagcaactaatttacgtggacaagctgagcgtgaagcggatttacttgttaatgaagcyaaacgtgaaagcaagtctcttaaaaaagaagcactattggaggccaaagaagaagccagaaaataccgtgaagaagtggacgctgaattcaaatcagaacgtcaagaactcaaacaaatcgaaagtcgtttgacagagagagctactagccttgaccgtaaggacgacaatttgacgagtaaagaacaaacacttgaacaaaaagaacaaagtatttctgatagagcgaaaaaccttgatgcgcgtgaagagcaattagaggaagtcgaaagacaaaaagaagcagaactagagcgtattggtgckctgtctcaggcagaagcacgagatattatcttggctcagaca

SEQ ID NO: 2162 - DNA, 338 bp, Streptococcus pneumoniae
  misc_feature (1)..(338): tiling:Spneumo1:WAN024F8T; Cluster includes WAN0243X0 spr1 167||15903210|NP_358760.1|1170327..1170659|-|333 bp|Conser ved hypothetical protein|S.pneumoniae|R6|NC_003098.1|ORF|1 11
atggaaatcgaaaaaaccaatcgtatgaatgcgctctttgaattttatgcggcgcttttgacagataagcaaatgaattatatmgagctytactacgctgatgattacagycttgctgaratwgcygaggagttyggtgtyagtcgtcaggctgtctatgacaatatcaagcgaacagaaaagattctggaagattatgagatgaaattgcacatgtactcggaytayattgtccgyagtcagatttttgaycaratyttggagcgctatcccaaggatraytttctgcaggagcagatagaaattttaacaagcattgatratagagaataactaat

SEQ ID NO: 2163 - DNA, 282 bp, Streptococcus pneumoniae
  misc_feature (1)..(282): tiling:Spneumo1:WAN024G2U; Cluster includes WAN0242DG SP12 09||15901072|NP_345676.1|1141282..1141398|+|117 bp|hypothe tical protein|S.pneumoniae|TIGR4|NC_003028.1|ORF|120
atggaaatcttttcatcaggaaaatgcgataaaatggctcttgaaacactggttttaccaccaccagaaccacctgtcactccaataatgattggtctattttgcatgctatcctccgttattttatccgtcgtctattctatcacattttttacaaaatttatagtctcatcagcaaaaaacaccagagtcttccctctgatgttcgacagttttaackaawgccctgtagggtttgagcaagcatctgcaagaaagccagtctccctctttcctggctag

SEQ ID NO: 2164 - DNA, 326 bp, Streptococcus pneumoniae
  misc_feature (1)..(326): tiling:Spneumo1:WAN024DKF; Cluster includes WAN0244N1 spr0 229|PTS-EIIA|15902273|NP_357823.1|220443..220763|+|321 bp| Phosphotransferase system sugar-specific EIIA component|S. pneumoniae|R6|NC_003098.1|ORF|111
atggaaatkattgttccagatcaaattatcatgggtttaattttatatgctggygatgcgaaacaacatatttataaagcrttagattacataaaraayggtacatgtgaacgrtgtgaagaagaaatmcagttagctgatgcmgccttattagaagcycataatctacaaacaaaattyttggcacargaagcgtctggtacaaagacagaaattacagctctctttgttcattcacaagatcatctcatgacyagtatgacggagattaatttaatcaaagaaattattagtttgagaaaagaacttcataaaaaataactaat

SEQ ID NO: 2165 - DNA, 893 bp, Streptococcus pneumoniae
  misc_feature (1)..(893): tiling:Spneumo1:WAN024DDC; Cluster includes WAN02446C spr0 830|rluD|15902874|NP_358424.1|830091..830978|+|888 bp|23S rRNA pseudouridine synthase (supresses ftsH(ts) mutants)|S .pneumoniae|R6|NC_003098.1|ORF|111
atggaaattaaaattgaaactggtggtctgcgtttggataaggctttgtcagatttgtcagaattatcacgtagtctcgcgaatgaacaaattaaatcaggccaggtyttggtcaatggtcaagtcaagaaagctaaatacacagtccaagagggtgatgtcgtcacttaccatgtgccagaaccagaggtattagagtatgtggctgaggatcttccgctagaaatagtctaccaagatgaggatgtrgctgtygtyaacaaacctcagggaatggttgtgcayccgagtgctggtcatacyagtggaacyctagtmaatgccctcatgtatcatattaaggacttgtckggtatcaatggggttctgcgtccrggrattgttcaccgtattgataaggatacgtcaggtcttctcatgattgctaaaaacgatgatgcgcatctagyacttgcccaagaactcaargataaaaagtctctccgcaaatattgggcgattgttcatggaaatctrcctaatgatcgtggtgtaattgaagcgycgattggccggagtgaaaaagaccgtaagaaacaggctgtractgctaaagggaagcctgcagtgacgcgttttcacgtcttggaacgctttggcgattatagcttagtagagttgcaactggagacagggcgcactcatcaaatccgtgtccacatggcttatatcggccatycagtcgctggtgatgaggtctatggtcctcgcaagactttgaaaggacatggacaatttcttcatgccaagactttaggttttactcatccgagaacaggtaagaccttggaatttaaagcagatatcccagagatttttaaggaaaccttggagagattgagaaagtaactaat

SEQ ID NO: 2166 - DNA, 962 bp, Streptococcus pneumoniae
  misc_feature (1)..(962): tiling:Spneumo1:WAN024F96; Cluster includes WAN0243GQ spr1 754|lytA|15903796|NP_359346.1|1722069..1723025|-|957 bp|Au tolysin (N-acetylmuramoyl-L-alanine amidase)|S.pneumoniae| R6|NC_003098.1|ORF|221
atggaaattaatgtgagtaaattaagaacagatttgcctcaagtyggcgtgcaaccatataggcaagtacaygcwcactcaacwggkaatccgcaytcaaccgtacagaatgaagcggattatcaytrkmgraargacccwgaaytaggkttyttytsrcayrttgtyggraacgghygyrtcatgcrggtaggacctgtkrayaayggwrsytggsaygttgggggcggktggaatrctgarasytaygcagcggttgaactgattgaaagccattcaacyaaagaagagttcatgacggactaccgyctytatatcgaaytsytacgcaatctagcrgaygaagcargtttgccgaaaacgcttgatacagggagtttagctggaattaaaacgcacgagtattgcacgaataaccaaccaaacaaccactcagaccaygtkgayccwtayccwtacttggcwaaatggggcattagccgtgagcagtttaagyatgatattgagaacggcttgamkattgaaacaggctggcagaagaatgacactggctactggtacgtacaytcagacggctcttatccaaaagacaagtttgagaaaatcaatggcacttggtaytactttgacagttcaggctatatgcttgcagaccgctggaggaagcacacagacggcaaytggtactrsttygacmamtcaggygaaatggctacaggctggaagaaaatcgctgakaagtggtaytatttyraygwagaaggtgcmatgaagacaggctgggtcaagtacaaggacacttggtactacttagacgctaaagaaggcgcmatggtatcaaaygcctttatccagtcagcggacggaacaggctggtactacctcaaaccagacggarcactggcagayarrccagavttcacagtagagccagatggcttgattacagtwaaataactaat

SEQ ID NO: 2167 - DNA, 471 bp, Streptococcus pneumoniae
  misc_feature (1)..(471): tiling:Spneumo1:WAN024D7W; Cluster includes WAN0243RB spr1 372||15903415|NP_358965.1|1353554..1354018|-|465 bp|Hypoth etical protein|S.pneumoniae|R6|NC_003098.1|ORF|111
atggaaattccaattaagatcattcaggcaagcaagtctgatttgcctgagataggggcacttcagacctcgtcttttccagctgaaaagcagcaactttcccatattttagaagaaagtatccgtaagtgtgcggatacctttcttctagctagggatgaaaatcaacttttaggctatattttatcaagtccccagtcagacaatccgcaatrtctaaaagtacattctttagtcatcgagtytgaccatcagagacagggcytgggaacacttcttcttgcagccttgaaagaggtggcagttgagctggattrcaaagggattcgtttggagagtcctgatgagctgctttcctattttgaaatgaacggttttgttgatgaagmagmaactttrctctatgcaactagccagggctatagtatgatttggtttaatcccttttatctggaggaacaaykaactaat

SEQ ID NO: 2168 - DNA, 500 bp, Streptococcus pneumoniae
  misc_feature (1)..(500): tiling:Spneumo1:WAN024D8F; Cluster includes WAN0243ST spr1 318||15903361|NP_358911.1|1306046..1306540|-|495 bp|Hypoth etical protein|S.pneumoniae|R6|NC_003098.1|ORF|111
atggaaattcgtttagcttttccaaatgaagtagatgccatcatgcaggtgatrgaggakgccaaaaaatgtttagcagatgctggtagtraccagtggcaaaatggctatccaaatgcagatgttattatcgatgatatcatctcagggcaagcctacgtagccttggaagagggagaactgctagcctatgctgctgtgaccaagagtccagaggaggcctatgaagctatttatgagggaaactggcaagctggagagtcagagtatctagtctttcaccgtattgctgtggcagcagatgtgcagggaaaaggagttgctcaaaccttcttagagggcttgattgaaggttttgattatcttgattttcgctcagatacgcatgctgaaaacaaggttatgcaacatatttttgaaaaacttggttttaaacaagtyggtaagrtgccagtagatggcraacgcttggcctatcaaraattaaagaaataactaat

SEQ ID NO: 2169 - DNA, 273 bp, Streptococcus pneumoniae
  misc_feature (1)..(273): tiling:Spneumo1:WAN024CJC; Cluster includes WAN0242FI SP11 32||15900998|NP_345602.1|1065887..1066153|+|267 bp|hypothe tical protein|S.pneumoniae|TIGR4|NC_003028.1|ORF|010
atggaaattctgtctaaagaaatacagttacagggcttacaacttcttaaacagactcttgaaactttagttgagctagaaaaacaacgatctagtaagttagatttaatttctcgtaaagaattaatggatctgctaggtataagtgctacaacccttgataactgggaggatcttggtcttaaacgatatcagactccgatggatggagctaagaaagtattctatcgtccgtcagatgtgtatttatttttagcaataaaactarctaat

SEQ ID NO: 2170 - DNA, 951 bp, Streptococcus pneumoniae
  misc_feature (1)..(951): tiling:Spneumo1:WAN024AVX; Cluster includes WAN0241M5 |lyt A||CAD12107.2|||951 bp|N-acetylmuramoyl-L-alanine amidase| S.pneumoniae||AJ419974|ORF|000
atggaaattgatgtgagtaaattaagaacagatttgcctcaagtyggcgtgcaaccatayaggcaagtccatgctcattccacaggcaaccgyaaytcaacggtkcaaaatgaggctgactaccattacagaaaagatcctgaattgggcttcttttctcacgtagtyggtaatggtcgtgttatgcaggtaggacctgttgataatggtgcctgggacgttgggggcggttggaatgcagaaggttatgcacaagttgaaytgattgaaagtcatgaatcaaaagaagagtttctgattgactatcgcctctatatcgaactcttgcgcaatctagcagacgaggctgggatacctaaaacgcttgatactgctgatttarcargtatcaagacacacgaataytgcaccaataaccaacccgataataactcagatcacattgacccctatccttatcttgccaaatggggtattagccgtgagmagtttaagcaggatattgaaaacggcttgasgattgaagcaggatggcaacagaacgatactggcacctggtatgtacactcagayggttcttatccaaaagataagtttgagaaagtmaatggtacytggtattactttgacggttcaggatatatgcttgcagaccgytggaagaagcacatagacggcaactggtactggtttgatcagtcaggcgaaatggctacaggctggaagaaaatcgctgagaagtggtaytatttygayrsagarggygctatgaaracaggctggrtyaartacaaggagacytggtaytatcytgatagycaaaatggggayatggtttccaatgcctttgtyaaatcaaatgatggmtggtattaccttaaagaagatggtmcgatagcagaraaaccagaatttacagtcgagcctgaaggyttgataacagtaaawtaa

SEQ ID NO: 2171 - DNA, 951 bp, Streptococcus pneumoniae
  misc_feature (1)..(951): tiling:Spneumo1:WAN024AVY; Cluster includes WAN02413G |lyt A||CAD12116.1|||951 bp|N-acetylmuramoyl-L-alanine amidase| S.pneumoniae||AJ419983|ORF|000
  misc_feature (337)..(337): n is a, c, g, or t
  misc_feature (903)..(903): n is a, c, g, or t
atggaaattgatgtragtaaattaagaacagwtttgcctcaagtcggcgtgcaaccatataggcaagtccatgcycattccacaggyaaccgtaactcaacggtkcaaaatgaggctgactaccattacagwaaaratcctgaattgggcttcttttctcacgtakkcggtaatggtcgtgttatgcaggtaggacctgttgataatggtgcctgggaygttgggggyggttggaatgcagaaggttatgcacaagttgaactgattgaaagccatgaatcraaagaagagtttckgattgackatcgtctctatatcgaactcttrcgyaatctancrgwygargctggkatacckaaaacrcttgatacwgmygayttrgcargtatcargacacacgaataytgcaccaataaccaaccyrwyaayaaytcagatcayrttgacccytatccttatcttgccaaatggggtattarycgtgagcarttyaagcaggatattgaaaacggcttgacsattgaagcaggmtggcaacagaaygatrctggyacctggtatgtacaytcagayggttcttatccaaaagataagtttgagaaartcaatggtacctggtattacttygacggytcaggmtatatgcttgcagamcgctggaagargcacayagacggvaaytggtaytggtttgaccagtcaggygaaatggckacaggctggaagaaaatmgctgagaagtggtactatttcgatrgagaaggtgctatgaaaacaggytggrtcaartayaaggagacttggtactatcytgatagtcaaaatggggayatggtttcymatgyytttgtcaartcaaatgatggmtggtattacctyaaagaagatggyacgatagcaganaraccagaatttaswrtmgarcctgamggyttgatwacrrtrawrtar

SEQ ID NO: 2172 - DNA, 102 bp, Streptococcus pneumoniae
  misc_feature (1)..(102): tiling:Spneumo1:WAN024CNR; Cluster includes WAN0246SK 5613 45-62-8||||||102 bp|DNA Streptococcus pneumoniae phage Dp- 1 open reading frame 258|S.pneumoniae||WAN0246SK|ORF|000
atggaaattggtattggttcgaccgtgacggatacatggctacgtcatggaaacggattggcgagtcatggtactacttcaatcgcgatggttcaatggtaa

SEQ ID NO: 2173 - DNA, 360 bp, Streptococcus pneumoniae
  misc_feature (1)..(360): tiling:Spneumo1:WAN024CXH; Cluster includes WAN023KI6 3139 08_3438||||1842861..1843220|+|360 bp|EGAD orf prediction|S .pneumoniae|R6|NC_003098.1|ORF|110
atggaaatttcttttctaccaaatagagagcctgatacatcaaatggctgcagacaaaagtccctgccgtattggaaacagaggccggtaagccctcttttttatagcttgaaccatcgctttaatcggcaaactactaaagtaggccgaagcaccatctgggcgaatgggacggtcaatcggttgattatcttcgttatcagaaatgcrtgcatcgtcttgattaatggycactcgttcaggtgtcaaactagttcttccaccagcttgcccaatacaaaggacaaagtcaggttgataacgattcatctcttcttccaatacttgagcagatttgtgaaaaactgtcggcacctctag

SEQ ID NO: 2174 - DNA, 1975 bp, Streptococcus pneumoniae
  misc_feature (1)..(1975): tiling:Spneumo1:WAN024FDY; Cluster includes WAN0243KU spr1 606|pepF|15903648|NP_359198.1|1581428..1583224|-|1797 bp|S imilar to oligoendopeptidase|S.pneumoniae|R6|NC_003098.1|O RF|221
atggaacaaaaacaccgttcagaatttccagagaaggaactytgggayttaacagcyctataccaagaccgtgaggatttcttgcgtgcaatcgagaaagctcgygaagacatcaaccartttagccgtgaytayaagggcaatcttcacacttttgaggatttcgagaaggcctttgcggaattggaacagatctacattcagatgagccatattggcaactatgsttttatgcctcagacgacggactatagcaatgacgaatttgccaatattgcccaagctgggatggaatttgaaacagatgccagcgtagccttgaccttctttgacgatgccttggtggyagcagaygaggaagtcttggaccgtttgggtraattgccwcayttracrgcwgcyattcgtcaggcyaaaatcaaaaaagcccactayytaggggcwgatgtggagaaggccttgacmaatctcggtgaagttttctayagtccgcaggacatttatactaagatgcgagctggggattttgaaatggctgactttgaagcccatggcaagacctayaaaaacagctttgtsacctatgagaatttctaccaaaaycaygaggatgctgaggttcgtgagaaatccttccgttccttctcagagggacttcgtaagcaccaaaatacggctgcagcagcctatctggctcaggtcaagtctgaaaaactcttggctgatatgaagggatacgactctgtctttgaytatcttctarctgaacaagaagtggaccgtgtcatgtttgaccgccagattgacctcatcatgaaggactttgcaccagtcgctcagagatacctcaagcatgttgccaaggtaaatggtcttgaaaagatgacctttgcagaytggaaattggacttggacagcgccctsaatcctgaagtgactattgacgatgcctatgatttggtcatgaagtcggtagaacctttggggcaagaatattgtcaggaagttgctcgttaycaagaagagcgctgggtggactttgctgctaacagtggcaaggattccggtggttatgcggcggacccatatcgcgtacacccttatgtactcatgagctggacaggccgtttgagcgatgtctataccttgattcatgaaatcgggcattctggtcaattyatcttttcagacaatcaycaaagytayttcaaygcccayatgtcgacctaytatgttgaagcaccgtcraccttcaatgaattgctactcagtgattacttrgagaaccartctaatgacccacgtcaaaaacgcttcgctctggctcatcgcttgacagacacctacttccataayttyatcacccacctcttggaagccrccttccagcgtaaggtgtatacattgattgaagaaggrgaraccttyggagcaagcaarctcaacagcattatgaaggaagttttgacrgatttytggggmgatgcyattgaaatygacgaygatgcarctytgacttggatgcgccaagctcactactatatgggcttgtatagttacacttactcwgcwggwctwgtyatctcgacwgctggttaccttcatctwaaamaytcwgaaactggagctgaagactggctcaatctcctyaaatcaggtggtagcaagacaccacttgagtcagccatgattatcggtgctgatatttcaacagacaaaccactccgtgataccatccaattcttgtctgacacagttgaccagattatckcctayagtgctgagttgggrgagtagrskaatagaaaaattttttagaatgatgtttatgggcttgttaagcgtcattctatttgtcttagttgtagctattttcaaaaatgtcgttgaagrtcgtgatgttaaatttgaacttactgtagaactggtattgatagttatttacgtcattttatatcagattgtatttaattga

SEQ ID NO: 2175 - DNA, 111 bp, Streptococcus pneumoniae
  misc_feature (1)..(111): tiling:Spneumo1:WAN024CLS; Cluster includes WAN02422X SP16 11||15901451|NP_346055.1|1512681..1512785|+|105 bp|hypothe tical protein|S.pneumoniae|TIGR4|NC_003028.1|ORF|020
atggaacaaacattgtttgaattagaactacttccagaggaagatatcattgtcacaggtctccctaagtattgttcttttacttgtttaattacaggtcgcctarctaat

SEQ ID NO: 2176 - DNA, 518 bp, Streptococcus pneumoniae
  misc_feature (1)..(518): tiling:Spneumo1:WAN024B5C; Cluster includes WAN023SYC BD00 3769.1_15||||10071..10412|+|342 bp|Glimmer 2.02 orf predic tion|S.pneumoniae|ATCC55840|BD003769.1|ORF|002
atggaacaattacattttatcacaaaactactcgatatcaaagacacaaatatccaaattatagatgtcgtcaatagggatacacacaaggaaatcatcgccaaactggactacgacgccccatcttgccctgagtgcggaaaccaattgaagaaatatgactttcaaaaaccttctaaaattccttatcttgaaacgactggtatgccyactagaattctccttagaaagcgtcgattcaagtgctatcactgttcaaaaatgatggtcgctgaaacttctatcgtcaagaagaatcaccaaatccctcgtatcatcaaccaaaarattgctcaaaagttaattgaaaaratttctatgactgatattgcccatcagctttccatctcaacttcaactgttattcgtaagctcaatgaytttcactttaaacatgatttttcttgtcttcstgagattatgtcttgggatgagtatgcttttrsaaarggraagatsagcttcattgcgtaccgagt

SEQ ID NO: 2177 - DNA, 519 bp, Streptococcus pneumoniae
  misc_feature (1)..(519): tiling:Spneumo1:WAN024B5E; Cluster includes WAN024483 spr0 767|IS1167|15902811|NP_358361.1|761883..762401|-|519 bp|Tr ansposase (orf1)|S.pneumoniae|R6|NC_003098.1|ORF|200
atggaacaattacattttatcacaaaactgctcgatattaaagacccaaacatcaagattctagatatcatcaatatggatacccacaaagaaattatcgctaagctggattatgaggctccatcttgccctgattgtggaagtctaatgaagaaatatgactttcaaaaaccgtctaagatcccttacctcgaaacaactggtatgccttctagaattctccttagaaaacgccgtttcaagtgctatcactgttcaaaaatgatggttrctgagactcccctggtaaagaaaaatcaccaaatccctcgtatcatcaaccaaaaaattgctcaaaagttaattgaaaaaatttctatgactgatattgcccatcagctggccatttcaacttcaactgtcattcgmaagctcaatgacttccactttgagtgtaattttagaaatctgcctragattatgtcttgggasgttgaaacagtccggggagtgactgtttcaatcgggagatggagatga

SEQ ID NO: 2178 - DNA, 520 bp, Streptococcus pneumoniae
  misc_feature (1)..(520): tiling:Spneumo1:WAN024B5J; Cluster includes WAN0243IX spr1 675|IS1167|15903717|NP_359267.1|1647556..1648074|+|519 bp| Transposase (orf1)|S.pneumoniae|R6|NC_003098.1|ORF|120
atggaacaattacattttatcacaaaattactagacattaaagaccctaatatccagattttagacatcatcaataargatacacacaaggaaatcatcgccaaactggactacgacgccccatcttgccctgagtgcggaaaccaattgaagaaatatgactttcaaaaaccgtctaagatyccttacctygaracaactggtatgcctwctagaattctmcttagaaarcgycgtttcaagtgctatcactgttcaaaaatgatggtcgctgaaacttctatcgtcaagaaraatcaycaaatycctcgtatyatcaaccaaaaaattgckcaaaagttrattgaraagatttctatgacygatattgcycatcagctgkccatttcaacttcaactgtcattcgmaagctcaatgattytcactttragcatratttttcgmgtcttcctragattatgtcctgggacgttgaaacagtccggggagtgactgtttcaatcgggagaykrasatrat

SEQ ID NO: 2179 - DNA, 525 bp, Streptococcus pneumoniae
  misc_feature (1)..(525): tiling:Spneumo1:WAN024B5K; Cluster includes WAN023PMC pne2 7_19||||19120..19635|-|516 bp|Type 14 capsule operon, Glim mer 2.02 orf prediction|S.pneumoniae||WAN01UCIR|ORF|022
atggaacaattacattttatcacaaaattactagacattaaagaccctaatatccagattttagacatyrtcaataargatacacacaaggwaatcatcgccaaactggrctaygamgcyccatcttgycctgagtgcggaarycwawygaagaaayatkactttcaaaaaccktctaaaattccttaycttgaaacractggtatgcctactagaattctccttagaaarcgycgwttyaagtgctatcaytgytydaaaatkatggtygctgaractycymtsgtmaagaaraatcaycaaatycctcgtatyatcaaccaaaarattgckcaaaagttrattgaraagatttctatgacygatattgcycatcagctkkccatytcaacttcaactgtcattcgaaagctcaatgacttccactttgagtgtaattttagaaatctgcctragattatgtcttgggacgttgaaacagtccggggagtgactgtttcaatcgggagatggagaykaactaat

SEQ ID NO: 2180 - DNA, 480 bp, Streptococcus pneumoniae
  misc_feature (1)..(480): tiling:Spneumo1:WAN024B5D; Cluster includes WAN0244SL spr0 029|IS1167-truncation|15902073|NP_357623.1|29624..30016|-| 393 bp|Degenerate transposase (orf1)|S.pneumoniae|R6|NC_00 3098.1|ORF|110
atggaacaattacattttatcacaaaattactagacattaaagaccctaatrtccagattttaracatcatcaataaggatacacacaaggaaatcatcgccaaactggactaygamgcyccatcttgycctgagtgcggaarycaawtgaagaaatatgactttcaaaaaccttctaaaattccttatcttgaaacgactggtatrcctacwagaattctccttagaaagcgtcgattcaagtgctatcactgttcaaaaatgatggtcgctgaaacttctgatgacgtacagtcatatttcttctctttttattatatcacagttttaaatctagctttactagattcaccgctactatctatttattcggaaaaaagacgaaaaaacctgagaatcatctcaggcttggtcattaaatttttttctcaatatcgaaaagtggagaaagtggtcgtttttcatgaatacgtacgatag

SEQ ID NO: 2181 - DNA, 138 bp, Streptococcus pneumoniae
  misc_feature (1)..(138): tiling:Spneumo1:WAN024EUY; Cluster includes WAN023P5V pne5 4_21||||14638..14766|-|129 bp|Type 25A capsule operon, Gli mmer 2.02 orf prediction|S.pneumoniae||WAN01UCGY|ORF|011
atggaacaattacattttatcacaaaattactagacattaaagaccctataaaattccttaccttgaaacgactggtatgcctactagaattctccttagaaaacgtcgttttaagtgctatcattgctctaactaat

SEQ ID NO: 2182 - DNA, 783 bp, Streptococcus pneumoniae
  misc_feature (1)..(783): tiling:Spneumo1:WAN024B5F; Cluster includes WAN02441Z spr0 987|IS1167-truncation|15903031|NP_358581.1|971764..972018| -|255 bp|Degenerate transposase (orf2)|S.pneumoniae|R6|NC_ 003098.1|ORF|110
atggaacaattacattttatcacaaaaytrctmgayattaaagaccctaatatccagattttagacatcatcaataaggatacacacaaggaaatcatcgccaaactggactacgacgccccatcttgccctgagtgcggaaaccaattgaagaaatatgactttcaaaaaccttctaaaattccttatcttgaaacgactggtatgccttctagaattctccttagaaagcgtcgtttcaagtgctatcactgttcaaaaatgatggttgctgagactcccctggtaaagaaaaatcaccaaatccctcgtatcatcaaccaaaarattgctcaaaagttaattgaaaaaatttctatgactgatattgcccatcagctggccatttcaacttcaactgtcattcgcaagctcaatgactttcactttgagcatgatttttctcggcttccaaagattatgtcttgggatgagtatgccttcactaakggaaagatgagyttcattgcgcaagattttrayaatcttaatattatcactgttcttgaaggcagaacacaagctgtcatccgaaatcactttcttcgctacgatagagccgttcgttgtcaagtgaaaatcattacgatggatatgtttagyccttactatgacttggctaaacagcttcgctttcaaatttctaggctcaggctgaaacagtctcccagactgtttcactcccgaatgctaaaatcgtkytrgatcgctttcacattgtacaacatcttagccgtgctatga

SEQ ID NO: 2183 - DNA, 353 bp, Streptococcus pneumoniae
  misc_feature (1)..(353): tiling:Spneumo1:WAN024D85; Cluster includes WAN0243RV spr1 352|bta|15903395|NP_358945.1|1335477..1335824|+|348 bp|Bac terocin transport accessory protein|S.pneumoniae|R6|NC_003 098.1|ORF|111
atggaacaatttttagataacatcaaagaccttgaagtcactacagttgtgcgtgcgcaagaagctcttgataaaaaagaaactgcaaccttctttatcggtcgcaaaacttgcccttactgccgtaaatttgcaggtacattgtcaggtgtcgtagctgaaaccaaagctcacatttacttcatcaatagtgaagaascaagccaactcaatgatttgcaagcattccgctcacgctatggaatcccaactgtaccaggttttgttcatattacagatggacaaatcaacgtccgttgcgactcttcaatgtcagcacaagaaatcaaagatttcgcagrattgtaactaat

SEQ ID NO: 2184 - DNA, 1275 bp, Streptococcus pneumoniae
  misc_feature (1)..(1275): tiling:Spneumo1:WAN024B7R; Cluster includes WAN0242WS SP04 60||15900376|NP_344980.1|434769..436037|-|1269 bp|IS1167, transposase|S.pneumoniae|TIGR4|NC_003028.1|ORF|010
atggaacacatcaatcataccacattactcatcggaataaaagacaaaaacatcaccttaaataaagccattcagcacgatacccatatcgaagtcttcgctacacttgattatcacccacctaaatgtaaacactgtaaaggaaaacaaatcaaatacgacttccaaaagccttctaaaatcccttttatcgagattggtggtttccctagcctcattcatttgaaaaagagacgatttcaatgcaagtcctgtcggaaagtcactgtagctgaaacaactctcgttcagaaaaattgccaaatctcggaaatggtgagacagaaaattgcccaactcctactcaacagagaggctcttacacatatcgcttctaaattagccatctctacctctacctctacctctaccgtctatcgtaagctcaagcaatttcatttccaagaggattacaccactttgcctgaaatcctctcctgggatgaattctcctaccagaaggggaaattggctttcattgctcaggatttcaacactaagaaaatcatgaccattcttgataacagacgtcaaacaaccatccgaaatcatttcttcaagtactcgaaagaagctagaaaaaaagttaaagtcgtcactgttgatatgtctggaagttatatccctctcattaagaaattatttcccaatgctaaaattgttctcgatcgtttccacattgtccaacacatgagcagggctcttaatcagactagaatcaacatcatgaagcaatttgatgataaatctctggaatacagagctcttaaatattactggaaatttatcctaaaagatagtcggaaactctctcttaagcctttctatgctagaactttcagagagaccttaactcctagggagtgtctgaagaaaatctttactctagtacctgaacttaaagattactatgacctgtatcaactactcctatttcatctacaagagaagaatactgaccagttttggggcttaattcaagacacgttacctcatctcaaccgcacctttaaaaccactttgagcacatttatttgctataaaaactacatcactaacgccattgaattgccttattctaacgctaaacttgaggccactaacaaactcatcaaagacatcaagcgcaatgcctttggttttcggaactttgaaaacttcaaaaaacggattttyatcgcyctgaacatcaaaaaagaaaggacraaatttgtcctttctcragctctarctaat

SEQ ID NO: 2185 - DNA, 806 bp, Streptococcus pneumoniae
  misc_feature (1)..(806): tiling:Spneumo1:WAN024ETZ; Cluster includes WAN0244IZ spr0 375|phaB|15902419|NP_357969.1|375761..376546|+|786 bp|Enoy l-CoA hydratase II|S.pneumoniae|R6|NC_003098.1|ORF|110
atggaacacattatttatcarcttgaagaggacttggcaatccttaccttgaaccgtcctgaggtcgcaaatggttttcatattcccatgtgtgaggagattttagaagctctgactttggcagaagaaaatccagctgtgcattttatcttaatcaatgccaatggaaaggtcttctcagttgggggagatttggtagagatgaagcgggcagtggatgaggatgatattccatcattgacaaaaatcgcagagttggtcaatacgatttcttataaaatcaagcaaatagccaaacctgttttaatggaagttgacggtgctgttgcaggtgccgcagcgaatatggctgttgcggcagatttctgtttggcgacggataaggctaagtttatccaagcctttgttggtgttggtttggctccagatgcagggggrattcatctcttgagccgcagtatcggtgtgacgcgtgctgctcaattagctatgacaggagaggctttaacggcagaaaaagccctagaatgggggttggtttaccgcgtttctgaagctgaaaaacttgaaaagacgagagaacagcttcttaaaaaattaagacgtgcttcaagtaattcctatgctgccattaagaagttggtttgggagagccaatttaaagactggcagggttacgctactttagaactgaacctacagaaatccttagctcaaacagaggatttcaaagaaggagtgcgagctcattcggagagaagaagacctaaatttayaggaaaataamwaatacttgcatcattctt

SEQ ID NO: 2186 - DNA, 372 bp, Streptococcus pneumoniae
  misc_feature (1)..(372): tiling:Spneumo1:WAN024CTA; Cluster includes WAN0242HJ SP10 55||15900925|NP_345529.1|991662..992027|+|366 bp|Tn5252, O rf 9 protein|S.pneumoniae|TIGR4|NC_003028.1|ORF|010
atggaacatcgttaccgaaccaatctcaagaaagtgtttttgtctgatagtgagttgaaccaactaaatataaatatcgatcaaagtggttgtaaatccttttctgaatatgcgagacgaactctactcgatcctggtatgaattttatcacgattgacacaaacggttaccaagatttagtgtttgagttaaagaggattggcaataatatcaaccagattgctcgaagtgttaatcaatctcagttaatttctggtgaagaattgcaggagttgaaaaaaggaattggtgaattgataaaagaagttgataaggaatttaatctgcaagcgcagaagctaaaggagttccatggtcatcacctaactaat

SEQ ID NO: 2187 - DNA, 483 bp, Streptococcus pneumoniae
  misc_feature (1)..(483): tiling:Spneumo1:WAN024CQV; Cluster includes WAN0242AL SP13 21||15901175|NP_345779.1|1244387..1244863|-|477 bp|v-type sodium ATP synthase, subunit K|S.pneumoniae|TIGR4|NC_00302 8.1|ORF|011
atggaacatttagcaacttatttttcaacctatggaggagctttcttcgctgcattgggaattgtattggcggttggattaagcggtatggggtctgcttatggagttggtaaggctgggcaatctgccgcagctttactgaaagaacagccwgaaaartttgcctcagctttgatattgcaaytattgcccggaacacaaggattatatggttttgttattggaattttratttggttgcaattaactccagaacttcctttrgaaaaaggcgttgcttatttctttgtagctcttccaattgctattgtaggatacttttcrgctaagcatcaaggaaatgtagcagtagcgggaatgcaaatcttggctaaaagaccaaaagaattcatgaagggagcaattttrgctgccatggtagaaacctatgcaattcttgcytttgtcgtatcattcattttgacccttcgtgtactaactaat

SEQ ID NO: 2188 - DNA, 399 bp, Streptococcus pneumoniae
  misc_feature (1)..(399): tiling:Spneumo1:WAN024EZW; Cluster includes WAN023LNF 3140 34_1533||||814679..815002|-|324 bp|EGAD orf prediction|S.p neumoniae|R6|NC_003098.1|ORF|110
atggaaccaagaatsgtttggagaggwaggaagcgacctyttttctctccrctwgctttctcacgmgagagctggagggcattcatacgggcgattcgaagrgcattcaggaacatgaggcctaggaaaatcaawccraagacaacaagyactgyaatgacaacwttcrtytggaaggtagcaaccagctcaaccttcartttcattagtttgagcaggaaagcgaaaattaacttgtcaaacaaggctccaataccgatacccgctccaacagttagaatcccaaataccactaactccttaaaggtcatactgatwagatgrcgcttctccaagcctaacatgccatatatacccagttccttggaacggtttttcatgacaaaactattggcatag

SEQ ID NO: 2189 - DNA, 240 bp, Streptococcus pneumoniae
  misc_feature (1)..(240): tiling:Spneumo1:WAN024G7B; Cluster includes WAN023LJX 3133 07_1747a||||932554..932793|-|240 bp|EGAD orf prediction|S. pneumoniae|R6|NC_003098.1|ORF|110
atggaaccaatccttataagcagactgttcaccatttttgacgacatttttccattgaagagattgcgaascaatatgattaaataccgcatccagcatgactttcatgccacgatgatgcgcttgatccaccagttcccgaaaggtctccttgtctccaaaatgacggtcaatttcaaagtaatctgtcgtattgtacttgtgattgcttgtagattcaaagatgggacaaagatatag

SEQ ID NO: 2190 - DNA, 266 bp, Streptococcus pneumoniae
  misc_feature (1)..(266): tiling:Spneumo1:WAN024DKQ; Cluster includes WAN0244NW spr0 198|rpsQ|15902242|NP_357792.1|200562..200822|+|261 bp|30S Ribosomal protein S17|S.pneumoniae|R6|NC_003098.1|ORF|111
atggaacgcaataatcgtaaagttcttgttggacgtgttgtatctgacaaaatggacaagacaatcacagttgtagttgaaacaaaacgtaaccacccagtctatggtaaacgtattaactactctaaaaaatacaaagctcatgatgaaaacaatgttgccaaagaaggcgatatcgtacgtatcatggaaactcgcccgctttcagctacaaaacgtttccgtcttgtagaagttgttgaagaagcggtcatcatctaactaat

SEQ ID NO: 2191 - DNA, 168 bp, Streptococcus pneumoniae
  misc_feature (1)..(168): tiling:Spneumo1:WAN024AUW; Cluster includes WAN023QTD cont ig_1351_2||||622..789|+|168 bp|Glimmer 2.02 orf prediction |S.pneumoniae|670|WAN01UE5K|ORF|001
atggaacggagtctatttggtttattcacggcttttctgwgtttcatctgccttttggcaggagcwcaggcttttcgtaaaaagcgttacrggctttctatcctyctttggttaaatgcctttaccaatctggtcaatagtattcatgctttttacatgaccttrttt

SEQ ID NO: 2192 - DNA, 176 bp, Streptococcus pneumoniae
  misc_feature (1)..(176): tiling:Spneumo1:WAN024AUX; Cluster includes WAN0243PR spr1 428||15903471|NP_359021.1|1412691..1412861|-|171 bp|Hypoth etical protein|S.pneumoniae|R6|NC_003098.1|ORF|110
atggaacggagtttatttggtctattcacggcttttctgtgtttcatctgctttctggcaggagcacargcttttcgtaaaaagcgttacgggctttctatcctcctttggttaaatgcctttaccaatctggtcaatagtattcatgctttttacatgaccttattttarctaat

SEQ ID NO: 2193 - DNA, 624 bp, Streptococcus pneumoniae
  misc_feature (1)..(624): tiling:Spneumo1:WAN024CJB; Cluster includes WAN0242FG SP11 34||15901000|NP_345604.1|1066521..1067138|+|618 bp|hypothe tical protein|S.pneumoniae|TIGR4|NC_003028.1|ORF|010
atggaactagtttacatggacggtaagaaagagccgtacaccacaagcgagatcatcgctgaatgtgctgaagtacaacaccacactatcacgcgcttaataagagaaaataaggctgactttgaagagttgggaatacttggatttaaaatccataaattagatactagaggacaacctaaaaaatcctatattctgaacgagcaacaggctacttttctgatcacttatttaaagaataccgaaacagtacggcaattcaaactaaacctagtcaaagcattctttgaaatgcgtgaggaactttctgaaattcgtctgcagagggcgctagaaaaaccgaaaagaaaaaccttgcatgacagtatagaaacatggcctaatgcaccaaagcacgcgcatagcaccatgaacaacttgctactaaaggcagtaacagacatgaacgctaagcagttaagagaagagcgtgggggctataacggtatcgatagcttgactagtgaggagttggagcagtaccaggcatttgaggatatggcaatagctatgattgaattgaaaatgagttatcaggaaattaagacaatgatgtttagaagtaaaaaaataagcctaactaat

SEQ ID NO: 2194 - DNA, 729 bp, Streptococcus pneumoniae
  misc_feature (1)..(729): tiling:Spneumo1:WAN024DEY; Cluster includes WAN02449V spr0 703||15902747|NP_358297.1|702460..703188|+|729 bp|Hypothet ical protein|S.pneumoniae|R6|NC_003098.1|ORF|102
atggaactatttaaaacatggaagaaaaatatggttctctatggtcttaaatctcaaattggaactgtctaccgaaacaatgataggacaacaagcttttatgatgttgggaattttctatacctagcaggggagttggattccagattttgggaagattttgttagaaaatatggtttagattataagattattatttcagaaaatactaattggcaagattttctgcatcgaaaagtggggctaaattcttttactcgctattcttttaaagataaggcaaattttcaagttgaatttttaaataatctagttactcatttagaggaaggttacaatattgtgcctattgataatcatatttataactgcttttctacggaagaatggtcacaggatttacagggggattttgagtcctatcaggattttgttttaaaaggtggatttggctttgtgattcttaaaaataatgaactgattgctgggatttcctcagggttagtttaccgtaaagcagttgaagtggaagttgcaactagaccaaacgaacaaggaaatggayttgctaaaaagcttggtgctgcaatgattctagagagtttaaatagagatatgtttccactttgggatgctcataatgaggcttccaaaaaagtagcagaatttttaggatatgagttatctgaaccttatgaagcttttgaactagaggaaattttgatataa

SEQ ID NO: 2195 - DNA, 375 bp, Streptococcus pneumoniae
  misc_feature (1)..(375): tiling:Spneumo1:WAN024CBT; Cluster includes WAN0244Q7 spr0 115||15902159|NP_357709.1|123810..124184|+|375 bp|Hypothet ical protein|S.pneumoniae|R6|NC_003098.1|ORF|100
atggaactcgtattaccaaataattatgttgctcttgagcaagaagagatgatgtatcttgatgggggattttctattctgagatggcctgttgcaacagccattaatatagcttttaatggtgttttaggtggaggagcaatcagtctagttagaaattatattcgtaattatggtttggggcgagttacaagcgcaattgctggagcagctgcaagatatgttggggtacgagttgcaaatagagtggcaggatttgcactgtctgctattaatggatttgcagcttggatgtcaattggcgatgctattacaacaatctgggccaacaatgatgtaaataggagagacccaaatttaaacgccttgtggtaa

SEQ ID NO: 2196 - DNA, 386 bp, Streptococcus pneumoniae
  misc_feature (1)..(386): tiling:Spneumo1:WAN024CBX; Cluster includes WAN0244QD spr0 109||15902153|NP_357703.1|117728..118108|+|381 bp|Hypothet ical protein|S.pneumoniae|R6|NC_003098.1|ORF|110
atggaactcgtattaccaaataattatgttgmtcttgagcaagaagagatgatgtatcttgatgggggtggtgktggtcgtaactggtggaatagtagaggtagttttgcaacagttctggatgtagrtttggccatctatagtggtggtgcaacaatttattctgcttatgcgataaaaaaagctatctcagctaatagaggggctattacgagaacattacgtagtttaataattaaacatgtaggtagtgcagctggccatttagtcaatactgcactaaacgttgcactaactgttactggattttcactaggtggagcaatcgcatatggggctgaktgggctgacggtagcttagatggttatatttttgcttaactaat

SEQ ID NO: 2197 - DNA, 312 bp, Streptococcus pneumoniae
  misc_feature (1)..(312): tiling:Spneumo1:WAN024CEV; Cluster includes WAN023RVW cont ig_1609_48||||34616..34927|-|312 bp|Glimmer 2.02 orf predi ction|S.pneumoniae|670|WAN01UDCD|ORF|001
atggaacttaaatttgtgattcccaacatggaaaaaacattcggcaatttagaatttgctggcgaggataaagtcgttcagcgaagaatcaacggacggctaactgtcttatcaagaagctataatctctattctgatgttcaaagagcagatgatattgtggtggtgcttcctgctgaagctggcgaaaaacatttcggctttgaggaacgtgtgaagttagtcaatccacgtattaccgcagagggctacaaaatcggcactcgtggttttacaaattaccttttacatgctgacgacatgatwaaagaa

SEQ ID NO: 2198 - DNA, 372 bp, Streptococcus pneumoniae
  misc_feature (1)..(372): tiling:Spneumo1:WAN024CBU; Cluster includes WAN0244QB spr0 111||15902155|NP_357705.1|119688..120059|+|372 bp|Hypothet ical protein|S.pneumoniae|R6|NC_003098.1|ORF|100
atggaacttgtattaccaaataattatgttgtgattgatgaagaagagatgatgtaccttgatgggggggctatatatatacccaggtgggcaattacaggagccattactggtgcagcatatgcagcattagcagcagcaggaggtggaggccttcaactagttcttgcatcttatggattacgctccgcactggtagctgggattgttaaaggtttaggagtattaggaattcatattggaaatgcttttgcaaatactgttattagaagtattgcatctgctggaattggtgctggagctgattggatttttaccaatattattgatggctgggatgggcgacgtgataatcaattgagaataggttaa

SEQ ID NO: 2199 - DNA, 524 bp, Streptococcus pneumoniae
  misc_feature (1)..(524): tiling:Spneumo1:WAN024FHH; Cluster includes WAN0243NW spr1 495|tpx|15903538|NP_359088.1|1471711..1472229|+|519 bp|Thi oredoxin-linked thiol peroxidase|S.pneumoniae|R6|NC_003098 .1|ORF|111
atggaagaaaaaagattggagtatcctatggtaacttttctcggaaatcctgtgagctttacaggtaaacaactacaagtcggcgacaaggcgcttgatttttctcttactacaacagatctttctaaaaaatctctggctgattttgatggcaagaaaaaagtcttgagtgtcgttccttctatcgatacaggcatctgctcaactcaaacacgtcgttttaatgaagaattrgctggactggacaacacggtcgtattgactgtttcaatggacctaccttttgctcaaaaacgttggtgcggtgctgaaggccttgacaatgccattatgctttcagactactttgaccattctttcggrcgcgattatgccctcttgatcaacgaatggcayctattagcacgcgcagtctttgtcctcgatactgacaatacgattcgctacgttgaatacgtggataatatcaattctgagccaaacttcgaagccgcaattgcagctgctaaagccctatarctaat

SEQ ID NO: 2200 - DNA, 1775 bp, Streptococcus pneumoniae
  misc_feature (1)..(1775): tiling:Spneumo1:WAN024DJ4; Cluster includes WAN0244JI spr0 356|mtlA|15902400|NP_357950.1|353760..355529|+|1770 bp|Man nitol PTS EII|S.pneumoniae|R6|NC_003098.1|ORF|111
atggaagaaaaagtatcattgaaagtcagggttcaaaaactagggacatcgctttcaaatatggttatgcccaatattggagcatttattgcttggggagtattgactgccctctttatcgctgatggctatctgccaaatgaacagttagctactgttgttggtcctatgttaacgtatttattgccaatcctgattggttacacaggtggatatatgatccatggccaacgtggtgccgttgtaggakctattgctactgttggygcaatcacaggttctagtgttcctatgtttatcggagctatggtaatgggcccactgggaggatggactatcaagaaatttgatgagaagttccargaaaaaattcgtcccggatttgaaatgttagttaataacttctcagctggtctcgttggttttgcattattgcttttggctttctacgcaatcggtccagtcgtatcgactcttactgkagctgttgggaatggtgttgaggctattgtcaatgctcgcctccttcctatggctaatattatcatcgaaccggctaaagtccttttyctcaataatgccctcaatcatggcatttttactcctctgggagtagaacaggtagctcaagctggtaagtcaattctcttcctattggaagctaatcctggaccaggyctgggaattctattagcttatgctgtattcggtaaaggttctgctaaatcttcttcttggggggcaatggttattcatttcttcggagggattcatgaaatttactttccttatgttatgatgaagcctactctatttttagctgctatggcaggaggtatctctggaacttttacttttcaactcttagacgctggtcttaaatctccagcttcaccaggttctattattgcgattatrgctacggcgccaaaaggtgtttggccycatctaaatrttcttttaggtgttttagtggcagcagttgtttctttccttrtagcagcccttattcttcatgcagacaagtcaactgaggattcgctcgaagctgctcaggcggctacccaagcagctaaggctcagtctaaaggtcagttagtatcaacttctgttgatgcagttgtttcgacagactcagtggaaaaaatcattttcgcctgcgatgctggtatgggaagctctgctatgggagctagtattcttcgagataaggttaaaaaagcaggtctagagmttccagtatctaatcaggcaatctcaaatttgcttgatacaccaaaaacattaattgttactcaggaagaactgacaccaagagctaaagacaagagtccaagtgctattcatgtttctgttgataatttcttagcgtccyctcgttatgatgaaattgtagcttcattaacaggagcttytccaatagcagaaattgaaggagatataccaacttcagcaccagtagatagtcaggaaaktgacctyaaccatattgatgctgtagtagttgcttatggtaaagcacagggaactgcaactatgggctgtgaaacgattcgggctatytttagaaacaagaatattcgtattccagtttctactgccaaaatttcagaattaggtgaatttaattctaaaaacataatgattgtaacaactatttctttacaggcagaagtgcagcaagcagcaccgaattctcaatttcttattgtggatagtttagtaacaacaccagaatatgacaaaatggctgctagaatgtacaaatarctaat

SEQ ID NO: 2201 - DNA, 267 bp, Streptococcus pneumoniae
  misc_feature (1)..(267): tiling:Spneumo1:WAN024B4E; Cluster includes WAN023KCU 3140 73_3660||||1974966..1975232|+|267 bp|EGAD orf prediction|S .pneumoniae|R6|NC_003098.1|ORF|110
atggaagaaacccaaatcgtatttgaaaaaatttccaataaatttgctgatacaaaaagtcttaatctaggatttctagcaactaacttccaacctttgagcaaaatttcaagattagtttctgactctaacacctccacttcagcgttaggaagaaataacatcagaaagctagaaatgatatacaagactaaattgatacacgtggtaggtaacagaccaattgttgcaaacaagagtccacctaatccccaacctatcaattga

SEQ ID NO: 2202 - DNA, 722 bp, Streptococcus pneumoniae
  misc_feature (1)..(722): tiling:Spneumo1:WAN024FKZ; Cluster includes WAN0243RI spr1 365|atpB|15903408|NP_358958.1|1347345..1348061|-|717 bp|Pr oton-translocating ATPase, F0 sector, subunit a|S.pneumoni ae|R6|NC_003098.1|ORF|211
atggaagaaagtattaatccaatcatctctattggtcctgttatcttcaatctgactatgttagccatgacyttgttgattgtgggagttatttttgtctttatttattgggcaagccgcaatatgaccttgaaacccaaaggaaagcaaaatrtacttgagtatgtctatgactttgttattggatttacagaacctaacattggttcgcgctacatgaaagattactcactctttttcctttgtttattycttttcatggtgattgccaataaccttggcttaatgacaaagmttcaaacgatcgatgrgactaactggtggagttcgccaaccgctaatttacmgtatgacttaaccttatcttttcttgtcattttgttgacacatatagaaagcgttcgtcgtcgtggatttaaaaaaagtataaaatcttttatgagtcctgtktttgtcataccgatgaatatcttggaagaatttacaaacttcttatctttggctttgcggwttttygggaatatctttgcaggagaggtcatgacgagtttgttacytcttctttcccaccaagctatttattggtatccagtagcctttggagctaatttggctkskactgcatyttctgtctttattycctgcatccaagcttatgtytttactcttttgacatctgtgtatttagggaataagattaatattgaagaggaatarctaat

SEQ ID NO: 2203 - DNA, 1112 bp, Streptococcus pneumoniae
  misc_feature (1)..(1112): tiling:Spneumo1:WAN024FE7; Cluster includes WAN0243L6 spr1 594||15903636|NP_359186.1|1571823..1572929|-|1107 bp|Conse rved hypothetical protein|S.pneumoniae|R6|NC_003098.1|ORF| 111
atggaagaaattctctgtattggttgtggagcaaccattcagacgacagataargctggtcttggttttaccccccagtyggcacttgaaaaaggtttggagactggcgaagtctattgccaacgctgtttccgtctccgccactacaatgaaatcacagatgtccagttgacgracgatgatttcctcaagctcttgcacgaggtgggagacagtgatgcyttagtggtcaatgtyattgatatctttgattttaatggatctgtcatcccaggtttaccacgtttcgtctcgggcaatgatgtcctmttggtaggaaataaaaaagatatccttcctaagtcagttaagtctggtaagattagccagtggctcatgaaacgtgcccrtgaagaaggtcttcgtccagtcgatgtggtcctaacttcagcacaaaataaayatgccattaaggaagtcattgayaagattgaacactaccgtaagggccgcgatgtctatgtggtcggtgtgaccaacgttggaaaatcaactctaatcaatgctattatccaagaaatcacgggtgatcagaatgtcatcactacttcacgcttyccaggkacaaccttggacaaaatagagattccgcttgacgacggatcttatatttacgatacrccgggaattatccaccgccaccagatggctcactacttgacggccaaaaacctcaagtatgtcagtcctaaaaaggaaatcaagcctaagacctatcagcttaatcctgagcaaaccctatttttaggtggtttgggacgctttgactttatagcaggagaaaagcaaggatttactgctttctttgataatgaactcaaactccatcgtagcaagcttgaaggagctagtgctttctacgataagcacctgggaactcttctgacaccaccaaatagcaaggaaaaagaagatttcccaaggctagtccagcatgtctttaccattaaagataagacagacctagtyatytcaggcctaggmtggattcgtgtaacaggcayagcaaaagtcgccgtytgggcaccagaaggcgtcgccgtcgtcacacgaaaagcaattatttaactaat

SEQ ID NO: 2204 - DNA, 750 bp, Streptococcus pneumoniae
  misc_feature (1)..(750): tiling:Spneumo1:WAN024FKA; Cluster includes WAN0243QS spr1 391||15903434|NP_358984.1|1371711..1372460|-|750 bp|Conser ved hypothetical protein|S.pneumoniae|R6|NC_003098.1|ORF|1 11
atggaagaagaacaattattaaaatcaggagagcgcattaaccagctcttttcgacagatatcaaaatcattcaaaatagagaggtttttagctattcggtggatagtgttctcttatcacgatttccacgttttcctaagaaggggttgattgtggatttctgtgctgggaatggagcagtggggctttttgctagcactcgtactcaagcacagatattgtctgttgagattcaggagcgtttggcggatatggctgaacgctctgtccgtttgaatggattagaggagcaaatgcaggtcatctgcgatgatttgaaaaatatgcctgctcacattcaggggagtaaggtggatatgattttgtgtaatccaccctatttcaaggtgratccttattctaatctgaacgagagtgaacattatctcttggctcgacacgaaatcacgactaatttggaagaaatctgtcrtagtgcccagagtattctcaagtctaatgggcgtttggccatggttcatcgtcctgatcgacttctggatattttggatacgttaaaacgacataatctagcccctaagcgcctgcagtttgtttatccaaaaagagaaaaggaagccaatatgcttttgattgaggcgatcaaggatggctcaacaagtggctttaaggtcttacctcctttgattgtccacaatgatgatggctcttatacgcccgaaatcgaagagatttattatggatcataa

SEQ ID NO: 2205 - DNA, 811 bp, Streptococcus pneumoniae
  misc_feature (1)..(811): tiling:Spneumo1:WAN024FYU; Cluster includes WAN023OT6 pne7 3_11||||8721..9527|+|807 bp|Type 34(2) capsule operon, Gli mmer 2.02 orf prediction|S.pneumoniae||WAN01UCF4|ORF|000
atggaagaagatacaawgtcgkatataarawtcawtcwagatarrattwkaattacttaargwkttkaytartatttgtgaagaaaataacctgacctactatgctctaggtgggaccttgttgggcgcggtacgtcataaaggattcataccttgggatgacgatattgatatcggtatgccaagagaagattatgaaaagtttaaaatactagcyccaracctgttaccaagtaatttaaaaatagttaataatccacttaatcttgatataactcagttagtagataaaaatgttattgttaaaattgcgaattcggaaarcaatgtgtttattgacatttttcctctagatggttatmcagaaaaaggattttttgcagctaaattgcatagttttaggctattgtttcaaagaatgctttgtaaaatatcagttttagaccagcttgaagataaagaccgtggcactgtggagaatcttatagttaaaatatcgaaaatgctaagaatccaaaaagtacttcctaaggatacattggtagaaaatctgcataaagttattcaaaaatatgattttaaaacttctcgttacgtcggtaatgttctaggtagatatagggagagagaaatagttccgaragagtattttaaagaacctgtttctcttatttttgaggatacgatgataaactgtccgacaaagtacaaggaatatttaarcgaaatctacggtgattacatgaaattaccatcagtagaagatagagtagcacataatatagaacttatatcagtaggtgatgcagag

SEQ ID NO: 2206 - DNA, 764 bp, Streptococcus pneumoniae
  misc_feature (1)..(764): tiling:Spneumo1:WAN024FES; Cluster includes WAN0243LO spr1 576||15903618|NP_359168.1|1555231..1555989|-|759 bp|Conser ved hypothetical protein|S.pneumoniae|R6|NC_003098.1|ORF|1 11
atggaagaatcaaaagaattaaatgccgtcattgatgtgattatgctagcggggactattctccttaaaagtggctcagaaatccatcgtgtagaagataccatgattcgaatcgcgcattcgcaggggattgtggattgcaatgtccttgccatgcctgccgctatctttttctctattgaaaataccaatatttcgcgcatgaagcgcgtgacctcctcttcttataacatcgaaaaagtctgcgatgtgaaccagatttctcgtcagctagttggggggcagattgacttagaaacagcctttaagcaattgacggccttgcaagcymaaccccttccctatactaagttgcaggtaactctggctgcgacctttagtgctcctttcttttcagttatgtttagcggaaatatctacgacgcacttggggcaggagtggcgaccttatttggttttgccttttccctctatgtggaaaaatttatccgaattccctttgtgacagcctttgctggagcctttgtctttgggataattgcccagttttgggctcgctacacaggttttccttcaacggcagatttgattatagctggtgcggtcatgccgtttgtaccaggyattgccttgaccaatgcggtccgtgatattatgaccaaccacataaactctggtatgagtaagatgtttgaatccctgctcattaccctcgctttaggggcaggaacttctgtcgccttggtattgatgaactaactaat

SEQ ID NO: 2207 - DNA, 294 bp, Streptococcus pneumoniae
  misc_feature (1)..(294): tiling:Spneumo1:WAN024C4W; Cluster includes WAN023Q2G cont ig_1220_17||||9166..9246|+|81 bp|Glimmer 2.02 orf predicti on|S.pneumoniae|670|WAN01UEKO|ORF|000
atggaagaattgattgaatggctggataacctgattatgattgttaaagaactggaaggaagggaatcaacttcaagacattttattacgatatgggaaaacgattataaaaatctattactagtcaaagaatacctaaccgactatgaaaaactagcaaaggactatcgttatgtgacccttaaaaataagctgctaaagattgaaaaaatggagctggaaggcaggtacatctatgaagatatgcggatgaagtatcgtgccaatcgcaggaagtggggtgctcggtatgtc

SEQ ID NO: 2208 - DNA, 1337 bp, Streptococcus pneumoniae
  misc_feature (1)..(1337): tiling:Spneumo1:WAN024EVH; Cluster includes WAN0243G2 spr1 778|hlyX|15903820|NP_359370.1|1752316..1753647|-|1332 bp|H emolysin|S.pneumoniae|R6|NC_003098.1|ORF|111
atggaagacccaagtagtcagaatttgttgctacaatttgttttattgtttatcttgacggtattaaatgcctttttctcagccacagaaatggccatggtttctcttaatcgtgcccgagttgaacaaaaggcggaagaaggagacagacgctacatccgcctgctgaaggtactagaaaatcctaaccactttttatcaaccatycaggtaggaatcaccctgattacaatcttatcaggggcgagtttaactratactctaggacgtgtgattgcctcttggcttgggaatggcgaaacagcacaagccgtggcaacttttctatccttggcatttttgacctatatttccatcgtttttggggaattatatcctaagagaatcgctcttaatctaaaggatgccttggcaattcgtacagcgccgrttatcawtgggatcggaaaactagtcagtccttttgtttggcttttagctgcttcgaccaatttcttgagccatttgactcctatgtcattcgatgatgcggatgaaaaratgacccgtgatgaaattgcctatatgctgacaaatagtgaagaaacattggatgctgatgagattgagatgctacaaggtgtcttttcgctcgatgaactgatggcacgagaggttatggtkcctcgaacggatgcctttatggtggatattcaggatgatagtcaagccattatccaaagtattttaaaacaaaattattctcgtatcccggtttatgatggggataaggacaatgtaattggaatcattcacaccaagagtctccttaaggcaggctttgtggacggttttgacaatattgtttggaagagaattttacaagatccactttttgtacctgaaactatttttgtggatgacttgctaaaagaactgcgaaatacccaaagacaaatggcaatcttgctggatgaatacggtggtatggctggtttrgtgactttggaagacctcttagaggaaattgttggtgaaattgatgatgaaacggacaaagcagcaatagatgttyatcagattggcgaggatacctacattgttcaaggaactatgaccctcaatgatttcaataattactttratgttgarctggaaagtgatgacgttgatacyatcgctggttattatttgacaggagtgggaacyattccaacgactgagaaactcagctatgaattgrtcagccaaaacaaacagtttatcttaaccaatgataaagtgaagaatggacgtgttaccaaggtaaaartccaaatcacagaagtcgaaatagaagaagaaacagaataactaat

SEQ ID NO: 2209 - DNA, 291 bp, Streptococcus pneumoniae
  misc_feature (1)..(291): tiling:Spneumo1:WAN024FH5; Cluster includes WAN023KWM 3151 86_2775||||1478659..1478949|+|291 bp|EGAD orf prediction|S .pneumoniae|R6|NC_003098.1|ORF|110
atggaagagcacgttccaaagtcactttcaagttttcagcatctgggattactgagtcgtcaagtgaagcrtaacgacggtctgtgtgagctgagtgctcatcatcacggtccatrtttggaggcaatacatcgtatgaacgacgccagatgtgaacttgctcatcaccaaattgttcagcagcttcagctttgtttttaccagtcaaaccaccgtagtgacgttcgttcaagcgccatgatttttcaactggaacccayaattggtcagaagcttcaagagccaagttag

SEQ ID NO: 2210 - DNA, 399 bp, Streptococcus pneumoniae
  misc_feature (1)..(399): tiling:Spneumo1:WAN024GLU; Cluster includes WAN023M1G 3152 77_807||||427621..428019|+|399 bp|EGAD orf prediction|S.pn eumoniae|R6|NC_003098.1|ORF|110
atggaagagtatcatatcgacacggttaccagtgacaaagattctatctttatccygtacagtcatgtcaccgcttggaatgataatttgatgatccctctctatcgcacagacaatgacattaccaaattttttacgaaaatcagaaatgggcatttggcaaagaccgctggtggacttgacgacaaattccatgaggctaacgcgtccaccagcaaagcgttcgacagacagggcgttggggaagtcaatgatattcgcgatagcgcgggcagccaagagctcaggattaacgataagagaaaaaccgagaatattcttttccttgaaataagagttagaatattcagggttccgcacccgaacgatagtttctttagctcccattttcttggctag

SEQ ID NO: 2211 - DNA, 630 bp, Streptococcus pneumoniae
  misc_feature (1)..(630): tiling:Spneumo1:WAN024F2X; Cluster includes WAN0244DO spr0 566||15902610|NP_358160.1|579191..579598|-|408 bp|Hypothet ical protein|S.pneumoniae|R6|NC_003098.1|ORF|211
atggaagagttagtgaccttagattgtttgtttattgacrgaactaagattgaagccaatgccaacaagtatagttttgtgtggaagaaaacgacagagaaattctccgccaaacttcaagaacagatacargtctattttcaagaagaaatcactcccctyctgattaaatatgccatgtttgataagraacaaaagagaggvyataaasagtcagctaraaacttagcgaattggcactataatgacaaggaggatagctacacacatcctgatggctggtrytatcgttttcaccataccaaayatcagaaaacacagacagactttcaacargaaatcaaggtttactacgcygaygaacctgaatcagyccctcaaaagggrctrtatatgaacgaacgctatcaaaacttgaaagctaaagaatgtcaggcgcttttatctccysaaggtagacagattttcgctcaacgcaagattgatgtgraacctgtctttgggcagataaaggcttctttgggttacaagagatgtaatctgagrggsaagygtcaagtgagaattgacatgggattggtacttatggccaataacctcctaaaatatagtraaatgaaactaactaat

SEQ ID NO: 2212 - DNA, 1593 bp, Streptococcus pneumoniae
  misc_feature (1)..(1593): tiling:Spneumo1:WAN024DAB-5; Cluster includes WAN0243Z2 sp r1093||15903136|NP_358686.1|1087705..1090890|-|3186 bp|Con served hypothetical protein|S.pneumoniae|R6|NC_003098.1|OR F|100
atggaagatgatcttaattatgaaaatttgatggatgatgtaaccgaggctataaaaaagtttaacttagtaatttttattggcgcaggagtttcaattgctcaaggttatcctaattggaacaattatattgaacatcttattaagtattggcaaggacaagttttatcggtaagtggtgaaaaaaggcttggaagagawcatcacgtagtttttgatttaattagcaaatctagtattagtaataaacgtaaagtggatcttgtaaactatgaattaaaaaaagtttttggtgaagattttgaaaagcgacgactagattttgaaaaaggatattttaaaaatctattaccatattcaatagttaatcaaacagtagaatctttagcaagtttgaatgcaatatttattwcttctaactacgactatgaaattgaaaatcatattaaacgtttaaagaatgctgtagttactattaatgatctcaatgaattyactaagaacaagaatgggaaactacaatttggtgatgttctacatatccatggaacaccagattgtgatgtaaagtattttgtaagttcatccgcagattattcaaaaacctatttaaaaaatagggaaaattttgaaaatttagtaacatggtttaaagagacaaaacctactgttttatttrttggagcaggtcttgaagaagatgaaattttatctttactttgtaaagatagtaagaactatgccttgatgaagtcagagaacacaggtaatcagagagttgatgaacattatagaggtgttgttgaaggattttttagctcagaaaatcatactcagattatttggtacggagatgaatttgagaaactacctctttttgtaaaaaaattagttgctgatattaatgaaaaattgggcacacatgatttttataatcagtggaacaatcttttgaatccttctataaatcaagaagagtataataaaaatctagatagtatttctaatgattttaagtatctaagctctgttttagataaggttattgaaaatgataataatcaactagatcagctaatgttaaatgctctgcttcggagtgaaactctaacagtaattaaaaaaaattttgtycttgcattttggargtttattgttaagaatattgaaaagttaagtgataatgagtgggatgtgatttataaaataatttatgaaggctctcaaaattactttatagatgatgtattctttgtctataattatgcgatagataataaaatttctagttttacaaataataataagcttaatgaactgagagaaattatatccaaagatggatatatcgttaattctaactttaataaagataaaactcttttgggttactggctagtaagtgcttttgaacagcaaaatcgtgatttatatataraggaagatagtgaagtakaagttaacttaaattacgaatgtgttaacaaattaatgtccatactaaataatccagaatttttaagttataattactactctatagagcatcaattaaaagagtatgatgttgttaaatttctttatgagcttgta

SEQ ID NO: 2213 - DNA, 957 bp, Streptococcus pneumoniae
  misc_feature (1)..(957): tiling:Spneumo1:WAN024FU8; Cluster includes WAN0240PA |cps 14J||CAA59782.1|||957 bp|ss-1,4-galactosyltransferase|S.pn eumoniae||X85787|ORF|000
atggaagatttagtaagcattgtcgttccggtctataatgtagaaaaatatttaaaaaaatcaatagaaagtattttgaatcaaacgtatgataaccttgaggttctattagtcgatgatggcagtacagatagtagtggggaaatttgcgattcatttattaaagttgattcaagaataagagtgtttcataaagaaaacggtggtttatcggatgctcgaaattttggaatagagcatatgaaaggccaatatgtatcgtttattgatggcgatgattatatatctaaggattatgtgtggaagttgtatcattctctaaaaaacaataattcagaggtgtctatatgttctttttcattggttgatgaaacgggtgaaaagataaaagatgagctactagattctggggaagtatccttgtctggtcaacaaatattagaaaaagcgttaacagcagatggttatcgctatgttgttgcttggaataagctttatcggtcaactttatttgaaaaattaaaatttaaaaaaggaatgttgtatgaggatgaatttcttaactatcctctattttgggactgtaaaagggtatcaattgtagaggagccgttatatttatacgttcaacgaaaaggaagcattatacaaagtaatatgactttagaaaaaataaagatgaaggataaaatgcatacatcgcgtattgaattttatgcagaaaaaaagaattcctttttacaccaacgttcgtgtcaacagtattgtaactggattgttacaataactgttagtcattacaatgttttgaatgtagcctttttaaaatatttgcaacatcaatttagaagaattgttaaatatacacaaaacgatgataagaaactgattatacagaatattttaggctatataaatattcgtttagcagcttatgtaaaatcaaaagtaatgtag

SEQ ID NO: 2214 - DNA, 954 bp, Streptococcus pneumoniae
  misc_feature (1)..(954): tiling:Spneumo1:WAN024FU9; Cluster includes WAN023PLZ pne2 8_14||||9702..10655|+|954 bp|Type 15F capsule operon, Glim mer 2.02 orf prediction|S.pneumoniae||WAN01UCCC|ORF|000
atggaagatttgataagcattgttgttccagtctataacgtggaaaaatatttaaaaaaatcaatagaaagtrttttgaatcagacttatcaaaatatcgagattttattggttgatgacggaagcacagatagtagtgggaaaatttgtgaatcatttagyaaagttgatcctaggataagagtatttcataaagaaaatggtggtttatcagatgctcggaattttggaattgagcaaatgaaaggtcaatatgtagcgtttattgatagcgatgactacatatctaaggattatgtctggaagttgtattcttctataaaaaataatgattccgaggtgtcgatttgttcttttttattagtcgatgaaaaaggggaaaaaataaaagatgagctattagattcgggaaaaatatgcttgactggtcaacaaatattagaaaaagtattaacagccgacggctatcgctatgttgttgcttggaataagctttatcggtcaactttatttgaaaaattaaaatttaaaaaaggaatgttgtatgaggatgaatttcttaactatcytctattttgggactgtaaaagggtatcaattgtagaggagccgttatatttatacgttcaacgaaaaggaagcattgtacaaagtaatatgactttagaaaaaataaagatgaaggatgagatgcatacttcacgcattgagttttattcagaaaaggggcattcttttttgcacgaaaaagcgtgtcaacagtactgcaattggattgttacagcgactaccaatcatagtaagattttaaatcctaatttttcraagtatttacaacgacagtttagaaagttcgctaaatatacacgaaacaatgatattagactaattgtrcagaacattctaggatttatagatattcgtttagcagcttatgtaaaatcaaaagtaatg

SEQ ID NO: 2215 - DNA, 656 bp, Streptococcus pneumoniae
  misc_feature (1)..(656): tiling:Spneumo1:WAN024CWZ; Cluster includes WAN02445M spr0 856|celA|15902900|NP_358450.1|849966..850616|+|651 bp|Comp etence protein|S.pneumoniae|R6|NC_003098.1|ORF|111
atggaagcaattatcgagaaaatcaaagagtataaaatcatcgtcatctgtactggtctgggcttgcttgtaggmggatttttcctgctaaarccagctccacaaacacctgtmaargaracgaatttgcaggctgaagtygcagctgtttccaaggaytyrkyrwccgaaraggaagtgaasaaggaagaraaggaagaaccmsttgaacaagatctaatcacagtagatgtcaaaggtgctgtcaaatcgccagggatttatgacttgcctgtaggtagtcgartcaatgatgctgttcagaaggctggtggcttgacagagcaagcagacagcaagtcgctcaatctagctsagaaagttagtgatgaggctctggtttacgttcctactaagggagaagaagcagttagycaacagactggttyggggacagcttcttcaayaagcaaggaaaagaaggtcaatctcaacaaggccagtctggaagaactcaagcaggtcaagggactgggaggaaaacgagctcaggacattatygaccatcgtgaggcaaatggcaagttcaagtcagtagacgagctcaagaaggtctctggcattggtggcaaaacaatagaaaagcttaaagactatgttacagtggattaactaat

SEQ ID NO: 2216 - DNA, 327 bp, Streptococcus pneumoniae
  misc_feature (1)..(327): tiling:Spneumo1:WAN024CJ3; Cluster includes WAN0242AO SP13 18||15901172|NP_345776.1|1242390..1242710|-|321 bp|v-type sodium ATP synthase, subunit G|S.pneumoniae|TIGR4|NC_00302 8.1|ORF|012
atggaagctaataagtataaaattggcataattggtagccrtgatattattttaccmtttagcatgattgggtttgatatatttyctgcctaycaagaacaagaagctataaatacwctaagaaaattagctcaatctgattatggtgtcatttatatcactgaagacattgcttcaatgatattagatacaattcgccattatgattcycaagttgtgcctgctattattttattaccgactcataaacaaggyttaaatttaggattaaaacgtatagaggataatgtagagaaagcagtaggacacaatattttactaactaat

SEQ ID NO: 2217 - DNA, 252 bp, Streptococcus pneumoniae
  misc_feature (1)..(252): tiling:Spneumo1:WAN024GGY; Cluster includes WAN023LX5 3145 28_1011||||528120..528371|-|252 bp|EGAD orf prediction|S.p neumoniae|R6|NC_003098.1|ORF|110
atggaagctagaaactggagaatcatagtaccaccgtcttgcgttttcacctcgcgctcctcaataaagagagaggttgtctggcggtctgtgtccagaggaagactgtccttgacttctaacttgtcctcggtcatctcacctttgacggtccccttgatatcactagtctgggaatacaagtctaacacttgctcgatactctgcctatctttcccttctagggactgggcaatggctgttgccttttga

SEQ ID NO: 2218 - DNA, 258 bp, Streptococcus pneumoniae
  misc_feature (1)..(258): tiling:Spneumo1:WAN024G9O; Cluster includes WAN023LNK 3132 79_1521||||807576..807833|+|258 bp|EGAD orf prediction|S.p neumoniae|R6|NC_003098.1|ORF|110
atggaaggagttgccaaaggcagaataggtcgcaaaaagaacaatgggattgataacaggtgctgtcacaagaaaaggaacggccgtgtaacttggaacctttttttccagaaaacgattgatgatggggacgattccacattcacaagaagggaaaagtataccgacaaaggtcccaaaaaagattctcccccaacgatttcgagggagaaaatgataaaccttgtcaggtgtgatataaacttcaatcagccctga

SEQ ID NO: 2219 - DNA, 408 bp, Streptococcus pneumoniae
  misc_feature (1)..(408): tiling:Spneumo1:WAN024CEJ; Cluster includes WAN023RVO cont ig_1609_56||||46044..46451|-|408 bp|Glimmer 2.02 orf predi ction|S.pneumoniae|670|WAN01UDCD|ORF|001
atggaagscatttatcaacgtgattcggatcaagatggaytaactgatgctcaagaattrgcsctaggaaccaatcctcttagykcagattctgatggtgatggwcgttcagatttagtggaartagaagaaggaaccaatcccttagaaaaggatttacaagacatagaccaaacaagtatmactgaaycrtcwtcagtatttatggaaatgaaacaaaagatttcagatatgatggagagtcactacaaggaatttatacwggctctkattagtattgaaacagggattgaaaacsaacaagacctagaagacttatatacttactacatgagaayrgatkcyrtttctcttttrtctagtgatttagaaaccagtcctcaaraggttgaaatggagatagagttg

SEQ ID NO: 2220 - DNA, 753 bp, Streptococcus pneumoniae
  misc_feature (1)..(753): tiling:Spneumo1:WAN024FOE; Cluster includes WAN023PIQ pne3 3_19||||12340..13092|+|753 bp|Type 16A capsule operon, Gli mmer 2.02 orf prediction|S.pneumoniae||WAN01UCI4|ORF|000
atggaagtgaagctatacgtcgcaacacataaatcttataatcaagttcaagaccaggacctatatatccctatattggtgggcgcggataagaatattggagaaaagaattatttaagagataatcagggagataataatatttctgatagaaactttacattttgtgaattaacaggattgtattggatttggaaaaattctaaagatgatattgttggtttatgccattatagacgttattttgggaaaaacaagcgttttttaaaacagaattctattttaaaaaagaatgatattctaaaacaattaaatgattatgatgtaatattaccatcaaagagtatgaacgagtataacgggtatactgctgaagagttttttaacaagaatcacgatcataaagtttgggaaatgtgtagacagattatttcagaaaacaataaagattaccttgatgcttttaattggttttctaaagaaaaaacaggatactgttataatatgtttataatgtctagagaaatgatggatgaatattgcagttggttatttccgattctttttgaactagataagaagattgattattcaagatatgatagttacaatactcgtatgattggttttgttgccgaacgtttaattaacgtatgggtacataagaaacaactaactgtaaaagagtttccggttttttcaacagaagaaccaggattcttacaaagaattcagaagaaattatttaataag

SEQ ID NO: 2221 - DNA, 980 bp, Streptococcus pneumoniae
  misc_feature (1)..(980): tiling:Spneumo1:WAN024CVY; Cluster includes WAN02441F spr1 007|pta|15903051|NP_358601.1|989463..990437|+|975 bp|Phosp hate acetyltransferase|S.pneumoniae|R6|NC_003098.1|ORF|111
atggaagtttttgaaagtctcaaagccaaccttgttggtaaaaatgctcgtatcgttctccctgaaggggaagagcctcstattcttcaagcaacaaaacgcttagtaaaakaaacagaartgattcctgttttgcttggaaatcctgaaaaaattaaaatttatcttgaaattgaaggaatcatggatggttatgaggtcatcgaccctcaacattatcctcaatttgaagaaatggtttctgccttggtggagcgtcgcaaggscaaaatgactgaagaagatgtacgcaaggttttggttgaagatgtcaactactttggtgtgatgttggtttacttgggcttggttgatggaatggtgtcaggagcgattcactcaacagcttcaacagttcgyccagctctacaaatcatcaaaactcgtccaaatgtaactcgtacttcaggagccttcctcatggttcgtggtacggaacgttacctatttggagactgtgccattaayatcaatccagatgcrgaagccttggctgaaattgccatcaactcagcaatcacagctaagatgtttggcatcgaacctaaaattgccatgttgagctattctactaaaggttcagggtttggtgaaagcgttgataaggtcgttgaagcaactaaaattgctcacgacttgcgtcctgaccttgaaatcgatggtgagttgcaatttgatgcrgcctttgttccygaaactgcagctctgaaagctcckggaagtacrgtagctggtcaagcaaatgtcttcatcttcccaggtatcgaggcaggaaatatyggttacaagatggctgaacgcctgggtggctttgcggctgtaggacctgttttgcaaggtttaaacaagccagttaatgatctttctcgtggatgtaatgcagatgatgtttacaagttgaccctcatcacagcagctcaagcagttcatcaatarctaat

SEQ ID NO: 2222 - DNA, 494 bp, Streptococcus pneumoniae
  misc_feature (1)..(494): tiling:Spneumo1:WAN024B2P; Cluster includes WAN02448G spr0 754|IS861-truncation|15902798|NP_358348.1|748579..749067|+ |489 bp|Degenerate transposase (orf2)|S.pneumoniae|R6|NC_0 03098.1|ORF|221
atggaamagtgctacacagatgtgacwgaatttgccattccagyaagtactcaaaagctttacttatcaccagttttagatggctttaayagcgaaattatygcytwtaatctttcdwsttcrccyaayttagaacaagtacaaacmatgttrgaacaggcattcamagagaagcactacgagaatacgattctccatagtgaccaagrctggcaataycaacacgattcttatcatcggttcctagagartaagggaattcaagcatctatgtcacgcaagggmawcagccaagacaacggtakgatggaatctttctttggyattttaaaatccgaaatgttttatggctatgagaaaacatttaaatcacttaaycaattggaacaagycattatagactatattgattaytacaacaayaarmraattaagrtaaaactaaaaggacttagycctgtgcartacagaactaaatccttyggataactaat

SEQ ID NO: 2223 - DNA, 374 bp, Streptococcus pneumoniae
  misc_feature (1)..(374): tiling:Spneumo1:WAN024CXE; Cluster includes WAN024392 spr2 031||15904072|NP_359622.1|2022029..2022397|+|369 bp|Conser ved hypothetical protein|S.pneumoniae|R6|NC_003098.1|ORF|1 11
atggaatacaaattatttgaagaatttattaccctccaagcactaytcaaagaacttggaattacacatagcggaggagctattaaatcatttctctctgaacattctgtttactttaatagggaattagagagycgtcgtggaaaaaaacttcgtattggcgataaagttgacatccctgacatgaacattgacatcttgttgacacaacctacttctgaagaacaagatgaataccaagctgataaagttgaaaaagaacggatcgctaaacttgtcaaaaagatgaataagggagttaaaaaagacaaatcgaaacctgcttcatcacctaaaagccaacaagctccacgattccctggtagataactaat

SEQ ID NO: 2224 - DNA, 1689 bp, Streptococcus pneumoniae
  misc_feature (1)..(1689): tiling:Spneumo1:WAN024G8N; Cluster includes WAN02445A spr0 868|flpA|15902912|NP_358462.1|861197..862879|-|1683 bp|Fib ronectin-binding protein-like protein A|S.pneumoniae|R6|NC _003098.1|ORF|121
atggaatacaatcacaaggagagaacgatgtcatttgayggattttttttacaccacatagttgaggaattgcgaagcgaattagtgaatggtcgcatccagaaaatcaatcagccttttgaacaagagttggtcktgcaaatccgcagcaatcgccaaagccatcgcctgctcctttctgcccatccagtttttggacgcattcagctgacccaaacgacttttgaaaatccagctcaaccttctacctttatcatggttttgagaaartatttgcagggggccctgattgagtcgattgagcaagtggaaaatgaccgtattgtggaaatkacagtttccaataaaaacgagattggagaccatatccaggctaccttgattatygaaattatgggraaacacagtaatattctactggtcgataaaagcagtcataaaatcctcgaagttatcaaacacgtcggyttttcacaaaatagctaccgcaccttacttccaggatygacctatatcgctccgccaagtacaraatctctcaatccttttactatcaargatgaaaagctctttgaaatcctrcaaacccaagaactaacagcaaaaaatcttcaaagcctctttcaaggtctgggacgcgatackgcaaatgaattggaaaggatactggttagtgaaaaactttccgctttccgaaattttttcaatcaagaaaccaagccatgcttgactgagacttccttcagtccagttccttttgcaaatcaggygggagagccttttgcaaatctttctgatttgttggacacctactataagrataaggctgagcgcgaccgcgtcaaacarcaggccagtgaactgattcgtcgtgttgaaaatgaacttcagaaaaaccgacacaaactcaaaaaacaggaaaragagttactggcgrcagacaacgctgaagaatttcgtcaaaaaggagaattgctgacaaccttcctmcaccaagtgcctaacgaccaagaccaggttatcctagacaactactataccaaccaacctatcatgattgcgcttgataaggctctgactcccaaccagaatgcccaacgctattttaaacggtatcagaaactcaaagaagctgtcaaatacttgactgatttgattgaagaaaccaaagccactattctctatctggaaagtgtagaaaccgtcctcaaccaagctggactggaagaaatcgctgaaatccgtgaagaattgattcaaacaggttttatccgcagaagacaacgggagaaaatccagaaacgcaaaaaactagaacaatatctagcaagcgatggcaaaaccatcatctatgtcggacgaaacaatcttcaaaatgaggaattgacctttaaaatggcccgcaaggaggaactttggttccatgctaaggacattcctggaagccatgttgtcatctcaggaaatcttgacccatctgatgcagtcaagacagacgcagcagagttagctgcctacttctctcaagggcgcctgtcgaatctggtgcaggtagatatgattgaagtcaaaaaactcaataaaccaactggtggaaaacccggctttgtcacttacacaggacaaaagaccctccgcgtcacaccagactccaaaaaaattgcatccatgaaaaaatccykaactaat

SEQ ID NO: 2225 - DNA, 936 bp, Streptococcus pneumoniae
  misc_feature (1)..(936): tiling:Spneumo1:WAN024FRA; Cluster includes WAN023PVW pne0 8_18||||12365..13300|+|936 bp|Type 7A capsule operon, Glim mer 2.02 orf prediction|S.pneumoniae||WAN01UCKE|ORF|000
atggaatcaaaaaaaacattaataatatttgaacaaatagatacatttgaacaatttttagaacgtaatataatttttaataatgtagacatatttacaccgtacaaaaaagtttcgaatgtttttatgcacaattttagagcaattgcaaaacgattacccggatttttattccataattggtggttagaagaatggtctagaaaattaccggattatactaatatagtagtatttgacaatgctatttcccttaaattattagagtatatagatgcacataagactcgtagttcaaagttgaaattatggttatggaatgttccgaataagcaagtgaattatttgaattcgaattatgatgtttattgctttgataagacatattctgaaaactataatttaaaatttgtagaacaattctatgtattaggttcgactaagaaaagagatatattggatattgagtatgatttttattttattggtgcagataaaggaagattgccaaaattaaaaagcttagctaagcagatagttttaaataattatagttatcgatttgacgtttttagtgtaaaaaaacagtatttcgattctgagtttgagggaattcaagttatagatacattactcccttatgatgaagtcttggataacatactagcttcgaatgttattgttgagttaaataaaaagggacaggatggtctaacccttagagcaatggaatccattttttataaaaaaaaattaataacaaataataaaaaaattattaactatgatttttatcacccaaataatattttagtttgggaggaaggaaaagatatcaaattagatgagtttattcaaaagccatatgttcaattagaaaaagatattattgaccgttattcttttagtaattggttaagtaaaattacagaaatt

SEQ ID NO: 2226 - DNA, 900 bp, Streptococcus pneumoniae
  misc_feature (1)..(900): tiling:Spneumo1:WAN024CJL; Cluster includes WAN0242LR SP08 90||15900773|NP_345377.1|838524..839489|+|966 bp|integrase /recombinase, phage integrase family|S.pneumoniae|TIGR4|NC _003028.1|ORF|011
atggaatcaaaagttacaattatcatgcaagaaatgttacctcttttaaataatgaacaattactagcgttgagagagagtttagaacatcatctagtagacggaaaaaagcagcagaagtattcgaataataacctgttgcaactatttattaccgccaagcaggtagagggctgtagctcaaaaacaattcgttattaycagaggacgattgaaaacttgtttaatgctattaaagagtctgtgacacaactcacaacagatgatttaaggagttatttagcaaattaccagtctgaaaaggattgtagtaaggcaaatttagacaatattaggcgtatattgtcttctttttttgcttggcttgagcaagaggaatatatcattaaaawtcccattcgacggatamagaaaattaagactgagcaaaatgtgaaggaaacttatactgatgaacatttggaaattatgcgtgataactgtgaaaatttgagagatttggcaataatagacctactagcatcgacaggtatgcgtgtaggggagcttgtacagttgaatcgttcagatattgattttgaaaacagagagtgtgttgtctttggtaaaggaaagaaggagagaccagtatattttgaygctcgkacgaaaattcatttaagaaattatcttaacgacagaaaagatagtcaccctgctctttttgtaacgctagttggaaaagyccagagrcttggaattgctggtgtagagattcgcttaagaaagttaggagacaaactcggcatacaaaaggttcacccacataagttcagaagaactttagcgactaaggcaattgataaaggtatgcctatcgaacaagtccaaaaactgctaggtcatagcaagattgacaca

SEQ ID NO: 2227 - DNA, 236 bp, Streptococcus pneumoniae
  misc_feature (1)..(236): tiling:Spneumo1:WAN024GBY; Cluster includes WAN024498 spr0 726||15902770|NP_358320.1|726433..726663|-|231 bp|Conserve d hypothetical protein|S.pneumoniae|R6|NC_003098.1|ORF|110
atggaatcacatttggttagaatcatcaaccgccttgaagcaatggcaaacgatggcggaaatttaaaacgtaattttgaacgcgaaggagttgttgttgcagaagttgcgtacagccacgacgaagaaaacggcccaatctttacccttcgtgacgtagaagatcgcgaaacgtatacgtttgatagcattgacttaatcgcaatggaaatttacgaacttctctactaactaat

SEQ ID NO: 2228 - DNA, 698 bp, Streptococcus pneumoniae
  misc_feature (1)..(698): tiling:Spneumo1:WAN024D54; Cluster includes WAN0244P8 spr0 150|ABC-MSD|15902194|NP_357744.1|158837..159529|+|693 bp|A BC transporter membrane-spanning permease - unknown substr ate|S.pneumoniae|R6|NC_003098.1|ORF|111
atggaatcattgattcaaacctatttaccaaatgtctataaratgggttggkctggtcaggcaggctggggaacrgctatctacytaacyctytatatgacagttctttccttcattatcggaggcttcttggggctagtggcaggtctctttctcgtcttgacagcgccaggtggtgtcttggagaataaagtcgtattctggattttagacaaaattacctcaatttttcgtgcggttccctttatcatcctcttggcaatcttgtcaccactttctcacttgattgwwaaaacaagtatcgggccaaatgcagcccttgtcccactttcttttgcagtctttgccttctttgcccgtcaggtgcaggttgtcttggctgaawtggatggcggtgtcattgaggcggctcaagcgagcggagcgactttctgggacatcgtgggtgtttacctatcagaaggtcttccagatttgatccgtgtgacgactgtgaccttgatttcccttgttggggaaacagctatggccggtgcggttggagctggtggtatcggtaacgtagccatcgcttatggatttaaccgctacaatcacgatgtgaccatcttggcaaccatyrttatcattttgattatctttgcaatccaattcttrggagatttcttgactaagaaattgagycataaataactaat

SEQ ID NO: 2229 - DNA, 234 bp, Streptococcus pneumoniae
  misc_feature (1)..(234): tiling:Spneumo1:WAN024GIF; Cluster includes WAN023LYK 3143 47_933||||488557..488790|-|234 bp|EGAD orf prediction|S.pn eumoniae|R6|NC_003098.1|ORF|110
atggaatcccttgcctrctttgaagttttcaaacttaccaagcaagaactgataagcatccaagcgactctcgtagcgaatcatggcatctttggcacgctcgtcctggtcttcttcgtaaactttttgrctttccttgtgcgccatrtcgttaatcatgatttgggtattgacccaagcttcaaattccttcataaattcttgttcgtaactcattttttctccttattctaa

SEQ ID NO: 2230 - DNA, 1041 bp, Streptococcus pneumoniae
  misc_feature (1)..(1041): tiling:Spneumo1:WAN024DCD; Cluster includes WAN023PTA pne1 3_20||||14840..15880|-|1041 bp|Type 9A capsule operon, Gli mmer 2.02 orf prediction|S.pneumoniae||WAN01UCJY|ORF|000
atggaatctaccagtaaatattggattcctgtcttcaatatccttgaaaaatcctgcaagatttgcttagctcaccctaagtatgtcaaggctatcagaggaaagaaaaccgacaagaaagatgcgcaatggatagccgacctcttcaagcatgatttggttgcttctagctttattccccctcttaaaatcagacaactccgagacctttttcgctatcgcatgaaattaacacaacttcaagtcagcgagaaaaatcgttaccagaactgtctgacttggtctaaccttcagattgcaagtgtcgtttccgacgtgttcggaaaaagtgctcaggctattattcagagcatccttgacaatccagaggacaaaccaaacattgaacagttgattcacaagagaatgaaggataaggtgcaagacttgaaaatcgctattgagggggaggtgacacctgaacaagctgagaaaatcagaatcatcaaggaacactatgatgctcttgccgtctgtaaagaagatttagaaaccatgattcggaagctcggtcacgaataccaagaacaggtcaaactgatccaaactgtgcctggtttcaaagaggaactatctgccctcagaatactctctgaaatcggagctgatatgactgtctttggtactgcaggtaaactctattcttggggcggattagttcctgccaacaatgaaagtgcaggaaagaaattctctactcgtatttcgaaaggcggtcactatctcaaaccttttcttgttcaaatagctaatgccgtggttaaatcagagaagcatcctgaactacgaaataaatatctcaaactcaagaaacgacgtggtcatcgaaaagctatcatcgctatctgtcgcagattattggttgccatctaccatgtattcctaaaacaggagagttataatccaagattacaaggccttacagaaataagaaatccagataagacaatgtccgtccaagacgctattcgcttcgcacagcagcgcggattcaatatgctt

SEQ ID NO: 2231 - DNA, 665 bp, Streptococcus pneumoniae
  misc_feature (1)..(665): tiling:Spneumo1:WAN024GGT; Cluster includes WAN0244EM spr0 532|glnP|15902576|NP_358126.1|532102..532761|-|660 bp|ABC transporter membrane-spanning permease - glutamine transpo rt|S.pneumoniae|R6|NC_003098.1|ORF|211
atggaatctattttagaarttttaaccccagataacctagtctttatctttaaaggatttggcttgaccctctatatttctctgattgccatcatcctctctactatcatcggtacsgtgctwgcygtcaygmgaaatggmaaaaatcctrtcttacgcattatttccagtatttatatcgagtttgtgcrcaacgttcccaaccttctctggatttttactatctttttggtgttcaaaatraartccacaccagcaggtattacagcctttactctctttacatcagcagccttggctgagattattcgaggcggtctcaatgccgtagacaagggacartacraagcaggaatgtcacaaggcttcacctcagcccaaatcctctactacatcattctcccacaagccakccgcaaaatgctaccagccatcatttctcagtttgttaccgtgattaaggataccagtctcctctactctgttatcgccctacaagaactctttggagccagccaaattctcatgggccgttatttcgaaccagagcaggtcttcagtctttacatcctgattgccctcatctacttcagctttaacctagcaatttctarcctgtctcatatgctagcmaaacgttggcaacaagctgcagaataactaat

SEQ ID NO: 2232 - DNA, 1461 bp, Streptococcus pneumoniae
  misc_feature (1)..(1461): tiling:Spneumo1:WAN024FKT; Cluster includes WAN0243LW spr1 568|scrB|15903610|NP_359160.1|1548764..1550218|+|1455 bp|S ucrose-6-phosphate hydrolase|S.pneumoniae|R6|NC_003098.1|O RF|221
atggaatggacaactgagcgtcgttacagactttatcaagattggacgcaagaagaaattcaacatataaaggaaaatatggcacaatctccatggcatactcattaccatgttgagccaaaaacaggacttctcaacgacccaaatggcttttcttacttygatggcaagtggatcctcttttaccagaattttccttttggtgcagcccacggtttraaatcttgggcacagctagaaagtgatgatttgrttcactttaragaaactggartcaaagttttrccagatactccattagatagycacggtgcctactctggttctgccatgcaatttggcgataacttattcctattttatacaggaaatgttcgcgatraaaactggatccgtcacccataccaratcggtgctttgatggacaaggagggtaagattacaaagattgacaagatcttgattgaccagccagcagactctactgaccacttccgcgatccacaaatttttaactttmarggtcaataytatgcyrtygtcggyggacargacttggagaaaaaaggyttcgtycgtctctacaaggctgtcaataacgactacacaaactggcaagcagttggcgaccttgactttgctaacgaccgtactgcctacatgatggaatgtcctaatytggtctttgtaraggaacadcctgtccttctctactgtccacaaggattggataagaaagttctagactacgataatatctttccaaatatgtataagatyggggcttcctttgaccctaaaaatgccaaaatggtagatgtgtctcaacttcaaaacatggattacggtttcgaagcctatgcaactcaagccttcaacgctcctgatgggcgtgctctagcagttagctggcttggtttgccagatgtttcttacccatctgaccgttttgaccaccaaggaaccttctctttggtcaaggaactcactatcaaagacgacaagctctaccagtatccagtcgctgctattaaggaccttcgtrcttctgaagaagccttctcaaaccgttyycaaaccaagaacacttacgaacttgaactcaacttggaagctaatagccagagcgagattgtcttacttgctgataaagaaggtaagggactttcaatcaactttgaccttgtaaacggtcaagtracagtggatcgtagccaggctggagarcagtatgcccaagaatttgggayaactcgttcttgccctatcgagaatcaggctactactgctacaatcttcatcgataactctgtctttgaaattttcatcaataaaggagaaaaagtattttctggtcgtgtcttcccacatgcggaccaaaatggtatcctgatyaaatctggaaacccaactggaayttactatgaattagattatggtcgcaaaactaacykaactaat

SEQ ID NO: 2233 - DNA, 176 bp, Streptococcus pneumoniae
  misc_feature (1)..(176): tiling:Spneumo1:WAN024D4Q; Cluster includes WAN0243KC spr1 624||15903666|NP_359216.1|1599538..1599708|+|171 bp|Conser ved hypothetical protein|S.pneumoniae|R6|NC_003098.1|ORF|1 21
atggaatggcttaaacaatatcgatatccaattatcgctggtctcataggcgtatttctggcttgtttgattgtctcctttggcttcttcaaaacaatatttgtattgattttaggagcactgggagttgcagctggattatatatcgaaaaaaactatatagataaataactaat

SEQ ID NO: 2234 - DNA, 317 bp, Streptococcus pneumoniae
  misc_feature (1)..(317): tiling:Spneumo1:WAN024DDS; Cluster includes WAN024474 spr0 802||15902846|NP_358396.1|805060..805371|+|312 bp|Hypothet ical protein|S.pneumoniae|R6|NC_003098.1|ORF|111
atggaattaaaagattttacagaaaaagaacaggaaatgattaagaaaaggcttacaatgtctaatattagtgacaaagaaactrctgagaagattctggcgctagtmccacaagacttgattaagcraatcccgttttttgtcagaaaacatgctacaacacgtacgattaaacgcatttyaattgaayaccctgaactctacgctgtagctcaaacaagtggtgagattccagaaaaaraaygcgaagaattgcgtcagattatcacaactatctttgaacaaaagatgaataagcatagtattaagtarctaat

SEQ ID NO: 2235 - DNA, 1464 bp, Streptococcus pneumoniae
  misc_feature (1)..(1464): tiling:Spneumo1:WAN024FZ4; Cluster includes WAN0240V6 |mel ||AAK69028.1|||1464 bp|Mel|S.pneumoniae||AF274302|ORF|000
atggaattaatattaaaagcaaaagacattmgtgtggaattcaaaggacrcgatgttttagatataaatgaattagaagtatatgattatgaccgtattggtttagtaggagcaaatggtgcwggaaaaagcactttaytcarggtacttttaggagaattaaytcccccaggatgtaaaatgaatcrtctgggtgaacttgcctatattccccagttggacgaagtaactctgcaggaggaaaaagattttgcrcttgtaggcaagctaggtgttgagcaattaaatatacagacyatgagcggtggtgaagaaacaaggcttaaaatagcacaggccttatcggcacaggttcatggtattttagcggatgaacctacgagccatttagaccgtgaaggaattgattttctaataggacagctaaaatattttacaggtgcactgttagttattagccatgaccgctattttcttgatgaaatagtagataaaatatgggaactgaaagatggcaaaatcactgagtattggggaaactattctgattatcttcgtcagaaagaggaagaacgtaagagmcaagctgcagaatacgaacaatttattgcggaacgtgcycgattggaaagggctgcggaggaaaagcgaaaacaggctcgtaaaatagaacagaaggcaaaaggttcttcaaagaaaaaaagtactgaagrcggagggcgtttagctcatcaaaaatcaataggaagtaaggaaaaaaagatgyataatgcygctaaawccctagagmacaggattgcggcmttaggaaaagtagaagctccggaaggcattcgcagaattcgtttcaggcaaagtaaagcattggagctccataatccataccctatagtcggtgcrgaaattaataaagtatttggggataaggcwctgtttgaaaatgcatcttttcaaattccgytaggagcaaaagtggcrttaackggtggtaatggaaycggaaaaacaactttaatccaaatgatcttaaaccatgaagaaggaatttctatttcrcctaaggcaaaaataggttactttgcacagaatggttacaagtacaacagtaatcagaatgttatggagtttatgcagaaggattgtgaytacaatatatcagaaattcgttcwgtgctagcatctatggggttcaaacagaacgatattggaaaaagyttatctgttttaagcggtggagaaattataaaattgttgcttgctaaaatgctcatgggtagatataacatcctaataatggatgaacccagtaacttccttgacataccaagtttagaggctttggaaatactaatgaaggagtacaccggaactatcgtgtttatcacccacgataaacgattactcgaaaatgtagcwgatgtagtttatgaaattagagataagaaaatwaakctgaaacattaa

SEQ ID NO: 2236 - DNA, 771 bp, Streptococcus pneumoniae
  misc_feature (1)..(771): tiling:Spneumo1:WAN024FCI; Cluster includes WAN0243J7 spr1 665|dpnC|15903707|NP_359257.1|1637672..1638436|-|765 bp|Ty pe II restriction enzyme DpnI (dpnC)|S.pneumoniae|R6|NC_00 3098.1|ORF|110
atggaattacaytttaatttagaattagtagaaacctataaaagtaatagccaaaaggcacgtatcttaacggaggattgggtttatcgtcagtcttattgccctaattgtgggaacaatcccttaaatcattttgaaaataatcggcctgtagcagatttttactgtaatcattgtagtgaggagtttgaactaaagagcaaaaaaggaaatttttcatcaacaatcaatgatggtgcttatgcaacgatgatgaagcgtgtgcaggcagataataatcctaatttcttttttttaacttacacaaaaaattttgaggtaaataactttcttgtccttccgaagcaatttgttacaccgaaatcgattattcaaagaaaaccacttgcaccaactgctagacgagcaggttggattggttgtaacattgatttatcacaagtaccttctaaaggaaggatatttcttgtgcaagatggacaagttagagatccagaaaaagttacaaaagaatttaagcaaggtttatttttaaggaagagctctctgtcatcaagaggttggacaatagaaattctaaattgtatagataagatagagggttcagaatttacccttgaagatatgtatcgttttgaaagtgacctaaaaaatatctttgttaagaacaatcatatcaaagaaaagattaggcaacagcttcaaatattaagagacaaagaaataatagaatttaaaggtagaggaaagtatcggaaattaykaactaat

SEQ ID NO: 2237 - DNA, 512 bp, Streptococcus pneumoniae
  misc_feature (1)..(512): tiling:Spneumo1:WAN024DKY; Cluster includes WAN0244OA spr0 184||15902228|NP_357778.1|193581..194087|+|507 bp|Hypothet ical protein|S.pneumoniae|R6|NC_003098.1|ORF|111
atggaattacgcagaccaagattagcggataagaaagctgttttagatatgatgacagagtttgaaaarwkycartcgcctcaygayggmggwttytgggatacagagaaytttgtgtatgaagastggttrgaaagcaatcaggaacaggaaatgggrattaatctgcctgaaggatgggttyctgcaattcagttagtggctttttctgagaaaggtcaagcagttggatttcttaatctccggttgcgcctcagtaactttytactagaagaaggtggscacattggctactccatycgtccatctgaaagaggcaagggttatgcaaaagagactctccgtcagggcttgcaagttgctaaggaaaagaacatcaagaaagctctggtgacctgtagygtgaataatcctgctagcagagcagtcattctagcaaatggtggaatatttgaggatgctcrcaatggagtcgagcgttattggatagaggtagcgaatgaataactaat

SEQ ID NO: 2238 - DNA, 698 bp, Streptococcus pneumoniae
  misc_feature (1)..(698): tiling:Spneumo1:WAN024D5I; Cluster includes WAN0244BS spr0 634|tenA|15902678|NP_358228.1|642193..642885|+|693 bp|Tran scriptional regulator of extracellular enzyme genes|S.pneu moniae|R6|NC_003098.1|ORF|111
atggaatttacagatattgcgatggaattatccaagaaagcttggcaggcwtcctttcatcatccctttattttacaattacaagaggggaatttagaacctgccattttccgctattacctgattcaggatgcctactatctgaaggyyttctcagaaatctatcatctkttggctgataagacttcaaaccaagagatgaaaagactcttgaaacaaaatgctcagggtttagtggagggtgagttatttattcgccaacaatttttcaaggaattggaaatcarcgaccaggaaatggagcaacatccaatcgctccaacctgttatcattacatttctcatatttataggcaatttgcagarccgaacttagccatmgcttttgcaagcttgcttccttgtccttggttataccatgatataggcaaatcacttaatcttaaaccatcaccaaatcctctctatcaacaatggattgaaacttatattacggatgagttagagcaacagatcagagaggagggagcaytggtcaatcagctctatcgagaaagtgaygagacagayaagcaaaaaatgctagatrccttccacatcagtgttcatatggaagccaagttttgggaratggcytaccaacaccagacatggaagagcgatttacagtctttagaaaaaggagaagaatarctaat

SEQ ID NO: 2239 - DNA, 641 bp, Streptococcus pneumoniae
  misc_feature (1)..(641): tiling:Spneumo1:WAN024CXL; Cluster includes WAN02439J spr2 014||15904055|NP_359605.1|2007310..2007945|+|636 bp|Conser ved hypothetical protein|S.pneumoniae|R6|NC_003098.1|ORF|1 11
atggaatttaggacaattaaagaggacggycaagtccaagaagaaatcaaaaaatctcgctttatctgccatgccaagcgtgtttatagcgaagaagaggctcgtgacttcattactgccatcaaaaaagaacactacaaagcgacacataactgctctgccttyattattggagaacgtagtgaaattaaacgtacaagtgatgatggtgagcctagtggtactgctggtgttcccatgcttggggtactagaaaatcacaatctcaccaatgtctgtgtggtcgtgacacgctactttggtggtattaaactaggcgctggaggactaattcgtgcttacgccggcagtgtcgccttagctgtcaaagaaattggtattattgaaataaaagaacaggctggcattgctattcaaatgtcttatgctcagtaccaagagtacagtaacttccttaaagaacatgrtctcatggarctggatacaaactttacagatcaagtcgatacgatgatttatgttgataargaagaaaaagaaactattaaagctgcacttgtggagttttttaatggaaaagtcactttaactgaccaaggtttacgagaggttgaagttcctgtaaacttagtgtaactaat

SEQ ID NO: 2240 - DNA, 674 bp, Streptococcus pneumoniae
  misc_feature (1)..(674): tiling:Spneumo1:WAN024C7U; Cluster includes WAN0244MX spr0 233|talC|15902277|NP_357827.1|225040..225708|+|669 bp|Tran saldolase C|S.pneumoniae|R6|NC_003098.1|ORF|111
atggaatttatgcttgacacattaaatttagatgagattaaaaagtggtctgaaattttgccgctagctggggtaacttcaaatcccactattgcaaaaagagagggttctattaatttttttgaacgaatcaaagatgtaagagaattgattggctctacaccctctattcatgttcaggtgatttctcaagattttgaaggcatcttaaaggatgctcatraaattcgaagacaagcaggagatgatatatttatcaaagtacctgttactccagctggattacgtgcaataaaggygctaaaaaaagagggctaccatatcactgcaacagctatttatacagttattcagggattattagctatcgaagyaggagcggattacctagctccatattataatagaatggaaaatctgaacattgattcaaattctgtcattcgtcaattagytcttgctrttgatagacagaactctcctagtaagattttrgctgcatcctttaaaaatgtagcacaagtaaataatgctttagctgcaggtgcgcatgctgttacagcaggagcrgatgtttttgaatcagctttcgccatgccatctatccaaaaggcggttgatgatttttctgacgattggtttgttaytcaaaatagtcgttccatttarctaat

SEQ ID NO: 2241 - DNA, 303 bp, Streptococcus pneumoniae
  misc_feature (1)..(303): tiling:Spneumo1:WAN024AVS; Cluster includes WAN0244VG |||| ||186 bp|Incyte orf contig SPN2C0136 11-196|S.pneumoniae|2 3F|WAN0244VG|ORF|001
atggaatttctaggaaaggacttgcataacgtagcgattcctcacacagatattgttcataatctagctgagaaagtggtggttgttcgattagaaaaaccagtcactttccacaatatgatagctcctgataaggaagtagaagtatctctactcttctttatcattaacaatycaagttcaagtcaaacgaacattctggctcagtygatggactttytcacaggaaatggtcatcttgaagacctatcaaaaatttctgaaccagaaaaactttatgcttacattgctgaagcaaccgct

SEQ ID NO: 2242 - DNA, 291 bp, Streptococcus pneumoniae
  misc_feature (1)..(291): tiling:Spneumo1:WAN024GE5; Cluster includes WAN023LTC 3146 99_1198||||633015..633305|-|291 bp|EGAD orf prediction|S.p neumoniae|R6|NC_003098.1|ORF|110
atggaatttctcaggaagaggacgaagagccttagacaagtgtgtgatgtgggttgccttgatagagagttctcccatatccgtacgcatcacttcaccttcgacaccaaggaagtcaccaaggtctgcttttttgaagatttcgtagttttcttcaccgacagcatccttacgaacrtagatctgaatctggccttcgcggtcttgaaggtgggcaaaaccaacttttcctttaccacgtttggttaycaagcgtcctgcgatagtagctgtttcgtttttatcgtgtaa

SEQ ID NO: 2243 - DNA, 1832 bp, Streptococcus pneumoniae
  misc_feature (1)..(1832): tiling:Spneumo1:WAN024DUW; Cluster includes WAN0243A8 spr1 989|glpD-truncation|15904030|NP_359580.1|1980346..1980843| -|498 bp|Glycerol-3-phosphate dehydrogenase, truncation|S. pneumoniae|R6|NC_003098.1|ORF|411
atggaattttcaaaraaaacacgtgaattgtcaattaaaaaaatgcaggaacgyaccctggacctcttgattatcggtggaggaatcacaggagctggtgtagccttgcaggcggcagctagcggtcttgagactggtttgattgaaatgcaagactttgcagaaggaacatctagtcgttcaacaaaattggttcacggaggwcttcgytacctcaaacaattygacgtmgaagtggtctcagatacggtttctgaacgtgcagtggttcaacaaatcgctccacacattccaaaaycagayccaatgctcttaccagtttacgatgaagatggagcaacctttagcctcttccgtcttaaagtagccatggacttgtacgacctyttrgcaggtgtkagcaacacrycarctgcgaacaaggttttgagcaagrawsaagtcttggaacgccagccaaacttgaagaaggaaggcttggtaggaggtggagtgtatcttgacttycgtaacaacgatgcgcgtctcgtgattgaaaacatcaaacgtgccaaccaagacggtgccctcattgccaaccacgtgaaggcagaaggcttcctytttgacgaaagtggcaagattacaggtgttgtagctcgtgatctcttgacagaccaagtrtttgaaatcaaggcccgtctggttattaatacaacaggtccttggagtgataaagtacgtaatttgtctaataagggaacgcaattctcacaaatgcgccyaactaagggagttcacttggtagtrgattcaagyaaaatcaaggtttcacagccagtttmmttygacacaggtttgggtgacggtcgtatggtctttgttctcccacgtgaaaacaagacttactttggtacaactgatacagactacacaggtgatttggagcatccaaaagtaactcaagaagatgtagattatctacttggcattgtcaacaaccgcttyccagaatccaacatcaccattgatgatatcgaaagcagctgggcaggtcttcgtccattgattgcagggaacagtgcctctgactataatggtggaaataacggtaccatcagwgatgaaagctttgacaacttgattgcgactgttgaatcttatctctccaaagaaaaaacacgtgaagatgttgagtctgctgtcagcaagcttgaaagtagcacatctgagaaayatttggatccatctgcagtttctcgtgggtctagcttggaycgtgatgacaatggtctyttgactcttgctggyggtaaaatcacagactaccgtaagatggstgaaggmgctatggagcgcgtggttgacatcctcaaagcagaatttgaccgtagctttaaattgatcaattctaaaacttaccctgtttcaggtggagaattgaacccagcaaatgtggattcagaaatcgaagcctttgcgcaacttggagtwtcacgtggtttggatagcaaggaagctcaytayctrgcaaatytttacggttcaaatgcaccgaargtctttgcacttgctcacagcttggaacaagygccaggwctyagcttggcagayacyttgtcccttcactatgcaatgcgcaaygagttgrctcttagcccagttgacttccttcttcgtcgtaccaaycayatgctctttatgcgtgatagcttggatagyatcgttgagccarttttggatgaaatgggacgattctatgactggacagaagaagaaaaagcaacttaccgtgctgatgtmraagcarctctygctmahaaygayttagcagaattaaaaaattaactaat

SEQ ID NO: 2244 - DNA, 1208 bp, Streptococcus pneumoniae
  misc_feature (1)..(1208): tiling:Spneumo1:WAN024GGV; Cluster includes WAN0244EN spr0 531||15902575|NP_358125.1|530654..531856|-|1203 bp|Hypothe tical protein|S.pneumoniae|R6|NC_003098.1|ORF|111
atggaattttctatgaaatcagtcaaaggactactctttatcatagctagttttatcttgactcttttgacttggatgaacacttctccccaattcatgattccaggactagctttaacaagcctatctctgacttttatcctagccactcgtctcccactactagaaagctggtttcacrgtttggagaaggtctacaccgtccacaaattcacagcctttctctcmatcatcctastaatctttcataactttagtatgggcggtttgtggggctctcgcttagctgctcagtttggyaatcttgccatctatatctttgccagcatcatccttgtcgcctatttaggcaaatacatccaatacgaagcttggcgatggattcaccgyytggtttacctagcctatattttaggactctttcacatctacatgataatgggcaatcgtctccttacatttaatcttctaagttttcttgttggtagctatgcccttttaggcttactagctggtttttatatcatttttctatatcaaaagatttccttcccctatctaggrraaattacccatctcaaacgcttaaatcmcgrtactagagraattcaaatccayyttwgmagacctttcaactatcaatcaggacaatttgcctttctaaagattttccaagaaggctttgaaagtgctccrcatcccttttctatctcaggaggtcatggtcaaactctttactttactgttaaaamttcaggcgaccataccaakaatatctatgataatcttcaagccggcagcaaagtaaccctagacagagcttacggacacatgatcatagaagaaggacgagaaaatcaggtttggattgctggaggtattgggatcacccccttcatctcttacatccgtgaacatcctattttagataaacrggttcacttctactatagcttccgtggagawgaawatgcagtctacctwgatttactccgtractatgctcagaaaaatcctaattttgaactccatctaatcgacagtacraaagacggctatcttaattttgaacaamaagaagtgcccgaacatgcaaccgwckatatgtgwggwcctatttckatgawgamggcacttgsmaaacagrttaagaaacaaaatccaaaaacrgagcwtatttackaaskawtcaagttcaaataactaat

SEQ ID NO: 2245 - DNA, 770 bp, Streptococcus pneumoniae
  misc_feature (1)..(770): tiling:Spneumo1:WAN024DFZ; Cluster includes WAN0244CA spr0 616||15902660|NP_358210.1|626460..627224|+|765 bp|Hypothet ical protein|S.pneumoniae|R6|NC_003098.1|ORF|111
atggaatttttcatttgtaatcttgtacgagtcgttcaatcacctcgrttttatatgtctttatttttgacccttctttgcatgagtttaggaaatttycttgctttcaatggtatttataaaattgaaggtttatcgattttttttgccgcttcttctattcgaggattttcaccgattagcctagtagctgcacttatctgtacactgccctattctagtcagataatagaggatgctgagagtcattttctaacagcacaattgtgycgaatttctaaaaagargtatctrgctattgtrggtagtactgyaattatttcttcttttctagtcttttttctcccctatttattattattaggaattaatcttttagtgactccttatcaggaaatttatattggagmttatagtggtgccttaaaagaattatttgattcyaatcagttkctctatagtcttgtracgactctytggtatggagtttggggcgctgtgttctctatttttggactagctagtgctttgctagtgaagaaaaaawtaggagctattttcatcccagttrcctatatgatggttggtggtattttwtgggctattttagggctatcttacttagaacctgtgacaacrytagctttgggatatcagaaagatatcagtctttccttagttagtgskcatcttgcttttattttatttgttagttgtttggttgtttatggtacattttttctacattcagaggactaygtataactaat

SEQ ID NO: 2246 - DNA, 1263 bp, Streptococcus pneumoniae
  misc_feature (1)..(1263): tiling:Spneumo1:WAN024EV5; Cluster includes WAN0244S9 spr0 041|IS1167|15902085|NP_357635.1|40224..40991|-|768 bp|Tran sposase (orf2)|S.pneumoniae|R6|NC_003098.1|ORF|299
atggaayaattacattttatcacaaaaytactmgayatyaaagacmcwaayrtccarattwtarayrtcrtcaatarrgatacacacaaggaaatcatcgccaaactggactacgacgccccatcttgccctgagtgcggaarycaawtgaagaaatatgactttcaaaaaccttctaaaattccttatcttgaaacgactggtatgccyacwagaattctccttagaaarcgycghttcaagtgctatcastgytcaaaaatrryggtygctgaractycymtvryhaakaaraatcaccaaatccctcgtatcatcaaccaaaarattgckcaaaagttaattgaaaaratttctatgactgatattgcccatcagctttccatctcaacttcaactgttattcgtaagctcaatgaytttcactttaaacatgatttttckygtcttcctgagattatgtcttgggatgagtatgcttttacaaadggaaagatgagcttcatkgmgcawgrkkttramaakctcratatcatcactgttcttrarggwagaacacaagctrtcatycgaratcactttcttmrmtaygatagagyygtccgatgtcgcgtcaaaatyattactatggatatgtttagyccttactatgayttagctagacaacttttcccrwrtgctaaaatcgtkytkgatcgctttcacattgtrcaacatcttagccgtgctatgagtcrtgtgcrtgtycaratyatgaaycarttksatcgaaartcycatgaatacaaggctatcaagcgctamtggaarctcatwcaacagratagycgtaaactsagygataarcrwttttatcgycctacttttcgtatrcayttaacmaataaagarattytwracaagmttttragytattcrsaaracytgaamcmymaytatmavmycwatcarctcttrctktttcayttycagaayaarrmmccdgagaaatttttcgrrytyatygaggacaatctdaagcargytcmtyctmtttttcagactgtctttaaaaccttyctmaarrayaaararaarvtyrtcaacrcccttcaaytacmytattchaaygycaaayyggaagcgaccaataatctcatcaaacttatmaagcgcaatgcctttggttttcgraactktgraaayttcwaaaaacggattttyatcgcyytgaayatcaaaaaagaaaggacraaatttgtcctttctcrarctctarctaat

SEQ ID NO: 2247 - DNA, 633 bp, Streptococcus pneumoniae
  misc_feature (1)..(633): tiling:Spneumo1:WAN024DKL; Cluster includes WAN0244N9 spr0 221|ABC-MSP|15902265|NP_357815.1|214280..214906|-|627 bp|A BC transporter membrane-spanning permease - iron transport |S.pneumoniae|R6|NC_003098.1|ORF|121
atggaaygtaaaaaactaaatatttggacagyytcctctttcttcmtctttcttacctatcytrtctttctcgtttatcctatcrttaccgtgctcaagcaagcacttatacaykaaskamwattctcactagctaattttgtcactttctttagtaaarcctactactctgagacactagtcaacagtttcarggtttccattaccgctactrtcacttccttagttgtaggaaccctattagcttatctcttctctatgtatgacttcmaggggragaaatttctacaaatattgattatcattgcttccatgtcagctcctttcgtaggagcctactcctggrttctcttgctrrgacgaaatgrggtcatcactaaatttttgacaaatgcccttyatcttccagctatcgatatttatbkawyyaawggaaktrtacttgtctttacactgcaactattcccactggtatttctatatgttgctggaacaatgaacagtattgacaattctctacttgaagcagctgaaagcatggggtccttcggatttaarystatcgtaacggttgttttacctctyctagttycaaccttactagcagctccttgcttgtatttaykaactaat

SEQ ID NO: 2248 - DNA, 857 bp, Streptococcus pneumoniae
  misc_feature (1)..(857): tiling:Spneumo1:WAN024GLR; Cluster includes WAN0243N9 spr1 518||15903561|NP_359111.1|1496473..1497324|+|852 bp|Conser ved hypothetical protein|S.pneumoniae|R6|NC_003098.1|ORF|1 11
atggacaaaccagatatcgcaactrtcattgattcacattttgaagaaatgacagaccyagarcaagaaatcgctcgctattttttrcaagcwgaaacsattmmagatgayytwtcytcycaacargtcacycaaaaattacatatytctcaagctgcwytgacccgctttgctaaaaagtgtggctttactggctaccgagaatttattttccaataccaacatsaggcagaaaatcaagccaaccaagtytccaagcayagtccactgaccaaacgagtcctcakaagytatagyaatatgagggaacaaacacaagacttgattgacgaartccaactagarcgaattgcccarytaatcgaagatgctgagcgtrtctacttcttyggaacaggragttctggcctygtygcycgtgaaatgaaattacgyttyatgcgwytrggtgtggtctgcgaagctttgacmgaycaagacggctttgcctggacaaccagcatyatggaygaaaattgtctmgtactkggyttctcactttcaggctcaactccttctattttagatagtctattrgatgcyaaggagatgggrgcaaagactgtactctttwcaagtgttcccaataaaratagccagrcctatacwgagacygttcttgtagcyacccacagccarccytcctayatccaacgwatatccgctcaacttcctatgctcttctttatcgatttgatttatgcctactttttggaaatcaatcgygaaagcaaggaraaaatctttaatagctaytgggaaaataaraaactcaacggctatcgtagacaaaaacgtgtmagaaaatcctarctaat

SEQ ID NO: 2249 - DNA, 899 bp, Streptococcus pneumoniae
  misc_feature (1)..(899): tiling:Spneumo1:WAN024CVC; Cluster includes WAN0242WL SP04 67||15900383|NP_344987.1|445791..446576|+|786 bp|sortase, putative|S.pneumoniae|TIGR4|NC_003028.1|ORF|010
atggacaacagtagacgttcacgaaaaaaaggcacaaaaaagaagaaacatccgctgatccttcttctgattttcttagtaggattcgccgttgcgatatatccattggtgtctcgttattattatcgtattgagtcaaacgaggttattaaagagtttgatgagacggtttcccagatggataaggcagaacttgaggagcgttggcgcttggctcaagccttcaatgcgaccttgaaaccatctgaaattcttgatccttttacagagcaagagaaaaagaaaggcgtctcagaatatgccaatatgctaaaggtccatgagcggattggctatgtggaaattcctgcgattgatcaggaaattccgatgtatgtcggaacgagtgaggamattcttcagaarggsgcaggrytgytagarggrgcttcgytrcckgttggwggtgaaaatacccayacagtkrtcactgctcayagaggattrccracggcagaaytgttyagtcaattggataagatgaaaaaaggggatrtcttttatcttcacgttttagaycaggtgttggcctaccaagtggatcagatwktgacggtkgagccraatgactttgagcctgtcttgattcaacatggggaagattatgcgaccttgttgacytgtacaccgtatatgattaacagtcatcgtctgttggtacgtgggaagcggattccgtatacggcaccaattgcagagcgraatcgagcggtgagagagcgtgggcaattctggttgtggttattrctagsrgcgwtggykrtsatyctkstmttgmkktaysgsgtgtatcgtmatcgwcgsattgtcaaaggrctagaaaarcaattggaggrgcrtcatgtcaaggmctaactaat

SEQ ID NO: 2250 - DNA, 542 bp, Streptococcus pneumoniae
  misc_feature (1)..(542): tiling:Spneumo1:WAN024D83; Cluster includes WAN0243RK spr1 363|atpH|15903406|NP_358956.1|1346301..1346837|-|537 bp|Pr oton-translocating ATPase, F1 sector, delta-subunit|S.pneu moniae|R6|NC_003098.1|ORF|111
atggacaagaaaacagtaaaggtaattgaaaaatacagcatgccttttgtccaattggtacttgaaaaaggagaagaagaccgtatcttttcagacttgactcaaatcaagcaagttgtwgaaaaaacaggtctgccttcttttttaaaacaagtggcagtagacgagtcggataaggaaaaaacaattgcttttttccaagattctgtgtcrcctttattacaaaactttatccaggttctggcctacaatcacagagcaaatcttttttatgatgtgcttgtagattgcttgaaccgacttgaaaaagaaacaaatcgatttgaagtgacgattacgtctgctcatcctctaactgatgaacagaagactcgtttgctccctttgattgagaaaaaaatgtctctgaaagtaaggagtgtaaaagaacaaatcgatgaaagtctcattggtggttttgtcatttttgccaatcacaagacaattgatgtgagtattaaacaacaacttaaagttgttaaagaaaatttgaaatarctaat

SEQ ID NO: 2251 - DNA, 234 bp, Streptococcus pneumoniae
  misc_feature (1)..(234): tiling:Spneumo1:WAN024FCJ; Cluster includes WAN023KQ1 3133 04_3069||||1636309..1636542|-|234 bp|EGAD orf prediction|S .pneumoniae|R6|NC_003098.1|ORF|110
atggacaagtggagctaccgcaacaggagagaagtccaccaagcccatagtagcagcaatggcagttccaacaaccagaccaatcaaaatagagatagacttgataaatcctttggtaaagatgttgatcaagaggataatcagaacagtaatagctgcaagcaagagactttgaccagttggctctggaacgttatttcccatatttccaatagcgacagggatcaaggttaa

SEQ ID NO: 2252 - DNA, 123 bp, Streptococcus pneumoniae
  misc_feature (1)..(123): tiling:Spneumo1:WAN0249MO; Cluster includes WAN024E86-rc R 6.IG_1721||||1645521..1645643|-|123 bp|Between spr1672 (cz cD) (- strand) and spr1673 (+ strand)|S.pneumoniae|R6|NC_0 03098.1|IG-rc|110
atggacacttaaggcaaattgttcagaactgaataaagctgacgttttgcttctatcctttctttgagttttagtggataatgataatgaacaaggtgttcataaatctattataacaaagga

SEQ ID NO: 2253 - DNA, 333 bp, Streptococcus pneumoniae
  misc_feature (1)..(333): tiling:Spneumo1:WAN024FSR; Cluster includes WAN023L6H 3148 95_2338||||1253987..1254319|+|333 bp|EGAD orf prediction|S .pneumoniae|R6|NC_003098.1|ORF|110
atggacagccaaggtttctgcttgacggaagatagagatggggctagtcacactgaggatattccagttagaccagtcaagagctggcgccgattgccctgctgtatagatcagagctgcagcttcgccaaagatacgaccagatgccaagacgacacccgttacaatacctggaagcgcttcyggaataacaacatgaaccactgtctcccagcgagaaatcccaagagccagaccagcctcacgttgggtatggtgaacgtgtttcaaactatcctctacattacgcgtcatctgaggcaagttaaagactgtcaaggccaaggcacctga

SEQ ID NO: 2254 - DNA, 252 bp, Streptococcus pneumoniae
  misc_feature (1)..(252): tiling:Spneumo1:WAN024GMV; Cluster includes WAN023M22 3143 61_767||||397564..397815|-|252 bp|EGAD orf prediction|S.pn eumoniae|R6|NC_003098.1|ORF|110
atggacagcttccgtaatgatacgcggaatatcagctgtctcacgaacttggtaattgtacttagtgattggcatggtaattccyacgatgtctgcctcctgaaaggcatccttcccaatccctgctcgcgccacctgacctgtaaagaccaaaaggggaacgctatcgctcatrgcatccgcaatccctgtaatggcatttgttgctcctggtccactagtgacgacggcaacacccaactttccagttga

SEQ ID NO: 2255 - DNA, 318 bp, Streptococcus pneumoniae
  misc_feature (1)..(318): tiling:Spneumo1:WAN024G8H; Cluster includes WAN023LLN 3146 52_1628a||||863910..864227|-|318 bp|EGAD orf prediction|S. pneumoniae|R6|NC_003098.1|ORF|110
atggaccttatcgattttattcaccaccaaaatcacaggaaccttggcagccttgagacgctcgataatcatatcgtcccccttaccacgcgcttcatcagcaggcaccatgaaaagaacagtgtccacttcgcgaagggtactgtaggcagactcaaccatgaaatctccgagagctgttttaggyttgtgaatccctggtgtgtcgataaagacaatttgctccttatcagtcgtgtaaattcccatgattttattgcgcgttgtctgcgccttgtcactcatgatggcaatcttttgccccataacgtgatttaa

SEQ ID NO: 2256 - DNA, 135 bp, Streptococcus pneumoniae
  misc_feature (1)..(135): tiling:Spneumo1:WAN024ARL; Cluster includes WAN024EQG R6.I G_284||||265529..265663|+|135 bp|Between spr0263 (- strand ) and spr0264 (+ strand)|S.pneumoniae|R6|NC_003098.1|IG|11 0
atggacctttctagtgtgttttcagataagatgtcttctattataacagaaagcaggcagaaaagcagattccaaacaaaaaatgaaattggattaatttcttaaacaaatcaaacaaagacattgaaaaagtga

SEQ ID NO: 2257 - DNA, 279 bp, Streptococcus pneumoniae
  misc_feature (1)..(279): tiling:Spneumo1:WAN024GNM; Cluster includes WAN023M36 3137 38_712||||372243..372497|+|255 bp|EGAD orf prediction|S.pn eumoniae|R6|NC_003098.1|ORF|110
atggacgaagtgcttctgggatggtcacagaaccatcttcattttggtaattttcaagaattgcagccactgtacgtccaactgcaagtccagaaccgttcaaggtatgaaggagtttcaccttgccatctgcttcatcacggtaacggatttgggcacgacgggcttggaaatcttctgtgtttgaacagcttgagatttcacggtaattgttttgtgctggaatccacacttccaagtcgtaagtcttcgyagctgagaagcccatatctccagtag

SEQ ID NO: 2258 - DNA, 495 bp, Streptococcus pneumoniae
  misc_feature (1)..(495): tiling:Spneumo1:WAN024CF6; Cluster includes WAN023RW5 cont ig_1609_39||||27905..27979|-|75 bp|Glimmer 2.02 orf predic tion|S.pneumoniae|670|WAN01UDCD|ORF|001
atggacgatatgcaagtctatattgcgaatttaggcaaatacaatgagggcgaattggtcggtgcgtggtttacctttcccattgactttgaggaagtcaaagagaaaatcggcttgaatgatgaatatgaggaatacgccattcatgactacgagttaccctttacggttgacgaatacacttccattggcgaactcaatcgactatgggaaatggtatcggaattacccgaagaattacaatcggagctatctgctctgctcactcatttttcaagcattgaagaactaagcgaacatcaagaggatattatcattcattccgattgtgatgatatgtatgacgtggcacgctactacattgaagaaacgggtgctttaggcgaagtaccagctagtcttcaaaactatattgattatcaagcctatggtcgggatttagacctttcaggaacgtttatctcaaccaatcatgggatttttgaaatcgtctat

SEQ ID NO: 2259 - DNA, 1406 bp, Streptococcus pneumoniae
  misc_feature (1)..(1406): tiling:Spneumo1:WAN024FK6; Cluster includes WAN0243QQ spr1 393||15903436|NP_358986.1|1372875..1374275|-|1401 bp|Hypot hetical protein|S.pneumoniae|R6|NC_003098.1|ORF|221
atggacgcgaaattaagatacaaggcaaagaagatcaagattgtcttttttgatattgatgatacattgcggaattcaaagacagggtttattccaactacaattcccactgtttttaaacagttgcgtgaaaaaggaattttaacaggaatcgcctctggacgtggcatttttggtgttgttccagagattcgtgatctcaarcctgacttttttgtaactttgaatggrgcttatatcgaagataaaaaaggtcaggtcatttatcagcatcagattgaaaagtcakatgttgaggagtatatctcttgggctaagcaagaaggaattgagtatggcttggttgggagtcatgatgccaagttgtcgactcgcaccgatatgatgagtgaagctatcaatccaatttatcccgacttagatgtagatcccgatttccatgaaaaagaagatatctatcagatgtggacttttgaagataagggagatgacttgcacttgcctgacagtctctcagacaaacttcgcatggttcgttggcatcaacattcgtctgatattgtgccgatttcaggctccaaagcgacgggggtggaaaaggttgtggaacaccttggcttgaaaccagagaaggtcatggtttttggagatggtctcaaygacttggaactctttgattatgctggaatcagcgttgccatgggaatttctcatgataaaatcaaagaaaaagcagattatattacaaaaacattagaagaagatggcatttttgmtgccttagaagtatttggtatggtagaaaaagaattgcattttccacaagtagacattgaaacagtagaaggtcctcttgcgactattaagaccaatcacggagacttacgtatcaagcttttccctgaacatgctcctaaaacagtggctaactttgtatctctttcaaaagatggctactatgatggtgtcattttccaccgtattatcaaggactttatgatccaaggtggagacccaactggaactggtatgggtggcgagtcaatctacggcgaatcttttgaggatgaattctcagaagagctttacaatatccgtggtgctctttccatggcaaatgctggtccaaatacmaacggcagccagttctttatsgtgcaaaaccaacacctaccttattckaagaaagaaattactcgtggtggttggccagaaccgattgcagaaatctatgccaatcaaggtgggacacctcacctagaccgccgtcacacggtttttggtcagttagctgatgaagcatcttacgctgtcttggatgycattgctgctgttgagacaggagctatggacaagccagttgaagatgttgtaattgaaactattgaaatcgaggactaactaat

SEQ ID NO: 2260 - DNA, 1171 bp, Streptococcus pneumoniae
  misc_feature (1)..(1171): tiling:Spneumo1:WAN024CL6; Cluster includes WAN023RTF cont ig_1604_2||||33..2891|+|2859 bp|Glimmer 2.02 orf predictio n|S.pneumoniae|670|WAN01UDD9|ORF|000
atggacgctttaactagacgacaatttgacagagccatgtttgccaaggaaaggacgctggctattcgtgttggtgaatatgcttcacgggatatcaaagaggctagttttgagtatggctacatcaagggcgatacttataagcctggtggaacctgcgctggtagcggtaaaattacctttaccagtatcattaccacgttcaataagctggataccctgcaccctgagattggtctactggttggggatacctaccagtgggtcaagatgggggaatacttcatcaacgatattgagattgaccgaaaccgcaacacaaccacacttgaacttatggacggtatgtttaagctcaatcgtgagtacgtgacggatttgcatttcccagctgaagtacgagaggttattcaggaaatctgcctgaaaacaggcattgagttagcgaatgactatttcggaatcagcgctatgcgttaccatatcgagcaagttcctgaaggtaagaaactttcgttcagggatatgctgagcgctatgactcagatgattgggatgtcttgcttcttcaaccgagaaggaaagatggaaatccgtgatttgaccgagtccaacatcacgattaacgctgacagttacttcttgcatggattgaccaagagtgaaatcgagtatcagatagctggtatcacttgtaagacggataagaagtctctgacggtcggtatgacaacaggtcggtctttggaacttgataatgtcttcataacccagagcgctttaaatgacttgtattacaaactgaaaaacctaacttactatccgtataatctcaactaccaaggacatttgttacttgaggttgggcagtgggtaaccattcagaccaacaagaaagagacttttaaagttcctgtcttaagtcagagctttatctttaaaggtggtctgagaggtcgtatcagtgcagatagtaaggctggaaacgatacccagtattcttacgagggtacgattaccaagcagattaagcaacaagatggctttgaagcgaaaatccaagcgcagattgaagcagcagataaagattttgaccaaaaggtcgacaaaatcaaaaaagactttaacgatcaagtagaactggccaaagccagagctgaagaagtcaaga

SEQ ID NO: 2261 - DNA, 150 bp, Streptococcus pneumoniae
  misc_feature (1)..(150): tiling:Spneumo1:WAN024CLF; Cluster includes WAN023S8F NC_0 03028.1_2315||||1754021..1754161|+|141 bp|Glimmer 2.02 orf prediction|S.pneumoniae|TIGR4|NC_003028.1|ORF|010
atggactacaatgcggtcattcccgagttgcttgtatcgaatatcgaacagtcycggtccttctactgtggtttactgggttttaggattgaataccaacgtccagaagaaaactttctctttctcttgaagagtgtcaacctaactaat

SEQ ID NO: 2262 - DNA, 440 bp, Streptococcus pneumoniae
  misc_feature (1)..(440): tiling:Spneumo1:WAN024DIU; Cluster includes WAN0244IY spr0 376||15902420|NP_357970.1|376640..377074|+|435 bp|Conserve d hypothetical protein|S.pneumoniae|R6|NC_003098.1|ORF|111
atggactaccaacgaatcaatgaatatttaacatctatatttaacaatgtccttgtaattgaggaagtgaacttgagaggtagtcgttttaaggatatctccatcaaagaaatgcatacgattgatgtcatcggtaaggctccagaygtgactccaagtcaagtgtcaaaagagttgatggtaactcttggaactgttacgacaagtttgaacaatttagagcgtaagggctacattgagcgagttcggtcagaacaggatcgtcgtgtggtgcatctgcatttgacaaagaagggtcgcttgattcatagactgcataaacgcttccacaaggccatggtagaaaaaattattgatggcatgagcgaggaagaaattgctgtcatgggtaaaggyttgactaatctttaccaatttttggaggatttgaaataactaat

SEQ ID NO: 2263 - DNA, 401 bp, Streptococcus pneumoniae
  misc_feature (1)..(401): tiling:Spneumo1:WAN024FP4; Cluster includes WAN024458 spr0 870|dgkA|15902914|NP_358464.1|863435..863830|+|396 bp|Diac ylglycerol kinase|S.pneumoniae|R6|NC_003098.1|ORF|111
atggactcacaagacaataaacgaaaatggaaaaatcgtgacytgatatccagtttagaatttgcywtsacaggkatttttactgctatcaaggaagaacgmaatatgcgaaaacaygcagtgacggctctagtggtcatccttgcaggttttgkttttcaggtgtcacgaatcgaatggctctttctcctattgagyattttcttggtrgtagcctttgarattatcaaytctgctatygaaaatrtggtggatttggccagtcactatcacttttccatgctggctaaaaatgccaaggatatggcggcyggcgcggtattagtggtttctcttttygcagycttaacaggygcattgatttttctcccacgaatctgggatttattattttaactaat

SEQ ID NO: 2264 - DNA, 428 bp, Streptococcus pneumoniae
  misc_feature (1)..(428): tiling:Spneumo1:WAN024F4M; Cluster includes WAN023M5C 3132 65_585||||301236..301499|-|264 bp|EGAD orf prediction|S.pn eumoniae|R6|NC_003098.1|ORF|110
atggactcatctgccgctcccagttcatcattgacttcaattcgaatagcctggaaaatctgcttagcaggatgccccttcttcttgagttccttggcaggtttgaccaacttgataatctctgctaactcagtcgttgtctcaatcggcttcacttcacgcgcttgctcaatcttacgcgcaatctgtttagagaatttrtcctcwccrtayttgaagaaaatacgaaccaartcatgatagtcataatgattaaccacttcataggctgtcagactagcatcctgattcatccgcatgtccagtggcgcatcctttttataagaaaaaccacgctcacgctggtccaattgaggactagacactcccaagtcataacaaattccatcaatttcctgaacaccagcttcgcgcaaacgtgcctgtaa

SEQ ID NO: 2265 - DNA, 246 bp, Streptococcus pneumoniae
  misc_feature (1)..(246): tiling:Spneumo1:WAN024GBH; Cluster includes WAN023LPX 3145 18_1400||||740605..740850|-|246 bp|EGAD orf prediction|S.p neumoniae|R6|NC_003098.1|ORF|110
atggactccaatttatcaattgttccgcctgtatggccaagaccacgaccactcatttttgctacaggcacaccgaagctagcaacaagaggarctaaaatcaaggttaccttatcgccgacaccaccagtagaatgcttgtyaactttcacaccatcaatggctgacaggtcaaactcttgcccagtcttaaccatattcatcgttaaatcagagatttctcgagtcgtcattcctttaaaataa

SEQ ID NO: 2266 - DNA, 582 bp, Streptococcus pneumoniae
  misc_feature (1)..(582): tiling:Spneumo1:WAN024ET8; Cluster includes WAN02441T spr0 993|IS1381-truncation|15903037|NP_358587.1|977840..978547| +|708 bp|Degenerate transposase (orf1)|S.pneumoniae|R6|NC_ 003098.1|ORF|234
atggacttaaaatttgaaggggttgatttagaatacaaaaaagctaaaaacaatcttccagagtctttctgggaaacctactcagcatttgcaaatacaaatggcgggaaaataattctcggkatagatgaaaaaaacattgacacctrcsaaasarwmwatrkdvtmbhwkhkhwmbvdrrmtdatgaagcaagtaaacaaytaacygatrcacgatttaarygtcttgttggtgttcarcgyacsacttttraagagatrttagctgtrttaaaaacagmttatcaacttaaacacgcaaaaggtggacgaaaacctaaattaagcctagaagaccttcttatgsccactcttcamtatgtgcgagaataycgmacttatgaasaaattgcggcygwttttggtatycacgaaagcaacttwmtccgtcggagccratgggttkaavtaaytcttgttcaaagtggtkttacgrtttcaagaactcctctcagytctgaggmcacggtaatgattgatgcgacggaagtamaaatcaatcgccctaaaaaaasaattagcgaathatwmtkgtaactaat

SEQ ID NO: 2267 - DNA, 1176 bp, Streptococcus pneumoniae
  misc_feature (1)..(1176): tiling:Spneumo1:WAN024CQD; Cluster includes WAN0244SF spr0 035|aspC|15902079|NP_357629.1|35811..36980|+|1170 bp|Aspar tate aminotransferase|S.pneumoniae|R6|NC_003098.1|ORF|111
atggacttaactaagcgctttaataaacagttagataaaattcaagtttcgttgattcgtcagtttgaccaggytatttcggagattcctggggtcttgcgtttgaccttrggggaacctgattttacaacgccagaccatgtcaaggaggcggscaagcgagcgattgatcagaaccaatcctactatacagggatgagtggtctgctgactctacgtcaggcrgcyagtgaytttgttaaggaaaagtaccaactggactatgctcctgaaaatgaaatcttggttacaattggggcgacagaggctttatctgcgactttgacggctattttggaagagggmgacaaggtacttttgccagctcctgcttatccaggctatgaaccgattgttaacttagttggggcagaaattgttgagattgatacgactgaaaatggttttgtcttgactcctgagatgttggagaaggccattttggagcagggtgataagctcaaggcggttattctcaactatccagccaatccgacaggaattacctacagtcgagagcagttagaggccttggcagctgttttacgcaagtacgaartttttgttgtctgtgatgaggtttactcagaattgacctacacaggcgaagcccatgtgtctctaggaacgatgttgagagaccaggctattattatcaatggtttgtctaaatcgcatgccatgacaggttggcgtttggggctgattttcgctcctgcgrccttcacakcccagttaatcaagagtcaccartacttggtcactgccgcaaataccatggcgcaacatgctgcggtagaagccttgacggctggtaaaaaygatgcggagcccatgaagaaggaatatatccarcgtcgggactatatcatcgaaaaaatgactgctcttggttttgagattatcaaaccagacggtgccttctatatttttgctaaaattccagcgggctacaatcaagactcctttgcttttctgaaggattttgctcagaagaaggccgttgcctttatccctggtgcagcctttggacgttacggggaaggctacgtccgcctatcttatgcagccagcatggagactatcaaagaagccatgaaacgacttgaggagtayatgagagaagcaykaactaat

SEQ ID NO: 2268 - DNA, 1376 bp, Streptococcus pneumoniae
  misc_feature (1)..(1376): tiling:Spneumo1:WAN024G95; Cluster includes WAN02445Y spr0 844|gidA|15902888|NP_358438.1|841805..843139|+|1335 bp|Glu cose inhibited division protein|S.pneumoniae|R6|NC_003098. 1|ORF|111
atggacttaggtcccacccaaagaggtattagtgtcgtgtctcaatcttatatcaatgttatcggtgctggtttggcaggttctgaagcagcytaccaaatcgcagagcgtggtattccagttaaactwtatgaaatgcgtggtgtcaagtcwacaccycagcayaaaacagacaattttgctgagttggtttgttccaattcyttgcgtggrgatgctttgacaaatgcwgttggyctyctyaaggaagaaatgcgtcgcttgggttctgtkatyttggaatctgctgaggctacacgtgttcctgcmggtggwgcccttgcrgtggaycgtgatggtttctctcaaatggtgaccgaaaaagtkgycaaccaccccttgattgaagtggtkcgtgatgaaattacagaattgccracagatgttattacrgttrtsgckactggtccyttgacwagygatgccytggctgaaaagattcatgcycttaatrayggygmtggyttytatttctacgatgcrgcagcgcctattatcgatgtcaacactatcgatatgagyaaggtctayctcaaatcwcgttatgataagggagaagcrgcctayctcaatgcyccwatgaccaagcaagartttatggatttccatgaagcyttggtcaatgcrgaagaagcaccgctyarttcttttgaaaaagaaaagtactttgaaggatgtatgccwatcgaagtyatggccaaacgtggcattaaaacyatgctttatggycctatgaarccagtyggtcttgagtayccrgacgactayacaggacctcgtgatggagaatttaaaacaccttatgcggttgtscarctycgtcaggataatgcagctggtagcctmtacaatatygttggtttccagacccacctcaaatggggagaacaaaagcgtgtcttccaaatgattccgggtcttgaaaatgcggagtttgtccgttatggtgtsatgcatcgcaattcttacatggattcaccaaatcttcttgagcagacttaccgttcyaagaaacaaccaaatctcttctttgctggtcaratgacgggkgtggaaggctatgttgagtcggcggcttcrggcttagttgcgggaattaacgcagctcgtctcttcaaggaagaaagcgaggytattttccccgagacgacagcgattggaagcttagctcattacattacccatgccgacagcaaacatttccaaccaatgaatgtcaattttgggatcatcaaggagttggaaggcgagcgtatccgtgataagaaggctcgttatgaaaaaattgcagagcgtgcccttgccgacttagaggaatttttgactgtctaactaat

SEQ ID NO: 2269 - DNA, 653 bp, Streptococcus pneumoniae
  misc_feature (1)..(653): tiling:Spneumo1:WAN024DOQ; Cluster includes WAN024462 spr0 840||15902884|NP_358434.1|839871..840518|+|648 bp|Hypothet ical protein|S.pneumoniae|R6|NC_003098.1|ORF|121
atggactttgaatatttttataacagagaagcggaaagatttaacttcttaaaagtaccggagatattagttgatagagaagaatttcggggcttatcagcagaagcaattatcctttattccatacttcttaaayagacaggaatgtcatttaagaataactggatagacaaggaaggcagagtatttatctattttactgtcgaagaaattatgaaaagaagaaatatctcaaagccaacygccataaaaacatwagatgagcttgatrtaaaaaaaggaatargactratcgaaagagtaaggcttggacttggtaagccgaacatcatttatgttaaagactttatgartatatttcaggtaaaagaaaatgacttacagaagtcaaaaaacttaacttcagaagtaaaagattttaacctcagaagtaaagaaaatgaacttcaagaggttaagaaccttgactctaactatatagagaataataagagtaagtatagtaagagagaatatagttttggtgaaaacggacttggaacatttcaaaatgtgtttttagctgctgaagatatatcggatttacaaatcataatgaactcacagcttgagaattacattagacttyctgcaaaactagaatcctarctaat

SEQ ID NO: 2270 - DNA, 1706 bp, Streptococcus pneumoniae
  misc_feature (1)..(1706): tiling:Spneumo1:WAN024GMX; Cluster includes WAN0244I9 spr0 401|ilvB|15902445|NP_357995.1|397357..399057|+|1701 bp|Ace tolactate synthase large subunit|S.pneumoniae|R6|NC_003098 .1|ORF|111
atggagaaaatcagtttagaatctcctaagacggggtcggacctagttttggaaacacttcgtgatttaggagttgataccatctttggttatcctggtggtgcggttttgcctttttatgatgcgatatataattttaaaggcattcgccacattctagggcgccatgagcaaggttgtttgcatgaagctgaaggytatgccaaatcaactggaaagttgggtgttgccgtcgtcactagtggaccaggagcaacaaatgccattacagggattgcggatgcyatgagcgatagcgttccccttttggtctttacaggtcaggtggcgcgagcagggattgggaaggatgcctttcaggaggcagacatcgtrggaattaccatgccaatcactaagtacaattaccaagttcgtgagacagctgatattccgcgtatcattacggaagctgtccatatcgcaactacaggccgtccagggccagttgtaattgacctaccaaaagacatatctgctttagaaacagacttcatttattcaycagaagtgaatttaccaagttatcagccgactcttgagccgaatgatatgcaaatcaagaaaatcttgaagcaattgtccaaggctaaaaagccagtcttgttagctggtggtggaattagttatgctgaggctgctacggaactaaatgaatttgcagaacgctatcaaattccagtggtaaccagtcttttgggacaaggaacgattgcaacgagtcacccactctttcttggaatgggaggcatgcacgggtcattcgcagcaaatattgcyatgacggaagcggactttatgattagtattggttctcgtttcgatgaccgtttgacggggaatcctaagactttcgctaagaatgctaaggttgcccacattgatattgacccagctgagattggcaagattatcagtgcagacattcctgtagttggagatgctaagaaggccttgcaaatgttgctagcagaaccaacagttcacaacaayactgaaaagtggattgagaaagtcactaaagacaagaatcgtgttcgttcktatgayaagaaagagcgtgtggttcaaccgcaagcagttattgaacgaattggtgaattgacgaatggagatgccattgtggtaacagacgttggtcaacaccaaatgtggacagctcagtattatccctaccaaaatgaacgtcagttagtgacttcagrtggtttgggaacaatgggctttggaattccagcagcaatcggtgctaaaattgctaacccagataaggaagtagtcttgtttgttggggatggtggtttccaaatgaccaaccaggagttggctattttgaatatttacaaggtgccaatcaaggtggttatgctgaacaatcattcactyggaatggttcgccagtggcaggaatccttctatgaaggcagaacatcagagtcggtctttgatacccttcctgatttccaattgatggcgcaggcttatggtattaaaaactataagtttgacaatcctgagaccttggctcaagaccttgaagtcatcactgaggatgttcctatgctaattgaggtagatatttctcgtaaggaacaggtgttaccaatggtaccggctggtaagagtaatcatgagatgttgggggtgcagttccatgcgtarctaat

SEQ ID NO: 2271 - DNA, 392 bp, Streptococcus pneumoniae
  misc_feature (1)..(392): tiling:Spneumo1:WAN024FJH; Cluster includes WAN0243Q3 spr1 416||15903459|NP_359009.1|1403031..1403417|-|387 bp|Hypoth etical protein|S.pneumoniae|R6|NC_003098.1|ORF|111
atggagaaagacatgaatcttaaacgtgaacaagaatttgttagtcagtatcattttgatgcgcgtaattttgaatgggaaaatgaaaatggagctcctgaaaccaaggtggatgtgaatttccaattgctccaacatgaccaagaaaatcaagtgacttccttgattgtcatcttgagctttatgattgtatttgataagtttgtcattagtggaacaatctcacaagtaaaccatatcgatggccgtattgtcaatgaaccaartgaattgaaccaagaagaggtggaaaccttggctcgtccatgtttgaacatgctcaatcgtttgacttacgaagtgactgaaattgcattagacttaccaggaattaatttggagttctaactaat

SEQ ID NO: 2272 - DNA, 1992 bp, Streptococcus pneumoniae
  misc_feature (1)..(1992): tiling:Spneumo1:WAN024FW5; Cluster includes WAN023PV5 pne1 0_16||||13230..15179|+|1950 bp|Type 7C capsule operon, Gli mmer 2.02 orf prediction|S.pneumoniae||WAN01UCKC|ORF|000
atggagaacaattattacatcagaagaatggagtgtgattggatgaatttaaataaagaagttagatggaaggataagcaatatattgcttttgatttttttgatacaactatccatagaaattgtcatcctgaagtgattttatttgaatggtctaaaaaaatttctatttatttctctttcaaaatatctgctacagaaatttattcaattaggaaaaaatctgaaatacatgagaagcaagaaaaacaattggaagaaattaaatatgaaagattacttcaacttgttttttatactattttaagtcgtttgaagtcagatgttaccgactataatcttgaagattttttaatttatgcaagaacgtgtgaagaggaaatagaattaagacatattagtattgatacagatacaattaattttattgaatttttaaaacaaaatgggaaaaaaataattttaatttcagatttttattctgataaaaagctaattgaaaaattaatggtttcattagggattagagattatttctctaaaatatttatttcaagtgaaattggsttacgtaagtcatcaggaaatttatatsaatatgtgatcaatgaattgagctgtaagcctataaatttacttatgattggtgataatatttattctgatgtaaaagttccaaaaaaactaggaatagattcttatcataaatcttattcagattcacatgtgactgtgagtcctaacgatattgtaaaagcgatgaataatgttatttctcaagcttgtactgaatctttatttaatctctatatacctgaaatactttattttatttcaaagttatacaaagaattatctgttaacaaagctagtgatatattattttgtkcaagagaaggtttttttataaaaaaattatttgatctttatcaaaaaaaaatgaacttaaagcttattaaytcacattatttttatgtttctagaaaatcaacgctatatccatcatttaaaaatattgaggatgaagaytttgaagttatttttagacaatttcctgaaattaytttagaaaattttttgattaatttaaatttttccaataatgatattaacartattkctragcaaacagaaattaaacaaacagacaaagtatcagataaatctattattaacaaattaaaacaaaataaattatttaaagaygtttatgawttgaactgtaaagaagaaaaatattcttttagagaatatttaaagtctgtaggagttgagaatgacaattctayaataaatatggtagatattggttggaaaggyacgatacaagacaatattcaaaaagcttttccatctttaaatataaaagggtattatatggggttgaattttcaacggtattctactaggaatagtatgaataagacgggaatactgtttactgaygatcctcaaaaaacaaagttttttaacttatttaattataaatatttattctatgaaagaatytttgttgcagatcatggaccgacagttagatatgaatttatgaatggtgttggggtaccaacattggatacagatgaaaatcatatagaaatttatagatttkctgaggaatttcagattacatttttcaacacatttgagaaaattttagatttgttcaatgaatcactagtaacaccagatgaattatttaacgaaatagctaatttatcrttaaaaaaacattgcatctatttaccwaggctttcagtaagtataaaaaaattagatagagcagcaaaagaaaattttggtattataaaatctactaacaggaatagtgataataaggtaagaaatttttggaaaaatagagattttttatttttagattatatatataaagcgtatggaaagaatagattgttaaaccctatattggatatttacggatattttgtatatctgattaaaacactgcaaataaaaatagtaggggatatt

SEQ ID NO: 2273 - DNA, 963 bp, Streptococcus pneumoniae
  misc_feature (1)..(963): tiling:Spneumo1:WAN024FX7; Cluster includes WAN02408Z |REP ||AAD12155.1|||963 bp|replication protein|S.pneumoniae||AF 047696|ORF|000
atggagaagtgggaaaatcaagataaaattcttttagataaaaataaaagaggcaaggatagaaactggcgaggacgaaaattattaagtttgaaattggcagatatttttaaagagttaggttatagggaaaccttgatagaacgcgttgagacttgtggagatactcttcgatttattcgtcgagaagatgggagtttgcgtttatatcaagcctatttttgtaagaataaattgtgtcctatgtgtaattggagacggtcaatgaaatattcttatcaaacatctcagatagttgatgaagcaattaaagaacaaccaaaagggcgttttcttttcttgactttgactgtgaaaaatgttccaggtaaagaattgaacgcgacaattagccagctaactcagtcctttgaccgtctttttagacgggcaaaggtaaagaaaaatctaatcgggtttttacgttcggttgaggtgactcataatcaagaagaagagacctatcaccctcatatccatgttttgatgatggttaagtctagctattttagtggggctggagataattatgtatctcaagaagaatgggggcggatgtgggaacagtcgcttaaggttgactatgtgccaatggttgatattcggtcagttaaagaaataggaaaaggtcttaaaggggcaattcttgaaacggcaaaatatccaattaagccgattaagttagatgttgaaaacaagcaagttgttggtgatttgtataatgggttatatcgtaaacggcaattgggttacggtggattgtttaaagaaattcggaagagattgcaactgtctaatgtcgaaaatggagatctggtttatayttctgatgacaatgatgaaatgtyaaaaggtacaaaaatagtcgcgatttggaatgcgactaaacaaaactattttgtaaaaaataagggttggaattaa

SEQ ID NO: 2274 - DNA, 516 bp, Streptococcus pneumoniae
  misc_feature (1)..(516): tiling:Spneumo1:WAN024DSD; Cluster includes WAN024106-con |pcpC||AAF73826.1|||1743 bp|surface protein PcpC|S.pneumon iae||AF154045|ORF|000
atggagaatatagacatgtttaaatcaaatcatgagcgaagaatgcgttattccattcgtaaatttagtgtaggagtagctagcgtagctgttgccagtctttttatgggaagtgttgtacatgcgacagagaaagagggaagtacccaagcagccacttcttttaataggggaaatggaagtcaggcagaacaacgtgrrgaactcgattyagaacgagataaggcaakgaaagmggtcgagtgaatatgtarraaaaatrgtgrgwgakrsctatgyaaaatcarmtaraaarcgacatamaaatactgtagctctagttaacsagttgrrmaacattaagaacrrgtatttgaatraaatagttsawtcaacctcaraaagccaactacagrwactgatgatgragagtcratcaraagtagatgaagctgtgtctaartttgaaaaggactcattttcttcgtcaagttcaggatcctccactaaaccagaaactccgcagccggaaaatcc

SEQ ID NO: 2275 - DNA, 888 bp, Streptococcus pneumoniae
  misc_feature (1)..(888): tiling:Spneumo1:WAN024FO7; Cluster includes WAN023OMD pne8 3_11||||9638..10525|+|888 bp|Type 41F2 capsule operon, Gli mmer 2.02 orf prediction|S.pneumoniae||WAN01UCDZ|ORF|000
atggagaatgccttgaataataaaataggaattgttattttaaattatcttaattgggaggatactttagaatgcataaatagtttgcgctcacaaagtgatcaagattttgaagctgtcatagtagaaaatggttctccaaatgaatctgtttctaggattagagattatataaaaaatgacaagaatattcatctttatgtagtagagaataacttaggttatgcaaatggaaataatatgggcatcctctacttaaaaaatagatactctataaatagaattctattaactaataatgatgttatttttgatgatgaagactacataaaaaaattagaagatattaagtatagtaayacmattggagctattggaacaaaaattattggttctgatggtttaaaccaaaatccagcttattttccaatttcttttagttctagtataaaatcacttcttattaacttattggcattttctaaagttatcacttttatcaaaaagcgttttctatcttcatggacgaaaagagctaatgacttttcaaatccaaaaaccgatgaacaaaaatacttcctacatggatcagtcatttttcttacggaaaattatttagataggtttatgggattgtatggagggacttttctttactatgaagaagtaatcctaggtattatatttgaaaaagcaggtcttgatatgttgtatgtacctgacttttcaatttaccataaagaagatcaatcatctttggaaagttttgcaaatgatgatttgattaggcgtaaatttttattgaaaagcatattctctagctttaaggtacatttttgtgcaacgaatagactctctatactggtgaaggagtcaataaagtatgat

SEQ ID NO: 2276 - DNA, 2012 bp, Streptococcus pneumoniae
  misc_feature (1)..(2012): tiling:Spneumo1:WAN024G22; Cluster includes WAN0243YD spr1 118|uvrB|15903161|NP_358711.1|1116467..1118455|-|1989 bp|E xonuclease ABC - subunit B|S.pneumoniae|R6|NC_003098.1|ORF |431
atggagagaggaattcttatgatcaatcacattacagataatcaatttaaactagtatcaaaatatcaaccatcaggagatcaaccccaagctatcgagcagttggtggataacattsakgggggagaaaaagctcagattctgatgggggcgactggaacagggaagacctatactatgagtcaggtcatttctaaagtcaataaaccaactctggttattgcccacaataaaactctggctggtcagctctatggggagtttaaggaatttttccctgaaaatgcagttgagtatttcgtatcctactatgattattaccagccagaggcctatgtcccttctagcgatacctatattgagaaggatagttctgtcaatgacgagattgacaagcttcgccactcagctacctcagcccttttggagcgtaatgatgttattgtcgtggcctcagtctcttgtatctatggtttgggttcgcccaaggaatacgctgatagtgtcgttagtctccgtcctggtctagagatttctcgtgataaactcttgaatgacttggtcgatattcagtttgaacgtaatgatattgatttccaacgcggaagatttcgcgttcgtggggatgtggtagagattttcccagcttcccgagatgaacatgcctttcgagtagaattttttggagacgaaattgaccgtatycgtgargttgaggctctgacaggtcaggtrttgggagargtggatcatttrgcgattttcccagckacwcactttgtgaccaatgacgaccayatggaagttgccrttgcmaagattcargcmgarttrgaagarcarttagctgtctttgaraaggaaggtaaaytgcttgaagcccagcgyttgaaacarcggacagagtaygatatcgaaatgytgcgygagatgggctatacmaatggggttgaaaattattctcgccacatggatggacgkagygaaggwgagcctccttatacgcttctcgacttyttcccagatgatttyttgattatgattgacgagagtcatatgacyatrggrcaaatmaarggcatgtacaatggagaccgttcgcgtaarraaatgctrgtwaattatggtttccgtttrccgtctgcyttggacaatcgtcctctccgtcgkgaggagtttgaragycaygtkcatcagattgtttacgtwtcagcgacacctggtgactatgaaaatgaacagacygagacrgtgattgagcaaatcattcgwccracrggrctyttggatccwgaggtggaagtccgtccgactatgggacagattgatgayctcttrggtgaaatcaatgcccgygttgaaaaraatgarcgwacctttatcacmacyttgaccaagaaaatggcagaggayttgaccgactayttcaaggaaatgggyatcaaggtcaagtacatgcactcggatatcaagaccttggaacggacggagattatccgtgayctscgcttgggtgtctttgatgtcttggtyggaatyaayctsctycgtgaaggrattgacgttcctgargtkagcytsgtwgcyattctcgatgctgacaaggaaggtttccttcgyaacgarcgtggactcatccagacyattggrcgtgcygchcgtaayagygaaggycatgtyatcatgtatgcrgayacggttacccagtctatgcaacgtgctatcgatgaaactgcccgccgtcgsaaaatycagatggcctataatgaagarcatggtatcgtwccacaracmatcaagaaagaaatccgtgacytgattgcygtgaccaaggcagttgctaaggaagargacaaggaagtcgayatcaatagcctcaacaaacaagagcgcaaagaactmgtcaaraarctwgaraaacaaatgcaagaagcmgtygaagtgcttgactttgaactrgcrgctcagatycgtgatatgatgytggaagtcaaggccttggattarctaat

SEQ ID NO: 2277 - DNA, 255 bp, Streptococcus pneumoniae
  misc_feature (1)..(255): tiling:Spneumo1:WAN024E2G; Cluster includes WAN023KJD 3152 19_3398||||1822042..1822296|+|255 bp|EGAD orf prediction|S .pneumoniae|R6|NC_003098.1|ORF|110
atggagagctgcgatggcatgatgaccaagataaaactcactatagatatcattatgccatgcagacacattaccaatatctggatatacaaagaggaagggagagtcaatctctttttctatagccaaatatttttcgatgctaytgatgaaaggatcatccataatttcaatagcaagtaccacctgagcttcttcagcccagtcacaggcttttctcaaatttttgataaaacgttggcgtgtctggggtga

SEQ ID NO: 2278 - DNA, 747 bp, Streptococcus pneumoniae
  misc_feature (1)..(747): tiling:Spneumo1:WAN024EV2; Cluster includes WAN024485 spr0 765|IS1167-truncation|15902809|NP_358359.1|761074..761214| -|141 bp|Degenerate transposase (orf2)|S.pneumoniae|R6|NC_ 003098.1|ORF|431
atggagatgagctttattgcgcaagattttgaaaagctcgatatcatcactgttcttgagggtagaacacaagctgtcatccgagatcactttcttaaatatgatagagccgtccgatgtcgcgtcaaaatcattactatggatatgtttagcccttactatgacttggctaaacagcttcgctttcacattgtacaacatcttagccgtgctatgagtcgtrtscrtgtycaaatyatgaaycarttksatcraaartyycatgaatacaaggmtatcaagcgctactggaarctcatwcaacaggatagccgtaractgagtgataarcrwttttatcgtcctayttttcgtatgcayttaaccaataaagagattttaracaarcttttgagyyattcrsaaracttgaaacaycactatcagctctatcarctcttkctktttcacttycagaataaggaaccrgagaaayttttcgrrcttatygaggacaatctdaagcargytcatcctmtttttcagactgtctttaaaaccttyytmaargayaargaraaratyrtcaacgcccttcaactacmctattcwaaygccaaayyggaagcgaccaataatctcatcaaacttatcaarcgmaaygcctttggwtttcgraactttgaaaayttcaaaaaamggattkttatcrctytgaayatcaaaaaagaaaggayraawtttgtcctttmtcgagctytarctaat

SEQ ID NO: 2279 - DNA, 156 bp, Streptococcus pneumoniae
  misc_feature (1)..(156): tiling:Spneumo1:WAN024EUU; Cluster includes WAN0244SW spr0 018|IS1167-truncation|15902062|NP_357612.1|21455..21604|-| 150 bp|Degenerate transposase (orf2)|S.pneumoniae|R6|NC_00 3098.1|ORF|100
atggagatgagctttattgctcaggactttgataaactcaatatcataactgttcttgagagcagaacacaagccatcatccgaaatcccatgaatacaaggctatcaagcgctactggaagctcattcaacaagatagtcagaaacykaactaat

SEQ ID NO: 2280 - DNA, 285 bp, Streptococcus pneumoniae
  misc_feature (1)..(285): tiling:Spneumo1:WAN024DYO; Cluster includes WAN023KGS 3128 88_3496||||1874981..1875265|-|285 bp|EGAD orf prediction|S .pneumoniae|R6|NC_003098.1|ORF|110
atggagcaaacattttatttaatcttgtcccaggtggttaatttgccactaaaaacgtctgcaagttcagccatactgacttggcttgccttattgtcattattgaccacaacagcaataccgtctaaagcaatagcatcatgggtgagactcttaccttcttcaggagttaattccctagaaaccataccaatatcagcggttttctccttaacagcggtaatacctgctgaagacccattagaggtaatatcaatcgtaacttctggattttcttttttataa

SEQ ID NO: 2281 - DNA, 858 bp, Streptococcus pneumoniae
  misc_feature (1)..(858): tiling:Spneumo1:WAN024DN5; Cluster includes WAN0243BS spr1 933|rgg|15903974|NP_359524.1|1914475..1915326|-|852 bp|Pos itive transcriptional regulator of glucosyltransferase and Spp phenotype|S.pneumoniae|R6|NC_003098.1|ORF|121
atggagcagattggaaaagtctttagacaattacgagartcaagaaatatctcactgagacaagcaaccggaggacaattttcgccgtctatgttgtcccgttttgaaacaggtcagagtgagctttyggtggaaaagtttctatttgctctggaaaatatatctgccagtgtggaggagatcctctttctggcragaggtttccagtatgatacagattctgagttgagaaaagaaattacagatgtcttggaaccaaagaatrtagcacctcttgaggacttatatcgcagggagtatcaaaagcatgcccattctyacaacaaacagaaacatattctaaatgccattatkatcaagtcttatatgaagagcatrgatgaaagggtagasttaacagcagaggaaggaaaagtccttcatgattatttgttttctaccgagatctggggaatctatgaactcaatttattttcagtcagttctccatttttatcygtttctctttttactagatatgtacgagaaatggtacgtaaatyygattttctaatggaaatgtctggyaatcgaaacytttttyatactatactattgaatggctttttagctagtattgagtgtgaaraatttaccaatgcctattattttaaacgtgttatcgaagagcatttctacaaggaaaatgagacctatttccgaattgtttatctgtgggcagaaggtctccttgatagcaagcaaggtagagtcaaggaaggycagaaaaagatggaggatgctgtccgtatttttgagatgcttggctgtaataaatctgccgaatactatagaaawackmccgawtstykaactaat

SEQ ID NO: 2282 - DNA, 498 bp, Streptococcus pneumoniae
  misc_feature (1)..(498): tiling:Spneumo1:WAN024FV3; Cluster includes WAN0240H8 |cap 8F||CAB43609.1|||498 bp||S.pneumoniae||AJ239004|ORF|000
atggagcgaagtaaaggaatgaaaaataaaaaaaaagtatgtttttgtgcttcgtcagggggacattatgagcaactaatgaagcttgaaccgattatgagacaacaagacagctatttaatcacagaatatactgattataacaaaggagagtctgagaagaaagatataaacaaggtgttttatcttttgcaaattaatcgtttggaatttttttggatcgttaaattgatttggatttccttgaaatcactttatatactgttaagaatacgcccaaaagtagttatctgtacaggtgttcttgcaatgataccgttttgtttgctttcaaaaatgtttggggctaaattaatttatattgaatcttttgcaaaagtgaccactcctactttaacaggtagaatactataccgttacgcagatagattctatgtgcaatgggagagtatgctagatatctacccaaatgctgtttataaaggggggctttattag

SEQ ID NO: 2283 - DNA, 807 bp, Streptococcus pneumoniae
  misc_feature (1)..(807): tiling:Spneumo1:WAN024FU2; Cluster includes WAN0240CA |cap 33fF||CAA07399.1|||807 bp||S.pneumoniae||AJ006986|ORF|000
atggagcgaagtagattgatagatgtaaaaatcattgtggcaacrcataaagargttaaaatgcctcaagacartagtctttaccttccaatacatgttggragagacggtaaatcagatattggttttatcggtgataatactggcgataatatatcctctytaaatccatattattgtgagttracgggactttattgggcatggaaraatcttgattataattacttaggtytagttcattaccgtcgttattttacaaataaatctcaagggtataatgaaaatrtcaatatggatgacstcattttgtctcgakytaatgttgaaatattattagagaaatctgacrtaatagttccaaagaagcgaaagtattatattgaaactctttattcacattatgcccatacccttaayggmgaacatctggatcttgctaggaaaattattgagcaaaatagttcagagtatctttcatcctttgataaagtgatgaaacaaagaagmggttatatgttcaatatgtttatcatgaaaaaagractattagatgattatttaccgtggcttttttctattctggatactatgtacgaacagatggacttgacygacyatactyyatttgagtcacgtttrttcgrgcgagttagtgagttgttgtttaatgttkggttatgtmaaaaaggaataacgcctaaagaggtaccatttatgtacatggagagagtgsatttrtttgaaaaaggaaaatcttttttaatggctaaattttttggaaagaagtatggacagagtttytag

SEQ ID NO: 2284 - DNA, 207 bp, Streptococcus pneumoniae
  misc_feature (1)..(207): tiling:Spneumo1:WAN024EUW; Cluster includes WAN0244SV spr0 019|IS1167-truncation|15902063|NP_357613.1|21645..21851|-| 207 bp|Degenerate transposase (orf1)|S.pneumoniae|R6|NC_00 3098.1|ORF|111
atggagctcgctgagacttctatcgtcaagaagaatcatcaaattccttgtatcatcaaccaaaagattgctcagaagctaattraaaagacttctatgaccgacattgatcatcagttgtctatttcaacttcaactgtcattcgcaagawcaatrattttcactttgagcatgatttttcgcgtcttcctgagattatgtcctag

SEQ ID NO: 2285 - DNA, 690 bp, Streptococcus pneumoniae
  misc_feature (1)..(690): tiling:Spneumo1:WAN024COW; Cluster includes WAN023PM6 pne2 8_6||||3740..4429|+|690 bp|Type 15F capsule operon, Glimme r 2.02 orf prediction|S.pneumoniae||WAN01UCCC|ORF|000
atggaggaacaaaacactttggaaatcgatgtattgcaactattcagatctttgtggaaaagaaagttggtcattttattagtggcaattataacttcttcagttgcttttgcctacagtacttttgttatcaaacctgagtttactagtacgactcggatttatgtagttaaccgtgatcagggagagaagtctggtttaaccaatcaagacttgcaggcaggaacatacttggttaaagactatcgtgaaattatcctatcgcaggatgttttggaggaagttgtttctgatttgaaactagatttgacgccaaaaggtttggctaataaaattaaagtgacagtaccagttgatacccgtattgtctcaatctctgtcaaggataaacagccagaggaagccagtcgyatcgctaattctctacgagaagttgctgcagaaaagatcgtcgctgtaacgcgagtatctgatgtaacgacacttgaagaagcgcgaccagctacgactccctcttctccaaatgttcgacgcaacaccttgtttggttttcttggaggagccgtcgtaacagtaattgctgttcttttgattgagttgctcgacacccgtgtgaaacgtcctgaagatgttgaagatgtactgcaaattccacttttagggctcgttccagatttggacaaaatgaaa

SEQ ID NO: 2286 - DNA, 180 bp, Streptococcus pneumoniae
  misc_feature (1)..(180): tiling:Spneumo1:WAN024D7G; Cluster includes WAN0243QD spr1 406||15903449|NP_358999.1|1390478..1390657|-|180 bp|Hypoth etical protein|S.pneumoniae|R6|NC_003098.1|ORF|111
atggaggacaaagaaatgggtttttatttgatggttgcttcaatgctactcggactgctcgctttgaagataggtttttctcagttcaaggagaamaaagataaattcttatctatcttaacaagtttagctggsmyagcccttgttctcgyrgctgtctggttaggatggcccaaataa

SEQ ID NO: 2287 - DNA, 724 bp, Streptococcus pneumoniae
  misc_feature (1)..(724): tiling:Spneumo1:WAN024FRS; Cluster includes WAN0243U3 spr1 272|nagB|15903315|NP_358865.1|1266335..1267057|-|723 bp|N- acetylglucosamine-6-phosphate isomerase|S.pneumoniae|R6|NC _003098.1|ORF|340
atggaggatgaaaagatgaaagttattaaagttgaaaaccaagttcaaggtggaaaagttgcttttgagattttgaaggaaaaattggctaatggagctcaaactctaggacttgcgacaggaagtagcccacttgaattttacaaggaaattgttgagagtraccttgatttttcaaatctaaccagtgtcaaccttgatgagtatgtgggccttgatggggacaatccacagtcttatcgttacttcatgcaagaaaacttgttcaaccaaaaaccatttaaagaaagtttcttgcctcgtggtgttaaggacaatgctgaagctgaagttgaacgctacaaccaaattttggctgaccatccagttgacctccaaatcttgggaatcggtcgcaatgggcatatcggctttaatgagcctggyactccatttgacagtcaaacgcatctagtagaacttgaccagtctactatcgaagccaatgcwcgcttctttgccaagattgaagacgtcccaacccaagctatttcaatggggattaaaaacattttggatgccaagtctattattctttttgcttayggtgagtcgaaagcagaagccattgccggaacagtatctggcccagtgactgagaacctacctgcaagtagcctccaaaatcaccctgatgtaaccatcatcgcagatgctgaagcgcttagcttactcbwaamataat

SEQ ID NO: 2288 - DNA, 1199 bp, Streptococcus pneumoniae
  misc_feature (1)..(1199): tiling:Spneumo1:WAN024DTQ; Cluster includes WAN02438O spr2 045|sphtra|15904086|NP_359636.1|2036394..2037587|+|1194 bp |Serine protease|S.pneumoniae|R6|NC_003098.1|ORF|111
atggaggcaaatatgaaacatctaaaaacattttacaaaaaatggtttcaattattagtcgttatcgtcattagcttttttagtggagccttgggtagtttttcaataactcaactaactcaaaaaagtagtgtaaacaactctaacaayaatagtactattacacaaactgcctataagaacgaaaattcaacaacacaggctgttaacaaagtaaaagatgctgttgtttctgttattacttattcggcaaacagacaaaatagcgtmtttggsaatgatgatactgacacagattctcagcgaatctctagtgaaggatctggagttatttataaaaagaatgataaagaagcttacatcgtcaccaacaatcacgttatwaatggcgccagcaaagtagatattmgattgtcagatgggactaaagtacctggagaaattgtcggagctgacactttctctgatattgctgtcgtmaaaatctcttcagaaaaagtgacaacagtagctgagtttggtgattctagtaagttaactgtaggagaaactgctattgccatcggtagcccgttaggttctgaatatgcaaatactgtcactcaaggtatcgtatccagtctcaatagaaatgtatccttaaratcggaagatggacaagctatttctacaaaagccatccaaactgatactgctattaacccaggtaactctggcggcccactgatcaatattcaagggcaggttatcggaattacctcaagtaaaattgctacaaatggaggaacatctgtagaaggtcttggtttcgcaattcctgcaaatgatgctatcaatattattgaacagttagaaaaaaacggaaaagtgacgcgtccagctttgggaatccagatggttaatttatctaatgtgagtacaagcgacatcagaagactcaatattccaagtaatgttacatctggtgtarttgttcgttcggtacaaagtaatatgcctgccaatggtcaccttgaaaaatacgatgtaattacaaaagtagatgacaaagagattgcttcatcaacagacttacaaagtgctctttacaaccattctatcggagacaccattaagataacctactatcgtaacgggaaagaagaaactacctctaycaaacttaacaagagttcaggtgatttagaatcttaactaat

SEQ ID NO: 2289 - DNA, 257 bp, Streptococcus pneumoniae
  misc_feature (1)..(257): tiling:Spneumo1:WAN024DPU; Cluster includes WAN02448U spr0 740|rpsT|15902784|NP_358334.1|737815..738066|-|252 bp|30S Ribosomal protein subunit S20|S.pneumoniae|R6|NC_003098.1| ORF|121
atggaggtaagamcattggcaaacattaaatcagctatcaaacgcgctgaattgaacgttaracraawcgaaaagaactcagctcaaaaatcagctatgcgtactgctataaaagctttcgaagcaaacccatctgaagaacttttccgtgctgctagctcagctatcgataaagcagaaactaaaggtttgattcacaaaaacaaagcaagccgcgataaagctcgtctttcarctaaacttgytaaataactaat

SEQ ID NO: 2290 - DNA, 488 bp, Streptococcus pneumoniae
  misc_feature (1)..(488): tiling:Spneumo1:WAN024DL9; Cluster includes WAN0244P2 spr0 156||15902200|NP_357750.1|164354..164956|+|603 bp|Conserve d hypothetical protein|S.pneumoniae|R6|NC_003098.1|ORF|111
atggaggtacatatgaagacaatttctttagtttatattagtttgagtggcaacactgaaagttttgtgacgcgcttgaaagactatctcttgtcccagtacaaarggattgaggttcaaaagattcatatcaaggatttggtcaaggaaggcaaaaatttctatgaaatggaccatccctatgtcgcttttttgccgacctatctcgaaggtgggaatggcgtggataacggagatgttgwgmttwwgacgacaccggtgggagattttattgcctatggtaacaatgctagtaagtgttttggtgtggttgggtcaggaaatcgtaactttaataaccaatactgcctaacagccaagcaatacagtcaacgctttggcttccctgtattggctgactttgaaatgcgaggcatgctggaagatatcaaacatgtcgcagctattatcgcagatttgtatgagttggaaaaggagaattaactaat

SEQ ID NO: 2291 - DNA, 1781 bp, Streptococcus pneumoniae
  misc_feature (1)..(1781): tiling:Spneumo1:WAN024G6G; Cluster includes WAN024428 spr0 978|dnaG|15903022|NP_358572.1|963503..965278|+|1776 bp|DNA primase|S.pneumoniae|R6|NC_003098.1|ORF|111
atggaggtattgtgtatggttgacaaacaagtcattgaagaaatcaaaaacaatgccaacattgtggaagtcataggagatgtgatttctttacaaaaggcaggacggaactatctagggctctgtccttttcatggtgaaaaaacaccwtctttcarygttgtagaggayaagcagttttaycactgtttyggttgtggtcgctcaggtgatgtctttaarttcatcgaggagtaccaaggggttmcctttatrgargcwgtccaaatcttaggtcagcgtgtyggrattgaggttgaaaaaccgctttatagtgarcagaagycagcctcrcctcaccaagctctttatgatatgcacgaagatgcrgcyaaattttaccatgckattctcatgacaacgactatgggmgaagaggccagaaattacctttatcagcggggkttgacagatgaagtgcttaaacatttttggattggtttagcacctccagaacgaaactatctctatcaacgtttgtctgatcagtatcgtgaagaggatttactggattcaggcctgttttatctytcggatgccaatcaatttgtagacacctttcacaatcgcattatgtttcccctgacaaatgaccaaggaaaggtcattgccttctcaggtcgtatctggcaaaaaacggattcacaaacttctaagtataaaaacagccgatcgactgyaatttttaacaaaagttacgaattatatcatatggatagggcaaaaaratcttctggaaaagctagtragatttacytgatggaaggattcatggatgttattgcagcctatcgggytggaatcgaaartgctgtggcgtcgatgggaacrgccttgagtcgagagcatgttgagcatctgaaaaggttaaccaagaaattggttcttgtttacgatggagataaggctgggcaagccgcgayattgaaagcattggatgaaattggtgatatgcctgtgcaaatmgtyagcatgcctgataacttggatcctgatgartatctacaaaaaaatggtccaraagacttggcctatctattaacraaaactcgtattagtccgattgagttctacattcatcagtacaaacctgaaaacrgtgaaaatctgcaggctcagattgagtttmttgaaaaaatagctcccttgattgttmaagaaaagtccatcgctgctcaaaacagctatattcatattttagctgacagtctggcgtcctttgattatrcccagattgagcagattgttaatgagagtcgtcaggtgcaaaggcagaatcgcatggaargaatttccagaccracgccaatcaccatgccwrtcaccaagcagttatcggctattatgagggcagaagcccatctactctatcggatgatggaatcccctcttgttttgaacgattaccgtttgcgagaagactttgcatttgctacacctgaatttcaggtcttayatgacttgcttggccagtatggaaatcttcctccagaagttttagcagagcagacagaggaagttgaaagagcttggtaccaagttttagctcaggatttgcctgctgaratatcgccgcaggaacttagtgaagtagagatgactcgaracaaggctctctkraatcaggacrwtatgagaatcaaaaagaaggtgcaggaagctagccatgtaggagatacagatacagccctagaagaattggaacgtttaatttcccaaaagagaagaatggagtaactaat

SEQ ID NO: 2292 - DNA, 405 bp, Streptococcus pneumoniae
  misc_feature (1)..(405): tiling:Spneumo1:WAN024CK4; Cluster includes WAN0242UJ SP05 44||15900457|NP_345061.1|516951..517349|+|399 bp|immunity protein BlpX|S.pneumoniae|TIGR4|NC_003028.1|ORF|011
atggaggtatttaatatgaaatacagattattttttgttattttcttgagtagtgtgttggatattcttttagggacatttttacaaatctctatcgtatctattgggtggcttgttctttacagtggtttgtttgaagcaggagttttccttcttgctaataaaggggtggcggtaaaaatcaaggaagtagatattcgaaatcgctttaaatttatttttggaaaaaccttatggtttcaaattcttttgctcatctttttgataatcaaactttatcttggtttggatgcgaggttgattttattctatggacatattttcattgtctttaatgccttaatgtatctattatctagtagtcaggttagccttaaaaaaaacaaactgtcttctctaactaat

SEQ ID NO: 2293 - DNA, 251 bp, Streptococcus pneumoniae
  misc_feature (1)..(251): tiling:Spneumo1:WAN024GIL; Cluster includes WAN0244FX spr0 485||15902529|NP_358079.1|486986..487231|+|246 bp|Hypothet ical protein|S.pneumoniae|R6|NC_003098.1|ORF|111
atggaggtcgtcatggacaatatcatcgatgtgtcaattcctgttgcagaagtggtggacaagcatccagaagtcttggaaattctagtggagytgggttttaaaccccttgccaatcccwtratgcgcaatacagttggtcgtaaagtatcacttaaacarggttctaagctagcaggaactcctatggacaagattgtacgcacactggaagcgaatggctacgaagtgattggattagactaactaat

SEQ ID NO: 2294 - DNA, 306 bp, Streptococcus pneumoniae
  misc_feature (1)..(306): tiling:Spneumo1:WAN024FJJ; Cluster includes WAN01UEOM |||| ||153 bp|Incyte orf contig SPN2C0514 12315-12467|S.pneumon iae|23F|WAN01UEOM|ORF|001
atggaggtgaaaaaatctaagaaaggaagtagtaaaatcatggaaacagtaaactataaagatttagttgcgattggttttccagagcacacatcgagaaatattattagacaagcaaaaaagattgctgtaaaaaagtttgaagaagctagwaaaaatgataagaatgcggtacaattaggatgttcacctttcgataataaaaggttaggcattgctcctaaaaatattgtagaaaatttaattggtatttctttttcagatatagaaggtgagaaaaatggttatatcaaagacaaagaaata

SEQ ID NO: 2295 - DNA, 246 bp, Streptococcus pneumoniae
  misc_feature (1)..(246): tiling:Spneumo1:WAN024FGY; Cluster includes WAN023KWD 3138 47_2791||||1486689..1486934|+|246 bp|EGAD orf prediction|S .pneumoniae|R6|NC_003098.1|ORF|110
atggaggtgtatccaattcatcttcatcttgtgaaattggggcttcaaagcgctcgactggagaaacgactgaatctgttgtacgaacaatcgattcacggcgaagatcccaatcaccaaaagcagatgcctgagttggttccaaacgacgtggattttgttttggcaattcaactgtttctgccatatcaaaatgacgatcaaagccatgtgaatgagctggtttcactgtctcacggtagttag

SEQ ID NO: 2296 - DNA, 896 bp, Streptococcus pneumoniae
  misc_feature (1)..(896): tiling:Spneumo1:WAN024FZ9; Cluster includes WAN0243XL spr1 146|licB|15903189|NP_358739.1|1147539..1148429|-|891 bp|Ho mologous to LicB, which regulates expression of LPS epitop es in H. influenzae|S.pneumoniae|R6|NC_003098.1|ORF|221
atggaggttcagatgaaaagtaaaaacggagttccttttggccttctctcaggtattttctggggcttgggtctaacggttagtgcttatatcttttcgatttttacagatttgtcaccctttgtggtggctgcarctcatgattttttgagcatctttatcttactagcttttctcttggtaaaagaagggaaagttcgcctctcaattttcttaaatattcgcaatgtcagtgttatcatcggagcmttgctagcaggccctatcggtatgcaggccaatctttatgcagttaagtatatcggaagttctttagcttcatctgtatcggctatttaccctgcgatttcagttctattggctttcttctttttgaagcacaagatttcgaaaaatactgkatttggrattgtcttgattattggaggkattattgcycagacctataargttgaacaggttaattcyttctacattgggattctytgtgctttggtttgtgctattgcatggggaagtgagagtgttcttagctcytttgcyatggaaagtgaaytgagtgaaatcgaagccctcttaatccgtcaagtracttcgttcttgtcctatcttgtgattgtgctcttctctcatcagtcatttactgcagtagycaatggacaattgctaggtctcatgattgtttttgcagcctttgatatgatttcctacttggcttattatatcgctatcaatcgcttgcaaccagccaaggctacaggcttgaacgtgagctatgtagtatggacggtcttgtttgcagttgttttyttgggtgcaccgctagatatgctgacmattatgacgtcacttgtcgtcattgctggagtttatattattattaaagaataactaat

SEQ ID NO: 2297 - DNA, 414 bp, Streptococcus pneumoniae
  misc_feature (1)..(414): tiling:Spneumo1:WAN024GF3; Cluster includes WAN023LUE 3143 32_1134a||||601450..601863|-|414 bp|EGAD orf prediction|S. pneumoniae|R6|NC_003098.1|ORF|110
atggaggttgttgatgaagtagaagaacttcccaaccttccagccaaaatgtttggcaatcatcatctgcaaagccacatactgcatagcgttgatgtggtgggccaccagcatatcattggagcgctgggtcaaggtcgcatccagatagatttccccatcaacacgccgaacatcaaacatggtctgaaaggcgcacgggagcagcccatctgtttcttcgaaagcttggtaatcccagagcgaaataatattgcggcggttccaaggattggtttccaactgtttgagaagcttattgataatgtcgtgtttcttaacaacggcaccatagcgctcaccaatggttcccgtgtctccaacttcccagtcattccagtagtgaacattgtacttgtcattaagcacttctaa

SEQ ID NO: 2298 - DNA, 108 bp, Streptococcus pneumoniae
  misc_feature (1)..(108): tiling:Spneumo1:WAN024CO9; Cluster includes WAN0246SW 5613 45-50-4||||||108 bp|DNA Streptococcus pneumoniae phage Dp- 1 open reading frame 246|S.pneumoniae||WAN0246SW|ORF|000
atggagtatcttgcaacccgtcacgttctgcgtcctcgcctaatagaccaaaaagtctttgaacggctgcctcagtattgtccaaggttacaatttcatccggcttaa

SEQ ID NO: 2299 - DNA, 524 bp, Streptococcus pneumoniae
  misc_feature (1)..(524): tiling:Spneumo1:WAN024D33; Cluster includes WAN0243GK spr1 760||15903802|NP_359352.1|1728664..1729182|-|519 bp|Conser ved hypothetical protein|S.pneumoniae|R6|NC_003098.1|ORF|1 11
atggagtatgaattgctcattagggaagcagagcccaaagatgcagctgaattagtggcctttttaaatcgtgtgagtttggagacagacttwaccagcctagacggagatggtattctcttgactagtgaggagatggaaatattcctcaacaagcaagctagttcggacaatcagataaccttacttgcattcttaaatggcaaaattgctggtattgtaaatattacagctgaycagcgtaagagagtccgtcatattggagatctcttcattgtgattggaaaaagatattggaataatggcttgggaagtttgttgctagaagaagcgatagagtgggcacaagcaagtggcattctgcgtcgtctccaactgactgtccaaactcgtaatcaagcagcagtccatctttatcaaaagcatggctttgtcattgaaggtagccaagagcgtggggcatatatagaagaagggaaatttatcgatgtttacttgatgggtaaactgatagrttarctaat

SEQ ID NO: 2300 - DNA, 1110 bp, Streptococcus pneumoniae
  misc_feature (1)..(1110): tiling:Spneumo1:WAN024AXO; Cluster includes WAN023PQU pne1 7_19||||14490..15599|+|1110 bp|Type 10A capsule operon, Gl immer 2.02 orf prediction|S.pneumoniae||WAN01UCJH|ORF|000
atggagtgtaatatgtacgactatttaatcgttggagctggtttgtctggagcaatcttcgcgcacgaagccacaaaacgtggtaaaaaagtaaaagtgattgataaacgtgatcacataggtgggaacatctactgtgagaacgtagaagggatcaatgttcataaatatggtgcccatatcttccatacttctaataaaaaagtttgggactatgtcaatcaattcgctgagtttaacaactatatcaactcacctgtcgcaaactataaaggaagtctctataatcttcctttcaatatgaatactttctatgctatgtgggggacaaaaactccacaggaagtgaaagataagattgctgagcagacagctgatatgaaggatgttgmaccgaaaaatctggaagaacaagccatcaagttgattggtccagatatctatgaaaagttgatcaagggatatactgaaaagcaatggggacgcttcgcgacagaacttcctccatttatcattaaacgccttccagttcgtctaacctttgataataactattttaacgaccgttaccaaggaattcctattggtggttacaatgtcattatcgaaaacatgcttaaagacgttgaagttgagcttggtgttgatttctttgctcaccgtgaagagttagaagcatcagctgaaaaagttgtcttcacaggaatgatcgaccagtattttgactacaagcacggcgagttrgaataccgtagtcttcgttttgagcatgaaactttgracgaggagaattatcaaggaaatgctgtagtgaactatacagagygtgaaatcccttatactcgcattattgagcataaacattttgagtacggtacacaagataaaacggttattactcgtgaatatccagctgattggaagcgtggggacgagccctactatccgatcaacgatgagaaaaataatgctatgtttgctaagtaccaagaggaagcagcgcagaatgataaagttatcttttgtgggcgtttagcagattataaatattacgatatgcatgtggtgattgaacgggcgcttgaggttgtggagaaagagttaggtaac

SEQ ID NO: 2301 - DNA, 1110 bp, Streptococcus pneumoniae
  misc_feature (1)..(1110): tiling:Spneumo1:WAN024AXN; Cluster includes WAN023OT1 pne7 3_16||||13177..14286|+|1110 bp|Type 34(2) capsule operon, Glimmer 2.02 orf prediction|S.pneumoniae||WAN01UCF4|ORF|00 0
atggagttaactatgtaygattatcttrtygtyggtgctggtttgtctggagcaatyttygcwyaygaagcwacmaarcgyggwaaaaaagtaaaagttattgataaacgtgaccacattggtgggaatatctattgtgagaatgtagaaggtgttaatgttcataaatatggtgcacatatcttccatacttctaataaaaaagtctgggattatgttaatcaatttgctgaatttaacaactacatcaactcgcctgtagcaaattacaagggtagcctttataatctgcctttcaatatgaatactttctatgctatgtgggggacaaaaactcctcaagaggtcaaagataagattgctgagcaaacggctcacatgaaggacattgaacctaaaaacttggaagaacaggctatcaagttgatcggtccagatgtctatgaaaaattaatcaagggttatactgaaaagcagtggggacgctcagcaacggaacttcctccatttatcattaaacgtcttccagttcgtttaacatttgataataactattttaacgaccgttaccaaggaattcctattggtggttacaatgtcatcatcgaaaatatgcttaaagacgttgaagttgagcttggtgttgatttctttactcatcgtgargagttagaagcatcagctgaaaaagttgtcttcacagggatgatcgaccagtattttgactacaagcatggagagttagaataccgtagccttcgctttgatcatgaaattttggacgaggaaaattatcaaggaaatgctgtagtgaactatacggagcgtgagattccttatactcgtattattgagcataaacactttgagtatggtacgcaagctaaaacggtcattactcgtgaatacccagctgattggaaacgcggagatgaaccttattatccaatcaatgatgagagaaacaatgctatgtttgctaaatatcaagaagaagcagcacagaatgataaggtgattttctgcggacgtttggccgattataaatactacgacatgcatgtggtcattgaacgtgccttagaagtcgtattaagtgagttaggaaag

SEQ ID NO: 2302 - DNA, 1257 bp, Streptococcus pneumoniae
  misc_feature (1)..(1257): tiling:Spneumo1:WAN024DTZ; Cluster includes WAN024393 spr2 030||15904071|NP_359621.1|2020620..2021870|-|1251 bp|Conse rved hypothetical protein|S.pneumoniae|R6|NC_003098.1|ORF| 111
atggagttagtgcatggaatttcaacacattttatccaatcaaaaaagtttaaaacaaacaaaattaccgtgcgttttaccgctccattatcccttgatacgattgcaggtcacatgttgagtgcaagtatgctagagactgctaatcagatgtaccccacttctcaagatttgaggagacacttggccagtctatacggtacagatatgtcaaccaattgtttcagaagagggcaaagccacattatagaattgacatttacctatgttcgtgatgagtttttaagtaggaaaaacgtgctaacctctcagattttggaacttgtaaaagaaactcttttttcacccgyagtagttgataatgggtttgatccggccttatttgaaattgagaaaaaacaattgctagcaagtttagcagctgatatggatgattctttttattttgcacataaagaattggataaattgttttttcatgatgaacgtcttcaattggaatatagtgatttacgaaatcgtattttagctgaaactccacaaagttcttaytcttgtttccaagaatttttagccaatgatcgaatagatttctttttcctaggtgattttaatgaggttgaaattcaaaatgtattagaatcatttggctttaaaggtcgaaaaggagatgtgaaggttcagtattgtcaaccttattctaatatccttcaggaaggtatggttcggaaaaatgtgggacaatcyattttggaattaggttatcattacygttctaaatatggtgatgarcaacatttacccatgattgtaatgaatggtttacttggtggatttgctcactctaagctctttacaaatgtccgtgaaaatgctggattagcttataccatttcaagtgagcttgatttatttagtggattcttgaggatgtatgctggtatcaatcgagaaaatcgtaaccaggctcgtaaawtgatgaataatcaackgcttgatttaaaaaaaggttwttttacagagtttgagttaaatcagaccaaggaaatgattcgttggtcgttgttactttctcaagataatcawtcttcattgattgaacgtgcttatcaaaatgccttatttggaaaatcttcagcagactttaaaagttggattgcaaagcttgaacarattgacaaagatgctatttgtagagtagctaataatgtgaaactacaagcgatttactttatggaaggaatagaaykaactaat

SEQ ID NO: 2303 - DNA, 866 bp, Streptococcus pneumoniae
  misc_feature (1)..(866): tiling:Spneumo1:WAN024CTH; Cluster includes WAN0243XN spr1 144|smf|15903187|NP_358737.1|1145894..1146754|-|861 bp|DNA processing Smf protein|S.pneumoniae|R6|NC_003098.1|ORF|11 1
atggagttatttatgaaaatcacaaactatgaaatctataagttaaaaaaatcaggtttgaccaatcaacagattttgaaagtkctagaatacggtgaaaatgttgatcaggagcttttgttgggtgatattgcagatatmtcaggttgycgtaatccagccgtttttatggaacgttattttcagatagacgatgcgcatttgtcgaaagagtttcaaaaatttccatctttctctattttagatgactgttatccttgggatttgagtgaaatatatgatgcgcctgtacttttattttacaagggaaatcttgacctcctgaaattcccgaaggtagcggtcgtgggcaktcgtgcttgtagcaaacagggagctaartcagttgaaaaagtcattcaaggcttggaaaatgaactggttattgtcagtggtctggccaagggcattgacacagcagctcatatggcagctyttcagaatggcggaaaaaccattgcagtgattggaacaggactggatgtgttttatcctaaagccaayaaacgcttgcaagactacatcggcaatgaccatctggytytaagtgaatatggayctggygaacaacctctgaaatttcattttcctgcccgtaatcgcatcattgctggactttgtcgtggtgtgattgtagcagaggctaagatgcgttcaggtagtctcattacstgtgagcgagcaatggaagaaggacgcgatrtctttgctattcctggtagcattttagatggactatcagacggttgccatcatttgattcaagaaggagcaaaattrgtcaccagtgggcaagatgttcttgcggaatttgaattttaactaat

SEQ ID NO: 2304 - DNA, 551 bp, Streptococcus pneumoniae
  misc_feature (1)..(551): tiling:Spneumo1:WAN024ETC; Cluster includes WAN02444M spr0 892||15902936|NP_358486.1|881755..882300|+|546 bp|Conserve d hypothetical protein|S.pneumoniae|R6|NC_003098.1|ORF|111
atggagtttgaagaaaaaacgcttagccgaaaagaaatctatcaaggaccaatatttaaactggtccaagatcaggttgaattaccagaaggcaagggaactgcccracgggatttgattttccacaatggggctgtctgtgttttagcagtaacggatgaacaaaaacttatcttggtcaagcagtaccgcaaagctatcgaggcwgtctcttacgaaattccagccggaaaattggargtaggagaaaacacagcccctgtsgcagctgcccttcgtgaattagaggaagaaacagcctatacagggaaattagaactcttgtacgatttttattcagctattggcttttgtaatgagaagttaaaactatatttagcaagcgatttgacaaaagtggaaaatccgcgtccgcaggatgaggatgaaaccttggaagtccttgaagtgagcttagaagaagcgaaagaattaatccaatcaggtcatatctgtgatgccaagacaattatggctgttcagtattgggagttgcagaaaaaatarctaat

SEQ ID NO: 2305 - DNA, 617 bp, Streptococcus pneumoniae
  misc_feature (1)..(617): tiling:Spneumo1:WAN024DHP; Cluster includes WAN0244G8 spr0 474|pncP|15902518|NP_358068.1|477306..477917|+|612 bp|ABC transporter ATP binding protein - unknown substrate|S.pneu moniae|R6|NC_003098.1|ORF|110
atggagttttttgataaatttcatgccttgtgttttggatttttagtactaataattgtcattacagttccttatacgattaaccatggggrtttttttcaaaatgaatctgcattgattmttgtaagtcttcttgtaacctcgctgagtgttgcttatgctagaaagtttgaaatgatttcttttgggatgttaagcaagaaacaacttttgcttttcattgcaatctttcttctaagtgtacttgagacgctggtttatattcatttcttcgctgtttcttctggctcaggggtccaacacttggcggaagtcagcagaggaatttccctgtctttgattttractacctcagtttttggccccatccaggaggaactcattttcagaggacttcttcaaggtgcggtttttgacaattcttggttagggcttgtgctaacttcctctctcttttctttcatgcatggaccttctaatgtcccttcgtttattttttatctacttgggggyttgttgctgggcyttgcttataaaaagagycaaaacctatgggtttctactctagtccayatgytttacaacagttggccactcytatattatttataactaat

SEQ ID NO: 2306 - DNA, 747 bp, Streptococcus pneumoniae
  misc_feature (1)..(747): tiling:Spneumo1:WAN024EX9; Cluster includes WAN0243LM spr1 578|pppL|15903620|NP_359170.1|1558080..1558820|-|741 bp|Ph osphoprotein phosphatase|S.pneumoniae|R6|NC_003098.1|ORF|1 11
atggamatttcmttattaacagatgttggtcagaaacgaacaaataaccaagactatgtcaaccactatgtcaatagagctggacgtaccatgattattttagctgatgggatgggaggtcatcgygcagggaatatcgctagtgaaatggcggtcacagacctgggtgtagcttgggttgatacccagatcgatacagtcaatgaagtgcgtgaatggttcgcccattacctagaaattgaaaatcaaaagattcaccagcttggtcaggatgaagcttacagaggcatgggaactactttggaagtccttgctattattgataatcaggctatctatgctcatattggtgattcgcgtatcggcttgattcgtggagaagaataccatcagttgacgagcgatcattccttggttaatgaattgctcaaggctggtcaattgacaccagaagaggcagaagctcatccgcaaaaaaatattatcacccagtctattgggcaaaaagatgaaattcagcctgattttgggacagttatccttgagtcaggygactatctcttgctcratagtgacggcttgaccaacatgatttcaggcagtgagattcgtgatattgtaaccagtgatattyctttagcagataaaacggagacacttgttcgttttgctaacaatgcaggaggtttagacaacattacggttgcccttgtttctatgaacgaggaggatgmagaaykaactaat

SEQ ID NO: 2307 - DNA, 2342 bp, Streptococcus pneumoniae
  misc_feature (1)..(2342): tiling:Spneumo1:WAN024EYA; Cluster includes WAN0243OR spr1 464|ctpE|15903507|NP_359057.1|1444730..1447066|-|2337 bp|P -type ATPase - metal cation transport|S.pneumoniae|R6|NC_0 03098.1|ORF|211
atggataaaaataagattatgggattaacccaaagagaagtcaaggaaagacaggctgagggtttggtcaatgactttaccgcatcagccagtaccagcacttggcaaatcgttaaacgaaatgtctttaccctttttaacgctttgaactttgccattgctttggcycttgcctttgtgcaggcttggagcaatctggtcttctttgctgttatctgctttaacgctttttctgggattgtgaccgagctacgagccaaacacatggtggacaagctcaatctcatgaccaaggaaaaggtcaaaaccatccgtgatggtcaggaagttgctcttaatcctgaagaattagtgctaggagatgtcattcgtttgtctgcaggagagcagattcctagtgatgccttggttttggaaggctttgcggaagtcaatgaagccatgttaacgggaraaagtgatttggtgcaaaaggaagttgacggcttacttttgtcaggaagtttcctagccagtgggtcagttttatctcaagttcaccatgtcggtgcagacaactatgctgccaaactcatgcttgaggctaagaccgttaaacccatcaactcccgtatcatgaaatcgctggacaagttggctggttttactgggaagattatcattccctttggtctggctctcttgctggaagccttgcttttaaaaggcctgcctctcaagtcatccgttgtaaactcgtcgacagctcttttgggaatgttgcctaagggaattgcccttttgaccattacttcgctcttgactgcagtgattaagttgggcttgaaaaaggtcttggtgcaggagatgtactctgttgagaccttggcgcgcgtggatatgctctgtctggacaagacgggyaccatcacccaaggaaagatgcaggtggaggctgttcttccrytgayggaaacktayggtgaagaggctattgccagcatcttgactagctacatggcccatagtgaggataagaatccaactgcccaagccattcgccagcgttttgtgggagatgttgcttatcctatgatttccaatcttcccttctcsagcgaccgcaagtggggggctatggagttagaaggcttggggacagttttcttaggggcrcctgagatgttgctkgattctgaagtcccagaagcyagggaggccttggagagaggatcacgtgtcttggtcttagctctcagtcaggagaaattagaccatcacaaaccacagaaaccatctgatrttcaggctctagccttgctggaaatcttggacyccattcgagagggagcagcagagacgctggactatctccgttctcaggaggtrggactcaagattatctctggtgacaatccagttacggtgtccagcattgcccagaaggctggttttgcggactatcacarctatgtagattgctcaaaaatcaccgatgaggaattgatggccatggcggaggagacagctattttcggacgtgtttcccctcatcaaaagaaactcatcatccaaacgttgaaaaaagcgggwcatacaacggctatgacaggggacggrgttaatgatatcttggcccttcgtgaggcggattgttctatcgtgatggcggagggrgatccagcaacccgtcagattgccaatctggttctcttgaactcagactttaatgatgttcctgagattctcttcgagggtcgtcgcgtggtcaataacattgcccacatcgccccgattttcttgataaagaccatctattccttcctgttagcagtcatctgtattgccagtgctttactaggtcggtcagagtggattttgattttccccttcattccgatccagattaccatgattgaccagtttgtggaaggtttcccaccattcgttytgacttttgagcgaaatatcaaacctgtygagcmraayttcctcagaaratccatgcttcgtgccctaccaagygcyctcatggtcgtsttyagcgtyctktttgtgaaaatvtttggmrmgagycaaggttggtctgagttagaaatctcaactctmctctattatctcttggggtcaattggtttcttatccgtatttagagcctgcatgccattyacyctatggcgwgtcctcttgattgtytggtcagtaggaggyttcctagccacagctctcttcccaagaatycaaaaactrcttgaaatttcaaccttracagracaaacrttrcctgtttatggtgtcatgatgttggtctttacmgtgattttcatcctgacyagtcgytaycaagcbaraaaataactaat

SEQ ID NO: 2308 - DNA, 156 bp, Streptococcus pneumoniae
  misc_feature (1)..(156): tiling:Spneumo1:WAN024DQX; Cluster includes WAN0242WJ SP04 70||15900385|NP_344989.1|448878..449027|-|150 bp|hypotheti cal protein|S.pneumoniae|TIGR4|NC_003028.1|ORF|121
atggataaaatgaaaccggtcttccaagccytaaataagraattaattcaggaaaatctgactttaacaattatytrtgtckgtggttatgtcttagaatatcatggtttacgtgccacacaagatgttgatgcttttatggctctactaactaat

SEQ ID NO: 2309 - DNA, 878 bp, Streptococcus pneumoniae
  misc_feature (1)..(878): tiling:Spneumo1:WAN024DUR; Cluster includes WAN0243A4 spr1 993|hsp33|15904034|NP_359584.1|1985475..1986347|+|873 bp|C haperonin (heat shock protein 33)|S.pneumoniae|R6|NC_00309 8.1|ORF|111
atggataaaattattaaaactatatcagaaagcggagcctttcgtgcttttgtccttgatagcackgaaaccgtccgcactgctcaagaaaaacatcaaacccaagctagctcaactgtagcgcttggtcgaactcttatcgcyagccagattctcgcagccaatgaaaaaggaaataccaaacttacagttaaggtgttgggmtctagctctctaggtgctattatcaccgtcgctgataccaaggggaacgtcaaaggctaygttcaaaatcctggtgttgacatcaaaaagactgcgactggtgaagtcctagtcggaccttttgttggaaatggtcaattcctygttatcacagactacggtrctggaaatccttacaactctataactcccctcatctctggagaaatcggtgaagaccttgccttttaccttactgaaagccaacaaacgccttcagcggtcggcctcaatgtccttttggacgaggaagacaaggtcaagrttgcaggtggtttcctagttcaagtcttgccaggagccaagaaagaagagattgctcgctttgaaaaacgcatccaagaaatgccagctatctctactcttctcgaaagcgacgaccatatcgaagccctcctcaaggctatctacggkgacgargcctacaagcgtctttctgaagaagaaatccgtttccaatgtgactgtagccatgaacgctttatgaacgctcttgccagccttccaagctcagacttacaggaaatgaaagaggaagaccacggggyagaaatcacttgtcaattctgccaaactacttacaactttgatgaaaaggacctggaggaactcattcgtgacaaatcttaactaat

SEQ ID NO: 2310 - DNA, 260 bp, Streptococcus pneumoniae
  misc_feature (1)..(260): tiling:Spneumo1:WAN024D3K; Cluster includes WAN0244DI spr0 572||15902616|NP_358166.1|582064..582318|+|255 bp|Hypothet ical protein|S.pneumoniae|R6|NC_003098.1|ORF|111
atggataaacaatacytacacgaaaagctggatgccatgcgccagaattttgttgaatcaaccyaccacgaacgakcgrtgggcgtgctagaccaagcgcatatgagcaaaaaaatgcttaaaatcaagaaaaaattagttgctcttgaaatggaacggtgccagagaaaaattgagcacaaagactgttccaagattgaccaaaaaatcaaagagcagaaggagatatttgaatcctgttgtaaaaaagattaactaat

SEQ ID NO: 2311 - DNA, 903 bp, Streptococcus pneumoniae
  misc_feature (1)..(903): tiling:Spneumo1:WAN024FSO; Cluster includes WAN02402N |cps 19bQ||AAB66522.1|||903 bp|putative rhamnosyl transferase|S .pneumoniae||AF004325|ORF|000
atggataaagtatgtatagttattctcaattataataattatgaagaaacgattgagygtgtacaaagtttgagaagtactataaaatcaaatgagtatgacatcgtgattgtagataataattcggtgaatgatagtgtcaaagagttatccaaggcgttatcccctattaagattattactagtttagaaaatagaggatatgcgaatggaaacaatattggaataaagtatgctgaggataatggatatgattacatttgtatattaaacaacgatacattaattgaggttgattttttggaatcgtgtaaacgagaactagaaaataattccttcgttgcctttgttagtccagtgttagttgaatataaagataataacttggtacaatctacaggtggtgatatttttattaataggggaattgtaactttaaaaaatcatggtgctcagagagacaaacttccttctaaaatcgaaagtgactatattgggggagcatgtttgatgttcaaaacctctatcttgaaaattattggatatatacctgaaagttactttctattttatgaagaaactgaatggtgttatagggctaaaaaattaggctataagaatatatgccttactcaaagttatgtktatcataaaggttcggtctctataaaagcggtcaatggacttcaagaatatttaatggcaagaaatagagttgtatttgttcgtagaaatrtaaatagyaaactaaagtattctgcttttttgttctatttattcatgcaacaactttatcattgcttyttgcgaagggattgttytaaaagaaagtataaatattatttagatggtgtatttaatagaattgatccatcctatccatttattttcataagcgaataa

SEQ ID NO: 2312 - DNA, 564 bp, Streptococcus pneumoniae
  misc_feature (1)..(564): tiling:Spneumo1:WAN024CKU; Cluster includes WAN02434D SP01 65||15900103|NP_344707.1|160384..160941|+|558 bp|flavoprot ein|S.pneumoniae|TIGR4|NC_003028.1|ORF|010
atggataagaaaaatttacttgtattggttactggttcggtaggtgccagtaatgtagatacatacttatattacataaaaaaattctataatgttaaagtgatactttctgaaaattctaaaaaatttataagtaaggaattaattagttatttttgtgataaagtttatgatgaaatatttgttgaagaggtagttccgcacgtttttctgccatatgaatctgacttacttcttattttaccagctacggcaaatgtgattggcaaaattgctaatggtattgctgatgatttagttacagcaactgttttaaactttaataaaaaaataattttttgtcccaatatgaactctactatgtgggacaatcacatagttcaaagaaatgtatcaattctaaaggagttgggacatatatttttatttgagtctaaaaaaacatatgaggtaggattgcgtaaagcaatagattcaacatgttcaatgttacaaccacagtcgttagtaaaagaacttatcaaattagaaaatattgtccttgaagagggacatctaactaat

SEQ ID NO: 2313 - DNA, 156 bp, Streptococcus pneumoniae
  misc_feature (1)..(156): tiling:Spneumo1:WAN024AZD; Cluster includes WAN0240QM |iP| |CAC10176.1|||156 bp|bacteriocin-like peptide, double glyc in cleavage type|S.pneumoniae||AJ278302|ORF|000
atggataagaaacaaaacctaacttcatttcaagaactaacaactaccgaactcaaccaaattataggtggaggatggtgggaagatttcttatatagatttaatataattgaacaaaaaaatacaaaaggattttatcagccaatacaactataa

SEQ ID NO: 2314 - DNA, 134 bp, Streptococcus pneumoniae
  misc_feature (1)..(134): tiling:Spneumo1:WAN024DHR; Cluster includes WAN0242UY SP05 28||15900442|NP_345046.1|507722..507850|-|129 bp|peptide p heromone BlpC|S.pneumoniae|TIGR4|NC_003028.1|ORF|020
atggataagaaacaaaacctaacttcatttcaagaactaacaactaccgaactcaaycaaattacaggtggaggattgtgggaagatttattatataacattaatagatatgctcattacatcacataactaat

SEQ ID NO: 2315 - DNA, 737 bp, Streptococcus pneumoniae
  misc_feature (1)..(737): tiling:Spneumo1:WAN024D94; Cluster includes WAN0243UQ spr1 249|aldB|15903292|NP_358842.1|1248451..1249182|-|732 bp|Al pha-acetolactate decarboxylase|S.pneumoniae|R6|NC_003098.1 |ORF|111
atggataagaacgtgcaggaaccagtgaaattatktcaatacaatactcttggagccttgatggctggcctttatggtggtactatgacagtaggagaattgctagaacatggtgaccttggtttgggaaccttggattccattgatggggaattgattgtcttggatggcaaggcttatcaggccaaagggtcaggagaccagccagaaattgtggaagtgtcaccagatgcccttattccttacgctgcagtggtaccgcatcrggcagaggtcattttccgccagcgctttgagatgacagacaaggaattgaaagaacgaattgagtcttattatgatggggaaaatcttttccgytctatcaagattcggggggaattttyacatatgcatgtgcgtatgattcctaagtcaacacccgataccaagtttgctgatgtcgcaacccatcaaccggaatatagtcgtgacaatgttgcggggactattgttggtttctggacgcctgagattttccatggggtcagtgtggcaggctaccatctgcacttcatatcagatgatttgaccttcggtggacatgtcatggattttgtcatcaaggaaggcattatcgaggtgggagcagttgaccagttggaccaacgtttcccagtccaagaccgtcaatacttgtttgctaagttcaatgttgacgagatgaaaaaagatattgaaaaggcagaatarctaat

SEQ ID NO: 2316 - DNA, 1685 bp, Streptococcus pneumoniae
  misc_feature (1)..(1685): tiling:Spneumo1:WAN024G3P; Cluster includes WAN0244HL spr0 425|PTS-EII|15902469|NP_358019.1|423672..425351|+|1680 bp| Phosphotransferase system sugar-specific EII component|S.p neumoniae|R6|NC_003098.1|ORF|111
atggataagctagtcgctgccattgaaaagcaacaagggaaatttgaaaaaatttctactaataactatatgatggctattaaagatggattcattgctactatgcctttaattatgttttcaagctttttgatgattattattatgattcctaaaaatttcggagtagagttaccgagtccagctattgtctggatgagaaaagtgtatatgttaaccatgggagttttgggtattattgtttcagggactgttggaaagtcattagttggaaatgttaacagaaraatgcctcacggaaaggtaataaatgatayttctgcaatgttggcagccatatsyagttatctgrwaytaactgtaacgcttgtagttgatgagaagacgggatctacaagtttgtcgacaaactatttaggatctcaaggattgataacttcgtttgtcagtgcctttattactgtaaatgtttaccgattctgtattaagcgagacattactattcatttacctaaggaagttcctggggctatatcacaagcttttagagatattttycctttttcttttgttttacttattagtggtttgttagatattgtatctcggtttagtttagatgttccttttgcccaagtatttcaacaactattgactcctatttttaagggggcagaatcatatcctgctatgatgttgatttggtttatgtgtgctttgctttggtttgttggaattcatggaccatctattgtcttacctgctgttacagctttrcaactgagcaatatggaagagaatgctcaacttcttgcaaatgggcagttcccttatcattctttaacrcctaatttcggraattatatcgctgctattggaggaacgggggctacctttgttgtaccatttattttgattttctttatgcggtctaaacaattaaaatcggtaggtaaagctacaattactcctgttttatttgcggtaaatgaacctcttctatttggtatgcctgttattttgaatccctatctttttgtcccttttttgatgactccaccagtraatgtatttctaggaaaggtmtttattgatttctttggaatgaatggattttatatccagttaccttggrcytttcctggtcccttgggattgttaattggaacgaattttcaacytatctcctttgtryttttatctttgatkttagttgtcgacatattgatttatttgccattctgtagagcgtatgatagacagttactgrtgaaagaagatrttgcaagctcaaatgrtattattttagaggaggatacaagtgaaataatkcctggtgagatagatgwaataaaaagtaaggagttgaaagtactggttctttgtgcagggtctggaacaagtgcgyaattagccaatgcaattaacgagggsgctmamttarcagargttagagtgattgckaattcaggagcgtacggagctcattatgatattatgggtgtttatgatttaattattctggcyccacaagttcggagttattatagagagatgaaggtggatgcagaaagattaggtattcagatagttgctaccagaggaatggaatatattcatttaacaaagartccaagtaaakccttacaatttgtattggagcattaccaagctgtgtarctaat

SEQ ID NO: 2317 - DNA, 636 bp, Streptococcus pneumoniae
  misc_feature (1)..(636): tiling:Spneumo1:WAN024FQV; Cluster includes WAN0243TK spr1 291||15903334|NP_358884.1|1286956..1287540|+|585 bp|Hypoth etical protein|S.pneumoniae|R6|NC_003098.1|ORF|111
atggataataaaaaattaaaagtaaaagatttagtaagyatcggtgtttttggcgtaatttattttgccttcatgtttggagttggtatgatgggcttgattccaatattgttcttaatatacccgacagtattagccatagttgcaggaactgttgttatgttatttatggctaaggttcaaaagccatgggcactatttatatttggtatgatatcaccacttgtgatgtttsyarctrrtcatacctacgtagttgtggttttatcacttatagtaatgataatagcagaattaattagaaagattggtaattataattcatttaaatacaatatgctttcttatgcaatcttcagcacatggatatgtagctctttaatgcaaatgcttttagcaaaagaaaaatatatggagtggtctttgatgackatgggaaaagattatgttgatgtattagaaaagttaataacttatcctcacatggctttagtagccttaggtgctttcttaggaggaattcttggagcatatataggcaaggctctattgaaaaaacactttkmaaawgsakkmtatygtrtrrgatactttactccttgcctaattttatggtgctatctgaatctaactaat

SEQ ID NO: 2318 - DNA, 1935 bp, Streptococcus pneumoniae
  misc_feature (1)..(1935): tiling:Spneumo1:WAN024G5O; Cluster includes WAN02440T spr1 029|glgB|15903073|NP_358623.1|1010268..1012196|+|1929 bp|1 ,4-alpha-glucan branching enzyme|S.pneumoniae|R6|NC_003098 .1|ORF|111
atggataatagagaagcattaaaaacctttatgacgggtgaaaatttttatctccaacattatctaggagcacatagggaagaactaaatggagagyatggctataccttccgtgtttgggcacctaatgctcaggctgttcacttggttggtgattttaccaaytggattgaaaatcagattccaatggtaagaaatgaytttggggtctgggaagtctttaccaatatggctcaagaagggcatatttacaaatatcatgtcacacgtcaaaatggtcatcaactgatgaagattgacccttttgctgtcaggtatgaggctcgtccaggaacaggggcaatcktaacagagcttcstgakaagaaatggarggatggactttggctggcacgaagaaaacgttggggctttghwgarcgtcctgtcaatatttaygargttcaygctggmtcwtggaaragaaatyctgatggcagtccttatagttttgcccarytsaargatgaactcattccttayctmgttgaratgaactatactcatattgagtttatgcccttgatgtcccayccwytrggyttgagttgggggtaycagcttatgggttacttcgctttagagcatgcytatggymgaccagaggagtttcaagattttgtcgaggagtgtcatacccataatattggggttattgtggactgggtaccaggtcactttaccatcaaygatgatgccttarcywattatgatgggacaccgacttttgaataccaagaccataataaggctcataaccatggttggggtgcccttaattttgaccttggaaaaaatgaagtccagtccttcttaatttcttgcattaagcattggattgatrtctatcatttggatggtattcgtgtggatgctgttagcaacatgctctatttggactatgatratgctccatggacacctaataaagatggcggaaatctyaactatgaaggttattatttycttcarcgcttgaatgargttattaagttagaatatccagatgtgatgatgattgcagaagaaagttcgtctgcraycaagattacgggaatgaaagagattggtggtctaggatttgactacaaatggaacatgggctggatgaatgatatcctccgtttctacgaagaagatccgatytatcgtaaatatgactttaacctggtgactttcagctttatgtatgttttcaaggagaattatctcttgccattctcgcacgatgaagtggttcatggcaagaagagtatgatgcataagatgtggggagatcgttacaatcaattcgcaggcttgcgcaatctctatacgtaccaaatttgtcaycctggtaagaaattgctcttcatgggtagcgaatacggtcaattcctagaatggaaatctgaagaacagttggaatggtctaacctagaagacccaatgaatgctaagatgaagtatttcrcttctcagctaaaccagttttacaaagatcatcgctgtctgtgggaaatygataccagctatgatggtattgaaatcattgatgcggataatcgagaccagagtgttctttcctttattcgtaagggtaaaaagggakaamtrwtagtctgtatctttaayatggtacctgttgagcggaaagattttacaatcggactacccgttgcaggaatttacgaagaagtatggaatactgagttggaagagtggggaggcgtttggaaagaacataatcaaactgttcaaacgcaagaaggmctatggaaagattatgagcagaccttaacctttacyctaccggctatgggagcaagtgtatggaaaatcaaacgtcgcttgaaatctactaaaaccgtcacaaataaaaaccmaaaaggagtagaaaatgaaaaaykaactaat

SEQ ID NO: 2319 - DNA, 801 bp, Streptococcus pneumoniae
  misc_feature (1)..(801): tiling:Spneumo1:WAN024FBC; Cluster includes WAN0243IC spr1 696|murI|15903738|NP_359288.1|1664899..1665693|-|795 bp|Gl utamate racemase|S.pneumoniae|R6|NC_003098.1|ORF|111
atggataatcgaccaattggttttttggattcgggtgtcgggggcttgaccgttgtgcgcgagctcatgcgccagcttccccatgaagaaatcgtctatattggagattcggcgcgggcgccctatggcccccgtcctgctgagcaaattcgtgaatatacttggcagctggtcaactttctcttgacyaaggatgtcaaaatgattgtcattgcttgtaacactgcgactgcggtygtctgggaagaaatcaaggctcaactagatattcctgtcttgggtgtaattttgccaggagcttcggcagccatcaagtccagtcaaggtgggaaaatcggagtgattggaacgcccatgacggtacaatcagacatataccgtmagaaaatccatgatctggatcccgacttacaggtggagagcttggcctgtcccaagtttgctcccttggttgagtcaggtgccctgtcaaccagtgttaccaagaaggtggtctatgaaaccctgcgtcccttggttggaaaggtggatagcctgattttgggctgtactcattatccactccttcgccctattatccaaaatgtgatggggccaaaggttcagctcatcgatagtggggcagagtgcgtacgggatatytcagtcttactcaattattttgaaatcaatcgtggtcgcgatgctggaccactccatcaccgtttttacacaacagccagtagccaaagttttgcacaaattggtgaagratggctggaaaaagagatycatgtggagcatgtagaattaykaactaat

SEQ ID NO: 2320 - DNA, 507 bp, Streptococcus pneumoniae
  misc_feature (1)..(507): tiling:Spneumo1:WAN024GO4; Cluster includes WAN023KL8 3139 02_3301||||1766052..1766558|+|507 bp|EGAD orf prediction|S .pneumoniae|R6|NC_003098.1|ORF|120
atggataatctctgcytccataatrcgtggacggactggrcttccataytcaagcaagccgtggtgactgaggatgacatgacgaagcaaaacgacttcttccttggtatcatcgatgccgagttccataactgtcttggtaatttcgctatcaatsagagcgatatgtccaagaagattrcctcksacygtgtactckgtctggtctggycccgtcaactcgatgaccttagcyaagtcrtgcaacataatccccgcatagagcaggctcttattgagctgaggataaacttcgctaatagcgtctgccaaacgcaccatggtcgccgtatgataggccaagcccgtttcaaaggcatggtggttggtcttggcagctggataggagtagaattccttatcatacttggtgtagagatttcggacaatccgttgccagacaggattttcaattttgaaaatcatttgcgacatgtagtcacgaatttccttgacatcaactggtga

SEQ ID NO: 2321 - DNA, 732 bp, Streptococcus pneumoniae
  misc_feature (1)..(732): tiling:Spneumo1:WAN024DXM; Cluster includes WAN023KFS 3139 19_3536||||1896363..1897094|+|732 bp|EGAD orf prediction|S .pneumoniae|R6|NC_003098.1|ORF|110
atggataatgtcttgagcgattgtgtaggctggagctgctttaccaccaaagaagattgtgattggacgagcagggatgttaccagctttgatgtcaaggtatttgtggatcacgtacaaagcgttcatttgttggcgtttgtactcgtgaagacgtttgatttggatatcaaagatagaatttggattgatttccacaccttggtgttctttcaagtgacgagccaatttacgtttgttgtgagccttgatgctttccaatttttctttgacarctgctttgtcttcataagacaaaagtttttcaagctcatctgcttcatggtgccaaccatctccaagaatctcatccaagtagtgagacaatcttgggttagcatgcataagccaacgacggaaagtgataccgtttgttttgttgttgaacttttctgggtaaaggtcgtagaaggctttcaactcagaatttttcaagatttcagtatgragtgctgcaaccccgttaacactgtatccgtagtggatatccatgtgagccatgtgaacacgtccgctctcatcgatgatttgaacagctggatctttgtactctgccttcacacgacggtccaattcttcgatgattggtaccaagtgaggaaccacttcttgcaagaattcaagaggccatttttcaagcgcytcagcaaggattgtgtggttagtgtaggcagtcatgctacgaacaattga

SEQ ID NO: 2322 - DNA, 261 bp, Streptococcus pneumoniae
  misc_feature (1)..(261): tiling:Spneumo1:WAN024CK5; Cluster includes WAN0242UO SP05 39||15900452|NP_345056.1|515091..515345|+|255 bp|bacterioc in BlpM|S.pneumoniae|TIGR4|NC_003028.1|ORF|010
atggatacaaaaattatggaacaatttcatgaaatggatataactatgttatctagtattgaaggaggcaagaataattggcaaactaatgtcttagaaggtrgtggtgctgcttttggtggctgggggytagggacagctatttgtgctgcgagtggtgttggagcvccatttatgggagcatgtggatacataggagctaaatttggtgtggmtctttgggcaggagtaacaggggcaacgrgtggatttctaactaat

SEQ ID NO: 2323 - DNA, 299 bp, Streptococcus pneumoniae
  misc_feature (1)..(299): tiling:Spneumo1:WAN024EU6; Cluster includes WAN0244L6 spr0 296||15902340|NP_357890.1|296637..296930|+|294 bp|Conserve d hypothetical protein|S.pneumoniae|R6|NC_003098.1|ORF|111
atggatacaacattgttttatggaatagtgattgtcttggcagtgagtccccttttactgtcaagctttcattctattcgtcagcaaaagttgcttcgcaaacagatggagcaacgacaagagtatttagcttctttaacatytggtgatgaagtgttgttattgtctggaattcatggaaaaatcatttctatcmaagatgacttgrtctccttgcagattgcaaaaggtgtggtcatcyatgtagaaaaggaaagtgtaatgggaaagacaaaagaactgctttttaagtarctaat

SEQ ID NO: 2324 - DNA, 560 bp, Streptococcus pneumoniae
  misc_feature (1)..(560): tiling:Spneumo1:WAN024DK9; Cluster includes WAN0244LY spr0 268|sulC|15902312|NP_357862.1|270271..270825|+|555 bp|GTP cyclohydrolase|S.pneumoniae|R6|NC_003098.1|ORF|111
atggatacacaaaagattgaagcrgctgtraaaatgattatcgaggcygtmggagaggacgctaaycgcgagggyttgcaggaaacacctgctcgtgtrgcycgtatgtaycaagagattttttcaggkcttggtcaaacagcrgaggaacatttgtcaaaatcytttgarattattgacgataatatggtggtagaaaaggatatctttttccataccatgtgtgaacaccacttyytgccattttatggkagagcrcayattgcctayattccagatggtcgtgtggcaggyttgtctaagctagcccgtacggttgaagtttattcgaaaaaaccacaaattcaagaacgtttgaatatcgaagtggccgatgccttgatggastatctaggtgctaaaggagcctttgttrtcattgaggcggaacatatgtgtatgagyatgcgtggtgtyagaaaaccaggcactgcaaccttgacgacagtagctcgtggtctatttgaaacagataaggayctccghgaycargcttatcgtttaatgggrctataactaat

SEQ ID NO: 2325 - DNA, 302 bp, Streptococcus pneumoniae
  misc_feature (1)..(302): tiling:Spneumo1:WAN024DFO; Cluster includes WAN0244BG spr0 646|bgl-truncation|15902690|NP_358240.1|653116..653412|+|2 97 bp|Phospho-beta-gluco or galactosidase, truncation|S.pn eumoniae|R6|NC_003098.1|ORF|111
atggatacaccggatgagaatggttatgtagcagatgactatcggattacttacttagaggcccacatcaaggccatgcgagatgccatttacmaagacggggttgacttgcttggttatacgacwtggggctgtatcgatycggtttcagctggcacaggggaaatgaataagcgctatggctttatctatgtagatcgagataatgtaggaaayggrrctctcaaaygtagcaagaagaagtccttctattggtacaaggatgtcattkatagcaatggtgyaagcatcgrgtarctaat

SEQ ID NO: 2326 - DNA, 941 bp, Streptococcus pneumoniae
  misc_feature (1)..(941): tiling:Spneumo1:WAN024DFE; Cluster includes WAN0244AV spr0 667|ftsX|15902711|NP_358261.1|670099..671088|+|990 bp|Cell division protein FtsX|S.pneumoniae|R6|NC_003098.1|ORF|111
atggatacgatgattagtagattttttcgccatttatttgaagccttaaaaagtttgaaacgaaatggttggatgacagtagctgctgtcagttcagtcatgattactttgaccttggtggcaatatttgcatctgttattttcaatacagcgaaactagctacagatattgaaaataatgtccgtgtagtagtttatatccgaaaggatgtggaagataatagtcagacaattgaaaaagaaggtcaaactgttacaaataatgactaccacaaggtatatgattctttgaagaacatgtctacggttaaaagtgttaccttttcaartaaagaagaacaatatgaaaaattaaccgagataatgggagataactggaaaatctttgaaggagatgccaatcctctctatgatgcctatattgtagaggcaaacrctccaaatgatgtaaaaactatagccgaagatgctaaaaaaattgaaggtgtctctgaggttcaagatggyggtgccaatacagaaagactcttcaagttagcttcatttatccgtgtttggggactagggattgctgctttgttaatttttatcgcagytttcttgatttcaaataccattcgtattaccattatttcccgcagtcgcgaaattcaaatcatgcgcttggtcggagctaaaaacagttatatccgtggaccgttcttgttagaaggagcctttatcggtttattgggagctatcgcaccatctgttttggtctttattgtttatcaaattgtttaccaatctgtcaacaaatcgttggtagggcaaaatctatccatgattagtccagatttatttagtccgttgatgattgccctacyatttgtgattggggttttcattggttcattgggatcaggaatatccatgcgccgattcttgaagatttarctaat

SEQ ID NO: 2327 - DNA, 245 bp, Streptococcus pneumoniae
  misc_feature (1)..(245): tiling:Spneumo1:WAN024DF8; Cluster includes WAN0244AF spr0 683||15902727|NP_358277.1|686774..687013|+|240 bp|Conserve d hypothetical protein|S.pneumoniae|R6|NC_003098.1|ORF|111
atggatacgattgaaaatctcattattgcgattgtgaaacccttaatttcacaaccagatgccttaactatcaagattgaggatacaccagaatttttggaatatcatttgaatcttgatcaaagcgatktgggtcgtgtaatcggtcgtaagggtcgcactatttctgcgataagaacgattgtctactctgtcccaactgaatacaaaaaagtaagaatcgttattgacgaaaaataactaat

SEQ ID NO: 2328 - DNA, 1014 bp, Streptococcus pneumoniae
  misc_feature (1)..(1014): tiling:Spneumo1:WAN024CJ2; Cluster includes WAN0242AN SP13 19||15901173|NP_345777.1|1242700..1243707|-|1008 bp|v-type sodium ATP synthase, subunit C|S.pneumoniae|TIGR4|NC_0030 28.1|ORF|012
atggatactaatcttttttcaaaaataaatacgacgatttcggtaaaagaaaacgattttattacagaagaaaaatttcaaaaaattatacaatccaaagatacggagacattggcatttatcttagaakcaactccctatcatttatcgattgacrtyttagaaratcctagtcagacagagatttcgctaatgacaaaattagtcaatgattatagatgggcctatgctgaaagtccgtctgatawaattgtgactttatttgctttacgatatgtttatcataatatcaaagttttattaaaatctaaggcggcaattaagaaagatttttctaaattattaattccaatagggatttttgatatagaaagtttaaaacatttagtttcttccttacattcagatacacttcctgattttatggttcrtgaagtagaatcaatttggaatgagtatgaaacttttaataatattcgtgtacttgatgtcggagctgatctagcatattttaaacatctgaaacttttatctaatgagttagrtgaggtrctgtctcaggttattgtygmaatgattgacttttataatattattactgtaaaacstggtttatctcaaaataagagtcatggggatattttacaattactttcagatgaaggaagtatttctgctaaagaatttatatacattgtagaaaatcaagaaatatttgtgtggttcaataaaataaatccaagcttagattcaatcttttcaacttaygaattgaagatgcaggacgcaacaatttcatcttctgagttagaatttttatgtgatttactattgtataaaactttagatcaaggaaggtayaatgtagakgggccgttagttcttgctagatatttattgggatgtgagtttgaagtaaagaatctyagaatgatcatatcagctcttcaaaatacaattccytttgaatcaataaaagaaaggatacgcccrcattatggaagcctaactaat

SEQ ID NO: 2329 - DNA, 959 bp, Streptococcus pneumoniae
  misc_feature (1)..(959): tiling:Spneumo1:WAN024DJ7; Cluster includes WAN0244JZ spr0 339|mvd1|15902383|NP_357933.1|343873..344907|+|1035 bp|dip hosphomevalonate decarboxylase|S.pneumoniae|R6|NC_003098.1 |ORF|111
atggatagagagcctgtracagtacgttcctacgcaaatattgctattatcaaatattggggaaagaaaaaagaaaaagagatggtgcctgctactagcagtatttctctaactttggaaaatatgtatacagagacgaccttgtcgcctttaccagccaatgtaacagctgacgaattttacatcaatggtcagctacaaaatgaggtcgagcatgccaagatgagtaagattattgaccgttatcgtccagctggtgagggctttgtccgtatcgatactcaaaacaatatgcctackgcagcgggyctgtcctcaagttctagtggtttgtccgccctggtyaaggcttgtaatgcttatttcaagcttggattggatagaagtcagttrgcrcaggaagccaartttgcctcaggytcttcttctcggagtttttatggaccactaggagcctgggataaggatagtggagaaatttaccctgtagagacagacttgaaactagctatgattatgttggtgctagaggacaagaaaaaaccaatctctagccgtgacgggatgaaactttgtgtggaaacctcgacgactttygacgactgggttcgtcagtctgagaaggactatcaggatatgctgatttatctcaaggaaaatgattttgccaagattggagaattaacggagaaaaatgcyctggctatgcatgctacgacaaagactgctagkccagccttttcttatctgacggatgcctcttatgaggctatggmctttgttcgycagcttcgtgagaaaggagaggcctgctactttaccatggatgctggtcccaatgttaaggtcttctgtcaggagaaagacttggagcatttrtcagaaattttcggtcakcgttatcgcttgattgtgtcaaaaacaaaggatttgagtcaagatgattgctgttaactaat

SEQ ID NO: 2330 - DNA, 750 bp, Streptococcus pneumoniae
  misc_feature (1)..(750): tiling:Spneumo1:WAN024CGL; Cluster includes WAN023S4Q cont ig_399_2||||622..1371|+|750 bp|Glimmer 2.02 orf prediction |S.pneumoniae|670|WAN01UD6U|ORF|000
atggatagaggctatgaaagttacaatctcatggctcattttcaagaaaaaggttggctttatatcatccgtattcgagatggaaaacaatccatgccttcctccttcaacttgccaaatacggagtgttttgatcaaaaagtttctctaaaattatcacgaaagcaaactaatcagctcaaaaaactttatcgtgattttcccaatgactatcattttattccacacaattctatttttgattttcttccagaaacaagtcgaaaacaagatcctgtaacactctatgaacttccttttcgtatggtgcgtttagaagtggaagaaggaaaatacgaaactttagtgacgaatacagactattcagtccaagaattaaaaaatctctacgccagtagatggggcatagagactagttttcgtgacctgaaatacagtattggcttggtcaattttcacgccaaaaagaagggagggattctccaagaaatctttgctcgctttacaaattttaacttttgtcgttgggtaacctcgcaagttgccatcgacagtagtcacaaaaaacaaagatataaagtgtgtttctcagatgcggcttatgcctgccgtttgttttttaacggttccctttcttccctccagttgaaaaactacctcaagaaacagttatctattattcgaccgaatcgaaaatattcaagaaagataaaagctcaatcggtagttgatttcatctatagagtaaca

SEQ ID NO: 2331 - DNA, 954 bp, Streptococcus pneumoniae
  misc_feature (1)..(954): tiling:Spneumo1:WAN024DLU; Cluster includes WAN0244PM spr0 136|glycosyltransferase|15902180|NP_357730.1|143802..14475 5|+|954 bp|Glycosyl transferase, family 2|S.pneumoniae|R6| NC_003098.1|ORF|111
atggataggaatatagatcaagaattagtaagtattataataccaacacataataggtatgaatctctgattagagctgtgaaaagttgtttacatcaaagttataaaaatatcgaagttataattattgatgataattatagtaatgtaaatttaagaaataaaattatccatcaatttggctataccaatcatagaattaagttaattttaagtaatgaagatttaggtgcaactaatgccagaaacataggtatcaaaaattctagaggtaagtatatatcatttttagacgatgatgatgaatatatgycagatcgaattttwaagttgatggcttgttttaaaaagagtagaatgaagaatttagctttagtttrtagttatggmataataatttatccaaatggtacacgagaagaggagaagaccgattttgttggaaatcccttgtttgttcaaatggttcacaatatagcaggtacgtcattttggttgtgtaaaaaagaggtgctagaattaattaatggttttgagaaaatagattcacatcaggacggtgttgttttattaaaactacttgytcaaggataccaaattgatatagtgcgagaattcttggtgaattactacgctcacagtaaagaaaacggtatcactggagtgacacaaaaaacaattaatgcagatgaagaatattataattactgtaggaaatattttaatttattgagtttcaacgagagaatattggttacaaagaaatattattctttaaacataaagcggttactattaataggagacaaatgcaaggctttaaaagtaatcaagaaggcaagagaagaaaaaatttttaacgaatttytttttytgaamtatatgttattatatmattttrgttttttctattgtatatatgacaactatgttcaattaaaatttagaaagtga

SEQ ID NO: 2332 - DNA, 332 bp, Streptococcus pneumoniae
  misc_feature (1)..(332): tiling:Spneumo1:WAN024CZS; Cluster includes WAN0243EG spr1 836|ptcA|15903878|NP_359428.1|1810463..1810789|+|327 bp|Ph osphotransferase system system, cellobiose-specific IIA co mponent|S.pneumoniae|R6|NC_003098.1|ORF|111
atggataggagaaataagatgacagaagaaatggaatatatctgttttcagctcattgccaatagtggagcagccaaatcatcctttattgaagccatccaactagctaaggcrggaaatttaaaagaagcgaaaattaaagttgaagaagcggaagactccttagtagaagcgcacaagattcactcyaatctcatacaaaaagaagctactggagaaaaaataggattctccttgctatttatgcatgcagaagaccaaatggcttcaacagagattattcagttgctatctaaagaattcatcgatctctatcaaaataaatarctaat

SEQ ID NO: 2333 - DNA, 800 bp, Streptococcus pneumoniae
  misc_feature (1)..(800): tiling:Spneumo1:WAN024DU7; Cluster includes WAN024399 spr2 024|ABC-MSP|15904065|NP_359615.1|2015486..2016280|-|795 bp |ABC transporter membrane-spanning permease - unknown subs trate|S.pneumoniae|R6|NC_003098.1|ORF|211
atggatagtatgattttrgggcgttatatcccaggggattcgattgttcaccgattggatccacgtagcaaattgcttgctatgatgctactgattttgattgtgttttgggctaataaccccttgacgaatctgattctttttatagcgacagggatatttattgccttgtcaggagtatctctttcattttttattcagggcttgaagtctatgtttttcttgattgccttcacaactatttttcaactatttttcatttctaatgggaatgttttatttgagttttcgtttgtgagaatcacggattatgctttgcaacaagctgggattattttttgtcgctttgtattgattattttcttttcaactttgttaaccttaacaaccatgcctttaagtttggcatcagctgtcgaagctttattagcacctttaaagcgtgtgaaagttccagttcatgaaattggattgatgctgtctatgagtttgcgttttgtcccaaccttgatggatgatacgackcggattatgaatgcacagaaagctcgtggagtggattttggagaaggaagcatcgttcaaaaagtaaaggcgatgattcccattttgattcctctttttgcgacaagtttaaaacgtgcagattccttggctatcgctatggaagcgcgtggctatcagggtggaaaaggcagaagtcaataccgacaattgaaatggactctaaaggatacgctgaccattcttgttattctcgtacttggttgttgtttatttttcttaaaatcttarctaat

SEQ ID NO: 2334 - DNA, 512 bp, Streptococcus pneumoniae
  misc_feature (1)..(512): tiling:Spneumo1:WAN024DJX; Cluster includes WAN0244LL spr0 281||15902325|NP_357875.1|279110..279616|+|507 bp|Hypothet ical protein|S.pneumoniae|R6|NC_003098.1|ORF|110
atggataraaaagaacgacaaaarattgaacaacaacgtcgagagatggctctaactaatacttttttyaatcgatatcttcttctacgttattcaatagcactcttcttttttgggaatatttattggcttttgartcagtttattartccctcgcytattattattttccccattatgctcatagtattttctattttagcaactgttgaacaatttaaactytatggaaataggaaagaaaagttgggaataacactaatgtttgttagaatacaaatgcttatttcaataggattacttgttttaacttggacaagttggtttamgaatctttttccgatttttgaaaataaccaagtagcacgtttatttgtttttgtagttcttctattaggtttagttctgagtttgttagacattagaagaattaaaaaaatttataaacgaacagataaggyttatcaacaatttgtccaattggaaaagaactcacttmgtttataactaat

SEQ ID NO: 2335 - DNA, 1425 bp, Streptococcus pneumoniae
  misc_feature (1)..(1425): tiling:Spneumo1:WAN024FWS; Cluster includes WAN02416Z |cps 9vK||AAM62295.1|||1425 bp|putative CPS repeating unit tran sporter Cps9vK|S.pneumoniae||AF402095|ORF|000
atggatataagtaataagtttaaggtaggtatcctatatactgctttaggtaagtattctaatgttataattcaattatttgtaacggcggtattaagtagaatattaacacctgaagagtatggcgttgtagcggttgtcaatgtgtttttagtattctttcagatattggcagattcgggaataggacctgcaattgtacaaaataagacattaactcaaaatgatttaaatgatatttttactttaacaatttattcaggtttaattctttcgtttgtttttgtattgataggctatccaattagtatagtctatgggaatgaagtctatatcaaactgtactcattattaggtatgtgtgtactattttatactatgacaattgttcctcagtcaattttaacaagaaacatgaactttaaacggatgaacttattgagtctgattgccaatatttttagtggagttattggtgttgtgctggccatacatgatttcggggtatattctctgattttttctaatattatgaaggctactatattattttttgtttttttttcaagtgttgagttgagttttaagaaaaagatagagaaaacttcgttagttaaaattctaaatttttctaagtttcaatttatgtttaattttctaaactactttgcaagaaatttagacaatctcttgattggtagattcattaatcccgctgcgttgggttattatgataaggcttaccagttatcattatatcctaatcagattttattgcaggtgatttcacctgtaattcatccgataatgtcgaattttcaaaatgatagacaaaaaatggaagaagtttttgcaaaaatttttaatattctacttttaataggaatgccaatctcagtgtatttgtttttcaatgcaagtgatgtgataacatttatgtttggaaataattggtttcagagcgttccagtatttcaaatactatctgctagcatctggattcaaatggctaatagtccaataggaattttttatcaagcttcgaatcgtgttgatctgttatttaaggtaggattattagcgtcaggatttaatattatagctattgtgatagggctattatcgaaaagtatagtgacaattgctgctatgttaattatttcatttataatagggctatcactgaatctctacgttttatcacatgtagtctttaaaaatgatataattaaatatttaaaaataattttagttcaccttgtaacagttatcccatatattatattcaatatgattggctttagatttgaacagggtgtagttatcaatcttgtgttgcaaggactggtattgggactaatttggtctataggaatatttgtaacaggtcaatacaagcagttaataatgatgtttagtaggtga

SEQ ID NO: 2336 - DNA, 942 bp, Streptococcus pneumoniae
  misc_feature (1)..(942): tiling:Spneumo1:WAN024CDB; Cluster includes WAN023P1I pne6 1_12||||6646..7587|+|942 bp|Type 33B capsule operon, Glimm er 2.02 orf prediction|S.pneumoniae||WAN01UCGA|ORF|000
atggatatagtatatrcgacagacaataactttrttgaggtrctttatgcwtcaatttcatctttatatgaaacgaatgcatyattatatcycaayrtttggatwattgctgayaaggtatcagctaaraataragakaraatcaatgagttagctagtaaaaataatcaaaayacgataaactggatagaaaatatagaaawaccttttaaattgamatyagatagaggttctataagttcttatagtagattatttttaggagaagttctycccaaaaaagttargaaagtactttatcttgattgtgayattattatcatggatagtttatcagrtttatttgatgaagaatttgatggaaaaataatccaaggtgtgtccgatgttttaaataaggaktataaaaaartattgaatattcctgttagygcacctgtatttaackcaggtgtattatatattgatttagakaaatggcgtgaasaacgaatcgargaaaarttrrtttatataatmaataaatttaaaggarmygtwattcaaggwgatgaaggagttttgaatgctgttytgtttrattcttataaagaattatctccaagatacaattatatgaccatttttgaggatatgtcttatgaggatatgatyrcttttaagcaacctgtaaactattatagtaaggaagttttagaagaakcargaaagmatataataatccgccatttyacaacgtgttttctatcactmagaccttggcaagaaagtagtgaggtarcgcatgtggaaatatttaaaaaatactatagaggrrcatacaaacaagyatctccatctaagttrttaartatttataarattttacckaaaaaaatgtcrctcyatctactaggwtttattcaatcaaaartkmgwccaaarytgtatagaattwyraaa

SEQ ID NO: 2337 - DNA, 965 bp, Streptococcus pneumoniae
  misc_feature (1)..(965): tiling:Spneumo1:WAN024CDR; Cluster includes WAN0244R5 spr0 081|ABC-MSP|15902125|NP_357675.1|87777..88736|+|960 bp|ABC transporter membrane-spanning permease - sugar transport| S.pneumoniae|R6|NC_003098.1|ORF|112
atggatatcaaaataaaaagggaggaaattatgaaaaagttttcaaaaacattgagagacaactggatctttctcttgatggttttgccaggggcactctggttgattctattcttttacattccagtatttgggaacgtggttgccttcaaagactaccacatgaccmgtaakggtttcatagatagtatcataaatagtaaatgggtcggactcgataatttyagattcttatttagttcaagagacgcctttattatcacacgaaatactgtcctctacaatcttggctttatctttctaggtttagttgtatctgtagggattgccattatcctcagcgagctccgttctaagagaatggtgaagattttycaaacttctatgttgttcccttacttcttgtcttgggttatcatyagtttctttacagatgccttcctaaatattgataaaggggtgttcaatcatctattggaaagtcttggtctcaaagaagtcaatttctacgctgacctgggcatctggccctatctcctacttttcctaggtatttggaaaggctttggatatagcagtgtcatgtactatgcgacgatcatgggaattgatccaacctactacgaagcagcgacagtggacggagctagcaagtggcaacgtattcgcaacgtaaccattcctcagttgactccgcttgtaactgtattgaccatccttgcagtcggaaatatcttccgcgcagacttcggtctcttctatcaaatcccacacaatgctggtcagctttacaatgtaaccaacgttttggaygtatatgtctttaatggtttgactcagacagcagatatyggtatggctgcagcagccggtctttaccaatccgttgttggtttgattctggttatcctatcaaacttgcttgcaagacgagtcgatccaaactcagctttgttctarctaat

SEQ ID NO: 2338 - DNA, 245 bp, Streptococcus pneumoniae
  misc_feature (1)..(245): tiling:Spneumo1:WAN024DV6; Cluster includes WAN0243AH spr1 980|dltC|15904021|NP_359571.1|1970972..1971211|-|240 bp|D- alanyl carrier protein|S.pneumoniae|R6|NC_003098.1|ORF|111
atggatatcaaatcagaagttattgaaattattgatgagttgtttatggaagatgtttctgacatgatggatgaagatctttttgatgcaggtgtcttggatagtatgggaacggttgagttgattgtggagattgagaaccgttttgacattcgtgtccctgtaacagagtttggtcgtgacgactggaatacagctaataaaatcatagctggtattgtggagctacaaaatgcttaactaat

SEQ ID NO: 2339 - DNA, 957 bp, Streptococcus pneumoniae
  misc_feature (1)..(957): tiling:Spneumo1:WAN024F95; Cluster includes WAN023RM6 cont ig_1575_7||||1465..2157|-|693 bp|Glimmer 2.02 orf predicti on|S.pneumoniae|670|WAN01UDHA|ORF|003
atggatatcgatagaaacagactacgwacaggcttgccacaggttggggtgcagccttatcgacaagtacaygcycactcaacaggyaaccgyaactcaacmgctcaaaatgargckgattaycactrkmgraargacccwgaaytaggkttyttytcrcaygttgtyggraayggycgyrtcatgcaagtaggtcctgtgaacaacggaagttgggatgttgggggcggttggaatrctgagagttaygcagcggttgaactgattgaaagccattcaactaargaagagttyatgrckgactaycgcctytatatcgaaytsytacgcaatctagcrgmygaagcaggyttgccgaagactcttgatacagacgacttggmaggtatcaagacgcatgaatactgtaccaataaccaaccaaacaaccactcagaccatgtggatccatatccatatcttgcaagttggggcattagccgtgarcagtttaagcaagacatcgaaaacggcttgagcgctgcaacaggctggcagaaaaatggcactggctactggtacgtacactcagacggctyttatccaaaagataagtttgagaaaatcaacggtayctggtattatttcgatggctcaggctatatgcttkcagaccgctggargaagcacacagacggyaaytggtactrsttygacmamtcaggcgaaatggcyacaggctggaagaaaatcgctgasaagtggtactatttyraygwagaaggtgccatgaagacaggctgggtcaagtacaaggacachtggtactacttagacgctaaagaaggcgccatggtatcaaatgcctttatccagtcagcrgacggaacaggctggtactacmtcaaaccagacggarcrmtggcagayaarccagavttcacagtagagccagatggcttgattacagttaaataa

SEQ ID NO: 2340 - DNA, 855 bp, Streptococcus pneumoniae
  misc_feature (1)..(855): tiling:Spneumo1:WAN024FHP; Cluster includes WAN0243OC spr1 479||15903522|NP_359072.1|1457719..1458567|-|849 bp|Conser ved hypothetical protein|S.pneumoniae|R6|NC_003098.1|ORF|1 11
atggatatgacgaaaatagctcttctttcagatattcatggaaataccaccgccttggaggctgttttggcagatgctcrgcagmtaggagtggatgaatactggcttttgggagatattctcatgccagggacaggrcgtagaaggattytggacttgttggatcaactaccgattacggctagagttttgggaaactgggaagacagtctttggcatggtgtccgtaaggaattggayagtactcgccccagtcaacgctatctcttgcgccagtgccagtatgttttagaggaaatttccctagaagaaattgaagtgctccacaatcaacctcttcaaattcatcgtcagtttggggatttgacggtgggaattagccatcatctgcctgataagaactgggggcgagagttgattcataytggcaaacaagaggagtttgaccgcttggtgactcatcctccctgtgatattgctgtttatggacatattcaccagcagttgcttcgttacgggactggtgggcaattgattgtcaatccgggttcgattggccaacctttctttttggacgctcagctacggaaggacttgcgggcccagtatatgattttggagtttgatgacaarggcctggtagatatggacttccgacgggtagaytacgatgtrgcagckgaattgcagctggctaaagacctgagacttccytattttgaggtttactatgaaagtctggtcaatgggatccaccatactcatcatcaggaatttttgagagaattggctcagaaagagggytgcgatcgggagttagacgactggttgaaaagtggtaacgatykaactaat

SEQ ID NO: 2341 - DNA, 909 bp, Streptococcus pneumoniae
  misc_feature (1)..(909): tiling:Spneumo1:WAN024FDE; Cluster includes WAN0243KH spr1 619|ABC-MSP|15903661|NP_359211.1|1592997..1593905|-|909 bp |ABC transporter membrane-spanning permease - sugar transp orter|S.pneumoniae|R6|NC_003098.1|ORF|200
atggatatgagtaaagaaactgttgtggatacaaaaagacgtgaaaaaataaaggataacatattaggttatagttttttagctccagctttaattttattaggtatctttttagtaattccagttggaatggtcatttattacgcttttacagattattatttgttgacaccagatgaaagaaaatttgttggacttgaaaattttattcgattaacaaaagatccgattttcttaaagagcttcttgaatactttgaaatttgttgtttggattattccagttcaattgggagcggccttaggaatggctttgattgtcaataaaaagcgaaaaggaaatatgttttttaaagtggctttttttgctccagttgtcatgtccttggtagttatttctattctttggctttatcttttaaatccaaatagtggcttattraatgctattttaaataaggtaggtattgcttctcaacctttcttgactagtcctaaacaagctatgtatgcaattgtttttgtttctgcttggcagggtgcaggttatcagatgcttttatttttaggaggaatgcagaatattccacaagatgtctatgaagctgctgaattagatggattctcaaaatgggctcagtttcgttatatcacgatgcccctactaaaaccaacagccctgtttgtattgttaacaactttaatttctgcttttaagctgattgtacaaccaatggttatgacgcaaggtgggccattaaactcaacaattactatggtgtactatatttatcaacaaggttttactgatcgtcttgtaggatattctagctcaatcgctttagtatttacaacgttaattggtatgattagcttagtacaacgtcgcgttctgaaggaggatgactaa

SEQ ID NO: 2342 - DNA, 734 bp, Streptococcus pneumoniae
  misc_feature (1)..(734): tiling:Spneumo1:WAN024FBK; Cluster includes WAN0243IH spr1 691||15903733|NP_359283.1|1661517..1662245|-|729 bp|Conser ved hypothetical protein|S.pneumoniae|R6|NC_003098.1|ORF|1 11
atggatattaaattaaaagattttgaaggacccctggacttrctcttgcatctggtttctaagtaccagatggatatctacgatgtgcccattacggaagtcatcgaacagtatctagcctatgtytcaaccctgcaggccatgcgtctggaagtgacgggtgagtacatggtcatggctagtcagctcatgctgattaagagtcgtaaactccttccgaaggtagcagaagtgacagacttgggggatgacctggagcaggacctcctctctcaaatcgaagaatatcgcaagttcaagctcttgggtgagcacttggaagccaagcaccaagaacgggcccagtattattccaaagcgccgacagagttgatttacgaagatgcggagcttgtgcatgacaagacgaccattgacctctttttgrctttttcaaatatcctagccaagaaaaaagaggagtttgcacaaaatcacacgackatcttgcgggatgagtataagattgaggacatgatgattatygtgaaagartccttgattggacgagatcaattgcgcttgcaggatttgttcaaggaagcccagaatgtccaagagrtcatcaccctctttttggcaaccctagagttaatcaaaacccaggagytgatcctcgtgcaagaggagagtttyggagatatctatctcatggaaaagaaggaagaaagtcaagtgcctcaaagctarctaat

SEQ ID NO: 2343 - DNA, 1343 bp, Streptococcus pneumoniae
  misc_feature (1)..(1343): tiling:Spneumo1:WAN024CXS; Cluster includes WAN0244NC spr0 218||15902262|NP_357812.1|210885..212222|+|1338 bp|Conserv ed hypothetical protein|S.pneumoniae|R6|NC_003098.1|ORF|11 1
atggatattagacaagttactgaaaccatcgccatgattgaggagcaaaayttcgatatyagaaccattaccatggggatttctcttttggactgtatcgatccaratatcaatcgtgctgcggagaaaatctatcaaaaaattacgacaaaggcggctaatttagtagctgttggtgatgaaattgcggctgagttgggaattcctatcgttaataagcgtgtatcggtgacacctatttctctgattggggcagcgacagatgcgacggactacstggttctggcaaaagcgcttgataaggctgcgaaagagattggtgtggactttattggtggtytttctgccttagwacaaaaaggttatcaaaagggagatgagattctcatcaattccattcctcgcgctttgrctgagacggataaggtctgctcgtcagtcaatatcggctcaaccaagtctggtattaatatgacggctgtggcagatatgggacgaattatcaaggaaacrgcaaatctttcagatatgggagyggccaagttggttgtattcgctaatgctgttgaggacaatccatttatggcgggtgcctttcatggtgttggggaagcagatgttatcatcaatgtcggagtttctggtcctggtgtkgtgaaacgtgctttggaaaaagttcgtggacagagctttgatgtagtagccgaaacagttaagaaaactgcctttaaaatcactcgtatcggtcaattggttggtcaaatggccagtgagakactgggtgtggagtttggtattgtggacttgagtttggcaccaacccctgcggttggagactctgtrgcacgtgtccttgasgaaatggggctagaaacagttggcacgcatggaacgacrkctgccttggccctcttgaacgascaagttawaaagkgtggagtgatggcctgyaaccargtcggtggtytatctggtgcctttatccctgtttctgaggatgaaggaatgattgctgcagtgcaaaatggctctcttaatttagaaaaactagaagctatgacggctatctgttctgttggattggatatgattgccatcccagaagatacgcctgctgaracyattgcggctatgattgcggatgaagcagcwatcggtgttatcaacatgwaaacaacwgctgttcgtatcattcccaaakgaaragaaggcgatatgattgagtttggtggtctattaggaactgcaccygttatgarggttaatggggcttcgtctgtcgacttcatctctcgcggtggacwwatcccagcaccarttcatagttttaaaaattaactaat

SEQ ID NO: 2344 - DNA, 962 bp, Streptococcus pneumoniae
  misc_feature (1)..(962): tiling:Spneumo1:WAN024FPY; Cluster includes WAN0243T9 spr1 302||15903345|NP_358895.1|1295051..1296007|-|957 bp|Conser ved hypothetical protein|S.pneumoniae|R6|NC_003098.1|ORF|3 21
atggatattagaccgcaatcaagtgatgaacttgattcgcaaagaagagtaaggagagacatgtcaaatagtttaaaagggactttactaacagttgtggctggtattgcttgggggktgtcaggaacgagtggccaatacctaatggcacacggaatttcggctctggtcttgacyaacttgcgtcttttaatcgctggtggaattctcatgmtcttggcttatgctactrcaaaggataaaatactggtctttttaaaggatagaaagagtttgctgtctcttcttatttttgctctgattggtctttttctcaaccaattcgcctatctgtctgctattcaggagaccaatgcgggaacagcgamggtgcttcagtatgtttgtcctgtcggaattttaatttatagctgtatcaaggatagggtggcaccgacactgggagagatagtttccatcatattsgccatcggaggaaccttcctgatcgcaacacatgggcagttggaccagttatccatgacacctgctggyctgttctggggtctcttttctgccttgacttatgctytrtatatcattttacccatagccttgattaaaaagtgggggagcagcttggtcattggtgtgggratggtyatagcaggtttggtcgcccttccttttacaggggttctacaggccratatcccgactagtcttgattttctccttgcgtttgcaggyattatccttatcgggactgtctttgcctatacagctttccttaaaggagccagtctgataggaccggtcaagtcaagcttgttggcttcaattgagccaatatcggcgrttttctttgccttcttaataatgaatgaacaattttatcccattgattttmttggtatggcaatgatattgtttgctgtaactttgatttctttgaaagatttattcttagaaaaataactaat

SEQ ID NO: 2345 - DNA, 935 bp, Streptococcus pneumoniae
  misc_feature (1)..(935): tiling:Spneumo1:WAN024GEX; Cluster includes WAN0244CZ spr0 591||15902635|NP_358185.1|605131..606060|+|930 bp|Conserve d hypothetical protein|S.pneumoniae|R6|NC_003098.1|ORF|221
atggatattcaatttttaggaacgggggctggtcagccctctaaagcccgcaacgtttcaagtctcgccctgaaactyttggatgagattaacgaagtttggctctttgactgtggagaaggtacgcaaaatcgcattctggaaaccacaattcgaccacgtaaggtcagcaaaatctttattacccatctgcatggagaccacatttttkgtttgccaggtttcctttctagccgtgcctttcaggccaatgaagagcagacagatttggaaatctacggacctcaaggaatcaagtcatttgtcttaaccagccttcgtgtgtcaggttctcgtctgccctaccgcattcatttccatgagtttgaccaagattctctrggtaaaattcttgaaaycgataaattcactgtgtatgcagaggagctggaccacactattttctgtgttggctatcgtgtcatgcaaaaggatctagaagggacgctggatgctraaaaactcaaggctgctggtgttccgttcggcccgctttttggtaaaatcaaaaayggccaggatcttgttttggaagacggaactgaaatcaaggcagcagactatatctcagcgccacgtccaggtaagattatcactattttaggagacactcgaaaaacggrtgccagtgtgcgtctggctgtcaatgcagatgtcctagttcatgagtccacttatggcaagggtgatgaaaaaattgctcgtaaccatggtcactcaactaatatgcaagctgcacaagtagcggtagaagcaggtgccaaacgcctcctactcaaccatatcagtgcccgtttcctctcaaaagatatwagcaaactcaagaaagacgctgccacaatttttgaaaatgtccatgtggtcaaagacttggaagaagtggaaatctarctaat

SEQ ID NO: 2346 - DNA, 1383 bp, Streptococcus pneumoniae
  misc_feature (1)..(1383): tiling:Spneumo1:WAN024DJW; Cluster includes WAN0244LK spr0 282|PTS-EII|15902326|NP_357876.1|279696..281042|+|1347 bp| Phosphotransferase system sugar-specific EII component|S.p neumoniae|R6|NC_003098.1|ORF|110
atggatcaacaaaacgggttgtttggtttycttgaaaaccatgttatggraccaatgggcaaacttgcycagtttaaagtagtacgtgctatcacggctgcwggtatggcwgctgtaccatttactattgtaggatcaatgtttttggtattcagtattttgccacaagctttctcattttggccaattgtggcagatattttctctgcttcatttgrtaaattcasatcactttacatggttgcaaaytatgcsactatgggttctctatctctttatttygttctwtcacttgcatatgaattgacaaaaatttatgcagaggaagaagaactcaatatgaatcctcttaatggtkccttgcttgccttgatggcttttgtcatgacagtaccgcaaatcatttttgatggtggaatgatgaagrctgtgacaagtctaaaagaaggygcagtaattgcagatggatgggcaatgggaaatgkagtcgcacgttttgggacaacagggatttttaccgcaatcattatggcaattgtgactgttcttatttatcgtatgtgtgttaaamataattgggttattaaaatgcctgaagctgttccagaaggagtttctcgtggatttaccgctttgrttccrggatttgttgttgcattygttgttatctttatcaacggtcttcttgtagcaatgggaacagatatttttaaagtcattgcaattccatttggttttgtatccaatctgactaattcrtggattggtttaatgattatttatctrttgactcaactactttggattgtaggtatccacggtgcgaacattgtttttgcatttgttagtccaattgctcttgcyaacatggctgaaaatgctgctggcgggcacttcgctgttgcaggtgaattttctaatatgtttgtaattgcaggtggttctggtgcaacwttaggmctatgtttatatattgcttttgcctctaaatctgaacagcttaaagcaataggacgagcatctgtagttccagccttatttaatattaatgaaccattaatttttggattacctattatctataatccagccttggctataccatttattttagcaccaatggttactgctactatttattacgtagcgaattctctaaactttattaagccaattatcgcacaggttccatggccaactccagtagggattggagctttcttagggacagcagatcttcgagctgtattagttgctctmgtwtgtgcatttgcagcattcytagtytatctyccattcatccgtgtatatgatcaaaaaytrgtgaaagaagagcaaggtatctaactaaktaaaaaagtatactcgatgatagaatccata

SEQ ID NO: 2347 - DNA, 818 bp, Streptococcus pneumoniae
  misc_feature (1)..(818): tiling:Spneumo1:WAN024DK8; Cluster includes WAN0244LX spr0 269|sulD|15902313|NP_357863.1|270868..271680|+|813 bp|Aldo lase-pyrophosphokinase|S.pneumoniae|R6|NC_003098.1|ORF|111
atggatcaactgcagattaaggatttggaaatktttgcctatcatggtctttttcctagtgagaargaattggggcagaaatttrtcgtttcagccatcctatcctatgatatgaccaaggcagctacagacttggatttaacagcctctgtccattacggagaattgtgtcagcagtggacgacttggtttcaggaaacgagtgargatttgattgaaacggtagcctataaactggtggaacgtacctttgagtyttatcctcttgtccaagaamtgaagyyggaactgaaaaaaccttgggcaccggtgcatttgtcactagatacttgctcggtaaccattcatcgccgcaagcaacgagcctttatcgccctaggaagcaatatgggagataarcaagcaaacttgaagcaagccattgacaaactgcgagctcgtggcatcyatattctcaaagagtccagtgtcttagcgacggagccttggggtggagtggagcaggatagctttgccaatcaagtggttgaggtggaaacctggctaccagcacaagacttgttagaaaccttgttagccattgagtcagagctgggacgggtgagagaagtgcattggggacctcgtttgattgatttggacttgctctttgtggaggaccagatcctttatacagacgacctcatattgcctcatccttacatagcggaacgcctttttgtccttgagtccttacaggaaattgcgcctcattttatccatccgatattaaaacaaccgatccgyaacttgtatgatgctttgaaaaaatarctaat

SEQ ID NO: 2348 - DNA, 306 bp, Streptococcus pneumoniae
  misc_feature (1)..(306): tiling:Spneumo1:WAN024FK9; Cluster includes WAN0243QT spr1 390||15903433|NP_358983.1|1371422..1371721|-|300 bp|Conser ved hypothetical protein|S.pneumoniae|R6|NC_003098.1|ORF|1 11
atggatcataaggcttatatgtacgttctggagtgtcgtgatggatcctactatataggctatacgactgatatgagaagacgcctcgctatccacaatagtgggaagggagccaaatatacacgagcacgcttgccagtcaaacttatctatgctcaaggttttgccagtaaggaagaagccatgtcggctgaagctcttytcaagcgtaagaagaggccacagaaggaagaatttttatctgaaaatcaagatagaaatttactcagttattttgaagaatcgtggggagtccttctaactaat

SEQ ID NO: 2349 - DNA, 312 bp, Streptococcus pneumoniae
  misc_feature (1)..(312): tiling:Spneumo1:WAN024C3N; Cluster includes WAN023M3Q 3143 68_686a||||360565..360876|-|312 bp|EGAD orf prediction|S.p neumoniae|R6|NC_003098.1|ORF|110
atggatcatttcttctggaagttctacgatttcagcrttttctacagctgtatcaattgctgcaccttcaactgcatctttgtaagyttcttctttagcagcagccaattctttgckgtatttttctttcaagtcagcaagtgtttcaacttcttcatcaatgtcttttgcaagttcatcgtcaagagcyggaacttctttagcttttacttcgtggatagttgtcacgaatttagcttctttacctgcaaggtcttctgcttggtagtcttctgggaatgttacgataacatcaacggtttcgccagctga

SEQ ID NO: 2350 - DNA, 263 bp, Streptococcus pneumoniae
  misc_feature (1)..(263): tiling:Spneumo1:WAN024ESV; Cluster includes WAN0243SK spr1 327||15903370|NP_358920.1|1314035..1314292|-|258 bp|Conser ved hypothetical protein|S.pneumoniae|R6|NC_003098.1|ORF|1 21
atggatccgaaaaaaattgctcgtatcaatgagcttgctaaaaagaaaaaaacagaaggcttaacaccagaagaaaaagtggaacaagccaaactacgtgaggagtacatcgaaggttatcgccgcgctgttcgtcaccacattgaaggaatcaaaattgtggacgaagaaggaaacgatgttacaccagaaaaactacgccaagtacaacgtgaaaaaggattacatggccgtagtcttgatgatccaaattcataactaat

SEQ ID NO: 2351 - DNA, 1365 bp, Streptococcus pneumoniae
  misc_feature (1)..(1365): tiling:Spneumo1:WAN024B3G; Cluster includes WAN023PEB pne3 9_10||||7064..8428|+|1365 bp|Type 19F capsule operon, Glim mer 2.02 orf prediction|S.pneumoniae||WAN01UCHJ|ORF|000
atggatgaaaaaggattgaaaatttttttggcagtattacagagtattattgtcattttattggtttattttcttagctttgttagagagacagaacttgaacgttcttcgatggttatactataccttctccacttttttgtattctattttagttcctatggtaacaatttttttaaaagagggtacctagttgagtttaatagtaccataagatatatttttttctttgcaatagctataagtgtattaaacttttttatagcggaacggtttagtatctctagaagaggaatggtatacttcttaactttagaaggaatatccttatacttgttaaatttcttagtaaagaaatattggaagcatgtgttttttaatctaaaaaatagcaagaaaattttactgttaacagtaacgaaaaatatggaaaaagttcttgataaattgctagaatctgatgaactttcatggaaattggtagcagtaagtgttttggataaatctgattttcaacatgataaaatacctgtaattgaaaaggaaaaaattattgaatttgcaacgcatgaagttgtggatgaggtgtttgtcaatcttccaggagagagctacgatattggagaaattatctctaggtttgagacaatggggatagatgtaactgtaaatcttaaagcatttgataagaatttgggtcgcaataaacaaattcatgagatggtaggattgaatgtagtcactttctctacaaatttttataaaactagtcatgtaattgctaagcggattattgatrtcatgggtgcattggtagggctgatactatgtggtttagtcagtattgtattggttcctttgattcgaaaggatgggggytctgctatttttgctcagacgcgtataggaaaaaatggtcgtcagttcactttttataagtttcgctctatgtgtgtagatgccgaggcgaaaaaaagagaactcatggaacaaaataccatgcagggtggaatgtttaaggtggacgatgatcctcgtatcacgaaaattggtcgttttatacggaagactagcttggacgagytaccacagttttataatgttctaaagggagatatgagtttggttggcacacggccacctacagtggacgagtatgttcagtatacttcagaacagaaacgtcgactcagctttaaacctggtattacaggtttatggcaggttagcggccgtagtaaaataaccgattttgacgatgttgtaaaattagatgtggcttatattgataattggacaatctggaaagatattgaaattttgcttaaaactgttaaagttgtatttatgagagatggagcgaag

SEQ ID NO: 2352 - DNA, 309 bp, Streptococcus pneumoniae
  misc_feature (1)..(309): tiling:Spneumo1:WAN024GDW; Cluster includes WAN023LT5 3136 48_1209||||640247..640501|-|255 bp|EGAD orf prediction|S.p neumoniae|R6|NC_003098.1|ORF|110
atggatgagacggtgcaagatgtccttgcaacgacattgctggacaacctctgctattttagaatcaatttcctgaaggtgatagccgatattytccawggtraaaaycarctcctcaaacaagytctccatggtaaattgatgattrggattttgmaagagaatrccaaccktctggacacgtkcgaygatagaaagctgactgacctcgctcccatctatcaggacttgaccrctatagggaagagaactracttgggcaatsayttgaaaraggctggattttccwgacccactactcccaactaa

SEQ ID NO: 2353 - DNA, 297 bp, Streptococcus pneumoniae
  misc_feature (1)..(297): tiling:Spneumo1:WAN024GC3; Cluster includes WAN023LQH 3155 75_1368||||724876..725172|+|297 bp|EGAD orf prediction|S.p neumoniae|R6|NC_003098.1|ORF|110
atggatgagttgagattgttctttctctttcaaatcaccaacagggatattggttttctgctcgataatgtgctcaatagttttctcgctgatgmtaggagtatcctggtctgtgatctttttcttttgcatttccttatacttggcaatctggtcgcggaagtaggccgccttctcaaaatcttcttctcgtgtagcttgagacttgagattttcagcctcaatcaagcgctgatcaattactttaggatccacaaaattcaaggtcaagttcatcttagaaccagcttcatctag

SEQ ID NO: 2354 - DNA, 225 bp, Streptococcus pneumoniae
  misc_feature (1)..(225): tiling:Spneumo1:WAN024CW7; Cluster includes WAN023LIG 3146 37_1839||||989109..989333|-|225 bp|EGAD orf prediction|S.p neumoniae|R6|NC_003098.1|ORF|110
atggatgataaaaggataggtaatggcaatgcagagcctgacgttgaataccatcttccagactaccaccatacaaatcatctcccagcaaaggaaaaccgatatgagaaaaatggactcggatttgatgggttcgaccagtgtgcaggtgaatatagaccaagtgaatatttccataagaagctacaatcttgtatgaagtatgggcatactttccgcctttag

SEQ ID NO: 2355 - DNA, 276 bp, Streptococcus pneumoniae
  misc_feature (1)..(276): tiling:Spneumo1:WAN024CBV; Cluster includes WAN023MBJ 3143 09_239||||123980..124255|-|276 bp|EGAD orf prediction|S.pn eumoniae|R6|NC_003098.1|ORF|100
atggatgatataaatagacatacaaaaaaaataataacaaaaattttttccattttaatacccatatctagttaccacaaggcgtttaaatttgggtctctcctatttacatcattgttggcccagattgttgtaatagcatcgccaattgacatccaagctgcaaatccattaatagcagacagtgcaaatcctgccactctatttgcaactcgtaccccaacatatcttgcagctgctccagcaattgcgcttgtaactcgccscaaaccataa

SEQ ID NO: 2356 - DNA, 1481 bp, Streptococcus pneumoniae
  misc_feature (1)..(1481): tiling:Spneumo1:WAN024GFX; Cluster includes WAN0244DQ spr0 564|PTS-EII|15902608|NP_358158.1|570343..571818|+|1476 bp| Phosphotransferase system sugar-specific EII component|S.p neumoniae|R6|NC_003098.1|ORF|111
atggatgcaatctttgacctaatcggaaaggttttcaatcccatcttagaaatgggtggacctgtcatcatgttratcattttgacagtattggctttactttttggagtgaaattctccaaagcgcttgaaggtggtatcaaacttgccatcgctcttacaggtatcggtgctatcatcggtatgctaaayrstgctttctcagcatcactwgcaaaattcgttgaaaacactggtatccaattgagtattacmgacgttggttgggcaccactygcwacaatcacttggggttctgcttggacactwtacttcttgctcatcatgttgattgtcaacrtagtgatgctwgctatgaagaaaacmgatacacttgatgtcgatatctttgatatctggcacttgtctatcacaggtctcttgattaaatggtatgctgataacaatggtgtgagtcaaggggtttcactcttkattgctacagcagctatcgtycttgtcggtgtgttgaaaattatcaactctgacttgatgaaacctacatttgatgaccttcttaacgccccaagttcatcaccaatgacatcaactcacatgaactacatgatgaacccagttatcatggttttggataagatttttgaaaaattcttcccaggccttgataaatatgactttgatgctgctaaattgaacaagaaaatcggtttctggggatctaaattcttcatcggtttcatccttggtatcgttatyggtattatgggaactccacatccaattgcaggtgttgcagatgcagataaatggcgtcttgttatcaaaggatggttgtctcttggtttgactgccggtgtatctttggaactcttctcacttatcggttcatggttcatcgcagccgtagaaccactatcacaaggtattacaaacgttgctactaaacgtcttcraggacgtaaattcaatatcggtcttgactggccattcatcgctggtcgtgctgaaatctgggcttgtgccaacgtacttgcaccaatcatgttgattgaagcagtgcttctttcaaaagttggaaatggtatcttgccacttgcaggtatcatcgctatgggtgttactccagctctcttggttgtaactcgtggtaaattgctccgtatgattatcttcggaacactcttgttgccactcttccttctttcaggtacmcttattgcaccatttgcaacagaacttgctaaaggtgtaggtgccttcccagaaggtgtgagccaaactcaattgattactcactctactcttgaaggaccaatcgaaaaacttcttggttggacaattggtaacactacaactggtgatatcaaagcaatccttggtgcagtagycttccttgtattctatatcggtatctttgcttggtacagaaaacaaatgatcaaacgtaacgaagagtacgcagcaaaagcaaaataactaat

SEQ ID NO: 2357 - DNA, 513 bp, Streptococcus pneumoniae
  misc_feature (1)..(513): tiling:Spneumo1:WAN024D77; Cluster includes WAN0243T3 spr1 308||15903351|NP_358901.1|1299522..1300034|-|513 bp|Hypoth etical protein|S.pneumoniae|R6|NC_003098.1|ORF|111
atggatgctattaaggaggcaggttatcatgtgctggatttagctcataatcatattttggattcgcaaattgagggagttatttcaayggccgatattattgasaaagctggaatcactccaatcggagtttatacgcacgaaccacgtgmtcaggytccgctggtcattaaggaagtgaatgstatcaaggttgcattgtyagcctattcctatggtttcaatggaattgagcagtatatttytcaggaagactataatcgttatctttyagatttaaacgaagataagatraaggytgaarttgaacgggcagagaaggaagcagatatcaccattatcatgcytcagatgggtgttgagtatcgattggaaccaactgaagaacaaaaagctctttatcacaagatgatygattkgggagcggatattatctttggagggyatcctcacgttgttgarccatctgaaacggtkgaaaaagatggagataagaarctcattrtctattaa

SEQ ID NO: 2358 - DNA, 489 bp, Streptococcus pneumoniae
  misc_feature (1)..(489): tiling:Spneumo1:WAN024D29; Cluster includes WAN023LF0 3139 97_1985||||1073646..1074134|+|489 bp|EGAD orf prediction|S .pneumoniae|R6|NC_003098.1|ORF|110
atggatgggttcattgtgactgttaaaatcataggtcacctcttagtcgtggtattctccrcgatcccatttytcaaggaattctgtaaagaagtttgcgtctgtttgttgagcattgtgactttcaasrtgttcaattttcgcaatcaatttyttgttttcttcagwtggtttgtattcagcatgratgaaagcttcgatgatatcacacataagcaattcaccagtaatyttaccaccaaarccrataacgttagcgttcaattgttctttagcataaagggctgttgtcatatcacgaaccaaggcagaacgaacacctggaactttatttacagcgttgttgataccaacaccagtaccacagatacatacyccaagatcagcttgrccgctagttacagcttcccctacttttttaccaaagattgggtagtgagtccgtgtatggtcatakgtaccaaagtcaatgacttcatatccttttga

SEQ ID NO: 2359 - DNA, 540 bp, Streptococcus pneumoniae
  misc_feature (1)..(540): tiling:Spneumo1:WAN024CRJ; Cluster includes WAN0244PZ spr0 123||15902167|NP_357717.1|131851..132333|+|483 bp|Conserve d hypothetical protein|S.pneumoniae|R6|NC_003098.1|ORF|120
atggatgttgcaggcttttttgtcctgcacttctttgtagttttgactgtwtttgtgtcgtttaagggaaaggacaagaatgactcaacaagactttcggacaaaagtagacaatacggtttttggtgttcgggckacagcyttgattstycaaaatcrcaagcttctagtyaccaaagacaagggcaagtattacaytatyggmggtgcgattcaagtyaaygaaarmacggaagacgcggtagtccgtgaagtgarggaagaactgggtrtyaaakctcaagctgggcagctagcttttgtggttgaaaatcgttttgaaswggacggygtttcctatcacaatatcgartttcattatctggtggayttrctkgargatgccccrttgaccatgcaggaagatgagaaaagkcagccctgtgagtggattgacttggataagctysagratatccagctagttccagyctttttaaaaacrgccctaccagattgggaaggccaactaagacacattcatcttgaggaatarctaat

SEQ ID NO: 2360 - DNA, 1368 bp, Streptococcus pneumoniae
  misc_feature (1)..(1368): tiling:Spneumo1:WAN024B3I; Cluster includes WAN0240UQ |wch A||AAK20711.1|||1368 bp|WchA|S.pneumoniae||AF316642|ORF|00 0
atggatraaaaaggattgraaattttthtrgcartawtrcagagtatwrttgtcattttatygrtttattttcttarctttgttagagagrcagaasttgaacgttcttcgatrgttatactataccttctccacttttttgtattytatkttagttcctatggtaayaawttttttaaaagagggyacytagttgagtttaatagtacyataagatatatttttttctttgcaatagctatargtgtattaaacbkttttatagyggaacggtttagyrtmtctaraagaggaatgrtatacytcttaactttagaaggratatccttatacttgttaaatttcttagtaaaraaatattggaarcatgtsttttttaatcyaaaaaatagcaagaaaattttactgttaacagtaacrraaaatatrgaaaaagttcttgataaaytgytagaatcygatgaacyttcatggaarytggtagcagtaagtrttttgrataaatmtgattttcaacatgataaaatacctgtaattgaraaggaaaaaattattgaatttgcaacgcatgaagttgtggatgaggtgtttrtcratcttccaggrgagarctaygatrttggagaaattatctctargtttgagamaatggggatrgatgtaactgtaaatcttaawgcatttrataagratttkggtcgyaataaacaaattyatgagatrgwrggaytgratgtagtcactttctctamaaatytttataaaaytagtcatdtgatttyaaagagaattctcgatatttgtggtgccactattggccttrttctttttgctrtagytagtctagttttagttccattgattcgtaaagatggcggaycagctatttttkctcarackcgtatagggamaaatggtcgayatttyacmttttataaattccgttcratgmrrakcgatgctgaakytatmaaagaacarttgatggatcaaaatacgatgcraggtggtatgtttaagatdracaaygatcckcgtrtyacraaaattggtcgytttatwmgkaaracyagyttrgaygarttrccvcarttttrkaatgtmtttawwggagatatgagyttrgtdggvacrcgkccaccdacagtrgaygartatgwkcastatactycaraacaraaacgtcgactcagctttaarccyggkattacaggyttatggcagrttagyggscgwagtaaaataaycrattttgaygmtgttgtaaaattagatgtgkcttatattgataattggacaatytggaaagatattgaaatwttgctwaaaacygtyaaagtkgtatttatragrrawggrgcgaagtra

SEQ ID NO: 2361 - DNA, 1029 bp, Streptococcus pneumoniae
  misc_feature (1)..(1029): tiling:Spneumo1:WAN024FVC; Cluster includes WAN023PM0 pne2 8_13||||8666..9691|+|1026 bp|Type 15F capsule operon, Glim mer 2.02 orf prediction|S.pneumoniae||WAN01UCCC|ORF|000
atggatratwsaartatcartsrtrattccartatacaatgctgaaaamackattaawaattgtrttgawagtgcyttaaarcaaratttagaatctyttgaagtrattttrgtraaygatggrtckaacgattctacakcarraattcttgaaccagtackaswgrtaatycmmrrgtkaagatwtttcatcarstkaayawrggrgtrtctrctgcyagaaatwwrggkttatctcatgcwagyggagartaygtattytttytagattcagatgatattttagatgatggtatgctttctaaaatgtaccaatttgtaaaaaataataaagttgatctcttatcttgttggcataaagaacctgctacaactcaatacggtggaaatgagaataagtcaacttcatttattgcacgtacaagagaagaaataggtgctcattttgttgatatctttccgagaagtgcttgtgccaaattgttttttcgcaaaataattgaagaaaataatattactttttcgactgagatgtcactaggtgaagatatgtcatttgtgtatcaatacttaatggtttctaaaagtattggagttattgacggggtgtattataatattcaaaatgtaaatccacagtcgttatctaagcgctatgtgcagaatattgaaaattccctaatrattcagaaccagttatggaatcaactgttggaagtttatcctaaaattgaggagaactactataagcaacatatggattttagattttaccttgctaacttgtatgtaaataatttatttaaatttgattctccgtattcatcaaaagaaaaactagaccaaattgctcaacaattaaaaaagtatagattatttttagatgaaaaagtcagcaaagaaaagatgcctaaaaatataaatgagatgattgttttttatttactaaaattgaaaattccagtgttgatttattctttttattcgtttaaagagtggtggaagagaagaaaaattaaaaatgaagga

SEQ ID NO: 2362 - DNA, 117 bp, Streptococcus pneumoniae
  misc_feature (1)..(117): tiling:Spneumo1:WAN024AXC; Cluster includes WAN023SIR NC_0 03098.1_1879||||1460183..1460299|-|117 bp|Glimmer 2.02 orf prediction|S.pneumoniae|R6|NC_003098.1|ORF|100
atggattctatagagttttttcatgacaagacctycctcttttatctaacttcattctactcyaaaagaatgggagttacaactaaaatgataaaaatagcagargggagattctct

SEQ ID NO: 2363 - DNA, 290 bp, Streptococcus pneumoniae
  misc_feature (1)..(290): tiling:Spneumo1:WAN024DIE; Cluster includes WAN0244HT spr0 417||15902461|NP_358011.1|415349..415633|-|285 bp|Conserve d hypothetical protein|S.pneumoniae|R6|NC_003098.1|ORF|111
atggattggtacgattatatgatacaggcatccaaacaatcacaattcaacgcaagccattggtttcgctatttgcgaaaagttatttttgaagactattcttatttaacaaaccaagatgtagaaaagttgctagactccaaagaactaacccgttttcaaaaaattagcttgaagtatgcctttcaagagcatactccaactcataaatatgtgatttcattaaataaacctgctaagttaaccaatgttcaaaaattgatggagaaatacaaacatggataactaat

SEQ ID NO: 2364 - DNA, 273 bp, Streptococcus pneumoniae
  misc_feature (1)..(273): tiling:Spneumo1:WAN024D9F; Cluster includes WAN0243WT spr1 174||15903217|NP_358767.1|1174650..1174916|-|267 bp|Strong similarity to chorismate mutase; prephenate dehydratase|S .pneumoniae|R6|NC_003098.1|ORF|110
atggatttagatattattcgtcaagaaatcgatcaaatcgacgaccaaattgtcaaactgttagaagaacgaatgcatttagttgagggggtggttgcttataagaaagcttcaggtaaaccgattttagatactaagagagaagaagttatttttgaaaaggttrggagtcgtgtagaggacaagcgctatcaggagactattgtmgcgactttttcggacatactcaaacgttcgcgtgattatcaggatcaaaayatcaaaykaactaat

SEQ ID NO: 2365 - DNA, 867 bp, Streptococcus pneumoniae
  misc_feature (1)..(867): tiling:Spneumo1:WAN024G9K; Cluster includes WAN02446N spr0 819|speE|15902863|NP_358413.1|821075..821935|+|861 bp|Sper midine synthase|S.pneumoniae|R6|NC_003098.1|ORF|221
atggatttatggttttctgaagttcatactccagatgtcaaattgtctctgagaacagccaagcaactttacgctggaaaaagtgaatggcaggatatcgaagtcttggatacgccagcttttgggaaaatactgattttaaatggccatgtcttgttctcagatgcggatgatttcgtctacaatgaaatgaccgtycacgttcccatggctgtccacccaaatccaaagaaagtattggttattgggggtggtgacggcggtgttgcccaagtattaacmctctatcctgaactggarcaaatygatatygtggaaccggatgagatgttggtcgargtctgtcgtgagtatttcccagactttgctgcaggsctagatgatcctcgtgttaccatttactaccaaaatgggctacgctttttgcgaaactgcgaakatgaytaygatattatcatcaacgatgcgacagatccatttggccatacggaaggactctttaccaaggaattytacggcaatagttatcgagctctgaaggaagacggcatcatgatttaccagcatgggagtccsttctttgacgaggatgagtcggcctgccgaagcatgcaccgcaaggtcaatcaagcctttccaatcagtcgggtttatcaggcccatattccaactagcccagctggctattggttgtttggatttgcatcgaaaaaataccaccctgtcaaagattttgacaaggaaggytggaaaaaacgccagcttttcacagaatactacactgcaaacttacacgtgggakcctttatgttgcccaagtatgttgaggacattttagaagaagaggaaggaaaaaaaykaactaat

SEQ ID NO: 2366 - DNA, 999 bp, Streptococcus pneumoniae
  misc_feature (1)..(999): tiling:Spneumo1:WAN024FW6; Cluster includes WAN02422W SP16 12||15901452|NP_346056.1|1512872..1513864|+|993 bp|conserv ed domain protein|S.pneumoniae|TIGR4|NC_003028.1|ORF|010
atggatttattagagaaagaatgtttaaaatgtgataaaaatttccaacargrtgatatttggaattactatyatttrtcagataagatgcctgcacaaggstggaaaatacacataagytcycaaatmaaagaygctgtaratatttttaagattgtgtataaactatccmaactaaataattgtagctttaaagttgttaaaaatttagaggaattaaaaaaaattaattcccctagggaaatgagccctactgctaacaaatttataactctatatcctaagtcagaatctgaagctaagagtatgatttgtaatcttacgaatagactgtcagaatttaaggctccaaaaatactatctgactatcaatgtggaatgcattctccagttcattatagatatggggcttttttaaaaaaacaagcttatgatgaaaaaaataaaaaagtcatctatttattgctagatgaaaaaaggaagaactatgtagaagataagagacaaaatttccctagtcttcctagctggaaaatggatttattttcagaagaagaaaaaaggatttattttcaaaccacatgtgaagtttcaagtaaggactctgcaataaataaatacaaaatggaaaaaattattaagagatcaaataaaggaaatgtttatcgggcaattagaaaatcggacgggcaaaaagtaatcatcaagcagtcaagaccttttgtgaattatgatgctgaaggagaatggacagctcttgatgatataaaaaatgaagctcacatgctaaaaaaattagccgataaaagttatactactaatttaactgatgaattttatatcgtggatgattattttcttgttcaggaacaagttgacgggttaaactttgaagaatttattcgagaaacagaacactccttaaatattagagaaaaaacactggataacattgtgaatatagtaagttacatccataaactgggaatactaactaat

SEQ ID NO: 2367 - DNA, 875 bp, Streptococcus pneumoniae
  misc_feature (1)..(875): tiling:Spneumo1:WAN024FMH; Cluster includes WAN0243S3 spr1 344|glpF|15903387|NP_358937.1|1329082..1329951|-|870 bp|Gl ycerol uptake facilitator protein paralog|S.pneumoniae|R6| NC_003098.1|ORF|211
atggatttcacatgggcactraagtatgccactgaatttttgggaactgccattttgatcattcttgggaatggtgcagttgccaacgttgaacttaaaggtacgaaaggtcaccaaagtggctggatcgtcatcgctgttggttatggtatgggrgttatgatcccwgccttgatgtttggtaacgtatctgggaaycacatcaaccctgctttcactctaggrcttgcagttagcggtcttttcccttgggcacaagtggtaccttayattatcgcrcaagtcttgggggctatctttggycaagccttagttgtggcaacayaccgtccattctacttgaaaactgaaaamycaaataacatcttgggaactttctcaactatttcaagtattgaccatggtacaaaagaaagtcgctatgcagcaactgtcaatggtttgattaaygagtttgttggttcatttgttttgttctttgcagctcttggtttgactaaaaacttctttggtgctgaagtgcttcaatwcatgaaacaaawggcaayasaagcaggacaaacagttgatttttctgacttggctattaaagcacaggtggctccacacactgcttcaggactttctgtggctcacttggcacttggattcctcgttatggctttggtaacatcacttggaggacctacaggacctgccttgaacccagcccgtgacttgggaccacgtctccttcatgctttccttccmaaatcagttcttggtgagcataaaggcgattcaaaatggtggtattcttgggtaccagtagtagcacckatygcagcagcaattgcggcagtagctgtattcaaattcctttatctctaactaat

SEQ ID NO: 2368 - DNA, 369 bp, Streptococcus pneumoniae
  misc_feature (1)..(369): tiling:Spneumo1:WAN024FUA; Cluster includes WAN023L81 3133 48_2284||||1228298..1228666|+|369 bp|EGAD orf prediction|S .pneumoniae|R6|NC_003098.1|ORF|110
atggatttccatggtctggcgttgttcacgcgcttggttaaaaaagttccaaatttgctcttcatctcccttactaatggcctgaccaatcgcttccaaacgttccttgaaatcctcaattctatccagaatgrtctcgctattggacaagagaatggaggtccacattcctggctcgctttccgcaattcgggtcatatctcgaaaaccacctgccgcaaagcgccttgccatctcatgctcttgagcatagaccgcagtctgctccatgagactagaagccaaaatatgaggaaaatggctaatctgagaagtgacacgatcatgctccttggcatcaatctcgataaaacgagcatgaagacctga

SEQ ID NO: 2369 - DNA, 183 bp, Streptococcus pneumoniae
  misc_feature (1)..(183): tiling:Spneumo1:WAN024CLV; Cluster includes WAN0242F4 SP11 46||15901012|NP_345616.1|1073141..1073317|+|177 bp|hypothe tical protein|S.pneumoniae|TIGR4|NC_003028.1|ORF|020
atggatttcttaaaccattctttcgatactaaaaaagttattaatacaaaaataaatgcagttaactccaaaaataatgttggaaagaatttcatcgatgtttaccgtgaaatgaaagaagtgccaaacaataaaattcatcaatcaaaagttaacgtggcgttaattaaaaaactarctaat

SEQ ID NO: 2370 - DNA, 989 bp, Streptococcus pneumoniae
  misc_feature (1)..(989): tiling:Spneumo1:WAN024EYC; Cluster includes WAN0243OW spr1 459|gtrB|15903502|NP_359052.1|1439772..1440863|-|1092 bp|G lycosil transferase|S.pneumoniae|R6|NC_003098.1|ORF|321
atggatttgaagactaagatgatgatttcaatcatcgtcccttgtttaaacgaagaggaagtacttcctcttttttatcaggctctggaagctttacttccagatttggaaacagaaatcgagtatgtctttgtcgatgatggatcaagtgatgggaccttggaactcttaaaggcctatcgggagcaaaatccggcagtccattatatttctttctctcgaaattttggcaaagaagcagccctttatgcaggcttgcaatatgcgacaggagatttggtggtggtgatggatgcagacctccaagatcctcctagtatgttgtttgagatgaaaaatgtaytagacaaaaatgtagacttggactgcgttgggacacggagaactagtcgggagggagaacccttctttcgcagtttctgtgctgttctcttttatcgcctcatgcaaaaaatcagcccagtagctctgccgtcgggtgtccgtgattttcgtatgatgagaaggtctgtrgtcgatgccattttaagcttgacygagtccaatcgtttttcwaagggrctcttygcctgggtsggyttyaaaaccyactatytggactatccaaatgtcgaaaggcaggctggcaagacmagttggagttttaggcaactctttttytactccattgaagggattrttaatttttcagatttyccyttgaytatagcctttgtagctggtctcctatcttgttttctttctctgctgatgaccttttttgttgtggttcggaccctcattttgggcaatccgacatctggttggacctctctgatggctgttattctctttcttggaggcattcaactcttgaccattgggattctcggyaagtatatcagtaagatttatttagagactaaaaaaagaccactttatcttatcaaagaaaaaagtgaccttcctgattttacagaaaaaaataaagtgaaaagactataactaat

SEQ ID NO: 2371 - DNA, 1241 bp, Streptococcus pneumoniae
  misc_feature (1)..(1241): tiling:Spneumo1:WAN024CAF; Cluster includes WAN0244OW spr0 162|ribA|15902206|NP_357756.1|170814..172019|-|1206 bp|Rib oflavin biosynthesis; GTP-cyclohydrolase II.|S.pneumoniae| R6|NC_003098.1|ORF|121
atggattttagcagaaaggataatcagtcaatggaatatcgaaaaatacaagaagcattagaagcattgcagaagggacgacttgttcttgttatagacgacaaggatagagaaaatgaaggagacttaatttgttctgcacaagcagctacaacagaaaatgttaattttatggctacttatgccaaaggattaatttgtatgcctatgagcgaaagtttagctaaycaattaatgctttcacctatggttgaaaacaatacagataatcataagactgcttttacagtttcaattgattataaagaaacgaccacaggtatttctgccgaggaaagaggactgaccgcacgtatgtgtgtagctgaagatataacaccctctgattttcgcaggccaggacacatgtttcctttaatkgcaaaaaaaggtggtgtyctagaaagaaatggacacacagaagcaactgttgatttattaaaattagctggactaaaagagtgtggcctatgttgtgaaataatgaatcatgatggcaaaatgatgagaacagatgatttaattcagttctcgaaraaacacaacattccaytaattaccatcaaagaattacaagaatatagaaaagtatatgatcagctggtagaacgagtttcaactgtcaatatgcctactaratacggtaatttcaaagcaattagctatatagataaactaaatggggaacatcatcttgctcttattatgggaaayatagaggatgaagccaatgtattatgtcgggtccactccgaatgtttaacaggagatgttttaggctctttacgttgcgattgtggacagcaattcgataargctatgaaaatgattgttgagaatggttcgggtgtcttactttacttgcgacmggagggacraggaattggacttatcaataaattaaaagcctatcatttacaaratcaaggcatggatacgcttgatgccaatcttgcattaggctttgaaggtgatttaagaraatatcatattggagcamaaatgcttaaagatctgggacttcagtcacttcatttactgacaaataatcctgacaaggttgaacagttagaaaaatatggaattaccatttccagtagaatatcaatcgaaatagaagccaatccttacgatagtttttatttagaaacaaagaaaaatcgaatgggtcacattttaaatatggaggraaaataactaat

SEQ ID NO: 2372 - DNA, 959 bp, Streptococcus pneumoniae
  misc_feature (1)..(959): tiling:Spneumo1:WAN024CHE; Cluster includes WAN0243DX spr1 855||15903897|NP_359447.1|1830044..1830997|-|954 bp|Conser ved hypothetical protein|S.pneumoniae|R6|NC_003098.1|ORF|1 11
atggattttgaaaaaattgaacaagcttatayctatttactagagaatgtccaagtcatccaaagtgatttggcgaccaacttttatgacgccttggtggagcaaaayagcatctatctggatggtgaractgagytaramcaggtcaargasaacaatcarrcccttaagcgtttagcactacgcaaagaagaatggctcaagacctaccagtttctcttgatgaaggctgggcaaacagaacccttgcaggccaatcaccagtttacrccrgatgctattgcyttrcttttggtrtttattgtggaagagytgtttamagaggaggaaattactatcctcgaaatgggttctgggatgggaattytrggcgctaytttcttgacctcgcttrmtaaaaaggtggattayttgggaatggaagtggatgatttgctgattgatytggcagctagcatggcagatgtaattggtttgcaggctggctttgtccaaggagatgccgttcgyccacaaatgctcaaagaaagygatgtggtcatcagygacttgcctgtyggctattatcctgatgatgccgttgcgtcgcgycatcaagttgcttctagycaagaacatacttacrcycatcacttgctcatggaacaaggryttaagtacctyaagtcagayggataygctatttttctagctccgagtgatttgttgaccagtcctcaaagtratttgttraaagwmtggytgaaagargaggcragtctggttgctatgattagtytrcctgaaaatctctttgctaatgcyaaacaatctaagactatttttatcytacagaagaaaartgaaatagcagtrgagccttttgtttatccacttgctagcttgcaagatgcaagtgttttaatgaaatttaaagaaaattttcaaaaatggactcaaggtactgaaatataactaat

SEQ ID NO: 2373 - DNA, 440 bp, Streptococcus pneumoniae
  misc_feature (1)..(440): tiling:Spneumo1:WAN024D5Y; Cluster includes WAN0243D9 spr1 880||15903921|NP_359471.1|1857099..1857533|-|435 bp|Conser ved hypothetical protein|S.pneumoniae|R6|NC_003098.1|ORF|1 11
atggayatctgggaaaagatgtacgaagaagcacagaaactatacaatccacatgaagtatcagactttgtttatgccaatcatgttgtagctgcagtagaagcagragatggacaaatatttacaggattctgtatggagggaacctgtggtgttttccatctctgcgcagaacgggcgrccctcttcaatatgtaccaattttcaggacaaactaaggttaagraagtattagcctttcgagacaaaccaccttatggtggaagttcagccatgccttgcggtgcttgtagagaattccttttagagyttaatgctgaaaataaagatgcagaattcatgatggactataatataagaaaaacagttaaagtcgcagaactaatcccttattggtggggaraagaacgtgcttctaastttaatgagcgatarctaat

SEQ ID NO: 2374 - DNA, 488 bp, Streptococcus pneumoniae
  misc_feature (1)..(488): tiling:Spneumo1:WAN024CWI; Cluster includes WAN02444Q spr0 888|ebsC|15902932|NP_358482.1|878003..878485|-|483 bp|Regu latory protein|S.pneumoniae|R6|NC_003098.1|ORF|111
atggcaaaaaaagttaaaatcaaaaaaacattggtggaacaaatcctatctaaagcagctatccctcatcaggggattcaaatcaatgccctagaaggagagcttcctcaaggttatgaacgagatcagattttcaaaaccttggcgcttttgggagacaagaccggaccgattatcggaattgtccctatcactcagcacttgtctgaaaagaaactagctaaaatttctggcaataaaaaagtgagcatgattccacaaaaggacttagaaaaaacaactggttacattcatggagccaataatcctgtcggaattcgtcagaaacasaattatcccatttttatcgataaaattgctctagatttggatcraatgattgtctctgcaggcgaagtcggacacagcattatcgtcgcgccacaagacttggctagctttgtaaaggcagaytttgtagatattttggaggacatcaagtaactaat

SEQ ID NO: 2375 - DNA, 929 bp, Streptococcus pneumoniae
  misc_feature (1)..(929): tiling:Spneumo1:WAN024DMC; Cluster includes WAN0244R4 spr0 082|ABC-MSP|15902126|NP_357676.1|88750..89673|+|924 bp|ABC transporter membrane spanning permease - sugar transport| S.pneumoniae|R6|NC_003098.1|ORF|111
atggcaaaaaagaaaattaaaaaagaaaaaattgataatgtcggcattcactccttcagtaagaaagcagatatcttcttcagtatcatttcgggtttgattgccctctcttgtatcctaccttttgtattcgttatcattatttcagtgacagacgagaaaagcctcctccaatacggctatagcttcttcccatcccaatttggcttagacggttttgagtttttggcacagttwaaggataaaatcctacaagccctcttcatctctgtctttgtaacygtagttgggacattgacaaatgtctttatcacaacaacctatgcctacgctatttcacggacaacctttaagtatcgcagattytttaccatcttcgtyctkctcagtatgttgttcaacgctggtttggtaccaggttatatcatggtgacycgtgtrcttcagcttggkgayactgtttgggccttgattgtkccaatgcttctctcmccmttyaayatcatcttgatgcgttccttcttcaagaagaccattccaraagccattctmgaatcggctcgtatcgatggtgccagtgargcccggattttcttccaaatctgtttgccattgtcactaccaggtatcgcaaccatcacgctyttracagctcttggtttctggaatgactggttcaacgcccttctttayatcaagagtgayaacttgtatccattgcaatatttgctcatgcaaatccaacaaaatatggactacattgccaaagcggtcggcttgaytggtcaactgggagttgctctaccgaaagaaacaggtcgtatggccatggttgtggttgcaacccttccaatcgcgattttrtatccattyttccaacgctactttgtaaaaggtttgactatcggtggtgtgaaagaatarctaat

SEQ ID NO: 2376 - DNA, 1109 bp, Streptococcus pneumoniae
  misc_feature (1)..(1109): tiling:Spneumo1:WAN024FUD; Cluster includes WAN0243V8 spr1 231|tyrA|15903274|NP_358824.1|1228058..1229161|-|1104 bp|P rephenate dehydrogenase|S.pneumoniae|R6|NC_003098.1|ORF|44 1
atggcaaaaacaatctatatcgcaggtcttgggttgattggagcctctatggcacttggtatcaaacgcgatcatccagattatgaaattttaggttataatcgtagtcaagcttcgagagayatcgccttgaaagaaggyatgattgaccgtgcaacggatgattttgctagttttgctcctttggcagatgtcattatcctcagcttgccaatcaaacaaactattgctttcattaaggagttggccaatttggatttgcgagaaggcgttattatttcagatgctggttcgaccaagtcaaccattgtggatgcggcggagcagtatttggctggcaagtctgttcgctttgtcggggcccatcccatggctggtagtcacaagacaggggctgcttcggcagatgtcaatctttttgaaaatgcctattatatctttacaccttcaagcctgacaagtcaggacacgcttaaggaaatgaaggatctgctttcaggtcttcatgctcgttttatcgagattgatgccaaggagcatgatcgtgtcacttctcagattagccattttcctcatattttggcttctagtctcatggagcagactgcggtctatgctcaagagcatgagatggcaaggcgctttgcggcaggtggttttcgagatatgacccgaattgcggaaagcgagccaggaatgtggacctccattctcttgtccaatagcgagaycattctggatagaattgaggatttcaaggaacgtttggaagygattggtcaggccattagtaagggagatgaagagcaaatttggaacttttttaaccaagcgcgtgaacaacgccagaccatggaaatccataagcgtggtggtgtggatagctcttacgacctctatgttgacgttcctgatgaagaagatgtsatcctgcggattttggaactgctacgtggracttccttggttaayatccacatcaacgaggaaaatcgtgaggatattcacggaatcctacaaatttcatttaaaaatgctcaagacttggaaagagcygagcatctcataacaraaaatacygactatacagtcgtcatyaaataactaat

SEQ ID NO: 2377 - DNA, 386 bp, Streptococcus pneumoniae
  misc_feature (1)..(386): tiling:Spneumo1:WAN024EYE; Cluster includes WAN0243PU spr1 425|aldR|15903468|NP_359018.1|1410440..1410820|-|381 bp|Tr anscription regulator|S.pneumoniae|R6|NC_003098.1|ORF|111
atggcaaaaacaattcatacagayaaggccccaaaggctatcggrccctatgttcaaggaaaaatcgttggcaaccttttgtttgctagcggtcaagttcccctatcccctgaaactggggaaattgtaggagagaatatccaagaacagacagagcaagtcttgaaaaacatcggtgctattttggcagaagcaggaacagactttgaccatgttgtcaaaacaacttgcttcttgagcgatatgaacgactttgttccttttaatgaggtttaccaaacggccttcaaagaggaattcccagctcgttcagctgtggaggtagctcgtcttcctcgtgatgtaaaagtcgaaattgaagtcatcgcagagattggataactaat

SEQ ID NO: 2378 - DNA, 482 bp, Streptococcus pneumoniae
  misc_feature (1)..(482): tiling:Spneumo1:WAN024FI3; Cluster includes WAN0243OY spr1 457||15903500|NP_359050.1|1438976..1439452|-|477 bp|Hypoth etical protein|S.pneumoniae|R6|NC_003098.1|ORF|211
atggcaaaagaaccgtggcaagaagatatytatgatcaagaagaatcaagagcagrgcgtcggcatcgaaaccacggaggggctgataggatggctaatcgtattttgacgatcctagctagtattttctttgtaattgtggtggtgatggtcatcgttctcatctatctatcatcgggggggagtaatcgcacagcagccttaaaagrctttcatgattctgatgcmagtgtagtacaaatctcatcttcaagyagttctcagcctgagcagagttcagagccagaatctacttctagtagttcagaagaagctgctaatcctgaaggaacgattaaagttctcgcaggagaaggggaagcagctattgccgctcgtgcaggaatctccattgctcagttagaggccttgaatcctgggcacatggctacaggatcttggtttgctaatccaggtgatgttataaaaataaaatarctaat

SEQ ID NO: 2379 - DNA, 320 bp, Streptococcus pneumoniae
  misc_feature (1)..(320): tiling:Spneumo1:WAN024FE5; Cluster includes WAN0243KY spr1 602|trxA|15903644|NP_359194.1|1578217..1578531|+|315 bp|Th ioredoxin reductase|S.pneumoniae|R6|NC_003098.1|ORF|111
atggcaaaagcaattacagatgcaacattcgaacaagaaacaaaagayggtttggtcttagtagacttctgggcaacttggtgtggtccatgtcgtatgcaaggtccaatcttggacaaattgtctgaagaactttcagaagatgtcttgaaaatcgttaaaatggacgttgatgaaaatccaaacacagctcgtgcttttggaatcatgtctattccaactcttctcttcaaaaaagacggccaagttgtcaaacaagttgcaggtgttcacacagyagaacaaatcaaggccatcattgctgaattgagctaactaat

SEQ ID NO: 2380 - DNA, 321 bp, Streptococcus pneumoniae
  misc_feature (1)..(321): tiling:Spneumo1:WAN024CV4; Cluster includes WAN0244LO spr0 278|PTS-EII|15902322|NP_357872.1|276329..276670|+|342 bp|P hosphotransferase system sugar-specific EII component|S.pn eumoniae|R6|NC_003098.1|ORF|110
atggcaaaagctttaattatttgtgcagcaggaatgtcttcatcacttatggcacagaaaacaacagagtttctaaaaggaaaagggaaagatattgtagttgatgctattagtgctactgaaggagggaaagctatcgcagcagcagcttttgatttgtatctkgtcagycctcaaacaaaaatgtactttaagcaatttgaasaggctggttctaaagcaggaaaaccagttgtmcaaatacctcctcmagcmtatwttcckattccaatggsaattsaaaarwtggctaatttgattcttgagaatatyykaactaat

SEQ ID NO: 2381 - DNA, 234 bp, Streptococcus pneumoniae
  misc_feature (1)..(234): tiling:Spneumo1:WAN024F3Y; Cluster includes WAN023M2V 3143 64_729a||||381490..381723|-|234 bp|EGAD orf prediction|S.p neumoniae|R6|NC_003098.1|ORF|110
atggcaaaaggtgtgatagaagcttctgttcctcccaccaacatcacatcttggaaaccaaacttaatggagcggaaggcatccccaatcgcatcatttgatgaagagcaggcagtattgatagatttacaaacaccgtttgcaccaaaacgcatggctacattcccagaagccatatttggtaaagcttttggaagagtcattggtttgacacgtttgggtcctttttcatga

SEQ ID NO: 2382 - DNA, 108 bp, Streptococcus pneumoniae
  misc_feature (1)..(108): tiling:Spneumo1:WAN024DOM; Cluster includes WAN023SJH NC_0 03098.1_1619||||1269897..1269995|-|99 bp|Glimmer 2.02 orf prediction|S.pneumoniae|R6|NC_003098.1|ORF|100
atggcaaaatctaatactaataagcgctatgcawtacgtaaactcggaaagatttttggttctgcggtaatcgggctaactttatttttaggaggaatcctaactaat

SEQ ID NO: 2383 - DNA, 746 bp, Streptococcus pneumoniae
  misc_feature (1)..(746): tiling:Spneumo1:WAN024BFK; Cluster includes WAN0243YA spr1 121|glnQ|15903164|NP_358714.1|1121823..1122563|+|741 bp|AB C transporter ATP-binding protein - glutamine transport|S. pneumoniae|R6|NC_003098.1|ORF|111
atggcaaaattaaaaattgatgtaaatgatttacacaagcactatggaaaaaatgaagtcctaaaaggaattacgactaagttctatgaaggagatgttgtttgtatcatcggtccttcaggttctggtaagtcaactttcctccgtagcctcaatcttttagaagaagtcactagcggtcacatcactgtgaacggctatgatttaactgaaaaaacaaccaatgttgaccacgtccgtgaaaatatcggcatggtattccaacacttcaacctcttccctcatatgtctgtattggacaacatcacctttgctcctattgagcacaagttgatgactaaggaagaagctgagraattgggaatggagttgcttgaaaaggttggactagcagataaagctaatgccaatccagatagcctatcaggtggtcaaaaacaacgtgtrgccatmgctcgtggcctakcaatgaatccagacatcatgctcttcgatgaaccaamttctgcccttgaccctgagatggttggagamgtamttaacgttatgaaggaattggctgagcaaggyatgaccatgattatcgtaacccatgagatgggatttgcycgycaggttgccaaccgcgttatctttactgcagatggcgagttccttgaagacggaacacctgaccaaatctttgataacccacaacaccctcgtctgaaagagttcttagataaggtcttaaacgtctaactaat

SEQ ID NO: 2384 - DNA, 314 bp, Streptococcus pneumoniae
  misc_feature (1)..(314): tiling:Spneumo1:WAN024DKT; Cluster includes WAN0244O7 spr0 187|rpsJ|15902231|NP_357781.1|195551..195859|+|309 bp|30S Ribosomal protein S10|S.pneumoniae|R6|NC_003098.1|ORF|110
atggcaaacaaaaaaatccgtatccgtttgaaagcttacgaacaccgtacgcttgacacagcggctgcaaaaatcgtagaatcagctactcgtacaggtgcacaagttgcgggtccaatcccacttccaactgaacgtagcctctacacaatcattcgtgcgactcacaaatacaaagactctcgcgaacaatttgaaatgcgtacacacaaacgtttgatcgatatcgttaacccaactcaaaaaacagttgatgccttgatgaaattggatcttccaagtggtgtaaacgtagaaatcaaactttaactaat

SEQ ID NO: 2385 - DNA, 281 bp, Streptococcus pneumoniae
  misc_feature (1)..(281): tiling:Spneumo1:WAN024ET6; Cluster includes WAN024412 spr1 020|hlpA|15903064|NP_358614.1|998667..998942|+|276 bp|Hist one-like DNA-binding protein|S.pneumoniae|R6|NC_003098.1|O RF|111
atggcaaacaaacaagatttgatcgctaaagtagcagaagctacagaattractaagaaagactcagcagcagcagttgaagctgtatttgcagcagtagctgactatcttgcagctggtgaaaaagttcarttgatcggttttrgtaactttgaagttcgtgagcgygcagaacgtaaaggtcgcaacccacaaactggtaaagaaatgacaattgcagcttctaaagtaccagcattcaaagctggtaaagctcttaaagacgctgttaaataactaat

SEQ ID NO: 2386 - DNA, 2309 bp, Streptococcus pneumoniae
  misc_feature (1)..(2309): tiling:Spneumo1:WAN024BHC; Cluster includes WAN02447P spr0 781|ftsK|15902825|NP_358375.1|778069..780372|+|2304 bp|Cel l division protein|S.pneumoniae|R6|NC_003098.1|ORF|111
atggcaaacaagaatacaagtacaacaagacggagaccgtctaaagcagaactggaaagaaaagaagcgattcaacgaatgttgatttcgttaggaattgcgattttattgattttcgcagccttcaaattaggggctgcaggtataaccctttataatttaattcgcttgctagtgggtagcctagcttatctggcgatattcggcctattaatctatctcttytttttcaagtggatacgaaaacaggaaggactcttatctggytttttcaccatatttgctggcttactcttgatttttgargcctacttggtttggaaatatggtttggacaagtccgttctaaaagggaccatggctcaggttgtgacagatctgactggttttcgaacgactagytttgctggagggggcttgatcggggtcgctctttatattccaacagcytttctcttttcaaatatcggaacttactttattggttctatcttgattttagtgggttctctcctagtcagcccttggtctgtttacgatattgctgaatttttcagtagaggctttgccaaatggtgggaagggcacgagcgtcgaaaagaggaacgctttgtcaaacaagaagaaaaagctcgccaaaaggctgagaaagaggctagattagaacaagaagagactgaaaaagccttactcgatttgcctcctgttgatatggaaacgggtgaaattctgacagaggaagctgttcaaaatcttccacctattccagaagaaaagtgggtggaaccagaaatcatcctgcctcaagctgaacttaaattccctgaacaggaagatgamtcagatgacgaagatgttcaggtcgatttttcagccaaagaagcccttgaatacaaacttccaagcttacaactctttgcaccagataaaccaaaagatcagtctaaagagaagaaaattgtcagagaaaatatcaaaatcttagaagcaacctttgctagctttggtattaaggtaacagttgaacgggccgaaattgggccatcagtgaccaagtatgaagtcaagccggctgttggtgtaagggtcaaccgcatttccaatctatcagatgacctcgctctagccttggctgccaaagatgtccggattgaagcaccaatccctgggaaatccctaatcggaattgaagtgcccaactccgatattgccactgtatctttccgagaactatgggaacaatcgcaaacgaaagcagaaaatttcttggaaattcctttagggaaggctgttaatggaaccgcaagagcttttgacctttctaaaatgccccacttgctagttgcaggttcaacgggttcagggaagtcagtagcagttaacggcattattgctagcattctcatgaaggcgagaccagatcaagttaaatttatgatggtcgatcccaagatggttgagttatctgtttacaatgatattccccacctcttgattccagtsgtgaccaatccacgyaaagccagcarggctstgcaaaaggttgtggatgaaatggmaaaccgttatgaactctttgccaaggtgggagttcggrmtrttgcaggttttaatgccaaggtagamgagttcrattcccagtctgagtacaagcaaattccgctaccattcattgtcgtgattgtggatgagttggctgacctcatgatggtggccagcaaggaagtggaagatgctatcatccgtcttgggcagaaggcgcgtgctgcaggtatccacatgattcttgcaactcagcgtccatctgttgatgtcatctctggtttgattaaggccaatgttccatctcgtgtagcatttgcggtttcatcaggaacagactcccgtacgattttggatgaaaatggagcagaaaaacttcttggtcgaggagacatgctctttaaaccgattratgaaaatcatccagttcgtctccaaggctcctttatctcggatgacgatgttgagcgcattgtgaacttcatcaagrctcaggcagatgcagactacgatgagagttttgatccaggtgaggtttctgaaaatgaaggagaattttcggatggagatgctggtggtgatccrctttttgaagaagctaagtctttggttatcgaaacacagaaagccagtgcrtcyatgattcagcgtcgtttrtcagttggatttaaccgtgcgacccgtctcatggaagarctkgagatrgcaggtgtcatyggtccagctgaaggtaccaarccwmgaaaagtrttrcarcaataactaat

SEQ ID NO: 2387 - DNA, 557 bp, Streptococcus pneumoniae
  misc_feature (1)..(557): tiling:Spneumo1:WAN024DA7; Cluster includes WAN0243YK spr1 111|dfp N-terminus|15903154|NP_358704.1|1112468..1113019|+ |552 bp|Similar to N-terminal region of the Dfp protein|S. pneumoniae|R6|NC_003098.1|ORF|111
atggcaaacattctcttggctgtaacgggttcaatcgcctcttataagtcggcagatttagtcagttctctaaaaaaacaaggccatcaagtcactgtcttaatgactcaggctgctacagagtttatccaacctttgacactacaggtactctcacagaatcctgtccacttggatgtcatgaaggaaccctatcctgatcaggtcaatcatatcgaacttggaaaaaaagcagatttatttatcgtggtacctgcaactgctaacactattgcaaaactagctcacggatttgcggacaacatggtaaccagtacagctctagccctaccaagtcatattcccaaactaatagctcctgctatgaatacaaaaatgtatgaccatccagtaactcagaataatctgaaaacattagaaacctacggctatcagctgattgctcctaaggaatccctactagcttgtggagaccacggacgaggagctttagctgacctcacaattattttagaaagaataaaggaaactatcgatgaaaaaacgctctaactaat

SEQ ID NO: 2388 - DNA, 629 bp, Streptococcus pneumoniae
  misc_feature (1)..(629): tiling:Spneumo1:WAN024C9R; Cluster includes WAN0244O5 spr0 189|rplD|15902233|NP_357783.1|196727..197350|+|624 bp|50S Ribosomal protein L4|S.pneumoniae|R6|NC_003098.1|ORF|111
atggcaaacgtaacattatttgaccaaactggtaaagaagctggccaagttgttcttarcgatgcagtatttggtatcgaaccaaatgaatcagttgtgtttgatgtaatcatcagccaacgcgcaagccttcgtcaaggaacacacgctgttaaaaaccgctctgcagtatcaggtggtggacgcaaaccrtggcgtcaaaaaggaactggacgtgctcgtcaaggttctatccgctcaccacaatggcgtggtggtggtgttgtcttcggaccaactccacgttcatacggctacaaacttccacaaaaagttcgtcgsctagctcttaaatcagtttactctgaaaaagttgctgaaaacaaattcgtagctgtagacgctctttcatttacagctccaaaaactgctgaatttgcaaaagttcttgcagcattgagcatcgattctaaagttcttgttatccttgaagaaggaaatgaattcgcagctctttcagctcgtaaccttccaaacgtgaaagttgcaactgctacaactgcaagtgttcttgacatcgcaaatagcgacaaacttcttgtcacacaagcagctatctctaaaatcgaggaggttcttgcataactaat

SEQ ID NO: 2389 - DNA, 1044 bp, Streptococcus pneumoniae
  misc_feature (1)..(1044): tiling:Spneumo1:WAN024CUD; Cluster includes WAN0243XW spr1 135|leuB|15903178|NP_358728.1|1137655..1138692|-|1038 bp|3 -isopropylmalate dehydrogenase|S.pneumoniae|R6|NC_003098.1 |ORF|121
atggcaaagaaaatagtagctctagyaggagacggaattggcccagaaatcatggaggytggtttagaagttctggaggctctagctgaaaaaacaggttttgactatgagattgacagacgaccgttcggaggtgcagatattgatgcagcaggacctcccttacctgatgaaacccttaaggcaagtagggaagcagatgctatcctactagyagctatcggtagtcctcagtatgatggagyagyggttcgccctgaacaaggcctgatggctctccgtaaggaactcaatctttacgctaatattcgtcctgtaaaaatctttgacagtctcaagyatttgtcacyactcaaacyggaacgaattkctggtgtagactttgtcgtggtgcgtgaattgacaggcgrgatttactttggakatcatattcttgaagagcgcaawgcgcgtgatatcaacgactatagctatgaggaagtggagcggattattcgcaaagcctttgaaattgcaagaaatcgcagaaaaatcgttactagtatcgataagcaaaatgttctagcgacctcaaaactctggcggaaagtagctgaggaagtcgcacaggatttcccagatgtaaccttggaacaycagctggtagactcagctgctatgcttatgattaccaatcctgctaagtttgatgttattgtaacggagaatctttttggagatattttatctgatgaatcaagcgtcttatctggtacacttgrggttatgccatcagccagtcattctgaaaatggaccaagtctctatgaacctattcacrgttcagcacctgatattgcaggtcaaggaattgccaatcctayttccatgattttatyagttkycatgatgttgagagatagtttcggacgttatgaggatrcagagcgtatcaaacrtgctgttgagacaagtctggcggcaggaattttaacgagagatataggaggtcaggcttcaacaaaggaaatgayggaagctattattgcaaggttaykaactaat

SEQ ID NO: 2390 - DNA, 255 bp, Streptococcus pneumoniae
  misc_feature (1)..(255): tiling:Spneumo1:WAN024FXY; Cluster includes WAN023LAV 3141 41_2162||||1167589..1167843|-|255 bp|EGAD orf prediction|S .pneumoniae|R6|NC_003098.1|ORF|110
atggcaaagaggaatggaatgattcgtaggaagccttttccttttgtattgataaaggcagcaattaggaaagtaacaacggctaccagagcatttttccaatttccgtctgctacaagacctgcattggtaacagctgaacctgcaagtccaagaccgataacgatgatcataggaccgataatgattggtggcaagagtttatcaatccattttgttcctacaaatcggatgctggtagcaacaaggacatag

SEQ ID NO: 2391 - DNA, 528 bp, Streptococcus pneumoniae
  misc_feature (1)..(528): tiling:Spneumo1:WAN024FBD; Cluster includes WAN0243IE spr1 694||15903736|NP_359286.1|1663434..1663955|-|522 bp|Conser ved hypothetical protein|S.pneumoniae|R6|NC_003098.1|ORF|1 11
atggcaaagcaaaccatcattgtaatgagcgattcccatggcgatagcttgattgtggaagaagtccgtgatcgctatgtgggcaaagtcgatgcygtttttcataacggcgattctgaactacgtccggattytccactttgggagggcatccgcgttgttaaagggaacatggacttctacgccggctacccagaacgtctggtgactgagcttggttcgaccaagattatccaaactcatggtcacttgtttgacatcaatttcaactttcaaaagttggactactgggctcaggaggaagaggccgctatctgcctctatggtcacttgcatgtgccaagtgcttggwtggaaggcaagatcctctttctaaatccaggttctatcagycaaccacgaggtaccatcagagaatgtctctatgctcgtgtggagattgatgatagttacttcaaagtggactttttgacacgagatcacgaggtgtatccaggtttgtccaaggagtttagccgaykaactaat

SEQ ID NO: 2392 - DNA, 473 bp, Streptococcus pneumoniae
  misc_feature (1)..(473): tiling:Spneumo1:WAN024G8D; Cluster includes WAN02444Z spr0 879|smpB|15902923|NP_358473.1|870251..870718|+|468 bp|Smal l protein B|S.pneumoniae|R6|NC_003098.1|ORF|111
atggcaaagggcgagggaaaggtcgtcgcacaaaataaaaaggcacgccacgactatacaatcgtagatacgctagaggcagggatggtcctgactggaactgaaatcaagagtgtacgagctgctcgaattaatctcaaggatggctttgctcaagtgaaaaatggagaagtttggctgagyaatgttcatatcgcgccttacgaagagggcaatatctggaaccaggaaccagaacgtcgtcgtaaactcctgctccataaaaagcaaattcaaaaattggaacaagaraycaaagggacaggaatgaccttagttccccttaaggtctatataaaagatggctacgctaagcttcttttaggacttgccaaagggaagcatgactatgacaaacgggagtctatcaaacgtcgtgagcaaaatcgagatatcgcgcgtgtgatgaaagctgttaatcagcgataactaat

SEQ ID NO: 2393 - DNA, 1421 bp, Streptococcus pneumoniae
  misc_feature (1)..(1421): tiling:Spneumo1:WAN024D3B; Cluster includes WAN0243H5 spr1 739|ply|15903781|NP_359331.1|1713926..1715341|-|1416 bp|ne umolysin (sulfhydryl-activated toxin that lyses cholestero l containing membr...|S.pneumoniae|R6|NC_003098.1|ORF|111
atggcaaataaagcagtaaatgactttatactagctatgaattacgataaaaagaaactcttgacccatcagggagaaagtattgaaaatcgtttcatcaaagagggtaatcagctacccgatgagtttgttgttatcgaaagaaagaagcggagcttgtcgacaaatacaagtgatatttctgtaacagctaccaacgacagtcgcctctatcctggagcacttctcgtagtggatgagaccttgttagagaataatcccactcttcttgcggtygatcgtgctccgatgacttatagtattgatttgcctggtttggcaagtagcgatagctttctccaagtggaagaccccagcaattcragtgttcgcggagcggtaaacgatttgttggctaagtggcatcaagattatggtcaggtcaataatgtcccagctagaatgcagtatgaaaaaatmacggctcacagcatggaacaactcaaggtcaagtttggttctgactttgaaaagacagggaattctcttgatattgattttaactctgtccattcaggygaaaagcagattcagattgttaattttaagcagatttattatacagtcagcgtagaygctgttaaaaatccaggagatgtgtttcaagatactgtaacggtagaggatttaaaacagagaggaatttctgcagagcgtcctttggtctatatttcgagtgttgcttatgggcgccaagtctatctcaagttggaaaccacgagtaagagtgatgaagtagaggctgcttttgaagctttgataaaaggagtcaaggtagctcctcagacagagtggaarcagattttggacaatacagaagtgaaggcggttattttagggggcgacccaagttcgggtgcccgagttgtaacaggcaaggtggayatggtagaggacttgattcaagaaggcagtcgctttacagcagatcatccaggcttgccgatttcctatacaacttcttttttacgtgacaatgtagttgcgacctttcaaaayagtacagactatgttgagactaaggttacagcttacagaaacggagatttactgctggatcatagtggtgcctatgttgcccaatattatattacttggratgaattatcctatgatcatcaaggtaaggaagtcttgactcctaaggcttgggacagaaatgggcaggatttracggctcactttaccactagtattcctttaaaagggaatgttcgtaatctctctgtcaaaattagagagtgtaccgggcttgcctgggaatggtggcgtacggtttatgaaaaaaccgatttgccactagtgcgtaagcggacgatttctatttggggaacaactctctatcctcaggtagargataaggtagaaaatgaytarctaat

SEQ ID NO: 2394 - DNA, 953 bp, Streptococcus pneumoniae
  misc_feature (1)..(953): tiling:Spneumo1:WAN024DW4; Cluster includes WAN0243B3 spr1 958|arcC|15903999|NP_359549.1|1943950..1944897|+|948 bp|Ca rbamate kinase|S.pneumoniae|R6|NC_003098.1|ORF|111
atggcaaatcgtaaaattgtagtagctttgggaggaaatgcgattctttcttctgacccatcagcaaaggctcaacaagaagctttagttgaaacagctaagcatcttgtaaaattgatwaaaaatggagatgatytgattatcactcacggtaatggacctcaagttgggaatctcttgctccaacatttggcatcmractctgaaaagaaccctgcmttcccrctcgactcacttgtcgctatgacagaaggtagcatcggtttctggttgaaaaatgctttgcaaaatgytctcttrgatgaaggyatcgaaaaaaaygttgcctctgttgtaacgcaagttrtcgtagataaaaatgatccrgcttttgttaayttgagtaaaccaatcggtcctttctattcagaaraagaagcaaaagcagaagccsaaaaragcggagcgactttcaargaagatgctggccgtggctggcgtaaggtcgttgcctcaccaaaacctgttgacatcaaagaaattgaaaccatccgtactcttttaaatartggtcaagtcgtcgtagctgcaggtggtggcggtattcccgtcgtcaaagaaaacaatggacatttgactggtgtcgaagcggttattgataaagacttcgcttcccaacgtttggcagaattggttgatgcagacctcttcatcrttttgacaggtgtagattatgtatttgttaactacaacaagccaaaccaggaaaaattggaacatgtgaatgttkcccagctrgaagaatatatcaaacaagatcagtttgcaccaggtagcatgcttccaaaagtagaagcagctatcgcttttgtcaatggtcgtccagaaggaaaagcagttattacttcccttgaaaatctaggcgccttgattgaatctgaaagcggaacaattattgaaaaaggataactaat

SEQ ID NO: 2395 - DNA, 548 bp, Streptococcus pneumoniae
  misc_feature (1)..(548): tiling:Spneumo1:WAN024C8V; Cluster includes WAN0244NT spr0 201|rplE|15902245|NP_357795.1|201623..202165|+|543 bp|50S Ribosomal protein L5|S.pneumoniae|R6|NC_003098.1|ORF|221
atggcaaatcgtttaaaagaaaaatatcttaatgaagtagttcctgctttgacagaacaattcaactactcatcagtgatggctgtgcctaaagtagataagattgttttgaacatgggtgttggtgaagctgtatcaaacgctaaaagccttgaaaaagctgctgaagaattggcacttatctcaggtcaaaaaccacttatcactaaagctaaaaaatcaatcgccggcttccgtcttcgtgaaggtgttgcgatcggtgcaaaagttacccttcgtggtgaacgtatgtacgaattcttggataaattggtatcagtttcacttccacgtgtacgtgacttycacggtgtyccaacaaaatcatttgatggacgcgggaactacacacttggtgtgaaagaacaattaatcttcccagaaatcaacttcgatgacgttgacaaaactcgtggtcttgacatcgttatcgtaacaactgctaacactgacgaagagtcacgtgcattgcttacaggccttggaatgccttttgcaaaataactaat

SEQ ID NO: 2396 - DNA, 189 bp, Streptococcus pneumoniae
  misc_feature (1)..(189): tiling:Spneumo1:WAN024D8Q; Cluster includes WAN0243TQ spr1 285|spnIR-truncation|15903328|NP_358878.1|1280075..1280257 |+|183 bp|Type II restriction endonuclease, uncharacterize d, truncation|S.pneumoniae|R6|NC_003098.1|ORF|111
atggcaaatgataataagagccattatttgatatacagagttttaggtatttcatttgaagaaggagaaaatatcgatttgtatcaaaataaaggtcgttttttatacaaatatgctggttcatttttagaagaagctgcagtactatsctttaacgaaaaatttggtacagaaaatactctaactaat

SEQ ID NO: 2397 - DNA, 225 bp, Streptococcus pneumoniae
  misc_feature (1)..(225): tiling:Spneumo1:WAN024FFR; Cluster includes WAN023IR9 8577 3_2640b||||1502985..1503209|+|225 bp|EGAD orf prediction|S .pneumoniae|TIGR4|WAN01UC25|ORF|011
atggcaaatgtgataaataagttaatccaaagagaaagacagcaaatcagtccaaaaacaaagagactgactttcttggacagcaaggccatgagaatggacagaattccaaaagctagcaagattttctgtatgatgaagatgtcaatccttayccccagaakygstytatcccaagggataaagaagaaagacagccagatcagcagaactaaaccaatataa

SEQ ID NO: 2398 - DNA, 476 bp, Streptococcus pneumoniae
  misc_feature (1)..(476): tiling:Spneumo1:WAN024D52; Cluster includes WAN0243KP spr1 611||15903653|NP_359203.1|1586584..1587054|-|471 bp|Hypoth etical protein|S.pneumoniae|R6|NC_003098.1|ORF|112
atggcaacatacggatttttagatrttttagaggaagagttggacaagaactttccctttgactttgagattagytgggacaarcgyaaccaygcggtagaagtgagttttctattggaagcrcaaaatgctgcaggtgtggagatggtggatgaagacggagaggtttyatcagatgacattctttttgaggaagcggtccttttctacmatcctgccaagtcaacmgkcaatgmrraagactatttrackgttatyccttayctrcctaaaaaaggattttcycgygartttttagcttattttgcsmttttcctyaaagatactgctgaggttgggctagatrycctcatggactttttggaagayccagaagcagaggaatttgtcatggaatggaaccaagaagtctttgaagaaggaaaarttggyttggaaragggagaattttayccttatccragatactarctaat

SEQ ID NO: 2399 - DNA, 785 bp, Streptococcus pneumoniae
  misc_feature (1)..(785): tiling:Spneumo1:WAN024DAQ; Cluster includes WAN02440E spr1 044|rnh|15903088|NP_358638.1|1037149..1037928|+|780 bp|Rib onuclease H|S.pneumoniae|R6|NC_003098.1|ORF|111
atggcaacgattaaagaaatcaaagaaytccttgtgacagtcaaggagttagaaagccctatttttttagakcttgaaaaggataatcgctcaggagttcaaaargaaatcagcaagcgtaaaagagccatycaagctgaattagatgaaaatttgcgcttggaatccatgctttcttatgaaaaagaactttataagcaaggattgaccttaattgyaggtattgatgaggttggtcgtggtcctcttgctggtcctgtagtcgctgcggccgtyattttayctaaaaattgtaagattaaaggtctcaacgacagcaagaaaattcctaaaaagaaacatctggagattttccaagccgttcaagaccaagccttgtcgattggaattggtatcatagataatcaggtcatcgaccaagtcaayatctatgaagcaaccaaactagccatgcaagaagcaatctcccagctcagccctcaaccagagcaycttttgattgatgccatgaaactggacttgcccatttcacaaacctccattatcaaaggagatgccaactccctctctatcgcagcagcatctatagtagccaaggtaacacgtgatgaattgmtgaargaatacgatcagcagttccctggctatgatttcgctactaatgcaggatatggcacagctaaacatctggaaggcctcacaaaactaggagttaccccaattcaycgaaccagctttgaacccgttaaatcactggttttaggtaaaaaagaaagttaactaat

SEQ ID NO: 2400 - DNA, 123 bp, Streptococcus pneumoniae
  misc_feature (1)..(123): tiling:Spneumo1:WAN024AZ9; Cluster includes WAN023SN1 NC_0 03098.1_151||||120653..120775|+|123 bp|Glimmer 2.02 orf pr ediction|S.pneumoniae|R6|NC_003098.1|ORF|100
atggcaactattactaatgctcttaatattgcggytactgttgctgaagttttctcattaggaggagccattgcatatggtttagatatcgtagacggtaaatttgatggatatttatgggcg

SEQ ID NO: 2401 - DNA, 567 bp, Streptococcus pneumoniae
  misc_feature (1)..(567): tiling:Spneumo1:WAN024GIE; Cluster includes WAN0244FS spr0 490||15902534|NP_358084.1|490168..490725|+|558 bp|Conserve d hypothetical protein|S.pneumoniae|R6|NC_003098.1|ORF|221
atggcaagaactgagctgycagatmaaatcgaaacagaacgtctcgttttacgagtccgyacwgtggyggatgctgaggatatcywtrmctaygctagtttgccagaggtcgcctatccagcaggttttcctccagtcaagaycttggaagatgagatttattatctggagcacattcttccggagcgtamtcaaaaggaaaatctcccagcwggctaygggattgtcgtcaaaggaacsgataarrtcrytggytctrtykayttcaaccatckyyatgvrgaygatgtgmtrgarmtyggctataccttrcacycagactaytggggkcgaggttatgtkccagaagcwgcgygtkccttgattgayytagcytttaaagawytkggtcttcacaagattgaactaacttgctttggatataaccttcaaagtmaacgagtckcggaaaagcttggctttaccctcgaagctcgcataagagaccghaargatgytcaaggmaacygctgtgayrrtytrakatatgscttgctgargagygartgggaggwratwhkaactaat

SEQ ID NO: 2402 - DNA, 387 bp, Streptococcus pneumoniae
  misc_feature (1)..(387): tiling:Spneumo1:WAN024C48; Cluster includes WAN023M49 3136 14_645||||339484..339732|-|249 bp|EGAD orf prediction|S.pn eumoniae|R6|NC_003098.1|ORF|110
atggcaagcaatcacatcttccgttttttctttactacggttgtagatagcaactgtgtaaccacgagattcaatattaagggcaaggttacgacccattacggccatacctacgacaccaaagttagcttttgtcatttgacactcctcttgtttcatttgttttattttatcatttttacttttgaaaagaaagaattttgtaacgactgcttagtartcyaagtcatccgcatgaccagcgccatttccgacaaagtagcctgtcttacagttaagggtaaagagataggttccatctggcttatagaggttgtaataaccattgccgttaacgatattgacacgttcaaggatatattggtctccagtgatatagccacgtga

SEQ ID NO: 2403 - DNA, 237 bp, Streptococcus pneumoniae
  misc_feature (1)..(237): tiling:Spneumo1:WAN024CER; Cluster includes WAN023MDD 3143 16_144||||68180..68416|-|237 bp|EGAD orf prediction|S.pneu moniae|R6|NC_003098.1|ORF|110
atggcaagcggtgcatcaattccttgtgaaacagagaaggctgtcgcaagaaccgcaccagaagttgcgtcgatacgagaagcaccaccgaaggtaccaaccccaagaacgaacagttgcaagttaccaccgataagtaaaccagtagtcacatctcccatgattaaaccagtaatgaaaccagcaaatacaggggaacctgcagatgaaacgatcgtcaactcatcacagatttga

SEQ ID NO: 2404 - DNA, 888 bp, Streptococcus pneumoniae
  misc_feature (1)..(888): tiling:Spneumo1:WAN024F4A; Cluster includes WAN0244J9 spr0 365|rnhB|15902409|NP_357959.1|364501..365373|-|873 bp|Ribo nuclease HII|S.pneumoniae|R6|NC_003098.1|ORF|111
atggcaagtatcacactcacaccaagcgaaaaggatattcaggcttttcttgaacactatcaaaccagtctggctcctagcaagaatccctatatccgctactttttgaaactacctcaagcaacggtttctatctatacttctggaaaaatcttgcttcagggtgaaggggctgaaaaatacgccagtttctttggctatcaagctgtagagcaaaccagcggacaaaatcttcctttaattgggacagatgaggtgggaaatggttcctactttggtgggcttgcagttgtggctgcctttgtcacacctgaccagcacgactttttacgaaaactcggtgtgggggattctaagactctgaccgaccaaaagatccgtcagattrctcctattctcaaggaaaaaatycagcaccaggcactccttctctcacccagcaagtacaacgaggtcatcggagaccgctacaaygctgtttcggttaaggttgccctccataatcaggctatctatctcctccttcaaaaaggtgttcagcctgagaaaattgtgattgatgcctttaccagtgctaaaaattatgacaagtacttggcacaagagrccaatcgtttcagcaatcctatcagcttagaagaaaaggctgagggcaaatacttgkctgtcgcagtttcttctgtcattgcgcgtgatctctttctggaaaatcttgaaaatytgggacgagaactgggttatcagctyccaagtggagctggaacggcttctgacaaggtggctagccagattttgcaagcctatggtatgcagggactcarcttctgcgcyaarytrcactttaaaaayactgaaaaagcgaaaaaacgcttagaaaggctaactaat

SEQ ID NO: 2405 - DNA, 335 bp, Streptococcus pneumoniae
  misc_feature (1)..(335): tiling:Spneumo1:WAN024EU4; Cluster includes WAN0244K6 spr0 332||15902376|NP_357926.1|336266..336607|+|342 bp|Conserve d hypothetical protein|S.pneumoniae|R6|NC_003098.1|ORF|110
atggcaagtattattttttcagcgaaagatatttttgaacaagagtttggacgtgargtccgtggctataataaagtagaagttgacgagtttttagacgatgtcatcaaggactatgaaacctatgctgccttggtcaagtcacttcgtcaggaaattgcggatttgaaggaagaattaactcgtaaaccgaaaccttcaccagttcaagcagaaccccttgaagcggcaattacaagttctatgacgaattttgatattttgaaacgcctgaatagattggaaaaagaagtttttggtaaacaaattttagataactcagatttttaactaat

SEQ ID NO: 2406 - DNA, 1017 bp, Streptococcus pneumoniae
  misc_feature (1)..(1017): tiling:Spneumo1:WAN024FCY; Cluster includes WAN0243JP spr1 647|galE|15903689|NP_359239.1|1619051..1620031|-|981 bp|UD P-glucose 4-epimerase|S.pneumoniae|R6|NC_003098.1|ORF|111
atggcaatattggtaacaggcggagctggttatattggtagccataccgtagtagaattactaaatttaggaaaggaagtyatcattgtcgacaacctttcgaactctagcatcttggtgctagaccgtattgaagcaattacaggaatacgtcccgtgttttacgaattagatgtttgtgataaacmagcattgagaaaggtatttgaacaagaatcgattgatgctgcaattcattttgcaggttataaagctgtcggagaatccgtgcaaaagcctgtgatgtactacaaaaataatattatgagtacattggcacttgttgaagtgatgtcagaatttaatgttaaaaagattgtcttttcttcaagtgcgactgtatatggaattaacaatcagtcacctctaattgagackatgcaaacaagtgcgacaaatccttatgggtatacgaaagtgatgcttgagcaaattttaaaagatgttcatgtggcagattcagaatggagtattgcgttgcttcgttatttcaatccaattggtgctcatgagtctggtttgattggggaagatccctcaggamttcctaacaacttgatgccytatattgcacaagtagcggtaggtaagctrtcagarctaagtgtgttcggaaatgattatgatacgcttgayggtactggtgtgcgygattatatccatgtagtagatttagcaataggacatataaaagctttagaaaaagtatctgaaaaaacagatgtttatatctataacctaggctcgggagaaggcactagtgtattacaacttgtaaatacatttgaaagtgttaataagatccctattccttataaaatagttcyaaswmrttcaggagacgttgcaacttgttatgcaaatgcagacaaagcatataaggaattaaattggaggacaacaaaatcgattgaagacatgtgtagagatacatggaattrgcaatcaaaaaatcccaatggctataatykaactaat

SEQ ID NO: 2407 - DNA, 905 bp, Streptococcus pneumoniae
  misc_feature (1)..(905): tiling:Spneumo1:WAN024DW2; Cluster includes WAN0243AZ spr1 962||15904003|NP_359553.1|1949304..1950203|-|900 bp|Conser ved hypothetical protein|S.pneumoniae|R6|NC_003098.1|ORF|1 21
atggcaatatttttcatgatttttctgattgtttgtgtgctcctattggtgatagtcacactgagtacagtttatgtggttcgtcagcagtcggtggcgattattgaacgctttgggaaataccaaaaggttgctaatagcggtattcatattcgcttgccttttgggattgactcgattgcagcacggattcagttgcgcttgttgcaaagtgatattgtggttgagactaagaccaaggacaatgtgttcgttatgatgaatgtagcgactcagtaccgtgtcaacgagcagagcgtgacagatgcttactataaactcatacgtccagaatctcagattaaatcttatatcgaagatgctcttcgctcttctgttccaaaattaaccttggatgaattgtttgagaaaaaagatgagattgcccttgargttcaacaccaagtagcagaagaaatgaccacttacggctacattatcgtgaaaaccttgattaccaaggtcgaaccrgatgcagaagttaagcaatcyatgaatgaaatcaatgcggcgcaacgtaagcgggtcgcagcacaagaattggcggaagctgacaagattaaaattgtcactgcagctgaagcmgaagcagaaaaagaccgccttcatggtgtggggattgcccaacaacgtaaggcgattgtggatggattggcagagtctatcaccgaactcaaggaagccaatgttggcatgacagaagaacaaatcatgtctatcctcttgaccaaccagtatttggataccttgaatacctttgcctctaaaggaaatcaaacyatctttttaccaaatackccaaatggtgtggatgatatccgwacacaaatcttgtcagcccttcgcgctgagaagaaataactaat

SEQ ID NO: 2408 - DNA, 887 bp, Streptococcus pneumoniae
  misc_feature (1)..(887): tiling:Spneumo1:WAN024GGX; Cluster includes WAN0244EO spr0 530|fba|15902574|NP_358124.1|529452..530333|+|882 bp|Fruct ose-bisphosphate aldolase|S.pneumoniae|R6|NC_003098.1|ORF| 111
atggcaatcgtttcagcagaaaaatttgtccaagcagcccgtgacaacggttatgcagttggtggatttaacacaaacaaccttgagtggactcaagctatcttgcgcgcagcagaagctaaaaaagctccagttttgatccaaacttcaatgggtgctgctaaatacatgggtggttacaaagttgctcgcaacttgatcgctaaccttgttgaatcaatgggtatcactgtaccagtagctatccaccttgaccacggtcactacgaagatgcacttgagtgtatcgaagttggttatacttcaatcatgtttgacggttcacaccttccagttgaagaaaaycttaaattggctaaagaagttgttgaaaaagcacacgctaaaggtatctcagtagaagctgaagttggtactatcggtggtgaagaagayggaatcatcggtaaaggtgaattggctccaatcgaagacgctaaagcaatggttgaaactggtatcgacttcttggcagctggtatcggtaacatccacggyccttacccagtaaactgggaaggtcttgaccttgaccacttgcaaaaattgacagaagctcttccaggattcccaatcgtattgcacggtggatcaggtattcctgatgagcaaatccaagcagctatcaaamytggtgttgccaaagttaacgttaacacmgratgccraatcgcattcgctaacgcaactcgtaaatttgctcgtgactacgaagcaaacgaagcagaatacgacmagaaaaaactcttcgacccacgtaaattcttggctgacggtgtaaaagctatccaagcatcggttgaagaacgtatcgacgtattcggttcagaaggtaaagcataactaat

SEQ ID NO: 2409 - DNA, 275 bp, Streptococcus pneumoniae
  misc_feature (1)..(275): tiling:Spneumo1:WAN024D6U; Cluster includes WAN0243OO spr1 467|rpsO|15903510|NP_359060.1|1449589..1449858|-|270 bp|30 S Ribosomal protein S15|S.pneumoniae|R6|NC_003098.1|ORF|11 0
atggcaatctcaaaagagaaaaaaaatgaaatcatygcacaatatgcacgtcacgaaggtgatacaggttcagtagaggttcaagttgctgtccttacttgggaaatcaaycaccttaacgaacacatcaaacaacayaaaaaagaccacgctacttaccgtggattgatgaaaaaaatcggtcgccgtcgtaacttgcttgcatacttgcgtaaaaacgacgttaaccgttaccgtgagttgatcaactctctaggacttcgtcgctaactaat

SEQ ID NO: 2410 - DNA, 998 bp, Streptococcus pneumoniae
  misc_feature (1)..(998): tiling:Spneumo1:WAN024GG2; Cluster includes WAN0244DX spr0 557|ABC-NBD|15902601|NP_358151.1|558589..559581|+|993 bp|A BC transporter ATP-binding protein - role in polysaccharid e efflux|S.pneumoniae|R6|NC_003098.1|ORF|111
atggcaatgatagaagtggaacatcttcagaaamattttgtgaagaytgttaaggaaccgggcttgaagggggctttgcgctcctttattcatcctgaaaagcagacctttgaagcggtcaaggatttgacctttgargttccaaaagggcagattttaggatttatcggggcaaatggtgctgggaagtcgacaaccattaaaatgctgacaggaattttgaaaccaacatctggtttttgtcggattaacggcaagattccccagracaatcggcaagattatgtcaaagatattggcgtagtctttggacaacgcacccagctatggtgggatttggctctgcaagagacctacactgtcttaaaagagatttatgatgtgccaractcgctctttcataagcgyatggactttttgaatgaagtcttggatttgaaggactttatcaaggatcccgtgcggactctttcactgggacaacggatgcgrgcggatattgcggcctccttgctccacaatcccaaggttctttttttagatgagccgaccattggtttggacgtttcggttaaggataatattcgtcgggcaattactcagatcaatcaagaggaagaaactaccattcttttgaccactcacgatttgagtgatattgagcaactttgtgatcggattttcatgattgacaaggggcaaragatttttgatggaacggtgagccaactcaaggagacctttggtaagatgaagactctctcttttgaactgctaccaggtcaaagtcatctcgtctctcactatgamggtctgtctgatatgaccattgatagacaaggaaacagcctcaacattgaatttgatagttctcgctaccagtcagctgacattatcaagcaaaccctrtctgattttgaaatccgcgatttgaagatggtggatacggatattgaggatattatccgtcgcttctaccgaaaggagctctarctaat

SEQ ID NO: 2411 - DNA, 240 bp, Streptococcus pneumoniae
  misc_feature (1)..(240): tiling:Spneumo1:WAN024ESJ; Cluster includes WAN023KKR 3127 51_3320||||1777366..1777605|+|240 bp|EGAD orf prediction|S .pneumoniae|R6|NC_003098.1|ORF|110
atggcaatggcttgcactccaatcgtttctgcttccttcacatcttccatagttttcgcattttcaatctctttgagagctgcttgtttttctgcttccactcttgctaaaagttctgctttttctttatcagaaagcggtgcgcctttgatttcatcctgcttgtycttggctgctttttcaatggcatttttagctgattctttttcagtagctaattgcttagaagcttgtgattga

SEQ ID NO: 2412 - DNA, 722 bp, Streptococcus pneumoniae
  misc_feature (1)..(722): tiling:Spneumo1:WAN024DMH; Cluster includes WAN0244RS spr0 058||15902102|NP_357652.1|64781..65539|-|759 bp|Conserved hypothetical protein|S.pneumoniae|R6|NC_003098.1|ORF|111
atggcaattcccaaatatcaatacataaaagacgaattaaaaaataaaatcatctctgggcagtttagcagtggagataaattttacactgaagcagaactcatttcaatgtacgatgtcagctctatcacagttgttcgcgccttaaacgaccttgccaaagatggctatattgtccgccaacaaggaaaaggaaccttcrtttcacgtgcacgcaaacacaagcttgtagagttttcagatattgarctcttcaatgctaaagatgataaggtaactgttctttcaattgaacgcggaaacaagcttgtttacttggaaaaattgggtctacgyggcgatcaattctactacaagattgaacgtatccgcgaatcaaacggtgtcgtttatatctaccatacatcctacatcccagaacaatatatcaacgcaaattatccaaaycttgaatactatagytctatctataatcgtttcaagttagactaccacattcacatgaatgatgaacactttgaagaaatcaacgaaatagtctttccaactccagaacatgcrgcttcagtcctcggagtcgatgaacaattccctactgtcctacaaactaaaatcaccaaactcgaatcaactggccaagttttagaatmcagtgaaacttacaaacgatctgattactacaagattaaattyatctcatgtgaccgtgatcactaactaat

SEQ ID NO: 2413 - DNA, 927 bp, Streptococcus pneumoniae
  misc_feature (1)..(927): tiling:Spneumo1:WAN024C4I; Cluster includes WAN023Q1K cont ig_1216_6||||4294..5220|+|927 bp|Glimmer 2.02 orf predicti on|S.pneumoniae|670|WAN01UEKW|ORF|000
atggcacaaaaaattatgagcctacaaaataggaagaatcaaaaaagacgatttatctttttatttcttttgccaacgttgatttgtttctttctattttatttttattctgtagtaacaatctttttaacttcatttgctaaatgggattatacaaatttaaacacccctgagtttcttggatttgataaattatttgaaaattataggtatgtttttaaagaatacccattttttacagaagctctaattaattctgttcgttgggctgtaattggtgttattattcaagttcctttagctgtatctgttgcaattacattatctaagaaattaaaaggctggaagatatctaggaatctttatattgtaccaagtatcatttctagtgctgctatgggcttgatttttcttcaaatctataatccaaactatggtgttgttaaccaaattattcatctatttaatccatcgtttaaagattcagtactgttgactccaggattaaatatagtagctatgactggcgcttatatcttctttgcaggagcatcaaccattatgattcttgggcaaatttttgctattccagaagaagttcaagaagctgctattttagacaatattactggttggaggaaagagtggtatattacgattccgatgattaaggggacaattaaaactgtttcaattatggcagcaacttcagggtttttgctctataacgaagtattctttttgacaaatggtgctgcaggaacaaaaagtatcagttttgttattcgagaattagcagtggctagctcacgaactcagtatgctcgtgcaaatacaattggagttatacaaattttaggtggaatgttgattatcgtttgtattaatattttattcagagaaagaaaaagactgaaaggtgggaaa

SEQ ID NO: 2414 - DNA, 651 bp, Streptococcus pneumoniae
  misc_feature (1)..(651): tiling:Spneumo1:WAN024FGI; Cluster includes WAN0243N5 spr1 522||15903565|NP_359115.1|1499342..1499806|-|465 bp|Hypoth etical protein|S.pneumoniae|R6|NC_003098.1|ORF|211
atggcacaaaaaggagtaagccttatcaaggcagcatttgatacagayaactttctyatgcgttttagtgagaargtcttggacatcgtgacagccaatcttctttttgtcgtctcttgtttrcccatcgtgacgattggagtggctaaaatcagcctctacgagaccatgttygarrttaagaagagcagacgggtgcctgtttttaaaatctatctaagatctttcaagcaaaatctgaaactaggtcttcagytrggtytrmtkgagttrggmattgtgttymtyascctyyyagatctytatctyttytggggtcaaacagctctgcccttycaattgctgaaagcyatttgtytaggyattctgattttycttackatygtgatgytggctagytayccwatcgcggcacgttatgayytawcttggaaagaartkytwcaaaaaggrytkatsttggcwagttttaactttccttggttcttcctcatgttagccattcttgtcctcattgtgatggttctttatctgtccgccttcagtctactcttaggtggctcagtcttcytacttwttgggtttggactattggtctttatccagactggattgatggagaaaattttcgcaaaataccaactarctaat

SEQ ID NO: 2415 - DNA, 1541 bp, Streptococcus pneumoniae
  misc_feature (1)..(1541): tiling:Spneumo1:WAN024GBA; Cluster includes WAN02448M spr0 748|ABC-NBD|15902792|NP_358342.1|744090..745625|+|1536 bp| ABC transporter ATP-binding protein - ribose/galactose tra nsport|S.pneumoniae|R6|NC_003098.1|ORF|111
atggcacacgaaaatgtcattgagatgcgtgatattaccaaggtgtttggtggatttgttgcyaacgacaaaatcaacttgcacctacgaaaaggtgaaattcatgcacttttaggagaaaatggggctggtaagtccacgctaatgaacatgttagcaggccttcttgaaccaacyagtggtgaaatcgcggtcaacggtcaagttgtcaatctcgactccccatctaaagcagctagcttgggaatcgggatggttcaccagcactttatgttggttgaagccttcacagtggctgaaaacatcattttaggtagtgaattgactaaaaatggtgtgctagatatcgctggagctagcaaagaaatcaaggctctttctgaacgttatggcttagctgttgacccttctgccaaggtagcagatatctcagttggagcccaacaacgtgtagaaattttaaaaacactttatmggggggctgatatccttatctttgacgaaccaacggctgttttgactccatcagaaattgatgagttgatggctattatgaaaaatcttgtcaaagaaggaaaatcaattatcttgattacccacaaattggatgaaattcgmgcagtttctgaccgtgttacagttatccgtygtgggaaatcaattgaaaccgttgaaattgcaggggctaccaatgctgatttggcggaaatgatggtaggacgttctgtttcctttaaaacagagaagcaagcctctaaaccaaaagaagtggttttgtctatcaaagatttggtggtcaatgaaaaccgtggtgttccagctgttaaaaatctgtccttggatgttcgtgctggagagattgttggtattgcggggattgatggaaatggtcagtytgaactgattcaagccattacaggtyttygtaaggttgaatctggtagcattgagctaaaaggagattcaattgtaggcttgcacccacgtcagattacagaactaagtgttgggcacgttccagaagaccgtcaccgtgatggcttgattttggaaatgatgatatctgaaaatattgcccttcaaacctactataaagaaccacatagtaaaaatggaattttgaattattcaaatattacttcttatgctaaaaagctgatggaagagtttgatgttcgcgctgccagtgaattagttcctgcagctgcactctcaggaggaaatcaacaaaaagcaattattgctcgtgaaattgatcgagatcctgatctccttatcgttagycagccaactcgtgggttggatgtcggtgccattgagtatatccacaaacgcttgattgaagagcgtgataatggcaaggctgtccttgttgtcagctttgaattggatgagattttaaacgtctcagaccgtattgccgttatccacgatggtaagattcaaggtattgtatcaccagaaacaaccaataaacaagracttggtgtcttgatggctggtggaaacttgggaaaggagaagagtgatgtctaactaat

SEQ ID NO: 2416 - DNA, 606 bp, Streptococcus pneumoniae
  misc_feature (1)..(606): tiling:Spneumo1:WAN024DC6; Cluster includes WAN02443S spr0 922|tdk|15902966|NP_358516.1|909208..909807|+|600 bp|Thymi dine kinase|S.pneumoniae|R6|NC_003098.1|ORF|111
atggcacagttgtaytatcgttatgggaccatgaactctggtaaracgattgagattctcaaagtggcctataactacgaggagcaaggaaaaggtgttgtsattatgacytcggctctggatacgcgtgacggygttggctatgtgtcgagtcgaattggcatgaaacgccctgcccttgcgattgaggaaacaacggatatctttggctatatccgagacctaccagaaaaaccttactgtgttttggtcgatgaagcccagtttctyaaacgccaccatgtttaygacctagctcgtgttgtrgacgagttagacatacccgtcatggcttttggcttgaaaaatgactttcgcaatgaattgttcgaaggttccaaatatctcttgcttttagcrgacaagattgacgaaatcaagaccatctgtcagtattgcaagaaaaaggcgaccatggtgttgcgaacacaggatggactgcccgtttacgatggagaacagatccagattggtggtaaygaaacctatatctcrgtttgccgtaaacattattttgcsccaatgataaycwmtaasragragmaraamwatgacaatykaactaat

SEQ ID NO: 2417 - DNA, 294 bp, Streptococcus pneumoniae
  misc_feature (1)..(294): tiling:Spneumo1:WAN024FFS; Cluster includes WAN02420J SP17 03||15901537|NP_346141.1|1609286..1609573|-|288 bp|conserv ed domain protein|S.pneumoniae|TIGR4|NC_003028.1|ORF|011
atggcacatctaaaatcatttattacacgmtattccaaggtttatattggtttagttctgctgatctggctgtctttcttctttatcccttgggatarascrmttctggggrtaaggattgacatcttcatcatacagaaartcttgctagyttttggaattctgtccattytsatggccttgctgtccaagaaagtcagtctctttgtttttggactgatttgctgkctytctctttggattaacttatttatcacatttgccattttgccgatttttggcaatctaactaat

SEQ ID NO: 2418 - DNA, 794 bp, Streptococcus pneumoniae
  misc_feature (1)..(794): tiling:Spneumo1:WAN024FIP; Cluster includes WAN0243PG spr1 439|codY|15903482|NP_359032.1|1422736..1423524|-|789 bp|Tr anscriptional pleiotropic repressor|S.pneumoniae|R6|NC_003 098.1|ORF|111
atggcacatttattagaaaaaactagaaaaattacatcaattttgaaacgctcagaggagcagttgcaggatgagctyccttacaacgctattacgcgtcagttagcggatattattcattgcaatgcctgcattatcaatagtaagggacgtctgcttggctattttatgcgttataaaacaaatacagatcgsgtagagcaattcttccaaactaagattttcccagatgactacgttcaaggggctaatatgatttacgaaacagaagcaaacttgcctgttgagcatgatatgagtattttccctrttgagagtagagatgattttccagatggcttgacgactawygcaccgattcatgtatcggggattcgccttggttctttgattatttggcgtaatgataaaaaattcgaagatgaggacttggttcttgttgagattgccagtaccgttgttgggattcagcttcttaacttccaacgtgaagaagatgagaaaaatattcgtcgtcgtactgctgtcaccatggcggtcaataccctttcttactccgaactccgtgctgtttcagcaattttaggggaattaaatggaaatgaagggmagttgactgcgtcagtgattgcagatcgtatcggaatcactcgctctgtgattgtcaatgctcttcgtaaacttgagtctgcggggattattgaaagtcgctcacttggaatgaagggaacctatcttaargtcttgatttcagatatttttgaagaagtgaagaaaagagattactaactaat

SEQ ID NO: 2419 - DNA, 2106 bp, Streptococcus pneumoniae
  misc_feature (1)..(2106): tiling:Spneumo1:WAN024F4R; Cluster includes WAN0244MG spr0 250|fusA|15902294|NP_357844.1|248889..250970|+|2082 bp|Elo ngation factor G|S.pneumoniae|R6|NC_003098.1|ORF|111
atggcacgcgaattttcacttgaaaaaactcgtaatatcggtatcatggctcacgtcgatgcyggtaaaacaacaactactgagcgtattctttactacactggtaaaatccacaaaatcggtgaaactcacgaaggtgcgtcacaaatggactggatggagcaagagcaagarcgtggtatcackatcacatctgctgcgacracagctcaatggaacaaycaccgcgtaaacatcatcgacacaccaggacacgtggacttcacaatcgaagtacaacgttctcttcgtgtattggatggtgcggttaccgttcttgactcacaatcaggtgttgagcctcaaactgaaacagtttggcgtcaagcaactgagtayggagttccacgtatcgtatttgccaacaaaatggacaaaatcggtgctgacttcctttactctgtaagcacacttcacgatcgtcttcaagcaaatgcmcacccaatccaattgccaatcggttctgaagatgacttccgtggtatcatygacttgatcaagatgaaagctgaaatctatackaacgaccttggtacrgatatccttgaagaagayatyccagctgaataccttgaccaagctcaagaataccgtgaaaaattgrttgaagcagttgctgaaactgacgaagaattgatgatgaaatacctcgaaggtgaagaaatcactaacgaagaattgaaagctggtatccgtaaagcgactatcaacgttgaattcttcccagtattgtgtggttcwgccttcaaraacaaaggtgttcaattgatgcttgatgcrgttatygactaccttccaagyccacttgayatcccagcwatcaaaggtattaacccagatacagacgmwgaagaaaytcgtccagcatctgacgaagagccatttgcagctcttgccttcaagatcatgactgacccattcgtaggtcgtttgacattcttccgtgtttactcaggtgttcttcaatcaggttcatacgtattgaayacttctaaaggtaaacgtgaacgtatcggacgtatccttcaaatgcacgctaacagccgtcaagaaatcgacactgtttactcaggtgatatcgctgctgccgttggtttgaaagatactacaactggtgactcattgacagatgaaaaagctaaaatcatccttgagtcaatcaacgttccagaaccagttatccaattgatggttgagccaaaatctaaagctgaccaagacaagatgggtatcgcccttcaaaaattggctgaagaagatccaacattccgcgttgaaacaaacgttgaaactggtgaaacagttatctcwggtatgggtgarcttcaccttgaygtccttgttgaycgtatgcgtcgtgagttcaaagttgaagcraacgtaggtgckcctcaagtatcttaccgtgaaacattccgcgcttctactcaagcacgyggattcttcaaacgtcagtctggtggtaaaggtcaattcggtgatgtatggattgaatttactccaaacgaagaaggtaaaggattcgaattcgaaaacgcaatcgtcggtggtgtggttcctcgygaatttatcccagcggttgaaaaaggtttggtagaatctatggctaacggtgttcttgcaggttacccaatggttgacgttaaagctaagctttaygatggttcataycacgatgtcgactcatctgaaactgccttcaagatygcggcttcacttkcycttaaagaagctgctaaatcagcacaaccagctatccttgarccaatgatgcttgtaacaatcactgttccagaagaaaaccttggtgatgttatgggtcacgtaactgctcgtcgtggacgtgtagatggtatggaagcacayggtaacagccaaatcgttcgtgcttacgttccacttgctgaaatgttcggttacgcaacagttcttcgttctgcatctcaaggacgtggtacattcatgatggtatttgaccactacgaagatgtacctaagtcagtacaagaagaaatyattaagaaaaayaaaggtgaagactmrmkmaycaccaccaccaccactgac

SEQ ID NO: 2420 - DNA, 365 bp, Streptococcus pneumoniae
  misc_feature (1)..(365): tiling:Spneumo1:WAN024G8P; Cluster includes WAN02445F spr0 863|rplT|15902907|NP_358457.1|856133..856492|+|360 bp|50S Ribosomal protein L20|S.pneumoniae|R6|NC_003098.1|ORF|110
atggcacgtgttaaaggtggcgttgtatcacgcaaacgtcgtaaacgtattcttaaattagcaaaaggttactatggagctaaacacatcttgttccgtactgcaaaagaacaagtaatgaactcttactactatgcataccgtgaccgtcgtcagaaaaaacgtgacttccgcaaattgtggattactcgtatcaatgcggcagctcgtatgaacggactttcatactcacaattgatgcatggtttgaaattggctgagatygaagttaaccgtaaaatgcttgctgacttggctgttaacgatgcagtagctttcacagctcttgcagatgcagctaaagcaaaacttggtaaataactaat

SEQ ID NO: 2421 - DNA, 153 bp, Streptococcus pneumoniae
  misc_feature (1)..(153): tiling:Spneumo1:WAN024D22; Cluster includes WAN0243EU spr1 822|rpmG|15903864|NP_359414.1|1796524..1796676|-|153 bp|50 S Ribosomal protein L33|S.pneumoniae|R6|NC_003098.1|ORF|11 0
atggcactaaaaaaagcaagcctagcttgtgcggtttgtggttcgagaaactattcaatcaagatcagcggaaaccycaagcctacacgactagaagtaaataaattttgtaagcattgtggcaagtacactacacacagagaaacgagatag

SEQ ID NO: 2422 - DNA, 348 bp, Streptococcus pneumoniae
  misc_feature (1)..(348): tiling:Spneumo1:WAN024CCJ; Cluster includes WAN023RM1 cont ig_1575_12||||3071..3418|-|348 bp|Glimmer 2.02 orf predict ion|S.pneumoniae|670|WAN01UDHA|ORF|000
atggcagaaacaattcaaaacacagataacttactagaccttrcaaaaatcacagaaccatttgatcttgcgagygctttgcgctacatgaaagaaaatggagagttcattcgttgcaagaatgtaagcgatgacttctatatgtatcgtgaygttcaaaaacgtcctgtgatcgtaaatggccgtcgccaattmaaggatgttgaaaccgtttgggcgttcaaycagtggggtggtacaatcgcaacaatcaacgtagccgttctgttgaatcatgaattctatatcatgaaatttgatgcagmkrrcaatcctgactggacggwtccaacggtaraacctaaagaa

SEQ ID NO: 2423 - DNA, 323 bp, Streptococcus pneumoniae
  misc_feature (1)..(323): tiling:Spneumo1:WAN024DJO; Cluster includes WAN0244KZ spr0 303|ftsL|15902347|NP_357897.1|301940..302257|+|318 bp|Cell division protein|S.pneumoniae|R6|NC_003098.1|ORF|111
atggcagaaaraatggaaaaaacaggtcaaatactacagatgcaacttaaacggttttcgcgtgtggaaaaagctttttacttttccattgctgtaaccactcttattgtagccattagtattatttttatgcagaccaagctcttgcaagtgcagaatgatttgacaaaaatcaatgcgcagatagargaaaagaaraccgaattggacgatgccaagcaagaggtcaatgaactattacgtgcagaacgtttgaaagaaattgccaattcacacgatttgcaattaaacaatgaaaatattmgaatagcggagtaactaat

SEQ ID NO: 2424 - DNA, 1046 bp, Streptococcus pneumoniae
  misc_feature (1)..(1046): tiling:Spneumo1:WAN024D7S; Cluster includes WAN02439E spr2 019|tsf|15904060|NP_359610.1|2010734..2011774|-|1041 bp|El ongation factor TS|S.pneumoniae|R6|NC_003098.1|ORF|111
atggcagaaattacagctaaacttgtaaaagagttgcgtgaaaaatctggtgccggtgttatggacgctaaaaaagcgcttgtagaaacagacggtgacatcgaaaaagcgattgaattgcttcgtgaaaaaggtatggctaaggcagctaagaaagctgaccgtgttgctgcagaaggtttgactggtgtttatgttaacggtaatgttgcagcagttattgaagtaaaygctgaaactgacttcgttgcaaaaaacgctcaattcgttgaattggtaaatactacagctaaagtcattgctgaaggaaaacctgctaayaaygaagaakctcttgctttgataatgccttcaggtgaaactcttgaagctgcatacgtatctgcaacagcaactatcggagagaaaatctcattccgtcgctttgcattgattgaaaaaacagacgcacaacactttggagcataccaacataacggtggacgtatcggtgttatttcagttgttgaaggtggagacgaagcacttgctaaacaattgtcaatgcacatcgcagcgatgaaaccaacagttctttcttacaaagaattggatgagcaattcgttaaagatgagttggcacaattgaatcacgttatcgaccaagacaacgaaagccgtgcaatggttaataaaccagctcttccacacttgaagtatggatcaaaagctcaattaactgatgatgttattgctcaagctgaagctgacatcaaagctgaattggctgcagaaggcaaaccagaaaaaawctggsacaaaattatyccaggtaaaatggaycgcttcatgcttgataayactaaagttgaccaagcttacacacttcttgcacaagtttacatcatggatgacagcaagacagttgaagcataccttgaatcagttaacgcttcggtagttgagtttgctcgctttgaagttggtgaaggtatcgagaaagctgcaaacgacttcgaagctgaagttgcagctacaatggcagcagccttgaataactaactaat

SEQ ID NO: 2425 - DNA, 350 bp, Streptococcus pneumoniae
  misc_feature (1)..(350): tiling:Spneumo1:WAN024C9A; Cluster includes WAN0244O0 spr0 194|rplV|15902238|NP_357788.1|198894..199238|+|345 bp|50S Ribosomal protein L22|S.pneumoniae|R6|NC_003098.1|ORF|111
atggcagaaattacttcagctaaagcaatggctcgtacagtacgtgtttcacctcgtaaatcacgtcttgttcttgataacatccgtggtaaaagcgtagccgatgcaatcgcaatcttgacattcactccaaacaaagctgctgaaatcatcttgaaagttttgaactcagctgtagctaacgctgaaaacaactttggtttggataaagctaayttggtagtatctgaagcattcgcaaacgaaggaccaactatgaaacgtttccgtccacgtgcgaaaggttcagcttcaccaatcaacaaacgtacagctcacatcactgtagctgttgcagaaaaataactaat

SEQ ID NO: 2426 - DNA, 944 bp, Streptococcus pneumoniae
  misc_feature (1)..(944): tiling:Spneumo1:WAN024D9A; Cluster includes WAN0243VM spr1 217|msrA|15903260|NP_358810.1|1213611..1214549|-|939 bp|Pe ptide methionine sulfoxide reductase|S.pneumoniae|R6|NC_00 3098.1|ORF|111
atggcagaaatttatctagcaggtggttgtttttggggcctagaggaatatttttcacgcatttctggagtgctagaaaccagtgktggctacgctaatggtcaagtcgaaacgaccaattaccagttgmtcraggaaacagaccatgcagarrcggtccragtgatttrcgatgagaaggragtgtcactcagagagattttactttattatttccgagttatcgatcctytatctatcaatcaacaagggaatgaccgtggycgccaatatcgaactgggatttattatcaggatgaagcagatttgccagctatctacacagtggtrcargagcaggaacgcatgctgggtcgaaagattgcagtagaagtggagcaattacgccactacattctggctgaagactaccaccaagaytatctcaggaagaatccttcaggttactgtcatatcgatgtgaccgatgctgataagccattgattgatgcagcaaactatgaaaagcctagtcaagaggtgttgaaggccagtctatctgaagagtcttatcgtgtcacmcaagaagctgctacagaggctccrtttaccaatgcctatgaccaaacctttgaagaggggatttatgtagatattacgacaggtgagccactcttttttgccaaggataagtttgcttcaggttgtggttggccaagttttagccgtccgatttccaaagagttgattcattattacaaggatctgagccatggaatggagcgaattgaagttcgttctcgttcaggcagtgctcacttgggtcatgttttcacagatggaccgcgggagttaggcggcctccgytactgtatcaattctgcttctttacgctttgtggccaaggatgagatggaaaaagcaggatatggctatctattgccttacttaaacaaataactaat

SEQ ID NO: 2427 - DNA, 632 bp, Streptococcus pneumoniae
  misc_feature (1)..(632): tiling:Spneumo1:WAN024FEL; Cluster includes WAN0243LH spr1 583|gmk|15903625|NP_359175.1|1563890..1564516|-|627 bp|Gua nylate kinase|S.pneumoniae|R6|NC_003098.1|ORF|111
atggcagaccgaggcttactaatcgttttttctggtccttcaggggttggaaaaggaacggttagaagagagatttttgagagttctgaaaaccaatttcaataytctgtatcgatgacgacacgcgcacaacgtcctggagaagtggacggtgttgactatttcttccgtactcgtgaagaatttgaagagctgattcgtcaaggacagatgttggaatacgcagaatatgtcggyaactactatggaactcctctgacctatgtcaatgaaaccttggacaagggaatcgatgttttccttgaaattgaagttcagggtgctcttcaggtcaagaaaaaggttccagatgctgtctttatcttcctgacaccaccagatttggatgaattgcaagatcgcttggtaggtcgtggaacagatagtgcagaagtgattgcccaacgaatcgaaaaggccaaggaagaaattgccctcatgcgtgagtatgattatgcsattgtcaacgatcaggtryccctagytgctgaacgtgtcaaatgtgtgattgaagcagaacayttctgtgtggatcgtgtcattggtcactatcaggagatgttaccaaaatctccaactacccgataactaat

SEQ ID NO: 2428 - DNA, 883 bp, Streptococcus pneumoniae
  misc_feature (1)..(883): tiling:Spneumo1:WAN024COE; Cluster includes WAN023IOP 8592 1_2759a||||1567350..1567835|-|486 bp|EGAD orf prediction|S .pneumoniae|TIGR4|WAN01UC25|ORF|032
atggcagacgaactaattagtattgtagttccaatctacaaygttgagaattatttgcgaatgtgtttggatagcattcagaatcagacgtatcaaaattttgagtgtttattaatcaatgatgrctctccagatcattcatccaaaatatgtgaagaatttgtagagaaagattctcgtttcaaatattttgagaaagcaaacggcggtctttcatcagctcgtaacctaggtattgaatgttcgggggggggcgtacattacttttgtagactykratrattggttggaacatgatgctttagaccgattatatggtgctttgaaaaaggaaaacgcagatattagtatcgggcgttataattcttatgatgaaacacgctatgtgtatatgacttatgttacggatccagatgattctctrgaagtgatagaaggtaaagcaatyatggatagggaaggtgtcgaagaagtcagaaatgggaactggactgtagctgtcttgaagttattcaagagagagttactacaagatttaccatttcctataggaaaaattgcagaggatacttactggacatggaaggtacttctaagagcttcgaggatagtctatttgaatcgttgtgtttactggtaccgtgttggtttatctgatactttatcgaatacatggagtgaaaagcgtatgtatgatgaaattggggctagggaagaaaagatagctattttagcaagttcagactatgacttgaccaatcatattttgatttataaaaatagattacaaagagtgatagcaaaattagaagaacaaaatatgcagttcacagagatttayagaagaatgatggaaaaattgtctttacttccgctarctaat

SEQ ID NO: 2429 - DNA, 824 bp, Streptococcus pneumoniae
  misc_feature (1)..(824): tiling:Spneumo1:WAN024D9W; Cluster includes WAN0243Y7 spr1 124||15903167|NP_358717.1|1125526..1126344|-|819 bp|Conser ved hypothetical protein|S.pneumoniae|R6|NC_003098.1|ORF|1 11
atggcagatataaaattratygcattggacttggacgggaccttgctgactactgataaaaggctgacggatcgtaccaaggaaaccttgmaagctgcgcgtgatcgtggtatcaaggtcgtattgacaactggtcgtcccttaaaagcyatggatttctttctccatgagytagggactgacggtcaggaagatgagtataccattacttttaatggtggwttrgttcagaaaaatacaggwgaaatccttgataaracagtcttttcatatgatgatgtggcacgyttgtatgaagaaacagagaaattatcactgcctcttgaygcyatctcagaaggaacwgtttatcaaatycaatcggaccaagaaagtctttatgccaaattcaatccagctttgacytttgttccagtkgaytttgaagacytrtctartcaaatgacctacaacaaatgcgtgacygcctttgctcaagaacccttggatgcagccattcagaagatttctccagaattgtttgaccaatatgaaatctttaaatcacgtgaaatgttgctagartggtcaccaaagaatgttcataaagcaacaggtttggcaaaactaatyagccatctyggaatyraycaaagycaagtkatggcytgtggtgacgaggccaatgacctytctatgattgaatgggcaggkctyggtgttgcyatgcaaaacgctgttcctgaagtmaaggcagycgcaaatgtrgtraykcckatgaccaaygatgargaagctgtcgcctgggctatcgaagaatatgtgctaaaggagaactaactaat

SEQ ID NO: 2430 - DNA, 435 bp, Streptococcus pneumoniae
  misc_feature (1)..(435): tiling:Spneumo1:WAN024CAW; Cluster includes WAN0242FA SP11 40||15901006|NP_345610.1|1069910..1070338|+|429 bp|hypothe tical protein|S.pneumoniae|TIGR4|NC_003028.1|ORF|010
atggcaggaaatgaaaatgataaccttacgtccaagcaaattaaattcatagatgccatgcttaccgagccaacgatagacaaagcatgtcaaaaagcaggggtatcacgcgcaacaggtcataagtatctaaaagttgcagcggttaaaaagacattgaggataaagcaagatgagatgatggataaaacaactcaaatgctttatttagcatcatctaacgctgtttctgtactcaatgatattatgatggacagtaaggtcaacccgtttataagaactcaagcagcaaaggctatacttgaacaatcttataagacccatgaaatttttggagtagtaaggcagattgaagaattgaggttggaaattgaggaagtatctaaaggaaatcaaagagttacaagaactcaaggagttattaagctaactaat

SEQ ID NO: 2431 - DNA, 160 bp, Streptococcus pneumoniae
  misc_feature (1)..(160): tiling:Spneumo1:WAN024DOS; Cluster includes WAN0242A3 SP13 39||15901193|NP_345797.1|1261682..1261819|-|138 bp|hypothe tical protein|S.pneumoniae|TIGR4|NC_003028.1|ORF|252
atggcagmagaagtattaaatcttcaattagtatctgttcaagttgacgaaacagatgaagttgatggaatgcgatttagtacattcagtacaaaycgttgcggtaactggagtgcttttagttgggaaaattgttaaytmatttaaattgctaactaat

SEQ ID NO: 2432 - DNA, 894 bp, Streptococcus pneumoniae
  misc_feature (1)..(894): tiling:Spneumo1:WAN024GI4; Cluster includes WAN023PI6 pne3 4_10||||7708..8601|+|894 bp|Type 17F capsule operon, Glimm er 2.02 orf prediction|S.pneumoniae||WAN01UCHZ|ORF|000
atggcagtaaaattaaaatatgataaatcagatattayatttttagatgatgacgrattgaaaaaataccaatcagaattgttgaaaatgatatcagatgtgtttactttttttgatgaaaatgggatagcgtattctttaagtggaggtagcattttaggggcaatccgtcataaagggtttatcccttgggatgatgatgttgatatcaatattccgagggaaagttacgataaactattttctctatttgagtcagacaatagtcttagtcgtaaatattatcttcaatcagcaaaaagtcatccagaattrggacttcatgtttctcaaattagaaaaaaaggaacagttgctcgtaggaaatacgatcattcggctgaggagtgcggtatttctatagatctttacattgtagaaaatgtatacaataatccagtgaaacgattctttcaaggttatacaagtatgtttttgacttttgccttggcttctgtacgagaaacaaagaaycatgccctgatgaaggaaatgtttagactggaaggtagaaaactaaattattcarytggaaagttaatggttggttggttttttggaattattccaattgaaaagtggttgaattggcttgataaatgtaattcaagctgtaaggattcacatacaaaatatgtatccatacctacaggaaggaaacactttagacgcgagacttacttgcgagagaatatgaatatttataaaaaggttccttttgaaactttgatggtgaatgttcctgtttggtcagaagagtatttagaaatgttttacggtaaagattatatggtcgttcctcctgttgataagagagagcaacatttgtttttagagttgagttacggagaagaa

SEQ ID NO: 2433 - DNA, 188 bp, Streptococcus pneumoniae
  misc_feature (1)..(188): tiling:Spneumo1:WAN024CYK; Cluster includes WAN0243BI spr1 943|rpmF|15903984|NP_359534.1|1924956..1925138|+|183 bp|50 S Ribosomal protein L32|S.pneumoniae|R6|NC_003098.1|ORF|12 0
atggcagtacctgcacgtcgcacttcaaaagcgaagaaaaacaaacgtcgtacacactacaaagtaacagctccatctgtaaactttgacgaaactactggagattactcacgttctcaccgtgtatcacttaaaggatactacaaaggacgtaaaatcrctaaagctgcatcagctgaataactaat

SEQ ID NO: 2434 - DNA, 225 bp, Streptococcus pneumoniae
  misc_feature (1)..(225): tiling:Spneumo1:WAN024CDY; Cluster includes WAN023RTU cont ig_1606_3||||1320..1544|-|225 bp|Glimmer 2.02 orf predicti on|S.pneumoniae|670|WAN01UDD2|ORF|000
atggcagtagtatcattggaaaataatattaaactatatagttcagaattatttcaagcactattaaaagcctctaattataaattggataagcgtattgctcagactgttgcagaaggctatgctcgtaatctagattattctgatcctgaactgatgcatgttggtgtaacttcggttgctaacaatctgcttacaaaaattaaacaagagtattttaatgta

SEQ ID NO: 2435 - DNA, 230 bp, Streptococcus pneumoniae
  misc_feature (1)..(230): tiling:Spneumo1:WAN024DIS; Cluster includes WAN0244IW spr0 378|acp|15902422|NP_357972.1|378108..378332|+|225 bp|Acyl carrier protein|S.pneumoniae|R6|NC_003098.1|ORF|111
atggcagtatttgaaaaagtacaagaaattatcgttgaagaacttggaaaagacgcatcagaagtaacacttgaatcaacttttgatgatttggacgcagattcattggacttgttccaagtaatctcagaaatcgaagatgcttttgatatccaaatcgaagcagaaaatgacttgaaaacagttggtgacttggttgcttacgttgaagagcaagcaaaataactaat

SEQ ID NO: 2436 - DNA, 785 bp, Streptococcus pneumoniae
  misc_feature (1)..(785): tiling:Spneumo1:WAN024GGK; Cluster includes WAN0244EF spr0 539|estA|15902583|NP_358133.1|539428..540207|+|780 bp|trib utyrin esterase|S.pneumoniae|R6|NC_003098.1|ORF|221
atggcagtratgaaaatcgagtattactcacaagtattggatatggagtgggggrtgaatgtcctctaccctgatgccaatcgagtggaagaaccagagtgtgaagatattcccgtcttgtaccttttgcacgggatgtctggaaatcataatagttggcttaagcggaccaatgtagaacgcttgcttcgaggaactaatctcatcgttgttatgcccaataccagcaatggttggtacaccgatacccagtatggttttgactactacayggctctagcagaggaattgccacaggttctgaaacgcttcttccctaatatgackagcaagcgtgaaaagacctttatmgctggtctttctatgggaggctacggctgyttcaaactggctcttrcgacaaatcgtttttctcatgcagctagtttttcaggtgccctcagctttcaaaacttttctcctgaaagtcaaaatctgggaagtccagcctactggagaggtgtttttggagagattagagactggacaactagtccctattctcttgaaagtctggctaaaaaatcggataaaaagaccaaactttgggcgtggtgtggcgaacaggatttcttgtacgaagccaataatctcgcagtgaaaaatctcaaaaaactaggttttgatgtgacctatagccatagygctggaactcacgagtggtactactgggaaaaacaattggaagtttttttaacaacyctaccaattgatttcaaattagaagagagactgacttarctaat

SEQ ID NO: 2437 - DNA, 884 bp, Streptococcus pneumoniae
  misc_feature (1)..(884): tiling:Spneumo1:WAN024FLB; Cluster includes WAN0243RM spr1 361|atpG|15903404|NP_358954.1|1343887..1344765|-|879 bp|Pr oton-translocating ATPase, F1 sector, gamma-subunit|S.pneu moniae|R6|NC_003098.1|ORF|111
atggcagtrtctctaaatgatattaaaacaaaaatcgcctcaacaaaaaatacgagtcaaatcactaatgccatgcaaatggtatcggctgctaagytaggtcgytctgaagaagctgctcgcaacttccaagtttacgctcagaaagtgcgtaaacttttgacagatatccttcatggtaatggagctggtgcttcaactaatccgatgttgattagccgttctgtgaagaagacaggctatatcgttatcacttcagaccgcggtttggttggaggttataattcctctattttgaaagctgttatggagttgaaagaagaataccacccagacggtaaaggttttgaaatgatctgtatcggtgggatgggagctgatttctttaaggctcgcggtattcaaccactttatgaattacgtggcttgkcagaccaacctasctttgatcaagttcgtaagattatttcaaaaactgttgaaatgtaccaaaatgaactctttgatgagctttatgtttgctacaaccaccatgtcaatacgctaaccagtcaaatgcgtgtggaacaaatgcttccgattgttgacttggatccaaatgaagcggatgaagagtacagcttgacttttgaattggaaaccagccgagaagaaattctggagcagttgttgcctcagtttgcagaaagtatgatttacggtgccattatcgatgccaagacagctgagaatgctgcgggyatgacagccatgcaaacagcgacagataatgctaagaaagtcatcaatgatttracaattcagtataaccgtgccagacaggcggckattacacaagaaattacagaaatcgtagcaggtgctagtgccttagaatarctaat

SEQ ID NO: 2438 - DNA, 278 bp, Streptococcus pneumoniae
  misc_feature (1)..(278): tiling:Spneumo1:WAN024DF9; Cluster includes WAN0244AG spr0 682|rpsP|15902726|NP_358276.1|686482..686754|+|273 bp|30S Ribosomal protein S16|S.pneumoniae|R6|NC_003098.1|ORF|111
atggcagttaaaatccgtttgactcgtatgggttctaagaaaaaacctttctaccgtatcaacgtagcagattcacgttcaccacgtgacggacgtttcatcgaaacagttggaacttacaacccacttgttgctgaaaaccaagtaactttgaaagaagaccgcgttcttrcatggttggctaatggagctcaaccttcagacacagtacgtaacatcctttcaaaagaaggcgtattgaaaaaattccacgattctaaattttcaaaataactaat

SEQ ID NO: 2439 - DNA, 662 bp, Streptococcus pneumoniae
  misc_feature (1)..(662): tiling:Spneumo1:WAN024GDB; Cluster includes WAN0244AY spr0 664||15902708|NP_358258.1|667600..668256|+|657 bp|Conserve d hypothetical protein|S.pneumoniae|R6|NC_003098.1|ORF|111
atggcagttaaagattttatgacccgcaaggtagtttatattagtccagatayaacagtatctcatgcagcagatttgatgagagagcaagrwttgcaycgyytgcctgttatcgaaaatgatcaattrgttggtttggtgactgagggaaccattgcacaagcaagtccatctaaagcaacaagtctttctatmtatgagatgaattatcttctgaataagacaaaagtaaaagatgtcatgattcgcgatgttgtcactgtctcaggctatgctagtctagaagatgcaacttatctgatgttgaaaaataagattrgtattctccctgtcgtagataaccatcaagtatacggagttattactgaccgtgaygttttccaagcctttcttgaaattgcaggttatggcgaagaagggattcgtgtacgctttgttacagaagatgaagttggtgttcttggaaaaattgtttctttgattgtagaagaaaatttgaatatctcccatacagtcaatattccgcgtaaggatggtaaggtgattatcgaagtgcaaatcgatgratcaattgatttaccagccttgaaagaaaaatttgaagcaaatggtattcaagtggaagaaatcgytcgcacttcagcaaaagtcttgtaactaat

SEQ ID NO: 2440 - DNA, 1229 bp, Streptococcus pneumoniae
  misc_feature (1)..(1229): tiling:Spneumo1:WAN024EWT; Cluster includes WAN0243K4 spr1 632|trpB|15903674|NP_359224.1|1605311..1606534|-|1224 bp|T ryptophan synthase beta chain|S.pneumoniae|R6|NC_003098.1| ORF|111
atggcatatcargaaccaaataaagatggattttacggaaaattyggcggacgttttgtcccagaaacattgatgacagcagttttggagttggagaaggcctaycgtgaaagtcaggcagacccaagtttccaagaggaattaaaccarctyttgcgccagtaygtrggrcgkgaaactccyctttaytacgcaaaaaacttgacccagcatatyggcggagccaagatttatctcaaacgggaagaccttaaccatacaggagcccacaagattaacaatgccttaggacaagtttggcttgccaaacgcatgggtaaaaagaaaattatcgcagaaacsggtgctggtcagcacggtgtggcaactgcaactgctgcrgccctctttaayatggaatgtaycatctacatgggtgaggaagatgtcaaacgccaagcyctcaatgtcttccgyatggagcttttgggagcyaaggtcgaggcygtracagatggttcgcgcgtgctcaaggatgcggtcaatgcagcccttcgttcatgggtrgctaatatcgaygatacccactatatccttggttctrccttggggcctcatccatttccagaaatcgttcgtgacttccaaagtgtcatcggtcgmgargctaaacaacagtaycgygaywtgacaggwcraratctgccmgatgcyctagtagcctgtgttggtggtggrtckaatgcyatyggkctcttccatccmtttgtasaasatgagtcwgtagcyatgtatggrrctgaagcrgcwggryttggtgtrgayacrgagcaccacgcwgctaccttgaccaagggtcgtccrggtgtycttcacggttcyctcatggatgtrctccaagatgcycatggtcaaattcttgaagccttctctatctcrgcaggtttggactatcctggtatyggtccagarcattctcactaccacgatatyaaacgtgccagctatgtycctgtracrgacgaagaagcyttggaaggattycaactcttgtctcgtgtggaagggattatcccagcyttggaatctarccatgctatcgcytttgcrgtgaaattggccaaagaacttggaccagaaaagtctatgattgtmtgcctatcrgktcgtgggracaaggatgtggttcaagtcaargaccgcttggaagcagatgcagcaragaagggagaagctcatgcctaactaat

SEQ ID NO: 2441 - DNA, 234 bp, Streptococcus pneumoniae
  misc_feature (1)..(234): tiling:Spneumo1:WAN024G8V; Cluster includes WAN02445R spr0 851||15902895|NP_358445.1|847414..847641|+|228 bp|Hypothet ical protein|S.pneumoniae|R6|NC_003098.1|ORF|111
atggcatcaagtaagaactatttggaatttgttttggaacaattatcaggattagatgatgtgacttaccgttccatgatgggggagtatattctttacttccgcggcaagattattggcggyatttatgaygatcgctttttagttaaacccgtgcaagcagtcttagataagattgaccaatcttcttttgagtttccatacaaaggtgccaaagaaatgattykaactaat

SEQ ID NO: 2442 - DNA, 138 bp, Streptococcus pneumoniae
  misc_feature (1)..(138): tiling:Spneumo1:WAN024G9E; Cluster includes WAN023YM5 AL44 9928.1_82||||63702..63839|+|138 bp|Glimmer 2.02 orf predic tion|S.pneumoniae||AL449928.1|ORF|001
atggcatctagtaaatcgatttttatgattcgctattcttgtctattgattagtccgtattttaaaatattagcaaaaaagcaaatagcagtaacttctgtctatttgcttttcttttttatagaatatatttctcaa

SEQ ID NO: 2443 - DNA, 770 bp, Streptococcus pneumoniae
  misc_feature (1)..(770): tiling:Spneumo1:WAN024DFI; Cluster includes WAN0244B0 spr0 662|livG|15902706|NP_358256.1|665712..666476|+|765 bp|ABC transporter ATP-binding protein - branched chain amino aci d transport|S.pneumoniae|R6|NC_003098.1|ORF|111
atggcattacttgaagtaaaacagttaaccaaacattttggtggtctaacagctgttggagatgtgactcttgaattgaacgaaggggaactggttggattaatcggtccaaacggagctgggaaaaccacccttttcaaccttttgaccggtgtttatgaaccaagygagggaacagtaacyctagatggtcaccttttgaatgggaaatcaccttataagattgcctctttgggacttggacgtactttccaaaatatccgtctytttaaagatttaacagttttagayaatgttttgattgcttttggaaaccatcacaaacarcatgtttttactagtttcttacgcttaccagctttttacaagagtgaaaaagaattaaaggctaaagctttggaattgttgaaaatctttgatttagatggtgatgcagagactcttgctaaaaatctttcctacggacaacaacgtcgtttggaaattgttcgtgcccttgctacggaacctaaaattctcttcttagatgaaccagcagcaggtatgaacccacaggaaacagccgaattgactgagttaattcgtcgtatcaaagatgartttaagattacaatcatgttgattgaacacgatatgaatctggtcatggaagtaacagaacgtatctacgtacttgaatatggccgtttaatygctcaaggaactccagacgaaattaagaccaataaacgcgttatcgaagcttatctaggaggtgaagcctaactaat

SEQ ID NO: 2444 - DNA, 449 bp, Streptococcus pneumoniae
  misc_feature (1)..(449): tiling:Spneumo1:WAN024FXS; Cluster includes WAN0243WS spr1 175|flaV|15903218|NP_358768.1|1175032..1175475|-|444 bp|Fl avodoxin|S.pneumoniae|R6|NC_003098.1|ORF|110
atggcattagcaaaaattgtatttgccagtatgaccggtaataccgaagaaattgcagatattgtagcagacaaattacgtgacttgggcttggatgttgatgttgatgaatgtacaactgttgacgcttcagacttcttggaagcagacatcgctatcgttgcgacctatacttatggtgatggtgaattgccagatgagatgatggacttctacgaagayytagcagatctcaacttgaatggcaaaatytacggagtggtcggctcaggagataccttctacgatgaattctgtaaggctgttgatgactttgaccgtgtctttgtktcaacaggagcagaaaaaggttcwgagtgtgtyaaagttgatctttctgccgaggaagaagatattgaacgcttggaacaattcgcagaagaattggytgctaaagtaggataactaat

SEQ ID NO: 2445 - DNA, 249 bp, Streptococcus pneumoniae
  misc_feature (1)..(249): tiling:Spneumo1:WAN024G3F; Cluster includes WAN023LES 3151 24_1997||||1078990..1079238|+|249 bp|EGAD orf prediction|S .pneumoniae|R6|NC_003098.1|ORF|110
atggcattcaacttaatagtaattccacgttcccgctctagmtccatgctatccaaaagctgggcctgcatttcacgacttgaaaccgtctctgttttttccaaaatgcggtctgctagagttgatttyccgtggtcaatatgggcgataatagagaagttacggatcttcycctgtcgttttttcaattcttctaagttcatgattctcttcctttcagggtatctatttattataaattgtttttga

SEQ ID NO: 2446 - DNA, 500 bp, Streptococcus pneumoniae
  misc_feature (1)..(500): tiling:Spneumo1:WAN024C8P; Cluster includes WAN0244NO spr0 206|rpsE|15902250|NP_357800.1|204321..204815|+|495 bp|30S Ribosomal protein S5|S.pneumoniae|R6|NC_003098.1|ORF|111
atggcatttaaagacaatgcagttgaattagaagaacgcgtagttgctgtcaaccgtgttacaaaagttgttaaaggtggacgtcgtcttcgtttcgcagctcttgttgttgttggtgaccacaatggtcgcgtaggatttggtactggtaaagctcaagaagttccagaagcaatycgtaaagcagtagatgatgctaagaaaaacttgatcgaagttcctatggttggaacaacaatcccacacgaagttctttcagaattcggtggagctaaagtattgttgaaacctgctgtagaaggttctggagttgccgctggtggtgcagttcgtgccgttgtggaattggcaggtgtggcagatattacatctaaatcacttggttctaacactccmatcaacattgttcgtgcaactgttgaaggtttgaaacaattgaaacgcgctgaagaaattgctgcccttcgtggtatttcagtttctgatttggcataactaat

SEQ ID NO: 2447 - DNA, 1037 bp, Streptococcus pneumoniae
  misc_feature (1)..(1037): tiling:Spneumo1:WAN024F8I; Cluster includes WAN0243ML spr1 542|aroF|15903585|NP_359135.1|1524246..1525277|-|1032 bp|h ospho-2-dehydro-3-deoxyheptonate aldolase (DAHP synthatase ); possibly tyr-se...|S.pneumoniae|R6|NC_003098.1|ORF|221
atggcatttattgaaaaaggtcaagaaatcgatatggaagtcatcaaggctgaaacccaattgtctgcrgaagccttgagactcaaggaaagccgtgacagggaattggcagatattatttcaggggaagatgaccgtattctcttggtgattggtccttgctcttctgataatgaagaggcggtcttggaatatgctcgccgtttatcygccttgcaaaagaaggtagcggataagattttcatggtcatgcgcgtgtatactgctaagcctcgtaccaatggagacggctataaaggrttrgttcaccagccagatacttctaaggctccaascctgattaayggcttgcaggctgtgcgccagttgcactaccgcgtgattacagagactggtttgacaacggcagatgagatgctttatccgtcaaatctgatcttggtggatgacttggtcagctaccatgccgttggagctcgttctgtggaagaccaagagcaccgctttgtggcttctgggattgatgcaccagtagggatgaaaaatccaacctcaggaaatttgggtgttatgtttaacgccatctatgctgctcaaaacaagcaaaccttcctttatcatgggcaggaagttgagacatcaggtaatcctttggcccatgttatcctccgtggagcagtcaacgagtatggcaattatatgccgaattactactatgaaaayctactccaagccattgaacgctatgaaaccatgggacttgaaaatccttttatcctcattgacaccaaccatgataactcaggcaagcaatatatggagcagattcgaattgttcgccagaccttgcagaatcgtgattggaatgagaaaattaaaaagacggttcgaggatttatgattgaatcttacctagcagatggtcgtcaaaaccaaccagagrtctttggttgctctattactgacccttgcctaggttgggaaaatacagaggccttggtagaagagatttatgttaccttgacaaaataactaat

SEQ ID NO: 2448 - DNA, 353 bp, Streptococcus pneumoniae
  misc_feature (1)..(353): tiling:Spneumo1:WAN024DPC; Cluster includes WAN02441M spr1 000||15903044|NP_358594.1|983807..984154|-|348 bp|Hypothet ical protein|S.pneumoniae|R6|NC_003098.1|ORF|111
atggcatttgaaaaaatcattcagttaaaaaattgtcgttacgattacactcttagyccttctgttaaaaaattcaccctcaaagataacaccttttttgaaactaaggttggtaactatgaactgactcgccttttggaaaaagtgccaaacagcggtgaaggcttccaactcaaaatcatcattaacaaggaacttacaggggctaaaatcaatatcactgacaagtttggccttcgtctagttgatattttcaaatcagaagaccaccatattcatcaggaaaaattctacttcctcatggatagcttggtagaacgtggtgtctttacaaaatcggaaagatarctaat

SEQ ID NO: 2449 - DNA, 1578 bp, Streptococcus pneumoniae
  misc_feature (1)..(1578): tiling:Spneumo1:WAN024F8U; Cluster includes WAN0243X1 spr1 166|ffh|15903209|NP_358759.1|1168744..1170315|-|1572 bp|Si gnal recognition particle (Fifty four homolog)|S.pneumonia e|R6|NC_003098.1|ORF|111
atggcatttgaaagtttaacagaacgtttgcagaacgtctttaaaaatctacgtaaaaaaggaaaaatctctgaatctgatgtccaagaggcaaccaaagaaattcgcttggccttgctcgaggccgacgttgccttgcctgttgtaaaggactttatcaagaaagttmgtgagcgtgcagtcgggcatgaggtcattgatacrcttaatcctgcgcaacagattattaaaatcgttgatgargaaytgacagccgttttaggttctgatacggcagaaattatcaagtcacctaagattccaaccatcatcatgatggttggtttacaaggggctggtaaaacaacctttgctggtaaattggccaacaaactcaagaaagaagaaaatgctcgtcctttgatgrttgcggcggatatttatcgtccagctgccattgaccagcttaagaccttgggacaacagattgatgtgcctgtctttgcacttggaacagaagtaccagctgttgagattgtacgtcaaggtttggagcaagcccaaactaatcataacgactatgtcttgattgatactgcgggtcgtttgcagattgatgagctcctcatgaatgagcttcgtgatgtgaaarcattggctcaaccaaatgaaatcttgcttgtcgttgatgctatgattggtcaggaagcagccaatgttgcgcgtgagtttaatgctcagttggaagtgactggggtcatccttaccaagattgatggcgatactcgtggtggtgctgctctgtctgttcgtcacattactggaaaaccaatcaagttcactggtacaggtgaaaagattacggacattgaaaccttccacccagaccgcatgtctagccgtatccttggtatgggggatatgctcactttgattgagaaagcttctcaggaatacgatgaacaaaaagcccttgaaatggctgagaagatgcgcgaaaacacctttgattttaatgatttcatcgatcaattagatcaggtgcaaaatatggggccgatggaagamttgctcaagatgattccaggtatggcmaacaatccagcmcttcaaaacatgaaggtggatgaacgccagattgctcgtaaacgtgccattgtgtcttcgatgacacctgaagarcgtgaaaacccagatttgttaaatccaagccgtcgccgtcgtattgctgctggttctggaaatacattcgtcgaagtcaataaattyatcaaggactttaaccaggctaaacagctcatgcagggtgttatgtctggggatatgaataaaatgatgaagcaaatggggattaatccaaataaccttcctaaaaatatgccraatatgggrggaatggatatgtctgcccttgaaggaatgatgggacaaggcggtatgcctgacttatcagctctcggaggagcaggaatgccagatatgagccagatgtttggtggcggtttgaaaggtaaaattggtgaatttgcyatgaaacagtccatgaaacgtatggctaacaaaatgaagaaagcgaagaagaaacgcaagsyractaat

SEQ ID NO: 2450 - DNA, 141 bp, Streptococcus pneumoniae
  misc_feature (1)..(141): tiling:Spneumo1:WAN024DPD; Cluster includes WAN0242GX SP10 78||15900947|NP_345551.1|1014397..1014531|+|135 bp|hypothe tical protein|S.pneumoniae|TIGR4|NC_003028.1|ORF|121
atggcatttggagataatggaaatcgtaaaaaaactatgtttgagaaaataaccttgtttatcgtgattatcatgctagtagcaagtttattgggaatttttgcaactgcaattggtgccctcagtaatctactaactaat

SEQ ID NO: 2451 - DNA, 219 bp, Streptococcus pneumoniae
  misc_feature (1)..(219): tiling:Spneumo1:WAN024DC2; Cluster includes WAN02443H spr0 933||15902977|NP_358527.1|919628..919846|+|219 bp|Hypothet ical protein|S.pneumoniae|R6|NC_003098.1|ORF|120
atggcayttaactataaaccattatggatacagttagcaaaaaaaggactaaagaaaacagatgtaatagctatggcaggacttacaacaaatgttatggcacaaatgggaaaggataaaccaattacatttaagaatttagaaagaatatgtaaggctttatcttgcactcctaatgatattattagttttgaagataattttagtgacgaggaatag

SEQ ID NO: 2452 - DNA, 1079 bp, Streptococcus pneumoniae
  misc_feature (1)..(1079): tiling:Spneumo1:WAN024FHR; Cluster includes WAN0243OG spr1 475||15903518|NP_359068.1|1455671..1456744|+|1074 bp|Hypot hetical protein|S.pneumoniae|R6|NC_003098.1|ORF|111
atggccaatatttttgactatctgaaagatgtcgcatatgattcttattacgaccttcccttgaatgagttagacattctaaccttaatagaaatcacctacctctcctttgataatctggtctccacacttcctcaacgtcttttagatctagcacctcaggttccaagagakcccaccatgcttactagcaaaaatcgccttcaattattagatgaattggctcaacacaagcgcttcaaaaattgcaaactctcccattttatcaacgacatcgaccctgaactgcaaaagcaatttgcggctatgacttatcgtgtcagcctcgatacctatctgattgtctttcgtgggacagatgacagtatcattggctggaaggaagwtttccacctgacctatatgaaggaaattcctgctcaaaagcacgcccttcgctatttaaagaacttttttgcycatcatcctaagcaaaaggttattctrgcygggcattccaagggaggaaatctcgctatctatgctgctagccaaattgagcaaagtttgcaaaatcagatcacagcagtttatacatttgatgcacctggtctccatcaagaattracacagactgcgggttatcaaaggataatggatagaagcaagatattcattccacaaggttccattatcggtatgatgctggaaattcctgctcaccaaatcatcgttcagagtactgccctgggtggcatcgcccagcacgatacctttagttggcagattgaggacaagcacttcgtycaactggataagaccaacagtgatagccrgcaagtagacacaacctttaaagaatgggtggccacagtccctgacgaagaacttcagctctacttcgacctcttctttggcactattcttgakgctggtattagctctatcaatgacttggcttccttaaaggcgcttgaatacattcatcatctctttgtccaagctcaatccctcactccagaagaaagagaaaccttgggtcgccttacccagttattgattgatactcgttaccakgcatggaaaaatagataactaat

SEQ ID NO: 2453 - DNA, 246 bp, Streptococcus pneumoniae
  misc_feature (1)..(246): tiling:Spneumo1:WAN024FJ5; Cluster includes WAN023KZH 3151 76_2644||||1409308..1409553|+|246 bp|EGAD orf prediction|S .pneumoniae|R6|NC_003098.1|ORF|110
atggccacaaggacattacgaagatcacctggcggtgtcaactgttgcatattttttcggagttcacctgaagaaccaccatcatctgccaccgtcacgatagctgcgatttccacatctttttcccgcagactttttagaatgacgggamttccagtccctccaccaatcaccgttatctttggttttctcatgaacggtttaccgtttcctttctgcggtctttgtcgcgatgcccttcattaa

SEQ ID NO: 2454 - DNA, 564 bp, Streptococcus pneumoniae
  misc_feature (1)..(564): tiling:Spneumo1:WAN024FE8; Cluster includes WAN023KSK 3138 71_2944||||1568247..1568810|+|564 bp|EGAD orf prediction|S .pneumoniae|R6|NC_003098.1|ORF|110
atggccattatgaaaaggattgaactccgcgataatacctgtkatggtcatgctaatctcctacttctgcgccacaaaaaaccaacgggtgctagtttctgttggctccttatcctcaaagtctgcatagagtttgaaggacttaaatccagcctgttccagcaagatatcataggtcaagatctcataggtcctctcctcatgtacttcatcgtggcgactaaaggaaccgtcagcctccttgataaagaaagtcagctcatgcacgatggagtgaggaacttcgtcctcatatgtatcccaaagcatggcaaaatcttccgcattttcatggtaggaatagccagggaatacttcatctgtctggtaggtcgagtgcacgtcaaagatgaaaactccctcttcattcagcgcattgtacacgtccttaaagacgtcccctacttccacctcatcctgcatatagcagatagagtccgaataacacgtgacaaaatcgtatttccctgccttggacaaattcagcatattaccttctataaaagcaatcttttgcttggctga

SEQ ID NO: 2455 - DNA, 180 bp, Streptococcus pneumoniae
  misc_feature (1)..(180): tiling:Spneumo1:WAN024DOI; Cluster includes WAN024270 SP14 54||15901304|NP_345908.1|1372248..1372370|-|123 bp|hypothe tical protein|S.pneumoniae|TIGR4|NC_003028.1|ORF|121
atggcccacggggatttgctctaccacgatggacttttcttttcagctaaaaaagaagacggtacctatgactttcatgaaaattttgagtatgtgactccttggytcaagcaagsrgayytarctawtggtgattttgaagraaccattaataaggatcattatttagcgggttatcyt

SEQ ID NO: 2456 - DNA, 307 bp, Streptococcus pneumoniae
  misc_feature (1)..(307): tiling:Spneumo1:WAN024CHC; Cluster includes WAN023MEM 3144 12_97a||||49819..50076|-|258 bp|EGAD orf prediction|S.pneu moniae|R6|NC_003098.1|ORF|220
atggcccatcttaccgatgatttgaccattcttgctggtaattccttcgatggcatggacagaaccattcggattgtacttagaatccatacttggtttaccgttaaagtcaacgtattggctgaaaatttgtccattgtcacggagctctgcaaattcctcagccgtcacgacaaacttcccttcaccgtgcgaaacaggaatagcgtggatatcgcccacttgcacaccarccaaccatggtgagttggtattggcaatgcgagtttccaccatcttggccacgtgttggttggcatcattgtag

SEQ ID NO: 2457 - DNA, 1363 bp, Streptococcus pneumoniae
  misc_feature (1)..(1363): tiling:Spneumo1:WAN024G8J; Cluster includes WAN0243MA spr1 553|serA|15903596|NP_359146.1|1534157..1535467|-|1311 bp|P hosphoglycerate dehydrogenase|S.pneumoniae|R6|NC_003098.1| ORF|221
atggccctaccaactattgccattgtaggacgtcccaatgttgggaaatcaaccctatttaatcggatcgctggtgagcgaatctccattgtagaagatgtcgaaggaktgacacstgaccgtrtytatgcaacgggtgagtrgctcaatcgytcttttagyatgattgatacaggaggaatygaygatgtmgatgctcctttcatggaacaaatcaagcaccaggcagaaattgccatggaagaagcagatgttatcgtytttgtcgtgtcyggtaaggaaggaattacygatgcagacgaatacgtagcycgyaagctttataagacccacaaaccagttatcctcgcagtyaacaaggtggayaaccctgagatgmgaaatgatatmtatgatttctatgcyctcggtttgggtgaaccaytgcctatctcatctgtccatggwatcggtacaggggatgtrctagatgckatygtrgaaaaycttccaaatgaatatgargaagaaaatccagatgtcattaagtttagcytgattggtcgtccwaacgttggaaaatcaagcttgatyaatgctatcttgggmgaagaccgtgtyattgcyagtcctgttgctggaacaactcgtgaygcyattgatacccactttacagatacagatggtcaagagtttaccatgattgatacggctggtatgcgtaagtctggtaaggtttatgaaaatactgagaartactctgtyatgcgtgccatgcgtgctattgaccgttcagatgtggtcttratggtcatcaatgcggaagarggsattcgtgartacgacaagcgtatcgcwggatttgcycatgaagctggtaaagggatgattatcgtggtcaacaagtgggatacgcttgaaaaagataaccacactatgaaaaactgggaagaagatatccgtgagcagttccaatacctgccttacgcaccgattatctttgtatcagctttaaccaagcaacgtctccacaaacttcctgrgatgattaagcaaatcagcgaaagtcaaaatacacgtattccatcagctgtcttgaacgatgtcatcatggatgccattgccatcaacccaacaccgacagacaaaggaaaacgtctcaagattttctatgcgacccaagtggcaaccaaaccaccaacctttgtyatctttgtcaaygaagaagaactcatgcacttttcttacctrcgtttcttggaaaatcaaatccgcaaggcctttgtytttgagggaacaccgattcatctcatcgcaagaaarcgyaaataamwaaktagaatctggaatgacagttccggatttttttgatataataaaataa

SEQ ID NO: 2458 - DNA, 2402 bp, Streptococcus pneumoniae
  misc_feature (1)..(2402): tiling:Spneumo1:WAN024FEO; Cluster includes WAN0243LJ spr1 581|priA|15903623|NP_359173.1|1561089..1563485|-|2397 bp|P rimosomal replication factor Y|S.pneumoniae|R6|NC_003098.1 |ORF|111
atggccctagctaagattatcgtagatgtgcccttgatgcagacggaccagccctatagttacaggattccggaggaatttgagggaatgctggaagttgggatgcgggttcatgtrccttttggtaagggkaatcgcctgattcaagggattgttcttggtttgragtcccaatcagatggagaagagatggagcaagatttaaaagatattgcagaggtgctggatttttctcctgttctcacgccagaacaactctggctggctgaggagttacgcaaatctgtcttctcctacaaaatytctatcctcaaggccatgcttccaggrtttctgaattctagctatgacaagattctctatcctctggaaggcttgagtcaggaagaacgagtgcgcctgtttggttcagaagattcgctagccttttcttcwctrgayytwgsyaagcaagctgaaatgatgcgtttgactagaaaaggcctgcttggtctggaatatcaggcagtcgatcaaaagaaggtcaagacccagtcttggtatgaggttgaccatgcycaattagaaggtgttgagatttctacacgtgccaagaaaaagttggaactgagagattatctgctgtctcatccagagagcgcttccttggctagcttgttagagtcctactcgcgagagcaagtcaacttctttgtggatcaaggtgctgttaccatagtccaaaaggaagttcracgctcggctgcytattttgaaggaattgaagcaagtagacctttggagttaaatccagaacaaagacaggygcgtgatgcggttgtgagttctattggcagttctcaacctccctttctacttcaagggattacaggaagtgggaagaccgaggtttacttgcagattatccaaggtgccctggataagggcaagacagctattttgctggtacctgagatttccttgactcctcagatgaccgagcgttttatagcacgttttggggacaaggtagccattcttcactcaggattatccaatggtgaaaagtatgatgaatggcgcaaggtggagcgtggcgatgcccaagttgttgttggtgccagatctgctatctttgctcctctgaaaaatctgggtgtcatgattattgatgaagagcatgaagyggcttataagcaggacagcaatccccgttaccatgccagagakgtagctattttacgggctcagtataatcaagcaactctggtacttggatctgcaacgccgagcttagagagccgggcacgtgctggcaaaggcgtctatcaacacttacgtctaacccaacgtgcyaatcctttggctacaatccctgaggttcaagtgattgactttcgagactatatcggacaaaatgagacgtcaaactttacgcctcctttgctagaggctatccaagaccgtctggttaaaaaagagcagrtggttctcatgctcaatcgccgtggttattctagctttgtcatgtgtcgggagtgtgggacggtggatacttgtcccaactgygatatttctctgaccttgcatatggataccaagactatgaactgccattattgtggtttctcgaaggatattcctcaggtctgtcctaactgtaagagccrcagtattcgttactatgggacgggaactcagaaggcttatgatgagctagcagaactctttccccaagctcgcattytgaggatggatgtggatacgactcgaaaraaaggcagtcaccaagccttgcttgaycagtttgggcgagggraagcggatattttacttggtactcagatgattgcaaagggtttggattttcccaatgttaccctagtcggagttctaaatgcggatacggccttgaatctgcctgatttccgttcttctgagagaaccttccagctcttgactcaggtggcaggtcgakcaggtcgkgctgaaaargcaggtcaagtcttgatacagtcctacaatycgcagcactatgctattcgatttgccaaggatcaagattacgaaggcttttatgcctatgaaatgggaatcagacgacaactcggctatccaccttactatttcacgattggtattaccctttctcacaagaaagaagaagaggttttcaaacgtgcctatgaagtcatgaacattttgcggtcaggcttgtcagagaccagtcccattctggggccaacgccaaaaccgattgcccgtacccacaacctctatcattaccagattttaattaaataccgtttagaagatgagctggggycgaccctcaaccaggtyytrgccttgactcaagaacgggaaaatagtgagctccgtctcagcattgaccatgagccgcagcaatttttataactaat

SEQ ID NO: 2459 - DNA, 348 bp, Streptococcus pneumoniae
  misc_feature (1)..(348): tiling:Spneumo1:WAN024G6R; Cluster includes WAN023LJK 3146 43_1783||||959718..960065|-|348 bp|EGAD orf prediction|S.p neumoniae|R6|NC_003098.1|ORF|110
atggccttaacttgctcgtcttcacaaagtttagcatattcaaaagcaatattcatatttgattttgacaaaaccatatcaacatttgaaagaagcgattggaagaaaggccaattttggtacatatctcgtaagatagcaatattctctggatttttattgataaattccttgaagcttgaaccaaccccgtaccatccagggaacataacacgactctgtgaccatgagaatacccaagggatrgcacgcaawccaccgatttcagtaatagtcttacgagcggctggacgagaaccaatattaaaacttgaaatagccttgattggacttgactcgaagaaataa

SEQ ID NO: 2460 - DNA, 1709 bp, Streptococcus pneumoniae
  misc_feature (1)..(1709): tiling:Spneumo1:WAN024G4Q; Cluster includes WAN02440A spr1 048|acoL|15903092|NP_358642.1|1042274..1043977|-|1704 bp|D ihydrolipoamide dehydrogenase|S.pneumoniae|R6|NC_003098.1| ORF|221
atggccttagaagtaattatgccaaaagccggcgtggatatgacagaaggacaaatcgtccaatggaataaaaaagtcggagaatttgtaaaagaaggagaaatccttttggaaatcatgactgataaagtcagcatggaattggaagccgaagaagatgggtacttgattgccattctcaaaggagatggtgaaactgtccctgtaacggaagtwatcggttaccttggtgaagaaagggaaaacatcccaacagctggagcagcatcgccagaagctagcyctgtacctgtagcaagtacctcaaacgatgatgrtaagagcgatgatgcttttgatatcgttgtgattggtggaggtcctgctggttatgttgcagccattaaagctgcccaaytcggcggtaaggttgcccttgttgagaaatctgaacttggtggaacctgcttaaaccgtggatgtattccaaccaagacctaccttcatarcgctgaaattattgaaaatatcggtcatgctgcaaatcgtggtatcgtgattgaaaatcctaacttcactgttgatatggaaaaacttttagaaactaaatctaaagttgttaatactcttgttggtggtgttgcaggacttcttcgtagctacggagttrctgttcataaaggaattggtacaatcactaaagacaagaacgtcttggtaaatggytctgaattgcttgaaaccaagaaaatcattcttgctggtggttcaaaagtcarcaagatcaaygtccctggtatggaatctccacttgtcatgactagtgatgacattcttgaaatgaacgaagtgccagaaagccttgttatcatcggtggtggagttgtcggtatcgaactcggtcaggccttcatgacatttggttcaaaagtgactgttatcgaaatgatggaccgtatagttccagctatggatgyggaagtttctaagaaccttcgcttgatycttgagcgtaaaggaatgaccatcttgactggtactaaactgcaagaaatcattgaggaaaatggtcaacttcgtatcaaggttgaaggaaaagacgatatcatcgcaagcaaagctcttctttcaattggtcgtatgccagaccttgaaggtattggagaggttgagtttgaattggatcgtggttgtatcaaggtcamygaatacatggaaacttcagttccaggcatttatgcaccaggtgacatcaacggtactaagatgttggctcacgcagctttccgcatgggtgaagtttccgctgaaaatgcccttaaaggaaatcatgcagttgccaaattgaatttgactcctgcagccatctacactctycctgaagtagcagcagtaggtttgacagaagaacaagcccgtgagaaatacgatgttgccatcggtaagtttaactttgctgctaacggtcgtgctattgcatctgacgcagctcaaggtttcgtaaaagttatcgctgataagaaatacggagaaatccttggtgtacacattattggtcctgcagccgcagaattaataaacgaagcatcaagcatcatcgaaatggaaatyactgttgaggaaatgctgaagaccatccacgggcacccaacttactctgaagtgatgtacgaagcgtttgcagatgttctaggaatggccatycattcacctaagaaaaaataactaat

SEQ ID NO: 2461 - DNA, 555 bp, Streptococcus pneumoniae
  misc_feature (1)..(555): tiling:Spneumo1:WAN024CWK; Cluster includes WAN023M4I 3154 25_632a||||328869..329363|-|495 bp|EGAD orf prediction|S.p neumoniae|R6|NC_003098.1|ORF|110
atggccttcgctaccatatcctttaaggagaacaccttgcccaagaccatctgtrtggagattgattttcttgataccatccaaggtcataaggaatgggttttgtgcttgagaaccaaagttcatcgcgatacggtaagctgtgatatccttaactttttyccaaccttgaggattgttcataatgctacgataagcaatggcaccatcytgccaatcrackttcttgtctgcattggcatcttcagtgataacaaccttagcacttggaagttccttcgtgtattctgggaaaacaatgcccttataagctttttcccattgccattcagagctgtggattcctacatagttggcatttccgactgtttctttatargctgtcaaacgagtccagtcattcgaaccaccaccatagctgttttgagagttactccaaacaccagcagcaagcttatctgtagaaacaaatccatacatgtaacccttrgcyaratccttcattggattggttacatcgatatgatcatctccgctgacatgcgtattgtttga

SEQ ID NO: 2462 - DNA, 1172 bp, Streptococcus pneumoniae
  misc_feature (1)..(1172): tiling:Spneumo1:WAN024F5W; Cluster includes WAN0243GN spr1 757|recA|15903799|NP_359349.1|1725078..1726244|-|1167 bp|D NA recombination/repair|S.pneumoniae|R6|NC_003098.1|ORF|22 1
atggcgaaaaaaccaaaaaaattagaagaaatttcaaaaaaatttggggcagaacgtgaaaaggccttgaatgaygctcttaaattgattgagaaagactttggtaaaggatcaatcatgcgtttgggtgaacgtgcggagcaaaaggtgcaagtgatgagctcaggttctttagctcttgacattgcccttggctcaggtggttatcctaagggacgtatcatcgaaatctatggcccagagtcatctggtaagacaacggttgcccttcatgcagttgcacaagcgcaaaaagaaggtgggattgctgcctttatcgatgcggaacatgcccttgatccagcttatgctgcggcccttggtgtcaatattgacgaattgctcttgtctcaaccagactcaggagagcaaggtcttgarattgcgggaaaattgattgactcaggtgcagttgatcttgtcgtagtcgactcagttgctgcccttgttcctcgtgcggaaattgatggagatatcggagatagccatgttggtttgcaggctcgtatgatgagccaggccatgcgtaaacttggcgcctctatcaataaaaccaaaacaattgccatttttatcaaccaattgcgtgaaaaagttggagtgatgtttggaaatccagaaacaacaccgggcggacgtgctttgaaattctatgcttcagtccgcttggatgttcgtggtaatacacaaattaagggaactggtgaycaaaaagaaaccaatgtcggtaaagaaactaagattaaggttgtaaaaaataaggtagctccaccgtttaaggaagccgtagttgaaattatgtacggagaaggaatttctaagactggtgagcttttgaagattgcaagcgatttggatattatcaaaaaagcaggggcttggtattcttacaaagatgaaaaaattgggcaaggttctgagaatgctaagaaatacttggcagagcacccagaaatctttgatgaaattgataagcaagtccgttctaaatttggcttgattgatggagaagaagtttcagaacaagatactgaaaacaaaaaagatgagccaaagaaagaagaagcagtgaatgaagaagttmcgcttgacttaggcgatgaacttgaaatcgaaattgaagaataactaat

SEQ ID NO: 2463 - DNA, 866 bp, Streptococcus pneumoniae
  misc_feature (1)..(866): tiling:Spneumo1:WAN024DMA; Cluster includes WAN0244R1 spr0 085||15902129|NP_357679.1|92633..93646|+|1014 bp|Hypotheti cal protein|S.pneumoniae|R6|NC_003098.1|ORF|111
atggcgaaaacattttttattccaaataaacagagcattttaggagaacaagagattttgaatgccaagtcgatcttggccttgctagamggtttggagtcacatagctatgatgtagtctatctycgtcagcctcttaatcgtctcgartatatygagtgtgcgatagtggggcaatcacaatttctytttaaggtcagttatgctgatggtcaaaaggcttaccgtgtcgatcttcctgacctactaacaragacagactggcrgattatcaagtcatttttagatgctttgcttgcttatacagrgactgatattgaagggctagatggttttgattttgaagcttatttccaagcaagtattcaagcctatctagcagacsctgtagctcgttttacgatttgccaaggaatttttaatcctattttctttagtcgtgagaacttgaaaagctttttagaggcagatggcttggctcagtttgaagcgcgtgtgcgtgcggttcaagagacagatgcctaytttgcragagtttcmttctatcaggatggagaaggaaaagtgcatggcgtttaccatytagctcaaggagtcaagacagttttaccgagagaaccgtttgttcctgcagcctatattgagcaattggtggataaggaagtccagtgggagatygacttggttcaaatcacaggagayggctctaaaccagaagactatgaakccathgcycgcttggactatgcaaaattcytagagkyrytaccmycakcwttttaccaccarctagacgccaatcaawtagaartrcaacccatmytaggacaagattttaaaacattagcacaagaaaagtaactaat

SEQ ID NO: 2464 - DNA, 267 bp, Streptococcus pneumoniae
  misc_feature (1)..(267): tiling:Spneumo1:WAN024CAJ; Cluster includes WAN023MA4 3153 69_318a||||168033..168299|-|267 bp|EGAD orf prediction|S.p neumoniae|R6|NC_003098.1|ORF|110
atggcgacgcagggccaactccacctcatcgtgggcaattccatgaccgttatccgtgatttgaaccttcttgagaccagcttcctcaatctcaatrataatctgactagagcccgcgtcaatggcattttctaccaactctttgaccacactggcaggacgttcaatgacctctccagcygcgatttggtttgccagcatctctggcaattcaataatatgagacatctttcagcccctttctgtatctattttcctagaaattra

SEQ ID NO: 2465 - DNA, 395 bp, Streptococcus pneumoniae
  misc_feature (1)..(395): tiling:Spneumo1:WAN024DEO; Cluster includes WAN02448O spr0 746|cdd|15902790|NP_358340.1|742415..742804|+|390 bp|Cytid ine deaminase|S.pneumoniae|R6|NC_003098.1|ORF|111
atggcgactactgagttgattgaactggcaattgaaaccagcaaacatgcctatgtcccctattctcactttcctatcggagcagttttagtagcyaaagacggaartgtttacacgggagtgaatatygaaaatgytagctatcctttgaccaattgcggtgagagaacagctatttttaaggctatatctgaaggccaaagagaattttcagaattgattgtctatggtcaaactgaaaaaccgatytcrccatgtggtgcttgtcgccaagtratggyygaattttttgaacaagatytaaaagtgaccytagtcgcaaaagataaatcgacggtcgagatgayggtcggggarttacttccataytcttttacagacttaaaytarctaat

SEQ ID NO: 2466 - DNA, 285 bp, Streptococcus pneumoniae
  misc_feature (1)..(285): tiling:Spneumo1:WAN024FX8; Cluster includes WAN023L9P 3138 12_2209||||1183989..1184273|+|285 bp|EGAD orf prediction|S .pneumoniae|R6|NC_003098.1|ORF|200
atggcgagcaagttccatactatctttagtattattgcaagcaacatgggcaataatggtcaatttacctttggctaccgccatgacttcttccaaaatcaacttgcgatcttcaacgctttggtagatacattcaccagaagaaccattgacataaagaccttgaacacctttatcaatgaagtattgaacctaggcacgcgtacgctctggacttacttctccttgctcatcataacatgcgtagaaggctggaatgacaccttcgtattttttcaaatctga

SEQ ID NO: 2467 - DNA, 309 bp, Streptococcus pneumoniae
  misc_feature (1)..(309): tiling:Spneumo1:WAN024D2W; Cluster includes WAN023LCM 3148 82_2091||||1127873..1128181|+|309 bp|EGAD orf prediction|S .pneumoniae|R6|NC_003098.1|ORF|110
atggcgcaagcgctcgctraccttttctttcttggcttcagcacgwgtttgcttgcgaatccactcytcattctgctggcgagcytgatccaartgactrgcaatatcatccagttgaccytcwatatcatccaactcaaactgcttgcgaatcaaaccttgttggagatttgttttytgagttttggattcttccgcctgttgactgagcaattctgtatcaaccttctcaagattrtcaayyttttcttgragmakgcgctgratttcytcttgttcrawatyaagattgtccaattccttgcctaa

SEQ ID NO: 2468 - DNA, 312 bp, Streptococcus pneumoniae
  misc_feature (1)..(312): tiling:Spneumo1:WAN024FED; Cluster includes WAN023KG3 3139 17_3523||||1887864..1888175|+|312 bp|EGAD orf prediction|S .pneumoniae|R6|NC_003098.1|ORF|110
atggcgcgttccaaggcaagagcatccacaatctctgccgccttacgagccaaggtcggcgcatccccaaccacctgctgtttaattagttgctgggtcaaggttgaacccccactagaggaacccaaacctacaaatttccccaaggtcgcacgaatcaccgccttgggtactacacccttatgttctttaaagtgttcatcttctgtcgcaatgatagccttcttcagattttccgaaatttgctcagatgagatagaagtgcgcaacaaatcactctctatggaagcaatcaccgtcccgtccgaatag

SEQ ID NO: 2469 - DNA, 87 bp, Streptococcus pneumoniae
  misc_feature (1)..(87): tiling:Spneumo1:WAN024CIC; Cluster includes WAN023W49 AX57 0429.1_1||||144..230|-|87 bp|Glimmer 2.02 orf prediction|S .pneumoniae||AX570429.1|ORF|000
atggcggacatccaaggggataatccaacagaaaaaattgataaacttcttagattcccacctgttagggcggctgagaaggctaga

SEQ ID NO: 2470 - DNA, 543 bp, Streptococcus pneumoniae
  misc_feature (1)..(543): tiling:Spneumo1:WAN024G25; Cluster includes WAN023LDD 3156 23_2057b||||1111101..1111460|+|360 bp|EGAD orf prediction| S.pneumoniae|R6|NC_003098.1|ORF|220
atggcggagcgyacggtcgttcaagtccacaacgcgtttccagaggatacgacgttgatcaattcccagctcattcccttggtgcaagtggttgtcaatcaaggcagaaagggcattgttggcagttgtaatagcatgcatatctccagtaaagtggaggttgatgtcttccattggcagaacttgtgcatacccaccaccagcagcaccacccttgatccccatgactggaccaagagacggttcgcggatagcaatcatggttttcttgccaatcttgttcaaggcatccgcaagaccaatggtaagcgtcgactttccttcacctgcaggtgttgggttgatggcagtaaccaagatcaatttaccgactggattgctctcaactgcacgaattttatcaaagctgagtttagccttgtactttccgtacaactccaaatcgtcrtaagaaataccaagtttctctacaacatcaacaattggcttcaactcaatactctgtgcgatttcaatatctgttttcattcaaaattcctctaa

SEQ ID NO: 2471 - DNA, 211 bp, Streptococcus pneumoniae
  misc_feature (1)..(211): tiling:Spneumo1:WAN0249N9; Cluster includes WAN024E8F R6.I G_1701.2.1||||1625736..1625946|+|211 bp|Between spr1652 (- strand) and spr1653 (+ strand)|S.pneumoniae|R6|NC_003098. 1|IG|110
atggcggattgaaactaaaacactacaatatatttcttaaatagaccttctataaaagctagatttaacctcgataaaaatagatgcagtgcttctaaaatactggaatagggcatataggtaatcgtagacaagtgttttatagattgtctcgcaggagatctaatratgtatagcaagcatcactaaacatatrgratatttgyrttat

SEQ ID NO: 2472 - DNA, 234 bp, Streptococcus pneumoniae
  misc_feature (1)..(234): tiling:Spneumo1:WAN024GF2; Cluster includes WAN023LUG 3147 03_1133a||||601176..601409|-|234 bp|EGAD orf prediction|S. pneumoniae|R6|NC_003098.1|ORF|110
atggcggatttgattgcaatgggacgcaargttgtgataggaaattctcctttagataagtcgtactcggaaaaggcaccagttacatacttggaattagcaacagtcccatccttgtacttaggacgagcctgctctgagaaaacaccttcctttagaatgcgttcaatattctctttaaaaatcgtatctgcttttgtcatttcgtttcacctcattcattgtcctaactag

SEQ ID NO: 2473 - DNA, 378 bp, Streptococcus pneumoniae
  misc_feature (1)..(378): tiling:Spneumo1:WAN024CGH; Cluster includes WAN023S3Z cont ig_356_2||||603..824|-|222 bp|Glimmer 2.02 orf prediction| S.pneumoniae|670|WAN01UD9A|ORF|000
atggcgttaaaatacacaacttggaaagttactgacgaaaaagagttgaagctacgtttgacatctcatcaagctgcaactgtggaagaaaaaatcggcatgaacttgctaaagattttcatgcctgaagctggcgaagagttcactttaccgcctttgaaagttatgctgttgttagttcacggcgccttgcagcagtatgaacatgggtattcttttgaggatgtctatgatttatacgatgaatacgtggacaatggtggagaccaaacaacattcatgacagaggttttaatgccactctttgaagtatcgggttttactccacgaggaagcaaggacaagaaaacttccaagaagaaaatgacagtagtcaag

SEQ ID NO: 2474 - DNA, 468 bp, Streptococcus pneumoniae
  misc_feature (1)..(468): tiling:Spneumo1:WAN024FAO; Cluster includes WAN023KNZ 3152 08_3156||||1682827..1683294|+|468 bp|EGAD orf prediction|S .pneumoniae|R6|NC_003098.1|ORF|110
atggcgttggaagaagagatagacaatggtgatactgataatgccgaccacgtaagaggcaaagcttggtccgtagtcgttgaaatattggcctgcgtagttgtattggaacaaaggcagagtccacattttggaatcccggttcaagacaaggagtggcaacatgaagtcattccagaaccaaagggcattgatgatcatggttgtcgcatgcatcggtttcatcattgggaagatgatgcggaaataggttgtaaattgattagccccatcgatctctgctgcttcatccagactttctggaatcgagattttgatatagccaacatagagaaagagggtctgtggaatcgcataggtcaagtagagcaagatcaaaccaaaggtattagccaaaccgagtttactcatcataaccgtaatcggaatcatgatgacttggaaaggtacgaagattccgaggattaa

SEQ ID NO: 2475 - DNA, 695 bp, Streptococcus pneumoniae
  misc_feature (1)..(695): tiling:Spneumo1:WAN024GG5; Cluster includes WAN0244DY spr0 556|rplA|15902600|NP_358150.1|555382..556071|+|690 bp|50S Ribosomal protein L1|S.pneumoniae|R6|NC_003098.1|ORF|111
atggctaaaaaaagcaaacaacttcgtgctgctcttgagaaaatcgacagcacaaaagcatacagygtagaagaagctgtagcacttgcaaaagaaactaactttgcaaaatttgaygcaactgtagaagttgcttacaacttgaacatcgaygttaaaaaagctgaccaacaaatccgtggagcaatggtattgccaaacggtactggtaaaacttcacgygttcttgttttcgcacgtggtgcaaaagctgaagaagcaaaagctgctggtgcagactttgttggtgaagatgaccttgttgctaaaatcaacgacggttggttggacttcgacgtagttatcgctacacctgatatgatggctcttgttggacgtcttggacgtgtccttggaccacgtaacttgatgccaaaccctaaaactggtactgtaacaatggatgttgsyaaagcrgttgaagagtctaaaggtggtaaaatcacttaccgtgctgaccgtgcaggtaacgttcaagcaatcatcggtaaagtatcatttgaagctgaaaaattggttgaaaacttyaaagctttcaacgaaacaatccaaaaagyaaaaccagctacagctaaaggaacttacgtaacaaacttgactatcacaactactcaaggtgttggtatcaaagttgaygtaaactcactttaactaat

SEQ ID NO: 2476 - DNA, 431 bp, Streptococcus pneumoniae
  misc_feature (1)..(431): tiling:Spneumo1:WAN024GG7; Cluster includes WAN0244DZ spr0 555|rplK|15902599|NP_358149.1|554749..555174|+|426 bp|50S Ribosomal protein L11|S.pneumoniae|R6|NC_003098.1|ORF|111
atggctaaaaaagtcgaaaaacttgtaaaattgcaaatccctgctggtaaagctacaccagctccaccggttggacctgctcttggtcaagctggtatcaacatcatgggattcacaaaagagttcaacgctcgtacagctgaccaagctggtatgatcattccagttgttatctcagtttacgaagataaatcatttactttcrtyackaaaacaccaccagctgctgttcttttgaaaaaagctgcaggtgttgaaaaaggatcaggtacacctaayaaaactaaagttgctacagttactcgtgcrcaagtacaagaaattgcagaaactaagatgccagatttgaacgcagcaaacgtagagtctgcaatgcgtatgatcgaaggtactgctcgttctatgggawtcactgttgttgactaactaat

SEQ ID NO: 2477 - DNA, 270 bp, Streptococcus pneumoniae
  misc_feature (1)..(270): tiling:Spneumo1:WAN024DRG; Cluster includes WAN0244NS spr0 202|rpsN|15902246|NP_357796.1|202183..202452|+|270 bp|30S Ribosomal protein S14|S.pneumoniae|R6|NC_003098.1|ORF|110
atggctaaaaaatcaatggtagctagagaggctaaacgccaaaaaattgttgaccgttatgctgaaaaacgtgctgcattaaaggcggcaggggactacgaaggtttatctaaattacctcgcaacgcytcaccgactcgtttacataatcgttgtagrgttacggggcgcccacattcagtttaccgcaaatttggtctgagtcgtatcgcttttcgcgaacttgcgcataaaggtcaaattcctggtgtaacaaaagcatcttggtaa

SEQ ID NO: 2478 - DNA, 78 bp, Streptococcus pneumoniae
  misc_feature (1)..(78): tiling:Spneumo1:WAN024DRD; Cluster includes WAN023SMH NC_0 03098.1_309||||231846..231923|-|78 bp|Glimmer 2.02 orf pre diction|S.pneumoniae|R6|NC_003098.1|ORF|101
atggctaaacaaggacaaatagtgtcaaaaaagaccycaagcttatttggtcgtgagcttggggtcttttctagccta

SEQ ID NO: 2479 - DNA, 176 bp, Streptococcus pneumoniae
  misc_feature (1)..(176): tiling:Spneumo1:WAN024DGJ; Cluster includes WAN0244D4 spr0 586||15902630|NP_358180.1|602094..602264|-|171 bp|Hypothet ical protein|S.pneumoniae|R6|NC_003098.1|ORF|120
atggctaaaggattcgctaaaggtcttgtaacaggtgtcgcaggaactgtcgctgccgttgcaggtgcagtatacgcatttaaaaagaaagtaatcgaaccagaagagcaaaaagcagctttcatcgaagaaaaccgtaaaaaagcagctcgtcgccgcgtatcacgttaactaat

SEQ ID NO: 2480 - DNA, 315 bp, Streptococcus pneumoniae
  misc_feature (1)..(315): tiling:Spneumo1:WAN024GN9; Cluster includes WAN023ZC2 AL44 9924.1_103||||73069..73383|-|315 bp|Glimmer 2.02 orf predi ction|S.pneumoniae||AL449924.1|ORF|001
atggctaaagtaacaattatgttagcatgtgcagcaggtatgagtacaagtctgctagtgacaaagatgcaaaaggcagcagaagataaggggttggatgcagaaatttttgcagttccagctcctgaagcagaagaaattgtagcaacaaargaagtaaatgtgttgcttttaggycctcaagttcgctatttactaggggactttcaagaaaaactaaaagatagacagattcctgtggcggttattccgatgacagattayggaatgatgaatggttctaaagtyttagatttagctgaaagtttattagac

SEQ ID NO: 2481 - DNA, 194 bp, Streptococcus pneumoniae
  misc_feature (1)..(194): tiling:Spneumo1:WAN024DIL; Cluster includes WAN0244IC spr0 398|rpmB|15902442|NP_357992.1|394776..394964|+|189 bp|50S Ribosomal protein L28|S.pneumoniae|R6|NC_003098.1|ORF|121
atggctaaagtatgttactttacaggtcgtaagactgtatcaggaaacaaccgttcacacgcgatgaaccaaacaaaacgtgccgtaaaaccaaaccttcaaaaagttactgttcttatcgatggtaaacctaaaaaagtttgggcttcagctcgtgctttgaaatcaggtaaagttgaacgcgtttaactaat

SEQ ID NO: 2482 - DNA, 296 bp, Streptococcus pneumoniae
  misc_feature (1)..(296): tiling:Spneumo1:WAN024D7L; Cluster includes WAN0243QN spr1 396|rpsF|15903439|NP_358989.1|1375323..1375613|-|291 bp|30 S Ribosomal protein S6 (S6)|S.pneumoniae|R6|NC_003098.1|OR F|111
atggctaaatacgaaattctttatatcattcgtccaaacattgaagaagaagctaaaaacgctttggtagcacgttttgactctattttgactgacaacggtgcaactgttgttgaatcaaaaacttgggaaaaacgtcgtcttgcatacgaaatccaagatttccgtgaaggactttaccacatcgttracgttgaagcaaatgacgatgcagctcttaaagagtttgaccgtctttcaaaaatcaacgctgacattcttcgtcacatgatcgtcaaaattgacgcgtaactaat

SEQ ID NO: 2483 - DNA, 1553 bp, Streptococcus pneumoniae
  misc_feature (1)..(1553): tiling:Spneumo1:WAN024CRK-5; Cluster includes WAN0243R8 sp r1375|snf|15903418|NP_358968.1|1356038..1359136|-|3099 bp| SWF/SNF family ATP-dependent RNA helicase|S.pneumoniae|R6| NC_003098.1|ORF|111
atggctaaattgattccggggaaaattcgtatcgaaggtgttgccctttatgaaactggtaaggttgatatcatcaaggaaaagaacaatcggctctacgctcgcgttgcagaagaagaactgcgctatagtttagaggatgatttgrttttttgtgcctgtgattyttttcaaaagaggggytactgtgtgcatttggcagcgctagagcattttctgaaaaatgatgagcgtggtcaggaaatcttgtggagtctggaagaaggtcatgaagaaaaagaggcygttgaaaccaaggtraccttgggtggcaagtttttggatcgaattttatctccaaaatcagaatgcgcctatgagttatcagctgtgggtcaggtggaagcaggaaccaatcatatcttgtggactctgagaatcggccaaatcaatagccaaaaatactatrtcattcgggatattccactttttttaaggattgtcgagcagagaaagtcgtatatgattggcaagatttatgaggagtctctttcttgggaagcctttgatgatgccagccaagaacttttgactttcttgcacggactaacggaggaagggctggttycagacctctttttccaaaaccaaggtcggcacctctttttccctctgaccttttttgagcagggtgtgaatttactgatggccttgccccattttcaatttgaccatcaagtggatagctaccaaaccctgctttttcaggatatgcatgctgatgccaatctatttgcctttrcagtaacagaataytcggaytattttgaaatggaaatcagtgagagtcctagggtcaatgtcttttatcarggagcagtacttttccataaaggtcaggtttattttttaacagaccagcagatgcgtcttctcaaggaaattaaagcgttacctgtggrtcracaaggaaagaaatacctgcaatttgatagcagtgatcgagacaaattggcctcctgtctgactctttttatccagatgggcaccgtttcagctccagaacgtctacaaatcaaaacttttgcgccctctttttactttgacagggaagaagataatcggattcgtttagaaattcagtttgattatggaaatagacaggtatctagccgacaagagctagaagaattaccmttttcaagtgacgcrgacttagaagaaagaattttccaagtctgtttggctgcgggctttgargccgattttcaatcttggcgtcaggccttaaaarcggagtctgtctatcatttttttcatgatatcattccagtctttgaaaaactcgggcatgttgacctatcagataaactagaagagctttatagcctagcgagtcctcaggtgcagattgcctccaagggaggtctcttggaaatccagtttgattttcaaratattgyccaggaggaaatcgaccaagccatrcaggccttggttgccaatcaggatttttatattgattcgtctaatcaagtttactttttcgatgaagaaaccaagaaaattcgcca

SEQ ID NO: 2484 - DNA, 563 bp, Streptococcus pneumoniae
  misc_feature (1)..(563): tiling:Spneumo1:WAN024G92; Cluster includes WAN02445W spr0 846|frr|15902890|NP_358440.1|843969..844526|+|558 bp|Ribos ome recycling factor|S.pneumoniae|R6|NC_003098.1|ORF|111
atggctaacgyaattattgaaaaagctaaagagagaatgacccartctcaccaatcacttgctcgtgaatttggtggtatccgtgctggtcgtgccaatgcaagcttgcttgaccgtgtacatgtagaatactatggagtcgaaactcctcttaaccaaatcgcttcaattacgattccagaagcgcgtgttttgttggtaacaccatttgacaagtcttcattgaaagacatcgamcgtgccttgaacgcttctgatmttggtatcacaccggctaatgacggttctgtgattcgcttggttatcccagctcttacagaagaaactcgtcgtgaccttgctaaagaagtgaagaaggtcggcgaaaatgctaaagtggctgtccgcaatatccgtcgcgatgctatggacgaagctargaarcragaaaaagcamaagaaatcactgragacgaattgaagactcttgaaaaagayattcaaaaagtaacagacgatgctgttaaacacatcgacgayatgactgcyaacaaagagaaagaacttttggaagtctaactaat

SEQ ID NO: 2485 - DNA, 822 bp, Streptococcus pneumoniae
  misc_feature (1)..(822): tiling:Spneumo1:WAN024G34; Cluster includes WAN0243Z9 spr1 086||15903129|NP_358679.1|1082099..1082914|-|816 bp|Conser ved hypothetical protein|S.pneumoniae|R6|NC_003098.1|ORF|2 31
atggctaaggaaagagtggatgtactagcttataaacagggsttgtttgaaacgagagagcaggccaagcgaggtgtratggctggyctagtcgtagcagtccttaatggagaacggtttgacaagccaggagagaaaattccagatgacaccgaattaaaactcaagggrgagaaactcaagtatgtcagccgtggtggtttgaaactggaaaaggccttgcaggtctttgatttgtcggtggatggcgcgactacgattgatatcggggcctctactggaggttttaccgatgtcatgctacagaatagtgccaagttggtctttgcagtcgatgttggtaccaatcagttggcttggaaattacgccaagacccacgagttgtyagyatggagcagttcaatttycgctatgctgaaaagactgatttcgagcaggagccgagctttgccagtattgatgtgagtttcatttcccttagtctgattttgccagccttgcaycgtgtcttggctgatcaaggtcaggtggtagcacttgtcaaacctcagtttgaggcaggacgtgagcagattgggaaaaatggaattattcgagatgctaagrttcatcagaatgtccttgaatctgtaacagctatggcagtagaggyaggtttttcagtccttgrcttggacttttctcccatccaaggtggacatggaaatattgaatttttagcgtatttgaaaaaagaaaagtcagcaagcaatcagattyttgctgagattaaagaagcagtagagagggcgcatagtcaatttaaaaatgaactaactaat

SEQ ID NO: 2486 - DNA, 483 bp, Streptococcus pneumoniae
  misc_feature (1)..(483): tiling:Spneumo1:WAN024D98; Cluster includes WAN0243VB spr1 228|aroK|15903271|NP_358821.1|1225865..1226341|-|477 bp|Sh ikimate kinase|S.pneumoniae|R6|NC_003098.1|ORF|111
atggctaaggtgttattagggtttatgggggctggaaaatcgactattgcaagaggcttggaccctaattaccttgatatggatgctctgattgagaakcgcctaggtatgtccattgcgaattttttcgctgaaaagggagaarcagcctttcgtcaggtagaatcagaagtcctagctgatttaytacaaasagaccaagtcgtgtcaactggaggaggagtggttatttctcagagaaatcgtgacttactcaagactaatacagataacatctacctgaragcagattttgaaaccctctaccwacgtatcgyagctgataaggacaatcagcgaccgctttttctaaataatagcaaggaagaactagtagctattttycaagaaagacaggcttggtatgaggaagtggctagtcgggttttggatgtgaccaagctaagcccagaggaaattatagaggaactaagaykaactaat

SEQ ID NO: 2487 - DNA, 221 bp, Streptococcus pneumoniae
  misc_feature (1)..(221): tiling:Spneumo1:WAN024DIG; Cluster includes WAN0244I3 spr0 407||15902451|NP_358001.1|403586..403801|+|216 bp|Hypothet ical protein|S.pneumoniae|R6|NC_003098.1|ORF|121
atggctaagtcaaactttgaaaaagtagaatcagttgttggctgggttcgtgataagaaaatcacaggctaccgtatctctaaagaaacgaatgcgcgtgaaatgtctatcattgctctggcgcagggtcgtgcaaaagtaaaaaatatttcatttgaaacagccytaggcytaattgatttctatgaaaaaaatyatgaaaaatttgaagattaactaat

SEQ ID NO: 2488 - DNA, 468 bp, Streptococcus pneumoniae
  misc_feature (1)..(468): tiling:Spneumo1:WAN024CC5; Cluster includes WAN0244QF spr0 107||15902151|NP_357701.1|115766..116233|+|468 bp|Hypothet ical protein|S.pneumoniae|R6|NC_003098.1|ORF|200
atggctaagttagaggtaaaagataataaaaaactggtactaaagtcagttatctgtaaaaagttacatgatacaaaagtagaagatgtagatcaggaaattaatagatttcatcaacatttgcagttgttaaaagcacaaatttttggtccattaattgtaaaaagttgtggtactactattcatgatgatggattaataacgactgattttgagttttatattcaagctcataatgctcaacagtacagtaacatttatgatgtacaggattccatctctgttccatattgtttatatgttcgttttgaagacagtccagagtatctacagtatgcgtattctaaattggatctatatgtctatgaaaatgatattcaaacggatgggattgtctatacagtttatgttaattcttctcctgaaaaaatggtagtagatatttttataccaattgtaagcctatga

SEQ ID NO: 2489 - DNA, 2523 bp, Streptococcus pneumoniae
  misc_feature (1)..(2523): tiling:Spneumo1:WAN024FFW; Cluster includes WAN0243MJ spr1 544|secA|15903587|NP_359137.1|1526391..1528904|-|2514 bp|P reprotein translocase secA subunit|S.pneumoniae|R6|NC_0030 98.1|ORF|111
atggctaatattttaaaaacaattatcgaaaatgataaaggagaaatccgtcgtctggaaaagatggctgacaaggttttcaaataygaagaccaaatggctgctttgactgaygaccaaytaaaagcraaaacagttgaatttaargaacgttatcaaaatggagaatcactggattcattgctttaygaagcatttgcggttgtccgtgarggtgccaaacgtgtcctaggtctcttcccttataaggttcaggtcatgggggggattgttcttcaccatggtgacgtgccagagatgcgtacaggggaagggaaaaccttractgcgaccatgccggtatacctcaatgccctttcaggtaaaggggttcacgtagttacggttaatgaatacytgtcagaacgtgacgcgactgagatgggtgaattgtactcttggcttggtttgtcagtagggattaacttggctaccaaatctccaatggagaaaaaagaagcctatgagtgtgatattacttactcaactaactcagaaatcggatttgactaccttcgtgacaayatggtygttcgcgcygaaaayatggtacaacgtccgcttaactatgccttggtcgatgaggttgactctatcttgattgacgaggctcgtacacctttgattgtatcaggtgccaatgcggttgaaaccagtcagttgtatcacatggcagaccactatgtaaaatctttgaacaaagatgactacatcatcgatgtgcagtctaagactattggtttgtctgattcagggattgacagggctgaaagctacttcaaacttgaaaacctctatgacatcgaaaacgtggctttgacycactttatcgataacgcccttcgtgccaactacatcatgcttctcgatattgactatgtggtgagcgaagagcaagaaatcttgattgtcgaccaatttacaggtcgtaccatggaaggtcgtcgttattctgatggattgcaccaagctattgaagccaaagaaggtgtgccaatccaggatgaaaccaagacatctgcctcaatcacgtaccaaaacctyttccgtatgtacaaraaattgtctggtatgacgggtacaggtaagactgaggaagaagaattycgtgaaatctacaacattcgtgttattccaatcccaacaaaccgtcctgttcaacgtattgaccactcagaccttctttatgcaagtatmgaatctaagtttaaagcggttgtcgaagacgttaaggctcgttaccaaaagggtcaacctgtcttggttggtacagtagcggttgaaactagtgactacatttctaagaaattggttgcagctggtgttcctcacgaagtcttgaatgccaaaaaccactatagagaagcccaaatcatcatgaatgctggtcaacgtggtgccgttaccatygcaaccaacatggcgggtcgtggtaccgacatcaagcttggtgaaggtgttcgtgaacttggaggactttgtgttattggtacagaacgtcatgaaagtcgtcgtatcgataaccagcttcgtggacgttcaggtcgtcaaggagatccaggtgagtcacaattctacctatctcttgaagatgatttgatgaaacgttttggttctgaacgcttgaagggaatctttgaacgyytsaacatgtctgaagaggcsattgagtctcgcatgttgacgcgtcaggttgaagcagckcaraaacgtgtcgaaggaaataacyacgatacccgtaaacaagtccttcaatacgaygatgtcatgcgtgaacaacgtgagattatctatrctcaacgttaygatgtcatyactgcagaycgtgacttggcacctgaaattcagkcwatgatcaaacgcacgattgrwcgtgtcgttgayggtcatgcgcgtgcyaaacaagatgaraaactagaggcaattttgaacttygctaagtayaacttgcttccwgaagattctattacgatggaagacttgtcaggcttgtctgataaggccatcaaggaagagcttttccaacgtkccttgaaggtttacgatagtcaggtttcaaaactacgcgatgaagaagcagttaaagaattccaaaaagttttgattctacgagtggtggataacaagtggacagatcatatcgatgcccttgatcaattgcgtaaygcggttggacttcgtggctatgctcagaacaaccctgttgttgagtatcaggcagaaggtttccgtatgtttaatgatatgattggttcgattgagtttgatgtgacacgcttgatgatgaaagcacaaattcatgaacaagaaagaccacaggcagaacgtcatatcagtacaacagcgactcgcaatatcgctgctcaccaagcaagtatgccagaagatttggatttgarccagattggacgcaatgaactttgcccatgtggttctggtaagaaatttaaaaactgtcacggtaaaagacaataactaatgaga

SEQ ID NO: 2490 - DNA, 534 bp, Streptococcus pneumoniae
  misc_feature (1)..(534): tiling:Spneumo1:WAN024DJ9; Cluster includes WAN0244K7 spr0 331||15902375|NP_357925.1|335681..336208|+|528 bp|Conserve d hypothetical protein|S.pneumoniae|R6|NC_003098.1|ORF|110
atggctacagctttggttttaggctattctgcttttgatttgggtttattttctgataaggatcctcgtcttaaattgattaaaaaagcgatacgtaaagatttagaggctatggcagcagatggggtgtcttggcttgtgtttacaggragtttgggttttgaatattgggttttagaggttgctcaggagatgaaaacygaatacggtttccagttggccaccatttttgcttttgaaacccatggggaaaattggaatgaaggcaatcagatgaaactgagtcgctttaagcaggtagactttgtcaaatatgcytatcctcgytatgaacacaaggggcagttaagagattaycagcartttttgctggaaaacacgactagttcctatcttttttatgatgaagaaaatgaaacaaaactagcttatttttaccaaaagatgaaaaatcaagaggactattttataaagagattaacatttgatsaattaaatgaacttgctgaaaatttttccgaaaatykaactaat

SEQ ID NO: 2491 - DNA, 243 bp, Streptococcus pneumoniae
  misc_feature (1)..(243): tiling:Spneumo1:WAN024FCX; Cluster includes WAN023KQQ 3149 44_3042||||1619987..1620229|+|243 bp|EGAD orf prediction|S .pneumoniae|R6|NC_003098.1|ORF|110
atggctaccaatataaccagctccgcctgttaccaatattgccatytkkgtttcctcctaattaattccaaccgacttaacaaatctcataaacgcttcatgcccagacggtgtattcttataaactcctgcatcttccagaactctcgcaaacacttgtcctgcttcgtgttgaactacgctattaacctcttctttattaatgcgaggatatttttctttcaattggtcggcccattctaa

SEQ ID NO: 2492 - DNA, 1013 bp, Streptococcus pneumoniae
  misc_feature (1)..(1013): tiling:Spneumo1:WAN024D4A; Cluster includes WAN0243J3 spr1 669|galR|15903711|NP_359261.1|1641933..1642940|+|1008 bp|a lR, member of GalR-LacI family of transcriptional regulato rs, binds DNA; reg...|S.pneumoniae|R6|NC_003098.1|ORF|111
atggctaccttaaaagacattgcacagctagcctctgtctctatcgcgaccgtatcccgygtcctcaaycgcgaccagagcctatctgttacagaagaaaccagacaccgtattttaaccgttgctgaagarctgggctacaccaagcacctcaagacaggcgagtcccayaaacccaagcaaaagattgccattatycaatgggtcagcgaacaaggggagctrgacgacctctactactaccagattcgcctaggaatagaaaaaagagcccaagagttggactaygatatcttgcgctattttaatgaccayccttttaccytaagcgaggaagtgattgggattctctgcatcggaaartttagycgagctcagatttctgcctttgaagaataccaaaarccyctkgtmtttctagacagygatacactttccctgggrcatacytgtattatyacggayttttacactgcyatraaacaggttgtcgattatttcctcagycaaggratggaccgyatcgggattctaacaggscttgargaaacaacagaccaagaagaaatcattsaggayaagcgkctrgaaaayttcaraaactayagtcaagcrarrggaatctatcatgatgaactgrtctttcaaggaarmtttactgcccagtctggctatgacttratgaaggargccattcagagcttgggagaccaacttccgccagcatttttcgcagccagcgatagtttagctatcggtgccctccgtgccctccaagaagctrgaatcarcctgccagatcgcgtcagcctcatttcmttyaacgacacyagtctgaccaaacaggtctatcctcccctctctagtattacagtttatactgaagaaatgggscgagcaggtatggatattcttaacaargaagtmctccacggtcgsaaaathcctagcctgaccatgytgggaaccaractgacrttaagagaaagtaccctaaatcaagaatarctaat

SEQ ID NO: 2493 - DNA, 1379 bp, Streptococcus pneumoniae
  misc_feature (1)..(1379): tiling:Spneumo1:WAN024FGW; Cluster includes WAN0243NG spr1 511|ftsA|15903554|NP_359104.1|1487948..1489321|-|1374 bp|C ell division protein FtsA|S.pneumoniae|R6|NC_003098.1|ORF| 111
atggctagagaaggcttttttacaggtctagatattggaacaagctctgtcaaggtgcttgtggccgagcagagaaatggtgaattaaatgtaattggcgtgagtaatgccaaaagtaaaggtgtaaaggatggaattattgttgatattgatgcagcagcaactgctatcaagtcagccatttcccaagcggaagaaaaggcaggcatttcgattaaatcagtraatgtcggcttgcctggtaatcttttgcaggtagaaccaactcaggggatgattccagtaacatctgatactaaggaaattacggatcaagatgttgaaaatgttgtcaaatcagctttgacaaagagtatgacacctgaccgtgaagtcattacctttattcctgaagaatttattgtggatggtttccaagggattcgtgacccacgtggyatgatgggggttcgccttgaaatgcgtggtttgctttatacaggacctcgtactatcttgcacaatttgcgtaagacggttgagcgtgcaggtgttcaggttgaaaatgttatcatttcaccactagcaatggttcagtctgttttgaacgaaggggaacgtgaatttggtgctacagtgattgatatgggggcaggtcaaacgactgtcgctacaatccgtaatcaagaactccagttcacacatattctccaagaaggtggagattatgtaactaaagatatctccaaggttttgaaaacctctcgcaaattagcggaaggcttraaactgaattacggggaagcctatccgcctcttgcaagcaaagaaaccttccaagtagaggttattggagaagtrgaagcagtcgaagtgacggaagcctacttgtcagaaattatttctgcacgaatcaagcacatccttgaacaaatcaagcaagaattagatagaaggcgtctattggacctccctggtggtattgtcttaatcggtgggaatgccattttaccaggtatggttgagcttgctcaggaagtctttggcgtccgtgtcaagctttatgttccaaatcaagttggtatccgtaatccagcctttgcgcatgtgattagtttatcagaatttgcgggtcaattaacagaagttaatcttttggctcagggagcgataaaaggtgagaatgacttaagtcatcagccaattagttttggtgggatgctgcaaaaaacagctcagtttgtacaatcaacgcctgttcaaccagctcctgctccagaagtagagccggtggcgcctacagaaccaatggcggatttccaacaagcttcacaaaataaaccgaaattagcagatcgtttccgtggmttgatcggaagcatgtttgacgaataactaat

SEQ ID NO: 2494 - DNA, 342 bp, Streptococcus pneumoniae
  misc_feature (1)..(342): tiling:Spneumo1:WAN024EZD; Cluster includes WAN023LLJ 3145 05_1635||||867457..867798|-|342 bp|EGAD orf prediction|S.p neumoniae|R6|NC_003098.1|ORF|110
atggctagccagaaaaagactaaaatccctgtcaaacgctgcattacagcttcaaaaccgcgagctttactgcgttcaaacaaatcacctgaactggcatcaaatacattgctggattggtttttggttggttgcatgaaaattgcaatcacaatcacaacagataatactaataaaatggttaataataggttatacatatcaaactccttaaaatccctattattttaccataaaatctacttagattcaagatgtagggttacttttctttccttgggacaatactttaaaacctcaatcttgtctggatgggtttttgaatttttactggttaggtaa

SEQ ID NO: 2495 - DNA, 1325 bp, Streptococcus pneumoniae
  misc_feature (1)..(1325): tiling:Spneumo1:WAN024FVL; Cluster includes WAN0243VK spr1 219|hom|15903262|NP_358812.1|1215716..1217035|-|1320 bp|Ho moserine dehydrogenase|S.pneumoniae|R6|NC_003098.1|ORF|111
atggctatattagaaaatttcgaggagataaagatgacagttaaaattgctttactaggatttggtaccgttgcaagtggtgtgcctttcctcctaaaggaaaatggaggaaaaatcaatcaatcagcacattcagatatcaaagttgctaaggtattggtcaaggatgaagatgaaaaaaatcgcttgcttgcagcagggaatgactttaactttgtaaccaatgtggatgatattttatcagaccaggatattactatcgtagtggaattgatggggcgtattgagcctgctaaaacctttatcactcgtgccttggaagctggaaaacacgttgttactgctaacaaggaccttttagctgtccatggcgcagaattgctagaaatcgctcaagctaacaaggtagcactttactacgaagcagcagttgctggtgggattccaattcttcgtactttagcaaattccttggcttctgataaaattacgcgcgtgcttggagtagtcaacggaacttccaacttcatggtgaccaagatggtggaagaaggctggtcttacgatgatgctcttgcggaagcacaacgtctaggatttgcagaaagcgatccgacgaatgacgtagatgggattgatgcagcctacaagatggttattttgagccaatttgcctttggcatgaagattgcctttgatgatgtagcccacaagggaatccgcaatatcacaccagaagacgtagctgtagctcaagagyttggttacgtagtgaaattggttggttctattgaggaaacttcttcaggtattgctgcagaagtgactccaaccttcctacctaaagcgcacccacttgctagtgtgaatggcgtaatgaacgctgtctttgtagaatctatcggtattggtgagtctatgtactacggaccaggtgcgggtcaaaaaccaactgcaacaagtgttgtagctgatattgtccgtatcgttcgtcgtttgaatgatggtacyatyggcaaagacttcaacgaatatagccgtgacttggtcttggcaaatcctgaagatgtcaaagcaaactactatttctcaatcttggctcyagactcaaaaggtcaggtcttgaagttggctgaaatcttcaatgctcaagatatttcctttaagcaaatccttcaagatggcaaagagggtgacaaggcgcgtgtcgttatcatcacacacaagattaataaagcccagcttgaaaatgtctcagctgaattgaagaaggtttcagaattcgacctcttgaataccttcaaggtgctaggagaataactaat

SEQ ID NO: 2496 - DNA, 1157 bp, Streptococcus pneumoniae
  misc_feature (1)..(1157): tiling:Spneumo1:WAN024DVY; Cluster includes WAN0243AY spr1 963|adh2|15904004|NP_359554.1|1950333..1951484|-|1152 bp|P robable alcohol dehydrogenase.|S.pneumoniae|R6|NC_003098.1 |ORF|111
atggctayattttatgttccggcagtcaaccttattggwaaaggtgttgtaaatgaagtgggtccttatatcaaggaacttggctataaaaaggcacttttggtkacagataagtacatcgaaggcagtgayattttacctaagrytttaaaaccactggatacagaaggaatcgaatatgtcatctttagcgatgtagagccaaaccctacttgtaaraatgtcacagatggggtagctgctttgcaagaacatggmtgtgaytttatcatcagtcttggygggggttctccacaggatgcagctagttgtatttctatcatggctacaaatggtggaaraccacaggattatgaagggcttcataagtctgctaaaaaaggcttgccagttgtggckatcaatacaacggcaggwacwtcwgcagaaatyacyattaactatgtgattactgatgaagaacgcaaggttaagatggtaatggttgacaagaatagccttgctcttatytctgttaatgaccckgaactcatgctttccaaacctaaaggcctgactgctgctactggtatggatgctctgactcaygctgttgaagctttggtaacacctggtgcttatgatgtaaccaagaaactgtctattggtgctattgagcttatcaaggaatatcttcctcgtgctgtagmaaayggacatgatattgaagcgcgtgaaggtatggtcaatgccatcttccttggtggtatgagctttaataatgctggtcttggytatgttcactcaatggctcaccaactcggtgcagtatataatttgccacatggygtktgctgtgccatgttgctaccagttatagarcgtgaaaatgctaaacgtgtaccagaagctttccgcaatgttgccaaagccttgggacttcatgtagaaggtaaatcagatcaagartgtgccgattatgcgattgytgagattgagaagctttctgagacagtaggtattcctaagaaaytgactgaacttggtattgaagaaaaagatttcgactttgaatacctttctaagaatgccttgattgatgcctgcgcaccaggaaatccatttatgccaaccttagaagaaacgattgccttttataaagagttattttarctaat

SEQ ID NO: 2497 - DNA, 188 bp, Streptococcus pneumoniae
  misc_feature (1)..(188): tiling:Spneumo1:WAN024DKO; Cluster includes WAN0244NN spr0 207|rpmD|15902251|NP_357801.1|204829..205011|+|183 bp|50S Ribosomal protein L30|S.pneumoniae|R6|NC_003098.1|ORF|111
atggctcaaattaaaattactttgactaagtctccaatcggacgcattccatcacaacgtaaaactgttgtagcacttggacttggcaaattgaacagctctgttattaaagaagataacgctgctatccgtggtatgatyacagcagtatctcacttagtaacagttgaagaagtaaactaactaat

SEQ ID NO: 2498 - DNA, 245 bp, Streptococcus pneumoniae
  misc_feature (1)..(245): tiling:Spneumo1:WAN024FK3; Cluster includes WAN0243QP spr1 394|rpsR|15903437|NP_358987.1|1374570..1374809|-|240 bp|30 S Ribosomal protein S18|S.pneumoniae|R6|NC_003098.1|ORF|11 1
atggctcaacaacgtcgtggcggattcaaacgccgtaaaaaagttgattacatcgcagcaaacaaaattgaatatgttgattacaaagatactgagcttcttagccgtttcgtttcagaacgtgggaaaatccttcctcgtcgtgtaacaggaacttcagctaaaaaccaacgtaaagtaacawcagctatcaaacgcgctcgcgtaatggctttgatgcctttcgtaaacgaagattaactaat

SEQ ID NO: 2499 - DNA, 348 bp, Streptococcus pneumoniae
  misc_feature (1)..(348): tiling:Spneumo1:WAN024DIF; Cluster includes WAN0244HU spr0 416||15902460|NP_358010.1|414804..415151|-|348 bp|Hypothet ical protein|S.pneumoniae|R6|NC_003098.1|ORF|101
atggctcaacaatcatgttgcaaagcaaatatgaacaaacaacctcccttaagtttatgcgaatccttgtactcatttgagaatctgaccgttttagtagtccctattgagtatgtgttaggaatgaagatgatgagtatcagagagcaggatttgmaagatattggtgcaattattaaatacaaaaactttcattcaccattcgatacctttaaatatttaaaagacatgggatttgatactattgacctctctgttctattagaaggttttagttatgcttatggtatggattggttagaaaaattttttaaagaaaatcaagataaacttcgcgaattttattaa

SEQ ID NO: 2500 - DNA, 425 bp, Streptococcus pneumoniae
  misc_feature (1)..(425): tiling:Spneumo1:WAN024FLG; Cluster includes WAN0243RO spr1 359|atpC|15903402|NP_358952.1|1341965..1342384|-|420 bp|Pr oton-translocating ATPase, F1 sector, epsilon-subunit|S.pn eumoniae|R6|NC_003098.1|ORF|111
atggctcagttaactgtccagatcgtgacaccagatggtctcgtctatgatcaccatgccagctatgtatcggttcgaactctggatggtgagatggggatcttgccacgacatgaaaatatgattgcggttttagcagttgatgaagtaaaggtaaaacgtatcgatgataaagatcacgtgaactggattgcagtaaacggtggygttattgaaattgccaatgatatgatcacaatcgtcgctgactctgcagaacgtgctcgtgatatcgatatyagycgtgcagaacgtgccaaacttcgtgcagaacgtgcaattgaagaagcacaagacaaacatttgattgaccaagaacgtcgtgctaagattgctttgcaacgtgcyattaaccgtattaatgtcggaaatagactataactaat

SEQ ID NO: 2501 - DNA, 126 bp, Streptococcus pneumoniae
  misc_feature (1)..(126): tiling:Spneumo1:WAN024FZE; Cluster includes WAN023WJT AX56 9305.1_1||||1..126|+|126 bp|Glimmer 2.02 orf prediction|S. pneumoniae||AX569305.1|ORF|001
atggctccaactcaggataagttttggacaccagttcaattattttatgattttgcagataaggtccaccttgatttgtctgagaaacaaagtggttccaaaattctttctgactatctaactaat

SEQ ID NO: 2502 - DNA, 264 bp, Streptococcus pneumoniae
  misc_feature (1)..(264): tiling:Spneumo1:WAN024CBI; Cluster includes WAN023MAP 3143 07_281a||||141698..141961|-|264 bp|EGAD orf prediction|S.p neumoniae|R6|NC_003098.1|ORF|110
atggctccgatgacctataaagatacgatgacgagtgactttttcgaagcttgcttccaaaaattcttactacctactttagatacaccatcccttatcattatggacmatgcaaggtttcacagaatgaacatgtgtaaggagcagggcatagactgttaccacttcctacctattcacccgagtataatcccattgagaaaatatgggcttacatcaaaaacatctcagaataatattgtcaaattacgatgcttttcttga

SEQ ID NO: 2503 - DNA, 371 bp, Streptococcus pneumoniae
  misc_feature (1)..(371): tiling:Spneumo1:WAN024C8J; Cluster includes WAN0244NH spr0 213|rpsM|15902257|NP_357807.1|208202..208567|+|366 bp|30S Ribosomal protein S13|S.pneumoniae|R6|NC_003098.1|ORF|111
atggctcgtattgctggagttgatattccaaatgacaaacgcgtagtaatctcattgacttatgtttatggtatcggacttgcaacatctaagaaaattttggctgctgctggaatctcagaagatgttcgtgtacgtgatcttmcrtcagatcaagaagatgctatccgtcgtgaagtggatgcaatcaaagttgaaggtgaccttcgtcgtgaagtaaacttgaacatcaaacgtttgatggaaatcggttcataccgtggtatccgtcaccgtcgtggacttcctgtccgtggacaaaayactaaaaayaacgcycgcactcgtaaaggtaaagctgttgcgattgctggtaagaaaaaataactaat

SEQ ID NO: 2504 - DNA, 873 bp, Streptococcus pneumoniae
  misc_feature (1)..(873): tiling:Spneumo1:WAN024F3U; Cluster includes WAN0244IO spr0 386|accD|15902430|NP_357980.1|384683..385549|+|867 bp|Acet yl-coenzyme A carboxylase carboxyl transferase subunit bet a|S.pneumoniae|R6|NC_003098.1|ORF|111
atggctctatttagtaaaaaagataagtatattcgaatcaatcccaatcgttcggttagggaaaaacctcaagctaagccagaggttccagatgaattattttcccagtgtccaggctgtaagcataccatctatcagaaggatctgggaagtgaacgtatctgtccgcactgtagctatacctttcgtatttctgcccaagaacgcttggctttgacgattgatatgggaaccttcaaagaattgtttacagggattgaaagcaaggatcccttgcatttccctggttaccaaaagaaactggcatctatgcgtgaaaaaacaggtctgcatgaagccgttgtgacaggaactgctcttattaaaggtcagactgtggctcttgggattatggattctaaytttatcatggcttctatgggtacggttgtaggtgaaaaaatcactcgtttgtttgagtatgcgactgtcgaaaaattgccagttgtcctattcacagcctctggtggagcccgtatgcaggaaggaatcatgagtctcatgcagatggctaagatctctgcrgcggttaaacgycattcaaatgctggtctcttttacctgacyattttgacagatccaacgactggtggtgtgacagcttctttcgctatggaaggcgatatcattctggctgaaccacagagcttggttggttttgctggrcgtcgtgtgattgaaaatacggttcgtgaaagcttgcctgaggatttccaaaaggcagaattcctattagaacatggctttgtggatgctattgtcaaaagaagagacttaccagatacgattgctagcctagtcagattgcatggagggagtcctagaykaactaat

SEQ ID NO: 2505 - DNA, 312 bp, Streptococcus pneumoniae
  misc_feature (1)..(312): tiling:Spneumo1:WAN024CWP; Cluster includes WAN023LR8 3146 90_1331a||||704694..705005|-|312 bp|EGAD orf prediction|S. pneumoniae|R6|NC_003098.1|ORF|110
atggctctcgaactgagtagacaagacctccttcttgactccatcaactgtataataagaagggtaaatccctgtcatgttgtctgtaattttaccagaaaaggcaagaaccaattcaacttgaccagcctcagccaattcgatatgaagggcttcattgtcatggtcaactgtaaatggacgagcttgacctgcaacttctacagaggtgatttccaartctttttggtggagggagatgcggtcactctgtgcttgaccagtgatggtcactttcccagaaaaagtcttggtctcacgactcaaatctaa

SEQ ID NO: 2506 - DNA, 249 bp, Streptococcus pneumoniae
  misc_feature (1)..(249): tiling:Spneumo1:WAN024EYI; Cluster includes WAN023L0W 3151 65_2587||||1376257..1376505|+|249 bp|EGAD orf prediction|S .pneumoniae|R6|NC_003098.1|ORF|110
atggctctgcaatgtagcgtttcaagagttctgtatcacgttccaaggtttccaaggcttgaggcgcgcggtcaagaacaccttgtagaagagctttcacataagcttcttgcaagtcaagcgactcatcatgtgtcaagtatgagtactcagcatccatcatccagaactcagtcaagtgacggcgtgtttttgatttttcagcacggaaaactggaccaaagtcaaagacacgaccaagagccatag

SEQ ID NO: 2507 - DNA, 1418 bp, Streptococcus pneumoniae
  misc_feature (1)..(1418): tiling:Spneumo1:WAN024GAO; Cluster includes WAN02447V spr0 775||15902819|NP_358369.1|768897..770309|+|1413 bp|Conserv ed hypothetical protein|S.pneumoniae|R6|NC_003098.1|ORF|22 1
atggctgaagaaagagtagaaccaaaaccaattgaccttggtgaatataaatttggtttccatgacgatgtagagcctgtcttatcgacaggaaaaggactcaacgaaggtgttattcgtgaattatctgctgctaagggtgagcctgagtggatgttggagttccgtttgaagtyttatgaaaccttcaaaaaaatgcccatgcaaacttggggagcagacttgtcagagattgactttgatgacttaatctactaccaaaaaccatctgacaaaccagcccgttcttgggatgatgtacctgaaaagattaaagaaacctttgaacgtatcgggattccagaagctgaacgtgcttatttagcaggggcttctgcccagtacgagtcagaagtggtttaccacaacatgaaggaagagttccaaaaattaggtattatctttacagatacagattccgcactcaaggaatacccagacttatttaawcaatactttgcgaagttggtaccgccgacagataacaagttggcagccctcaactcagcagtatggtcgggtggaacttttatctacgtgccaaaaggtgtcaaggtagatattccacttcaaacttatttccgtatcaataacgaaaatataggtcagttcgaacgtaccttgattatcgttgatgagggagcaagygtcyactacgtagaaggatgtacagcaccaacatattcaagcaatagcttacacgctgccattgtagaaatttttgctttggacggagcttatatgcgttatacaactatccaaaactggtctgataacgtctataacttggtaacaaagcgtgctaaggctcaaaaggatgccactgttgagtggattgatggaaacttgggtgccaaaacgactatgaaatatccatctgtttaccttgatggagaaggagcgcgtggtaccatgctctctatcgcctttgctaatgcagggcaacaccaagacacgggtgctaagatgattcacaatgctccacataccagctcgtctattgtgtctaaatccatcgctaaaggtggaggaaaggttgactaccgtggacaagtcacctttaacaagaactctaagaaatctgtttcccacattgaatgtgataccattatcatggatgacttgtcagcatcagatactattccatttaatgaaattcacaactcgcaagtggctttggaacacgaagccaaagtatctaagatttcagaagagcaattgtattatctcatgagccgtggattgtcagaatctgaggcaactgaaatgattgtcatgggatttgtagaaccctttacaaaagaacttccaatggaatacgcagttgagctgaaccgcttgattagctatgaaatggagggatcagttggataactaat

SEQ ID NO: 2508 - DNA, 206 bp, Streptococcus pneumoniae
  misc_feature (1)..(206): tiling:Spneumo1:WAN024CYL; Cluster includes WAN0243BJ spr1 942||15903983|NP_359533.1|1924604..1924804|+|201 bp|Hypoth etical protein|S.pneumoniae|R6|NC_003098.1|ORF|110
atggctgaagctaaaaaaaagcagatcccccttcgactctcaacaaagttatacgctgcactcgcatcatgggcagaagacgactttcgttcagtcaatggscaaatcgaatatctcctcacagagtgtgtcaagcaacggaagaaagacggaaaatacgtatcagaaaccattgacgaaccatttgagattgatatttaactaat

SEQ ID NO: 2509 - DNA, 1016 bp, Streptococcus pneumoniae
  misc_feature (1)..(1016): tiling:Spneumo1:WAN024FBE; Cluster includes WAN0243ID spr1 695||15903737|NP_359287.1|1663931..1664941|-|1011 bp|Hypot hetical protein|S.pneumoniae|R6|NC_003098.1|ORF|122
atggctggaaaaagagattcatgtggagcatgtagaattatgacaaataaaatttatgaatataaggatgaccagractggtatgttgggtcttatagtatttttggtggcgttaacagtttgagcgactataagrcagattttcctctgtttgaattctccaaaatatttggagatgaagagtatggtttcccgctttcagtyactgttttacgctatggttctayctaccgttygttctccttygtggtagayatgcttaatcaagmaatgggacgaaacttgsaagttattcaacgtcatggggccctgctcttggttgaaaatgggcaactcttgtatgtagaattgcctaaasaaggggtcaatgytcatgatttctttgmgacaagcaaggtcagagaaaccttgtygattgcgactcgtmacgaaggyaaaaccaaggmattccgagctatctytgataagttaggctacgatgtggaaaatcttaatgactacccygacctgcctgaagtagcagaaacaggtatgacctttgaagaaaatgcccgccttaargcagaaaccatttctcaattaacgggyaagatggttttggcagatgattctggtctcaaagtcgatgtccttggtggcttaccaggcgtctggtcagctcgtttcgcaggtgtgggagcaactgaccgtgaaaataatkccaaactcttgcacgaattggccatggtctttgaactcaaggaccgctcggctcagttccacacaaccctagtcgtagccagcccaaataaggaaagtttagttgttgaagcagactggtcaggttatattaactttgaacctaagggtgaaaatggctttggctatgatcccctcttccttgtaggagaracaggtgagtcatcagctgaattaaccctrgaagaaaaaaatagtcaatctcaccgtgccttagccgttaagaaacttttggaggtatttccatcatggcaaagcaaaccatcattgtaactaat

SEQ ID NO: 2510 - DNA, 138 bp, Streptococcus pneumoniae
  misc_feature (1)..(138): tiling:Spneumo1:WAN024CJK; Cluster includes WAN0242LD SP09 06||15900787|NP_345391.1|859026..859157|-|132 bp|hypotheti cal protein|S.pneumoniae|TIGR4|NC_003028.1|ORF|011
atggctgtmaaatttacaaaacgagacgacttggacaagatgtttgaagagtttgctaaactccctgatttgaaacaagtyactttccctgatgacaaagagaaaaaagycaaagcagaaaagaaaaacctarctaat

SEQ ID NO: 2511 - DNA, 392 bp, Streptococcus pneumoniae
  misc_feature (1)..(392): tiling:Spneumo1:WAN024C8B; Cluster includes WAN0244NE spr0 216|rplQ|15902260|NP_357810.1|209958..210344|+|387 bp|50S Ribosomal protein L17|S.pneumoniae|R6|NC_003098.1|ORF|221
atggcttaccgtaaactaggacgcactagctcacaacgtaaagcaatgcttcgcgatttgacaactgaccttttgatyaacgaatcaatcgtgacaactgaagctcgtgctaaagaaatccgtaaaactgttgaaaaaatgattactctaggtaaacgtggtgatttgcatgcacgtcgtcaagcagctgctttcgtacgtaatgaaatcgcatctgaaaactatgatgaagcaactgataagtacacttctactacagcacttcaamaattgttctcagaaatcgcacctcgttatgctgaacgtaacggtggatacactcgtatccttaaaactgaaycacgtcgtggtgatgcagcgccaatggcgatcatcgaattagtataactaat

SEQ ID NO: 2512 - DNA, 246 bp, Streptococcus pneumoniae
  misc_feature (1)..(246): tiling:Spneumo1:WAN024FIM; Cluster includes WAN023KYU 3151 79_2675||||1424863..1425108|+|246 bp|EGAD orf prediction|S .pneumoniae|R6|NC_003098.1|ORF|110
atggcttcgatgtcttcaaggaagcccatgttaagcatttcatccgcttcgtcaaggataagggtttcaatgtcttgtaatttcaaggccttgcgtttaatcaagtccaagaggcgacctggagttcccaccacratatgggcaccagatttaagagccttaatttgtttttcaatgcttgatccgccatatactgaacggactttgactcccttactacgaccaaagcggaagagttcttcttga

SEQ ID NO: 2513 - DNA, 269 bp, Streptococcus pneumoniae
  misc_feature (1)..(269): tiling:Spneumo1:WAN024DAJ; Cluster includes WAN0243ZV spr1 063|ptsH|15903107|NP_358657.1|1061374..1061637|-|264 bp|Hi stidine-containing phosphocarrier protein of the PTS|S.pne umoniae|R6|NC_003098.1|ORF|111
atggcttctaaagatttccacgtagtggcagaaacaggtattcacgcacgtccagcaacattgttggtacaaactgctagcaaatttgcttcagatatcactcttgrgtacaaaggtaaatcagttaaccttaaatcaattatgggtgttatgagtcttgstrwyggycaaggtgctgacgtaactatctcagctgaaggtgcagatgcaratgacgctatcgctgcaatctcagaaacaatggaaaaagaaggattggcataactaat

SEQ ID NO: 2514 - DNA, 294 bp, Streptococcus pneumoniae
  misc_feature (1)..(294): tiling:Spneumo1:WAN024F62; Cluster includes WAN023M7R 3143 87_458a||||236347..236640|-|294 bp|EGAD orf prediction|S.p neumoniae|R6|NC_003098.1|ORF|110
atggcttctaggatattgagcacaatcttaccaccatccaaggctggaatcggaataagattaaaaatcccaatattgatggaaatcattgccaagaagtacaagatattytcaattccatttttagcagcatcactacttgccttaaagatagcaacaggtccacccaacttgttcaaatcyggttggaaaatcagatttttcagagctgagagaattcggagagctgagtcagcagcagttgtaaaaccacctacaaacatggatagaaaatctgacttaacccccggttga

SEQ ID NO: 2515 - DNA, 150 bp, Streptococcus pneumoniae
  misc_feature (1)..(150): tiling:Spneumo1:WAN024GDJ; Cluster includes WAN023SP1 BD00 3992.1_5||||2046..2171|+|126 bp|Glimmer 2.02 orf predictio n|S.pneumoniae|ATCC55840|BD003992.1|ORF|001
atggcttctctggttaataaattggattcttggtttgattttctgagattttcaagagacttttcagagattctacgttcagacataacattttctttctacttgtcacaacagacggatgatgcttttgtttcmagggttttcatgata

SEQ ID NO: 2516 - DNA, 1000 bp, Streptococcus pneumoniae
  misc_feature (1)..(1000): tiling:Spneumo1:WAN024CZR; Cluster includes WAN0243ZM spr1 073|lacD|15903116|NP_358666.1|1071766..1072746|-|981 bp|Ta gatose 1,6-diphosphate aldolase|S.pneumoniae|R6|NC_003098. 1|ORF|221
atggctttaacagaacaaaaacgtgyacgcttagaaaaactttctgatgaaaatggtatcatctcagctcttgcatttgaccaacgtggtgctttgaaacgcctcatggytmaacaccaaacagaagaaccaactgtggcycaaatggaagaactkaaagtcttggtagcagatgaattgactaaataygcttcatcwatgcttcttgaccctgagtatggacttccagcaactaaagctcttgatgaaaaagctggtcttctccttgcttatgaaaaaacaggttatgacacaacaagyacaaaacgcttgccagactgcttggatgtytggtctgcaaaacgtattaaagaagarggtgcagatgcagttaaattcttgctttactatgatgtagatagytcagacgaactcaaycaagaaaaacaagcytayatcgarcgyatcggttctgagtgtgtggctgaagatatcccattcttccttgaaatycttgcttacgatgaaaaaattgcrgaygcaggttctgtagaataygckaaagtaaaaccacacaaagttatcggygctatgaaagtcttttcagacccacgctttaacattgatgtyttgaaagttgaagttcctgttaacattaaatatgttgaaggcktcgctgaaggtgaagtrgtttayacacgtgaagaagcagcagccttcttcaaagcgcaagatgaagcaacgaacttkccatacatytacttgagtgctggtgtatcagctaaactcttccaagatactcttgtatttgctcatgaatcaggtgcraactttaacggagttctttgtggccgtgcwacatgggcwggrtcagttgaagcwtacatcaaagatggtgaarcagcagctcgcgaatgssttcgcacaactggatttgaaaacattgaygarctcaayaaagttcttcaaasaacagcracttcatggaaagaacgygtgtaaswaaktcctcctagtttag

SEQ ID NO: 2517 - DNA, 264 bp, Streptococcus pneumoniae
  misc_feature (1)..(264): tiling:Spneumo1:WAN024EXV; Cluster includes WAN023KWW 3144 42_2763a||||1470051..1470314|-|264 bp|EGAD orf prediction| S.pneumoniae|R6|NC_003098.1|ORF|110
atggctttagccaagagttcatcaaaggaagttatcaagagttgcttgaagaaaatccagattaacaagaggatrgctgcccccacacccatagtaataaacatatccgtatcttggacggccaggatattaccaaaaaggatatggaaaaggtcagttgaacttttagcgacaccaatcaagatgataccgagggctaagaaagaagaaaaggtaatgccgatggcggtatcgcttttgataatcgagtttcctttgatgtag

SEQ ID NO: 2518 - DNA, 764 bp, Streptococcus pneumoniae
  misc_feature (1)..(764): tiling:Spneumo1:WAN024BFE; Cluster includes WAN0244EJ spr0 535|glnQ-truncation|15902579|NP_358129.1|534266..534610|-| 345 bp|ABC transporter ATP-binding protein - glutamine, tr uncation|S.pneumoniae|R6|NC_003098.1|ORF|211
atggctttagtagaatttaaaaacgtcgaaaaatattacggagactaccaygcaytccgcracatcaatctccgttttgaaaaaggacaagtygttgtcctrctyggaccwtctggytctgggaartccactcttatccgtacsatcaatggtttrgagrctgtygacaarggaagyctyctagtcaatggscaccaagttgctggtgccagccagaaagatttggtacctcttcgcaaggaagtcggcatggttttycarcattttaacctytayccwcacaaarcdgtgttagaaaacgtracrctyrcrccyattraarttctaggaattgataaaaaagaagctgaaaaaaccgccmaaaaatatctggaatttgtaaatatgtgrgacaagaaagattcctatcccgccatgctatctggtggacaaaaacagcggatcgccatcgctcgtggtcttgctatgcatccggaactcctcctctttgatgaaccaacatctgctcttgatcctgagactatcggagatgttctagcagttatgcagaaactggcgcrtgatgggatgaacatgatcatcgttacccacgaaatgggctttgctcgagaggttgcggaccgcattatctttatggccgacggagaagttttagtagatacgacagatgtcgataacttttttgacaatccaagcgaacctcgtgcccaacaattcctcagcaaaattatcaaccacgaaagtgacaaagtcaaataactaat

SEQ ID NO: 2519 - DNA, 980 bp, Streptococcus pneumoniae
  misc_feature (1)..(980): tiling:Spneumo1:WAN024DIT; Cluster includes WAN0244IX spr0 377|fabH|15902421|NP_357971.1|377074..378048|+|975 bp|3-ox oacyl-acyl-carrier-protein synthase III|S.pneumoniae|R6|NC _003098.1|ORF|111
atggcttttgcaaaaataagtcaggttgctcattatgtgccagagcaagtggttacaaatcacgacttggctcagattatggataccaatgatgagtggatttcaagtcgaacgggaatacgacaaaggcatatttcaagaacagaatctaccagtgatttggctacagaggttgctaagaaactgatggcaaaagctggaataacaggaraagaactggattttatcatcctagctaccattactccagattcgatgatgccctctacagctgctcgtgttcaagctaatattggygctaataaagcctttgcttttgacttaaccgcggcttgcagtggatttgtatttgctctttcaactgctgaaaagtttatcgcttctggtcgctttcaaaaaggcttggtgattggtagtgaaaccctctctaaggcagtcgattggtcggatcgatcaacagctgtgttgtttggaratggkgctggtggtgtcttgttagaagctagcgagcaagagcatttcttagctgagagtctyaatagcgatggaagtcgcagcgagtgtttaacttatgggcattcaggtttrcattctccattttcagatcaagaaagtgcagattcrtttttgaagatggatggacgcacagtctttgattttgccattcgagatgtagccaagtctatcaagcagactattgatgaatctcctatagaggtgacagacttggattatctgctacttcatcaagccaatgaccgtattttggataagatggctagaaaaattggtgttgaccgagccaaacttccagccaatatgatggaatatggcaataccagtgcagccagtatcccgattttactttcagagtgtgtagaacaaggtctcatccctttagatggtagccagactgttcttctatcaggcttcggtggaggcttgacctggggcacgctcattcttacaatttarctaat

SEQ ID NO: 2520 - DNA, 246 bp, Streptococcus pneumoniae
  misc_feature (1)..(246): tiling:Spneumo1:WAN024DOR; Cluster includes WAN0242A9 SP13 33||15901187|NP_345791.1|1257120..1257353|-|234 bp|hypothe tical protein|S.pneumoniae|TIGR4|NC_003028.1|ORF|122
atggcwgaacgattttgggagaacttgtccattattttrgctgaaagraatatcagctggattgagttaaccagaaaaatgtttgcgggagagtttcactatcyaagtgaattgaatcgtttrtatcaaaagatwcgycactabwagatggaacaacgaatgcctcaaagtccatgggtagaaaggattgtgcagrtattagatttrgattatgaagatttatttcggaggtaactaatgaaaaga

SEQ ID NO: 2521 - DNA, 1998 bp, Streptococcus pneumoniae
  misc_feature (1)..(1998): tiling:Spneumo1:WAN024CIY; Cluster includes WAN0242AK SP13 22||15901176|NP_345780.1|1244879..1246870|-|1992 bp|v-type sodium ATP synthase, subunit I|S.pneumoniae|TIGR4|NC_0030 28.1|ORF|011
atggcyattagtcagatgaaaagaatytctctactatttwctaaragtagtcttgatgatgttttaaaaactattcaagaactagagtcagtgcagttccgtgatttaaaggttcaggataactggtcagaagckctagaaaaagatgargttgtatttycaactattcaaatttytcayacttctaattccmatcatggggttattgarggaaatgatgccttgamttatttgatgaatmaacaacaacatttrgaagcaactgtagagaaattacaagaatacctaccgaaagaaaacacgtttaarttattrcagcaacctccgataacwacctcttatgaagaattagaraaatttggtaaagctaatgttgctgagggtgttcttaaaaaagtgaatcatcaaatwaacagagttcatgaattagaaagamacattcaaagtaataatgaggaaatagagmgattaataaagtgggaaaaattagaaattrttcctgcgmatttagaacaattttctttctgtaraggaaaagtcggaacaattccaaggactgwagataatcgcttatacaatartyttttagaaaacaatattgaagttcaagaaatattttctaatgatagagagtacggtgttgttgttttctatcagtcyagttrctctatwgattttgatgaatacttatttgaaccatttgattattctagaaaggaattaccgaagcagcgagtagtagatttrgatcaagaaaacatgcagttaataactgaaaaagagaatattatcgcatcgttgcaagattcaaagaaawatttgatagatttacaatggcaaatwgactatattttatctatctatgctcgtcaaatctctaagaataacyttttgwgcactccgcatctagttgcattagaaggatggatagaagaaactcgtattttatattttataaaagttatggatgagcrttttggacattctatttatatttatgaatcggaaacattgwcggataatcaagatgaaatacctatcaaattaacgaatcaytctttaattgaaccatttgaattattgacagaaatgtatgctctgcccaaatattatgagaaagatcctacacctgtattagcaccattttactttacattttttggaatgatggttgctgatttaggctatggtttactattgtttttaggaayaatgttagcattaaaaatttttcatctaccttcagyaactaagaratttttaaaattctttaatatattaggggtagccgttgcaatttggggtggaatctatggctcattttttggatatgagttgccatttcatctgatawctacaacctckgatgtcatgactatattagtagtgtcagttgtgtttggrtttattacagtatttgyaggtttgttagcttcaggactacaaaaagtaagaatgaakaaatatgcagaagcatataattcaggatttgcgtggtgtgttattctgcttggcttgttatttattgctgtyggaatgttgatgcctgatatkagaccgttatttgtattagggaaatgggtatctatttttaatgctgtggggattttgattgyttctattattcaarccaaaagcttgtcaggtattggmkcaggattgtttaatctatataacatttcatcttatataggtgatttagttagtttcactcgattgatggcattaggattatctggagcaagtatagcatcagctttcaatttaattgttggtttgtttccgggrayattggctaaactgacaattggattagtattattcattcttttacatgcgatcaatatttttctatcgttactatcaggatatgttcatggagcrcgtctgatatttgttgaattttttggtaagttttatgagggtggaggaaaaccatttcaacctttgaaggcttctgagaaatatattaaggttattacaaagaatctaactaat

SEQ ID NO: 2522 - DNA, 377 bp, Streptococcus pneumoniae
  misc_feature (1)..(377): tiling:Spneumo1:WAN024DIV; Cluster includes WAN0244J1 spr0 373||15902417|NP_357967.1|373698..374069|-|372 bp|Conserve d hypothetical protein|S.pneumoniae|R6|NC_003098.1|ORF|111
atggcycaatcacttaacaaaacagtactcctcagtacgacaggcacttcctacctctctatcgctgggaaagttgggaaattccttgtcggagatcaggstttggaattttacccagatgtcaatgtcgaacaatttatccagattccttggagccatatcaatcagattggagccaatgtcactggaygcaaaatcagccgccacttcgaagtctttacagacaaaggaaaattcctytttgcttcaaaagactcaggtgccattctcaaaattgcacgcramaaaytrggcaatgacaaggtcgtcaaacttccgaccctgattcagacaattagccaaaaatttaaaaatctatttgcaaaaaartarctaat

SEQ ID NO: 2523 - DNA, 147 bp, Streptococcus pneumoniae
  misc_feature (1)..(147): tiling:Spneumo1:WAN024DRI; Cluster includes WAN02433D SP02 03||15900139|NP_344743.1|190888..191028|+|141 bp|hypotheti cal protein|S.pneumoniae|TIGR4|NC_003028.1|ORF|121
atgggaaaatatcaactagacgataaggggcgcgcacaagtgacccgttatcacgagaaacactctaaaggtggagctggtaagaaagaacgcttgcttagcttcagagaacaatttttaaacaagaacaagaaaaaactaactaat

SEQ ID NO: 2524 - DNA, 1172 bp, Streptococcus pneumoniae
  misc_feature (1)..(1172): tiling:Spneumo1:WAN024D7V; Cluster includes WAN0243R7 spr1 376|patB|15903419|NP_358969.1|1359229..1360395|-|1167 bp|A minotransferase|S.pneumoniae|R6|NC_003098.1|ORF|111
atgggaaaatatgattttacaagcctgcccaaccgtttagggcaccatacctataaatggaaagaaacagaaacggatagtgaagttctaccagcttggatagcggatatggactttgtrgtcttgcctgaaatccrccaagccgtgcaaacttacgcagaccaactggtttatggttatacctatgccagtgaagacttaattaaggaagttcaaaagtgggaagctacacaatacggttacaactttgacaaagaggctcttgtctttatcgagggtgtggtaccagccatctcaacagctattcaaacctttacaaaagaaggcgaggcggttttaattaacacgcctgtctacccrccctttgctcgcagtgtcaagttgaataatcgtagattgattactaattccttagtggaaaaggatrgtctgtttgagattgactttgaccaacttgaaaaggatttggtggaagaggaggttaaactctatrttctttgcaaccctcacaatcctggtggacgtgtttgggaaaaagaagtgttggagaagattggccaactctgccaaaaacacggtgttttgttagtttcggatgagattcaccaagatttgaccctctttggtcacaaacaccagtctttcaataccatcaatcctgccttcaaaaattttgctatcgtcttgagyagtgccactaaaacatttaatattgctggaacaaaaaattcctatgcagtcattgaaaatcctaagttgagactrgctttccagaaacgcctgttggccaataatcagcatgaaatttcaggcttgggttatttggcgacagaagctgcctatcgatacggtaaagattggctagaggaactcaagcaagtctttgaagaccacatcaattatgtgrtggatctatttggaaaagagactaaaatcaaggtcatgaaaccgcaaggtacctacttgatttggcttgacttttcagcttatgacctgactgatgaaacattgcaagagttgttgagaaatgaagccaaggttatcctcaaccgtggtttggattttggagaggaaggaagtctccatgcccgcatcaatatagctatgcccaaatctctgttgcaagaagtctgtcagcggattgtggctacttttgccaaaygttaactaat

SEQ ID NO: 2525 - DNA, 687 bp, Streptococcus pneumoniae
  misc_feature (1)..(687): tiling:Spneumo1:WAN024FN9; Cluster includes WAN023P7A pne5 3_15||||6349..7035|+|687 bp|Type 25F capsule operon, Glimm er 2.02 orf prediction|S.pneumoniae||WAN01UCCQ|ORF|000
atgggaaaattagaactaacacgtaagtactatcaattgtacaatgaaacgaaagaatattttaatgccttacagaccaatattcaacttagtggtgatggactgaaagtcatttctgttacttccacagtaaaaaacgaaggcaaatcgactatatcagttggcttgtccatgtccttggccttatcaggctataaagtcctgttactggatgtggatttacgtaattcagtgatgtcaggaatgtttcattctagggaaagaataacaggtttgactgaatatttatctggcaaagcgggaatggcggattctatgcaggaaactactttagataatctctatatattacaagcaggagtcgtttcaccgaatcccttatctctattaaggagtgttaagtttgaaaccttgatagattctatgaaaaagtactttgactatattatagtagatactccaccaatcggccaagtaatagatgctgcaattattgcccaacaatgtgatgggatatttttggtcactgaaatgaggaaaacgacacgcagacaaattttttcttccctccagcaattggaacaaactggagttcccgttttgggccttgtggccaataaagcaattataaaaaaagatagctatggctattatggaaaaaacaccgcgagcgagactgaaagatat

SEQ ID NO: 2526 - DNA, 1005 bp, Streptococcus pneumoniae
  misc_feature (1)..(1005): tiling:Spneumo1:WAN024FTR; Cluster includes WAN023P1F pne6 1_15||||9421..10425|+|1005 bp|Type 33B capsule operon, Gli mmer 2.02 orf prediction|S.pneumoniae||WAN01UCGA|ORF|000
atgggaaagaaattattaacaatagcagtgccatcatacaatgcggaaaaatatttaccagatactataccaacaatattatctgcaaagaatgtacatttaattgatttacttatagtaaatgatggttcgagtgatggtacgggggaaatcgctgaagaattcgagcgaaattaccctgatattattcgtgttttaaataaaccaaatggtgggcatggatcagctgtaaatgcaggtataaaaaatgcttatggaacgtattttaagrttgttgatgcagatgattgggttgatacagaaaatttagatgatttgatagaatatttaaaagaaacagatgtggatgaaattctttcaccgtattatcgagtttatgttaatcaagctggagatgtagtatctattgaaaattataacgaattttcgatgattcagacagataaagtgtaccaggtmgatkctttctatgaacaaataggtagaaccgtaggaatgcacactatgacattaaaaaccaagctgttaaaagaaaatcaagtagaattatctgaaaatatgtactatgtagatatggaatatatcacctatgttctaccatatatagaaacggtttttctttttaataaaccgatttataaataccgtttaggaacatctacgcaaagtattagtatagaaagttatataaaaaatagatctatgcataaacaagttayttttaatcttattgatttttacaatcaaacgaaacttggatttggtcgctccaaagcagtaaagaatctaataataaatcttataaatcagcagtggaatatctatttcaatttaaataatgtaactgaagctaaaaaagaattaatagaatttgaaaaatctatagctattaaaaataaaagcttcttgaaaaattctacgggcttaaagatgaattttgtcagaaaaagtcgttaccatttatttaacattgctaaatattatagtaattggagagtgaaatct

SEQ ID NO: 2527 - DNA, 705 bp, Streptococcus pneumoniae
  misc_feature (1)..(705): tiling:Spneumo1:WAN024CRM; Cluster includes WAN0244RA spr0 076|rr08|15902120|NP_357670.1|83838..84536|+|699 bp|Respon se regulator|S.pneumoniae|R6|NC_003098.1|ORF|111
atgggaaagacaattttactcgttgacgacgaggtagaaatcacagatattcatcagagatrcttaattcaggcaggttatcaggtcttggtagcccawgatggactggaagcgmtagagmtgttcaagraaaaaccgattgatttgattatcacagatgtcatgatgcctcggatggatggttatgatttaatcagtgaggttcaatacttatcaccagrgcagcctttcctatttattactgctaagaccagtgaacaggacaagatttacggcctgagcttggkagcagatgawtttattgctaagccttttagcccacgtgagctrgttttgcgtgtccacaatattttgcgccgccttcatcgtgggggcgaaacagagctgatttcccttggcaatctaaaaatgaatcatagtagtcatgaagttcaaataggagraraaatgctggatttaactgttaaatcatttgaattgctgtggattttagctagyaatccagagcgagttttctccaagacagacctctatgaaaagatctggaaagaagactacgtggatgacaccaataccttgaatgtgsatatccatgctcttcgacaggagctggcaaaatatagtagtgaccaaackcccactattaagacagtttgggggttgggatataagatagagaaaccgagaggacaaacaykaactaat

SEQ ID NO: 2528 - DNA, 987 bp, Streptococcus pneumoniae
  misc_feature (1)..(987): tiling:Spneumo1:WAN024CD4; Cluster includes WAN02411A |cps 6aS||AAL68423.1|||987 bp|putative rhamnosyl transferase|S. pneumoniae||AF246898|ORF|000
atgggaaartcagttgcaattttaatgaccacytataatggtgagmgatatttgtcacaacagattgatagtattaggtctcaaacattyacyaattggacrctttttattagrgatgatggatcaaaagataaracartagaagtaatacagaggtattctaagatagatgatagaattagattmgttgaaaatccctcaaagtttcatggagcttattayaatttttttaatctaattgaatacgttaaaaacaattatcaatttgattattactttttttgtgatcaagatgatatttggaaagagcacaagytagaaatacagctgttaagattttctaargatgamatgccagagatggtttactctgatatgtcaaygattgatgccartaataakttgatagatattagtataaataamataatggggattgaattaccgaacataaataatktgtattttattcatgcctatatctgggggtgtackgcaggytttaatcatgcattgytagagatggttccttcagttgatattgataaagattatttatatatagaaaaactgkctcatgatarttattttgcaaagtttgcactagagtatgggaaggtgttgttctgccctgagcaactggtcttgtatcgaagacayggacataatgtaacaactagtcatcattttaaattatctccgctaaatrttytcagaaaggctatwttgggtttcaatgaattggcacttacacatgctrgggtatataatcaaactctttatatgctaaaaaaagcttctgraaaaartcctttaagtgatagactrcttgaaattcaggaagtaatcaaaattggaggattaaaaggtgtgagatatttctrtcagaatcgaatttctcgaaagcaactcgtaagaacmatcggcttatataccatcatgctttttggsacctataaaaaatatattatgaaagaactctyataa

SEQ ID NO: 2529 - DNA, 1128 bp, Streptococcus pneumoniae
  misc_feature (1)..(1128): tiling:Spneumo1:WAN024FN8; Cluster includes WAN023P74 pne5 3_21||||10972..12099|+|1128 bp|Type 25F capsule operon, Gl immer 2.02 orf prediction|S.pneumoniae||WAN01UCCQ|ORF|000
atgggaaatcgtaaaaaagtttttgtagtagccaatgtagtcaaagaacatattctaaaatttcacattccgactatcaaagaaatgacaaaaagagggtggacggtagacgtaggtgcttctggggatgaaacagttccctattgtcaccaacaatattcactgccccaccaacgttctccgtttcatctaggcactctcaaaagtatctggaaattgagaaaaattttgaagtctggaggctatgatattgtttactgtcatactcctgttggaggtttggtgggacgactggcttctttaggattgcgaaaacaaggaacaagagtcatttattttgytcatggatatcatttttacaaaggagcaacttttttcaattggttagtgtattacccaattgaaaagctactgtccctttttacagatagtatcattctaatcaatcaagaagattatcatctcacaaaaacaaaatttaaacaggttcaatcctatctagtgagtggaatgggagtaaaacaagaacggttttcaccccaatcaaatcaagttagagaacgttatcgtaaagaattgaaactgcctgaggatgcgactgttttaatttattgtgctgagctaataaaaaataaaaatcaaacatttttacttcatgctatgaaaaagcttgtggatcagggagaraatctttattgcttattagtaggaattgattataccaagggtgaaatggtagaatrtattcaatccttgaatttatccgatcgagttttacttttagggtggagagaagatattgccaatctttacgcttgttctgatatatgtgttgcaacaagtattcgagaaggatttggattaaatatagtggaagcaatgttttgtcacgttccagttgttgcgaccatcaatagaggacacgccagtattatacaagatggacaaaacggtctattagtccaattaggaaatacaaagcaattagtagaggctatttatgtactaatgaaggatactaagaagaagcaagaattagtggagcaagctagtgcgaatttagaacaatatcatagtcagaaaattgtaaatagcttactagaaataatagaacagactgcaatgaag

SEQ ID NO: 2530 - DNA, 1678 bp, Streptococcus pneumoniae
  misc_feature (1)..(1678): tiling:Spneumo1:WAN024GA4-5; Cluster includes WAN02447E sp r0792|hsdR|15902836|NP_358386.1|788951..792301|+|3351 bp|T ype 1 restriction modification system endonuclease R|S.pne umoniae|R6|NC_003098.1|ORF|221
atgggaaattttagctttcttttaaaaaatgacgaatatgaatctttttcaaaaccttgcattgaagctgaraatatgattgctacatcaactgtggctactgcctttatggcgcgtcgtgctttrgagcaggctgtccattggatatatagtcacgattcatatttagaagctccctatygtgctactctatcttctttagtatgggatgatgattttagggatatcgtagattctgaactccacaagcagatagttctgttgattcggtggggaaaccatgctgctcatggtggtgaaattaaggaacgagaagcgattytagctttrcatcatttgtatcagtttgttaattttatcgattattgttacagcaatgartttgtggagcgttattttgatgagaagtgyttaccactttcagcaaacatcaaataccgagaaactccacaatctatgataaagttacaagacagtttaccagaactgcctgattttcatgaacagatggctgctcagtccgtagaagttcaagagacttatactgaaaaacgtgagactgcagcgcaacggcaagatgtgcctttccatattgawcaattatctgaggcagagacaagaaagctctttattgatatcgatctccgtttagcaggatggatatttgaagaaaactgtcgtgttgagatagccgttgatggtctcaagcacggttcaggaattggttactgtgactaygtactttatggtaaaaatgggaaaattttagcgattgtggaggctaaaaaagcctctgtcaatccagaagtaggggaagtacaggtcaaagaatatgctgaagctttggagaaacatatcggctatcagccaatttgctttattacaaatgggttgaagcactatatacttgatggtccgaaccgccgccagattgcaggcttttactctcaagaagaattgcaattagtgatggatagacgtcatcttcaaaaaccrcttgaggatatttctagtaaaattagggacgatatttccgggcgtcactaccaaaaacatgccattgcaagcgtttgtgaagctttctctratcatcgtagacaggcacttttggttatggcaactggggckgggaaaactcgtacagcagtttctctagttgatatcttatcacgtcataactgggtaaaaaacgttctcttcttagccgatagaacttccttggttaagcaagcmtatgattcgtttagaaaattactcccagatctttccgtttgtaacttcttagaagataaagaaggagctcaatcaagtcgyatggtcttttcaacttatccgaccatgattggagckattagtggtcaagaagaagtaaatcaacgccctttyactgttgggcattttgaccttatcataattgacgaatctcaccgttctatttatcagaaatacaagtccatttttgattattttgatgcaagrattgtaggcttaacagctactccgcgtcaagatttagataaaaacacctatggattctttaatttggagaatggggttccaacatatgcatatgatttggaagaggctgttaaagacggatatttagtagcctatcattctatcgaaaccaaactgaaactacctacggatggtctacattatgatgatttgtccgaag

SEQ ID NO: 2531 - DNA, 758 bp, Streptococcus pneumoniae
  misc_feature (1)..(758): tiling:Spneumo1:WAN024CZ8; Cluster includes WAN0243CR spr1 898|pstB|15903939|NP_359489.1|1877042..1877794|+|753 bp|AB C transporter ATP-binding protein - phosphate transport|S. pneumoniae|R6|NC_003098.1|ORF|111
atgggaacattttcagtcagacacctagacttattttacggggattttcaagccttaaaaaatatttcgattcaattaccagaaagacagattactgccttgataggcccatctggttgtggyaaatcaayttttctaaaaacccttaaycggatgaacgatttggttccttcttgccatattgaaggccaagtcctcttagatgagcaagatatttatagtagcaaattcaaccttaatcarctacgyaagcgtgtagggatggtttttcaacagcctaatccctttgccatgtctatctatgataacgtggcttatggcccaaggacacatggtattcgagacaaaaaacaattagatgccttagtggaraaatctttaaaaggggcagccatttgggamgaagtcaaagatgatcttaaaaagagtgccatgtccttatcwggcggtcagcagcaacgcctttgcattgcgcgagctttagcagtagaacctgatrttctgttaatggatgagccgacttcagccttagaccctatctccactttaaaaattgaagacctcattcagcaactaaaaaaggattatacgattatcattgttacccataacatgcaacaagcttcacgtatttcagataaaactgcttttttcttaacaggagaaatttgcgaatttggagayaccgttgacgtgtttaccaatccaaaagatcagcgcacagaagactatatttcaggacggttcggataactaat

SEQ ID NO: 2532 - DNA, 721 bp, Streptococcus pneumoniae
  misc_feature (1)..(721): tiling:Spneumo1:WAN024C5S; Cluster includes WAN023Q9F cont ig_1258_26||||11817..12254|+|438 bp|Glimmer 2.02 orf predi ction|S.pneumoniae|670|WAN01UEG8|ORF|000
atgggaacttttgcaaagattgaagacttggaattgttatggcgctcgttgaaatttgatgagcgtgcaagggctgaggctttgttggaagttgtatctaattctttgcgagtggaagctgaaaaagtcggtaaagaccttgacgatatggtagctgagagcgtgtcattcgctagtgttgccaagtctgtcacggtcgatatcgtggcacgaaccctcatgacctcaacagaccatgaaccaatgactcaggtatctgaaagtgccttgggttattcgtttagtggttcgtaccttgtccctggaggcggtctctttatcaaagacaccgaacttaaaaggcttggtttgaagaaaaaacaacgatatggagcgattgaaatttatgacctacctaaaaggaatccctgtcattttaatagacaaggtggaaactggtaatgacgatttcggtcatccaatccatcgtgatgttgagattgaggttcaaaatgtattggttgtcccaacttcatcagaggacgtcatcaatcaaatgaatttgactgggaaaaaggcggaatatacacttggtattcctaaaggagacactaacaagtgggagaaccgtgaggttaagttttttggtcgtaaatggcggacgattggcatccctcaagaggggattgagtcaatgattccattatcgtggaatagaaaggttatggttgaagtttatgag

SEQ ID NO: 2533 - DNA, 180 bp, Streptococcus pneumoniae
  misc_feature (1)..(180): tiling:Spneumo1:WAN024FLN; Cluster includes WAN023OVL pne7 0_4||||1465..1644|-|180 bp|Type 32F1 capsule operon, Glimm er 2.02 orf prediction|S.pneumoniae||WAN01UCC2|ORF|000
atgggaagcttttccttaaaggaaatcactctatcccttacatttaggagcgagaaagtaaggagtgtaagacaagcatttcatttgacacgaggcttggagctgttaggctggcgagccaaggctaagactagccttggtttagctggcaaaacagcttcaagggttcctcgtgtcaaa

SEQ ID NO: 2534 - DNA, 171 bp, Streptococcus pneumoniae
  misc_feature (1)..(171): tiling:Spneumo1:WAN024CLJ; Cluster includes WAN0241XY SP18 01||15901630|NP_346234.1|1718597..1718761|+|165 bp|conserv ed hypothetical protein|S.pneumoniae|TIGR4|NC_003028.1|ORF |021
atgggaatcatcgcaaatgtattcgctggtttagtcggggcatatgcaggacaatctcttttaggtagttggggtccakcaatcgctggaatggctttgctcccatctattgtaggtgcagcgattgtgattactgtagtgtcattctttacaggtagaaagctaactaat

SEQ ID NO: 2535 - DNA, 1225 bp, Streptococcus pneumoniae
  misc_feature (1)..(1225): tiling:Spneumo1:WAN024CE7; Cluster includes WAN0244RM spr0 064|agaS|15902108|NP_357658.1|70549..71715|+|1167 bp|Tagat ose-6-phosphate ketose/aldose isomerase|S.pneumoniae|R6|NC _003098.1|ORF|211
atgggaatggagcttactcccattcctatatttaatagaaaaagaggaactcaatgctacattatacaaaagaagacttgctcgaattgggtgcagaaatcactacgcgtgaaatctaccaacarcctgatgtatggagagaagcttttgaattttatcaagcaaaacgtgaagaaattgcagccttcctacaagaaatcgctgataaacatgactatattaaggttatcttgacaggtgctgggacttctgcttatgtgggagayaccttgctaccttaytttaaggaagtctatgacgaacgcaaatggaatttcaatgctattgcgacaacagatatcgttgccaatccagcaacctatttgaaaaaagatgtggcaactgtccttgtgtcttttgctcgtagtgggaaytcgcctgaaagtktggcgactgttgatttggccaaatccttggtggatgagctttatcaagtgacgattacttgtgcarcagatggtaaattggctcttcaagctcacggtgatgaycgtaatctcttgctcttgcaaccagctgtctctaatgatgctggatttgccatgacttctagctttacgtctatgatgttgacarctctcttggtctttgatcctacagaatttgctgttaagtctgaacgttttgaagttgtatctagtcttgcccgtaaagttttagacaaggcagaagatgtcaaagagctcgttgatttagactttaaccgtgtcatcwatctaggcgctggtcctttctttggacttgctcatgaagctcagctcaagattttggaattaactgctggtcaagttgcgaccatgtatgaaagcccagttrgcttccgtcacggtccaaaatctcttatcaacgamaatacagttgttttggtctttggtacaasgacagactacactcgtaagtacgacttggacttggttcgtgaagttgctggtgaccagattgctcgtcgtgttgtgcttttgagtgatcaagcttttggtcttgaaaatgtcaaagaagtggcccttggttgtggcggtgtcttgaatgatatttaccgtgtcttcccttacatcgtttatgcccaactctttgcyytattgacttcactyaaggtagaaaataaaccagatacaccgtctcctacaggtacagtaaaccgtgtagtacaaggtgtcataattcacgaatatcaaaagtaactaat

SEQ ID NO: 2536 - DNA, 306 bp, Streptococcus pneumoniae
  misc_feature (1)..(306): tiling:Spneumo1:WAN024GMC; Cluster includes WAN023LNA 3145 09_1538||||818752..819057|-|306 bp|EGAD orf prediction|S.p neumoniae|R6|NC_003098.1|ORF|110
atgggaatggcaccacatagaaccaacgcattgatagcagatttatggacatttcgtggcagaataatcttatctcctgccttgcaggttgccagaatcatagtctgcaccgatgaagttgttccaccaatcattagaaaggcatggctagctccaaaagcatctgcagccagctcctctgcatcacgaataatcgaaataggatggcctaaattatccaarggtttcatcgaattgacatcaatgcctacacatttttctcctaagagttcgacaagttctggatttccccgtccacgcttgtga

SEQ ID NO: 2537 - DNA, 1065 bp, Streptococcus pneumoniae
  misc_feature (1)..(1065): tiling:Spneumo1:WAN024FMK; Cluster includes WAN023P63 pne5 4_13||||9597..10661|+|1065 bp|Type 25A capsule operon, Gli mmer 2.02 orf prediction|S.pneumoniae||WAN01UCGY|ORF|000
atgggaatgtattattttataaaagtagaaaaagatttaaaaaatactgccggaataaaagctccggatgatatagagagaatttcaaaagaattaggaatgcaagaattactattccctaaatttccatttgaaaaaaataaagtatttcaaaaactctggctttttagtgtcataggctacaagtggacgagccttttatggaaacttaaaaccaatgatgtagttatatatcaacacccaatgtacggagtgagagtgtccaattgtttgattccattgttaaaaaaatgcaaaaacattaaatttatagcagtaatacatgatttggaatcactaagaaaaggtattcaaggagttatcgaagataatgaaacaacaaatactattgcagatacagagttgctatcgaaattcgataaaataatctctcataattcaaaaatgacaaattatttggaagggattggaataaaaaaagaaaatttagttgatttagaaatatttgattatctggacccatcggaaatgaaagaaaaaactgaagatggagtagttatagctggcaatctagctaaaggtaagagctcctatatttacaagctaattgaaaaaaaaccaggatttaaattgaacctttttggtccgaattttaatattgaagaattgccagagaatgttaaatactatggtagtttaacaccaaatgaattacctcaaaaactagtaggtaagtttggattggtttgggatggtgatagtttagatacctgtggcggaaacactggtaattatctgaaatttaataatccgcacaaaacatccctatatcttgcttctggaataccagtgattatatggaaagaagctgccttagcggaatttattgaaaataataatgttggatttactgtaaatagtttatcagaaatagaaattgtgttaaaaaatatatcagcaaatgattattctttgatgaaagcaaatacaatggaagtgggaaagaaattaagagagggttatttttatcgtcaatctatatataaatgcaaaaatgatttgaaa

SEQ ID NO: 2538 - DNA, 102 bp, Streptococcus pneumoniae
  misc_feature (1)..(102): tiling:Spneumo1:WAN024AXB; Cluster includes WAN023PGF pne3 6_20||||15397..15585|+|189 bp|Type 18A capsule operon, Gli mmer 2.02 orf prediction|S.pneumoniae||WAN01UCHT|ORF|000
atgggaattagcatagattatcttggtrttyataaggattgccagaaaatgggggatcggttcgcttttggtgmyctttgcrcttcgattatctttaactat

SEQ ID NO: 2539 - DNA, 150 bp, Streptococcus pneumoniae
  misc_feature (1)..(150): tiling:Spneumo1:WAN024DG4; Cluster includes WAN0244CE spr0 612|IS1239-truncation|15902656|NP_358206.1|623952..624095| -|144 bp|Degenerate transposase|S.pneumoniae|R6|NC_003098. 1|ORF|110
atgggaattctgttttattttgcggatgcctattcatcttggcaaaggggaagtaatgagaatgcgaatggacttcttcgtgagtattttcttaaaccgatttggcaacaattaccgaaaaaatccttaatgrtgctttgcctarctaat

SEQ ID NO: 2540 - DNA, 395 bp, Streptococcus pneumoniae
  misc_feature (1)..(395): tiling:Spneumo1:WAN024F3O; Cluster includes WAN0244IJ spr0 391||15902435|NP_357985.1|387839..388228|-|390 bp|Conserve d hypothetical protein|S.pneumoniae|R6|NC_003098.1|ORF|111
atgggaattgaagaacaacttggcgaaatcgttatcgccccacgtgtacttgaaaaaatcattgctatcgctactgcaaaggtagagggkgttcactctttttcaaacagatcagtgtctgataccctttcaaaactttcactcggccgtggcatttatcttaaaaacgtggacgaagaactcacagcagatatctatctctaccttgagtacggagtaaaagttcctaaggtagcggttgctatccagaaagctgtcaaagatgccgtccgtaatatggctgatgtagaactcgctgctatcaatattcacgttgcaggtatcgtcccagataaaacaccaaaaccagaattgaaagatctatttgacgaggacttcctcaatgactarctaat

SEQ ID NO: 2541 - DNA, 845 bp, Streptococcus pneumoniae
  misc_feature (1)..(845): tiling:Spneumo1:WAN024DU6; Cluster includes WAN024398 spr2 025|ABC-NBP|15904066|NP_359616.1|2016273..2017112|-|840 bp |ABC transporter ATP-binding protein - unknown substrate|S .pneumoniae|R6|NC_003098.1|ORF|112
atgggaattgctctagaaaatgtgaattttayatatcaagaaggtactcccttagcttcagcagctttgtcggatgtttctttgacgattgaagatggctcttatacagctttaattgggcacacaggkagtggtaaatcaactattttacaactcttaaatggtttattggtgccaagtcaagggagtgtgagggtttttgataccttaatcacctcgacttctaaaaataaagatattcgtcaaattagaaaacaggttggcttggtatttcagtttgctgaaaatcagatttttgaagaaacggttttgaaggacgttgcttttggaccgcaaaattttggagtttctgaagaagatgctgtgaagactgcgcgtgagaaactggctctggttggaattgatgaatcactttttgatcgtagtccgtttgagctgtcagggggacaaatgagacgtgttgccattgcaggcatacttgccatggagccakctatattagtcttagatgagccaacagctggtctagatcctctagggagaaaagagttgatgaccctgttcaaaaaactccaccagtcagggatgaccatcgtcttggtaacgcatttgatggatgatgttgctgaatatgcdaatcaagtctatgtaatggaaaagggacgtttagtaaaggggggcaaaccaagtgatgtctttcaagacgttgtttttatggaagaagttcagttgggagtacctaaaattacggccttttgtaaacgattggctgatagaggcgtgtcatttaaacgattaccgrttaagatagaggagttcaaggagtcgctaaatggatarctaat

SEQ ID NO: 2542 - DNA, 84 bp, Streptococcus pneumoniae
  misc_feature (1)..(84): tiling:Spneumo1:WAN024C6J; Cluster includes WAN023QEL cont ig_1284_3||||2237..2320|-|84 bp|Glimmer 2.02 orf predictio n|S.pneumoniae|670|WAN01UED8|ORF|001
atgggaattgggattgattgtatttataatcaatttgtgataaacaaaaaagaggctcgcacctctttttcttatttcttttta

SEQ ID NO: 2543 - DNA, 2531 bp, Streptococcus pneumoniae
  misc_feature (1)..(2531): tiling:Spneumo1:WAN024GOL; Cluster includes WAN0243YW spr1 099|gyrA|15903142|NP_358692.1|1095463..1097931|-|2469 bp|D NA gyrase subunit A|S.pneumoniae|R6|NC_003098.1|ORF|131
atgggaatttatggtataatgttgttacttactaattgtgaaatgaggcatttattaatgcaggataaaaatttagtgaatgtyaatctgacaaaggagatgaagrcragytttatcgaytacgccatgagtgttatcgtagcscgrgctcttcctgatgttcgagatggsttraarcckgttcaccgtcgcatyctytacggaatgaatgaattgggtgtkacyccagacaaacchcataaaaaatctgctcgtattacwggggatgtcatgggtaaataycacccacacggggattyctctatytatgaagcmatggtycgyatggctcaatggtggagytaccgttacatgcttgtagatggkcayggraaytttggytccmtrrmtrrwgatrgtkctgccgcycarcgttayacygaggcacgyatgagcaagattgctctggaaatgcttcgwgatatcaayaaraatacrgttgayttcgtygataactatgatgccaatgaacgkgaacccttggtcttgccwgcrcgytttccaaaccttttggtyaatggagcaactggyatygcggttggkatggcraccaatattccmcctcataayytrggtgaaacmwttgatgcagtgaagttggtcatggayaatcctgaagtgactaccaaggacttgatggaagtcttgcctggwccagattttccaacwggtgcycttgtcatggggaaatcaggyatycatwaggcttatgaaacrggtaaaggttckattgtyctwcgttctcgtachgaratygaarmractaagactggycgtgagcgyatygttgtaacaraatttccwtayatggtcaayaaaaccaaggtgcatgagcatattgttcgcttggttcaggaaaaacgcattgagggkatyacrgcagtacgtgatgagtcaaaccgtgarggtgttcgatttgttattgaagtcaagcgygaygcctcagccaatgttatyctcaataayctyttcaaratgacccaratgcaaaccaaytttggtttcaatatgctsgctatccaaaatggtataccgaaaattttgtctcttcgtcagattttggatgcttatatygagcaccamaaagaagtrgttgttcgtcgtacacgttttgataaggaaaaascggaagcgcgcgctcatatcttagaaggtctcttgattgcgctagaccatatcgacgaagtgattcgtatcatycgtgctagtgaaacggatgcggaagcwcaagctgagttgatgagyaagtttaagctttctgaacgtcaaastcargcyatccywgayatgcgtcttcgycgtttracaggtttggaacgcgataagattcaatctgagtatgatgacctcttggctctgattgcggayttagcrratattcttgctaagcctgaacgtgtttctcaaatyatcaaagacgaattggatgaagttaaacgtaaattttyygataarcgccgtacagagttgatgrttggacagrtcttgagtctcgaggatgaggacttgattgaagaatcggatgtcttrattaccctttctaacaraggmtacattaarcgtytggaycargmygarttyactgctcaaaaacgtgggggtcgtkgtgtccaaggaacrggagtrraagatgatgactttgttcgtgagttagtgtcaactagyacccatgatcatctgctcttcttcacaaayaarggacgwgtytatcgtytkaaaggttatgaaattcctgagtatggtcggactgccaaagggctaccagtagtcaatctcttgaaattggatgaagaygaaartattcagacggttatcaatgttgagtctgatcgcagtgatgatgcttatctcttctttacaacccgtcacggtattgtgaagagaacyagtgttaaggarttygccaatattcgtcaaaatggtctcaaagcgctgaatttaaaggatgaagatgagttaatcaatgtcttgttgrcrgaaggagatatggatattatcattggtaccaagtttggttatgcagttcgctttaatcaatcagccgttcgtggtaykaryyrtatcgccactggtgtgaaaggtgttaaccttcgtgaaggagacacagttgttggtgccagcttgattactgatcaagatgaggttcttattatcacagaaaaaggatatggtaagcgtacagtcgctactgaatacccaacaaaaggtcgtggtggtaagggaatgcagacagctaaaattaccgaaaaaaatggcttgctggccggtcttatgactgttcaaggkgatgaggatttgatgattatcactgatacaggtgtcatrattcgaaccaatcttgccaatatttcacaaacaggacgtgcaactatgggagttaaagtaatgcgcctggatcaagatgctcagatagtgactttcacaacggttgcggtggcagaaaaagragargttgggacagwaaaygaaacagaaggtgaagmataactaat

SEQ ID NO: 2544 - DNA, 360 bp, Streptococcus pneumoniae
  misc_feature (1)..(360): tiling:Spneumo1:WAN024DBJ; Cluster includes WAN02442V spr0 955||15902999|NP_358549.1|938136..938495|+|360 bp|Hypothet ical protein|S.pneumoniae|R6|NC_003098.1|ORF|101
atgggacaagaaattaagttaatccgtaagcaatttagaatcacgagacaagaagaaaaacagataaaagaaatgatgagggaacaaaaagtggatagtttctcagaatttcttcgtcaaaatttattgaaaaagaattatcaggatagaatttttgaaagttggttctccctttggcagtctcaaaagtttgaacagattagtcgagatgtgtatgaagttctggttgtcgcaagagaaaatcatcaagtgactcaagagcacgtctcaatcttattgacttgcgttcaagaattgattgcagaagtgaatcaagtacagccactcagtcgtgagtttcgtgaaaaatatatgggttag

SEQ ID NO: 2545 - DNA, 620 bp, Streptococcus pneumoniae
  misc_feature (1)..(620): tiling:Spneumo1:WAN024DV2; Cluster includes WAN0243OP spr1 466|cadD|15903509|NP_359059.1|1448241..1448855|-|615 bp|Co nfers low level cadmium resistance in Staphylococcus aureu s|S.pneumoniae|R6|NC_003098.1|ORF|111
atgggacagacaatcatatctgctattggtgtttatatttccaccagtatcgattatttaattattttaattattttatttgcacagctatcacagaataaacagaaatggcatatttatgcggggcaatatctaggcacaggcttacttgtaggggcgagtttagttgctgcttatgtcgttaatttcgtgcctgaagaatggatggttggattgcttggtttaatccctatctatttagggattcgctttgcaattgttggagaagatgcggaagaagaagaggaagaaattattgaaagattagaacaaagcaaggcaaatcaactgttttggacagttacattgctgacaattgcgtctggcggagataatttargtatctatataccttattttgcttcgttagattkgkcacagaccctcgtggccttgcttgtgtttgtaatcggcataattatcttttgcgagattagtcgggtgttatcctctattccgttaatattcgagacaattgaaaaatacgagcgaatcattgtgcccttagtattcattctacttggactatacatcatgtatgaaaatggcacgatagagacttttctgatcgtgtarctaat

SEQ ID NO: 2546 - DNA, 255 bp, Streptococcus pneumoniae
  misc_feature (1)..(255): tiling:Spneumo1:WAN024GNQ; Cluster includes WAN023M3B 3143 66_704||||369220..369474|-|255 bp|EGAD orf prediction|S.pn eumoniae|R6|NC_003098.1|ORF|110
atgggacctcccgctactgcaccatggtcgtccttggtgcggtatttgatggccaagagtccttccgcatacttggtagccattccaaagaaagccgccatccacatccaaaatagagctcctggtccaccaaccttgatmgccgtcgcaactcctatgatatttcctgttccaacagttgatgccaaggctgtacacagagctgcaaaactggatacatcaccatgtcccttatcctggataaaaataagctga

SEQ ID NO: 2547 - DNA, 287 bp, Streptococcus pneumoniae
  misc_feature (1)..(287): tiling:Spneumo1:WAN024C9B; Cluster includes WAN0244O2 spr0 192|rpsS|15902236|NP_357786.1|198601..198882|+|282 bp|30S Ribosomal protein S19|S.pneumoniae|R6|NC_003098.1|ORF|111
atgggacgcagtcttaaaaaaggacctttcgtcgatgagcatttgatgaaaaaagttgaagctcaagctaaygacgaaaagaaaaaagttattaaaacttggtcacgtcgwtcaacgatcttcccaagtttcattggttacactattgcagtttatgacggacgtaaacacgtacctgtttacatccaagaagacatggtaggccacaaacttggtgaatttgcaccaactcgtacttacaaaggtcacgctgcagacgacaagaaaacacgtagaaaataactaat

SEQ ID NO: 2548 - DNA, 722 bp, Streptococcus pneumoniae
  misc_feature (1)..(722): tiling:Spneumo1:WAN024D3C; Cluster includes WAN0243H6 spr1 738||15903780|NP_359330.1|1712329..1713045|-|717 bp|Conser ved hypothetical protein|S.pneumoniae|R6|NC_003098.1|ORF|1 11
atgggacgtaaatgggccaatatcgtagccaagaaaacggctaaagatggagcyaactctaaagtatatgcaaaatttggtgtagaaatctatgtagcagctaaaaaaggtgatccagatccagaatcaaactcagctttgaaattcgttatcgaccgtgctaaacaagcccaagtgccaaaacacattatcgataaagcgattgataaagccaaaggaaacacagacgaaacctttacagaaggacgttacgaaggttttgggccaaatggctctatgctaattgtggatactttgacttctaacgtyaaccgtacagcagccaatgtccgtgcagcctttggtaaaaacggcggaaacatgggcgcttcaggttctgtttcttacctytttgacaacaaaggtgttattgtatttggaggtgaagatgcggacgcagtctttgagcaattgctcgaagcggatgtggatgtggatgacgtagaagcacaagaaggtacaatcacagtttacacagcgccaactgaccttcacaaggctatcgttgcyctccgtgagtctggtattgaagaattccaagtgactgaattggaaatgattcctcartcagaagtggaattgtcaggcgaagaccttgaaacctttgaaaaactttacagcgttcttgamgacgacgaagacgtccaaaagatttatacgaacgtagatgggttttaactaat

SEQ ID NO: 2549 - DNA, 168 bp, Streptococcus pneumoniae
  misc_feature (1)..(168): tiling:Spneumo1:WAN024B2D; Cluster includes WAN023SF5 NC_0 03028.1_488||||371594..371752|-|159 bp|Glimmer 2.02 orf pr ediction|S.pneumoniae|TIGR4|NC_003028.1|ORF|011
atgggacgtaagccaaaaamgagacctgaagagaggacagaattagaacgtcttcaagcagaaaatgagtacctgagagcggagaatgccatcctaaaaaagttaagagaactccgattgaaggaggaraaagaagaaagacagaaattgttyaagaatctaaykamt

SEQ ID NO: 2550 - DNA, 903 bp, Streptococcus pneumoniae
  misc_feature (1)..(903): tiling:Spneumo1:WAN024FQM; Cluster includes WAN023PR0 pne1 7_13||||8067..8969|+|903 bp|Type 10A capsule operon, Glimm er 2.02 orf prediction|S.pneumoniae||WAN01UCJH|ORF|000
atgggactatctacmgtracattrtttaaaaatttaaagttywyagatagtaaatttattaaattggarggagagctycttcttaaatatcaagagtatttattaaaaatcatggaagatattgtaacagtrtgtgaggaagaaggrttataytattcactttctggtggkagtgcrytaggrgcwtatcgacacaaaggrtttattccatgggatgatgatatggayatatttatgctaggaagtgarmggrarattttctttcaaaaattytmtcaraaattytctgataartattggatacataattcacaaacaccaaactatggyatgcckattggtcgtrtcagacaaaaaggaacagttytacgtggycgagaggatgtyggagttgaagaatgtggattttttattgatattttttggcttgaaaatgttcctaattcaaaawthttgagacaacttcayggytttctmtgyatggsrattggattgttrctatcatgtagaaatttttataaaaatcgtcagytgatgctggagattatgaaggarcataaagaartaaggcttgtttttcgaataaaaytarttttrggrtttctaactagytttatrtctttgagacaatttacaagacttacggaaagsatctaytcattgtgcaagaataatrartcragataccttagygttccttcaggwagaaaacattattttggygagatgtttayaagrgaagatatgcagttaactaggaaactaarttttgaaggacataagtggaatgttccaaataatrttgagcaytatttaactgtaatgtayggtgaytatatgmaaatacctgyagttgaagatagggaatcacatatcattttagaaatytccttccctarygas

SEQ ID NO: 2551 - DNA, 105 bp, Streptococcus pneumoniae
  misc_feature (1)..(105): tiling:Spneumo1:WAN024DIO; Cluster includes WAN023YN0 AL44 9928.1_50||||41137..41232|+|96 bp|Glimmer 2.02 orf predict ion|S.pneumoniae||AL449928.1|ORF|000
atgggacttcatctaaaatctccactggtatggttttacgaacgaatrggcgaaaataatggttacgtagaaacatatgatgggaawmawawgawrggaataata

SEQ ID NO: 2552 - DNA, 164 bp, Streptococcus pneumoniae
  misc_feature (1)..(164): tiling:Spneumo1:WAN024DB9; Cluster includes WAN024421 spr0 985||15903029|NP_358579.1|971016..971174|+|159 bp|Hypothet ical protein|S.pneumoniae|R6|NC_003098.1|ORF|121
atgggagataaaccgatatctttccgagatgcggatggtaattttgtttccgccgcagacgtttggaatgaaaagaaattggaagaactatttaatcgtctcaatccaaatcgtgccttgagattggcacgaactamaaaggaaaatccatctcagtaactaat

SEQ ID NO: 2553 - DNA, 231 bp, Streptococcus pneumoniae
  misc_feature (1)..(231): tiling:Spneumo1:WAN024GDA; Cluster includes WAN023LS9 3143 22_1261a||||667879..668109|-|231 bp|EGAD orf prediction|S. pneumoniae|R6|NC_003098.1|ORF|110
atgggagatattcaaattttcttctacaatcaaagaaacaatttttccaagaacaccaacttcatcttctgtaacaaagcgtacacgaatcccttcttcgccataacctgcaatttcaagaaaggcttggaaaacgtcacggtcagtaataactccgtatacttgatggttatctacgacagggagaatacyaatcttatttttcaacatcagataagttgcatcttctag

SEQ ID NO: 2554 - DNA, 291 bp, Streptococcus pneumoniae
  misc_feature (1)..(291): tiling:Spneumo1:WAN024CYG; Cluster includes WAN0243B0 spr1 961||15904002|NP_359552.1|1948375..1948665|-|291 bp|Hypoth etical protein|S.pneumoniae|R6|NC_003098.1|ORF|101
atgggagcattaggttactatgaaggatttgttccttatgtttcaaatcaatacaaaaaccaagctgaagaagaaggcaaaccgctatctgataaatatattttcgaaaaaatcttaggaaaaacatatgcagccttcaaaaaagatcaaattaatgagcgtgtcgagaaattaggtaagttaaaacctattacaataaattacaacggaaaatcagaagtaattgatagtaaagaaaaattacaagagcttatgaataaagccgttaaagacgaagtggctcaaatatag

SEQ ID NO: 2555 - DNA, 710 bp, Streptococcus pneumoniae
  misc_feature (1)..(710): tiling:Spneumo1:WAN024DAZ; Cluster includes WAN02441B spr1 011||15903055|NP_358605.1|992899..993603|+|705 bp|Conserve d hypothetical protein|S.pneumoniae|R6|NC_003098.1|ORF|111
atgggaggkaaaatgaggttatyacctataagaaaaatatcacgtcagtctaaaaggttagcactttttttgacgttttgtgctggatatgtggatgcttacacttttattgttcgcgggaatacccttgtagctggacaaactggaaatgttgtctttctttcagtagaattaattaaaaataatgtttcggatgttagggacaaggttctcaccttgctagcgtttatgatgggagtctttttattaacgatttataaggaaaaattgagaattgtgaaaaaacctattctgtccttgattcccttggcaatcttatcaatcattattgcttttgtgccgcaaactgtggataatatctatctagtgccgcccttggccttctgtatgggactggtgacaactgcttttggagaagtgtcgggtattgcctataataacgcttttatgacagggaatatcaaacggaccatgctggcttttggagattatttccgaaccaagcacactccttttttgcgtgaaggattcatatttgttagcctgcttagtagttttgtccttggcgttgtcttttcagcctatttgacgattttctatcatgaaaagaccattcttggtgttcctattatgatgagcgttttttacctcagcatgctttttgcctcttggcagaaaaaagtaaaagaaaaagcttcattttarctaat

SEQ ID NO: 2556 - DNA, 836 bp, Streptococcus pneumoniae
  misc_feature (1)..(836): tiling:Spneumo1:WAN024EW5; Cluster includes WAN0243E0 spr1 852||15903894|NP_359444.1|1827484..1828314|-|831 bp|Conser ved hypothetical protein|S.pneumoniae|R6|NC_003098.1|ORF|2 21
atgggagtgaaaaagaaactaaagttgactagtttgctaggactgtctctgttaatcatgrcagcctgtgcgactaatggggtaactagcgatattacagccgaatcggctgatttttggagtaaattggtttacttctttgcggaaatyattcgctttttatcgtttgatattagtatcggagtggggattattctctttacggtcttgattcgtacagtcctcttgccagtctttcaggtgcaaatggtggcttctaggaaaatgcaggaagctcagccacgcattaaggcgcttcgagaacaatatccaggtcgagatatggaaagcagaaccaaactagagcaggaaatgcgtaaagtatttaaagaaatgggtgtcagacagtcagactctctttggccgattttgattcagatgccggttattttggccctgttccaagccctatcaagagttgactttttaaagacaggtcatttcttatggattaaccttggtagtgtggatacaacccttgttcttccgattttagcagcagtattcacctttttaagtacttggttgtccaacaaagctttgtctgagcgaaatggcgctacgactgcgatgatgtatgggattccagtcttgatttttatctttgcagtttatgcgccaggtggagtcgccctatactggacagtgtctaatgcttatcaagtcttgcaaacctatttcttgaataatccattcaagattatcgcagagcgcgaggccgtagtacaggcacaaaaagatttggaaaatagaaaaagaaaagcyaagaaaaaggctcagaaaacgaaataactaat

SEQ ID NO: 2557 - DNA, 2169 bp, Streptococcus pneumoniae
  misc_feature (1)..(2169): tiling:Spneumo1:WAN024CIN; Cluster includes WAN0243HV spr1 713|aga|15903755|NP_359305.1|1685869..1688031|-|2163 bp|Al pha-galactosidase (melibiase)|S.pneumoniae|R6|NC_003098.1| ORF|111
atgggagttaggatagagaataatctattttatgttgagagtaaaaatctaagtttgattattgaaaatcgaaatggctacttacttttgaaacatttaggaaagactattaagaactataaaggttccaatagtgtttatgaacgagaccatgccttttcaggaaatccaacggctactaatcgaacctttagtttagatactcarcgwcaratttttggacaacatggcttaggagattttaggaaaccaacyatacaggttcagcatartgtaactgaagtaacagactttcgatttgtagaagcaaagattttaaaaggtcagaatggtccacagggcttaccttctccacatagcatggacgatacagagactcttgtcttaatgttagaagattctaaggctcaacttagtctgactttgtattatactacttttaataatgatgcgactattgctagctacagtaaattagataataatagtaatcaggaagttgtcatccataaagatttttcttttatggctgattttccagctgcagattaygaaatagyaactctgcagggtgcttatgctcgtgaaaagactgttagacgtcaacaggtagaacaaggaatcttttcgattagytcaaaccgaggtgcttctggtcatgctcaaacaccagctcttctactatgcgaacaaggagtcacagaggatgctgggaatgtgtttgctattcaactaatgtatagtggcaactttgaagcttttgttcaaaaaaatcaattgaatgaagttcgggtggctattggcattaatccagaaaacttttcttggaagttagcycctgaggaatactttgaaacaccggtagctttagtgactcattcagatcagggattaactggtattagtcatgaaagtcagaattttgtactgaagcacattatkctaagtgaattttctaaaaaagaacgtccaattctaatcaataactgggaagctacttactttgactttcagagagaaaaactgttagagttagcagatgaagctaagaaagttggcattgaactttttgtattagatgatggttggtttggcaatcgttttgatgataatcgtgctttaggtgattgggttgttaatgaggaaaaactgggtggaagtctagaaagtctgatttcagctatccatgaaagaggtttgcagtttggactttggttagaacccgaaatgatttctgtagatagtgatttgtatcgtcaacatcctgactgggctattcaggttcctgrytatgagcatacttattctcggaatcaattagtacttaatcttgccaatcctcaggtagtagaatacttgaaaagtgtcttagatcaactcctatyttatcatgakattgattacattaaatgggatatgaaccgcaatatcactaagctagggaatggattaacttatctagagacacagatgcaatctcatcagtacatgctgggrctttaygaactcgtttcttatctgacagagaagcacagccatattctctttgagtcctgctctggtggtggtggacgaaatgatcttggtatgatrcgctatttcccacaagtctgggctagtgataatacwgatgcyattgcacgtttaccaattcmwwacggttcatcctatctctatccaaccatttctatgggggctcatgtgtcagcagtaccgaatcatcagatgggrcgaaygacaccattagaaacacgtggmcwtgtagcaatgatgggaaatttgggctatgarcttgatttgacaartttatcagatgaagagaaagctrmgattgctaatcaggtgaacttgtataaagaattacgaccagtagttcagttaggacarcagtatagactaattaatcctgatactgyatccaatgaagcwgctgtacaatttaattacrraaatcaaacgattgtaacctacgttcgcgttttrtcwgttgtagagaccatggaaacaactttaaarttaaaagatttggatgaagagggactatatraattacaggaaaatggcgaagtttactcaggtgcagaactmatgtatgcgggyttaactgttatyttatcccaaggagattttttgagtaracagtatatttttagaaractaykaactaat

SEQ ID NO: 2558 - DNA, 174 bp, Streptococcus pneumoniae
  misc_feature (1)..(174): tiling:Spneumo1:WAN024BIO; Cluster includes WAN024416 spr1 016||15903060|NP_358610.1|995261..995434|+|174 bp|Hypothet ical protein|S.pneumoniae|R6|NC_003098.1|ORF|111
atgggagttgttggaaagcagtcatctagtttttctttgctgttttggcttttttctttgtcatyagggaaagtgacttgcttcaaatcagggagtttaggaaattcttcaaacatcttgcccaagttgtctcattttgtaaattttacagccataggtgtacctcgattctaa

SEQ ID NO: 2559 - DNA, 1082 bp, Streptococcus pneumoniae
  misc_feature (1)..(1082): tiling:Spneumo1:WAN024DC8; Cluster includes WAN02443W spr0 918|asd|15902962|NP_358512.1|905279..906355|+|1077 bp|Aspa rtate beta-semialdehyde dehydrogenase|S.pneumoniae|R6|NC_0 03098.1|ORF|111
atgggatatacagttgctgtagtcggcgcgacaggtgctgtcggtgctcagatgataaaaatgttggaagaatcaacacttccaatygataaaatycgttaccttgcttctgcacgttcagcaggtaagtcattgaaatttaaagatcaagatattacrattgaagaaacgactgaaacagcttttgaaggagttgatattgctctcttttcagcaggtrrttckacatcagctwagtatgcaccatacgcagtaaaagctggcgtggtagtagtrgataatacatcttatttccgtcaaaatccagatgttcctttggttgttccagaggtcaatgctcatgcacttgatgcycacaacggaatcattgcctgccctaaytgttcaacaatycaaatgatggtggctcttgagccggttcgccaaaaatggggcttggaccgtatcattgtttcaacttatcaagccgtttcaggtgctggtatgggagcaattcttgagacacaacgtgaacttcgtgargtcttgaatgatggwgtgaaaccaygtgatttgcatgcggaaatyttrccttcaggyggtgacaagaaacattatcctatcgccttyaaygctcttccacaaatygatgtyttcactgayaatgattacacktacgaagagatgaagatgaccaaggaaactaagaaaattatggaagatgatagcattgcagtatctgcracatgtgtrcgtattccagtcttgtcagctcactctgagtcwgtttatatygaaacaaargaagtggctccaatygaagaagtmaaagcagctatcgcakccttcccaggtgctgttcttgaagatgatgtagytcatcaaatctatcctcaagcyatcaatgcagttggttcrcgtgatacctttgttggtcgtatccgtaaagacttggatgcagaaaaaggaattcacatgtgggttgtttcagataaccttctcaaaggtgctgcttggaactcagttcagattgctgaaactcttcatgaacgtggattggttcgtccaacagcygaattgaaatttgaattaaaatarctaat

SEQ ID NO: 2560 - DNA, 264 bp, Streptococcus pneumoniae
  misc_feature (1)..(264): tiling:Spneumo1:WAN024FUB; Cluster includes WAN023L7X 3138 15_2286||||1228791..1229054|+|264 bp|EGAD orf prediction|S .pneumoniae|R6|NC_003098.1|ORF|110
atgggatgggccccgacaaagcgaacagacttgccagccaaatactgctccgccgcatccacaatggttgacttggtcgaaccagcatctgaaataataacgccttctcgcaaatccaaattggccaactccttaatgaaagcaatagtttgtttgattggcaagctgaggataatgacatctgccaaaggagcaaaactagcaaaatcatccgttgcacggtcaatcataccttctttcaaggcgatatctctcgaagcttga

SEQ ID NO: 2561 - DNA, 2165 bp, Streptococcus pneumoniae
  misc_feature (1)..(2165): tiling:Spneumo1:WAN024G3X; Cluster includes WAN0243ZT spr1 065|nrdE|15903109|NP_358659.1|1062287..1064446|+|2160 bp|R ibonucleoside-diphosphate reductase (major subunit)|S.pneu moniae|R6|NC_003098.1|ORF|221
atgggattaaaacatcttgaagacgtgacttacttccgtcttaataacgaaattaaccgtcctgttaatggacaaatcatgcttcataaagayaaggaagccttggatgctttctttaaagaaaatgtagttccaaacactatggtttttgattcaatcaaagacaaaatcaattacctcattgaacacaactacatcgaaacagcctttatcaagaaataccgtccagagttcttggaagaattrgctcaatttatcaaagaccaaaacttccaattcaagtcattcatggcagcttataaattttacaatcaatatgccttaaagactaatgacggtgaatactatcttgaaaatatggaagaccgtgtcttcttcaaygccctttatttcgctgatgggaatgaagctgttgcaatcgatattgccaatgaaatcatccaccaacgctaccaacctgctactccttccttcttgaatgctggacgtgctcgycgtggrgagttggtatcttgtttcctaatccaagtgacggatgatatgaactctatcggrcgttctatcaactcagctcttcaactttcacgtattggtggtggtgtgggaattaccctcagcaaccttcgtgaagctggtgcacctatcaaaggctatgaaggagctgcttcaggtgtcgttcctgttatgaagctttttgaagacagcttctcttactccaaccaattggggcaacgtcaaggtgcyggygttgtctacctcaacgtctttcacccagatatcatcgctttcctttcaactaagaaagaaaacgctgatgaaaaagtacgtgtcaagactctatcacttggtgttgtagtaccygataaattctacgaattggctcgtaaaaatgaagaaatgtacctcttcagcccttactctgtagaaaaagaatacggtgtgccattcaattacatcgacattactgaaaaatacgatgaattggtcgcaaatccaaatattcgcaagacaaaaatcaaggcgcgggatttggaaactgaaatctctaaattgcaacaagagtctggctatccttatgtagtcaacatmgatacggctaaccgtgcaaatcctgttgatggaaagattatcatgagtaacttgtgttctgagattcttcaagttcaagaaccaagcttgatcaacgatgctcaagaattccttcaaatgggaacagatgtttcatgtaayctgggttcaaccaacgtggttaacatgatgacttcacctgattttggtcgttctatccgtgctatggttcgtgcccttactttcgttacagatagttcacatatcgtagctgtaccaacgattgaccatggaaatagccaagcccacacctttggtctcggtgccatgggactgcacagctaccttgcccaacaactcattgaatatggttcacctgagtctgttgaatttacaagcatctactttatgcttatgaactactggaccttggtagagtcaaacaatattgcrcgtgaacgtggtattaccttccacaactttgaaaaatcagactatgctaacggaagttactttgacaagtatgtaactggtgaatttgttccaacatcagaccgtgttaaagaactcttcaaaaatgtytttatccctgktgttgctgattgggctgaacttcgsgacaaggttcaagaagatggtctttaccaccaaaatcgccttgctgtagcgccaaatggttctatcagytatatcaacgacgtttctgcttctatycacccgattacgcaacgtatcgaagaacgccaagagaagaaaattggtaaaatctaytaccctgctgctggcttgtctacagaaaccattccttactacacttctgcctacgatatggatatgcgtaaagtcatcgatgtttacgctgctgcgactgaacacgtggatcaaggactttcactcaccctcttcatgcgyagtgacattccaaaaggcctttacgaatggaagagggaaaataaacaaacgacacgtgayttgtccatccttcgtaactatgcctttaacaagggaatcaagtctatctactacgtccgtacctttacagatgacggtggagaagtcggcgccaaccaatgtgaaagctgtgtgatttarctaat

SEQ ID NO: 2562 - DNA, 1295 bp, Streptococcus pneumoniae
  misc_feature (1)..(1295): tiling:Spneumo1:WAN024ET2; Cluster includes WAN0243Y8 spr1 123|ftsY|15903166|NP_358716.1|1124245..1125522|-|1278 bp|C ell division protein FtsY|S.pneumoniae|R6|NC_003098.1|ORF| 111
atgggattrtttgaccgtctattcggaaaaaaagaagaacctaaaatcgaagaagttgtaaaagaagctctggaaaatcttgatttgtctgaagatrttgakcctrccttcacagaagytgaggaagttyctcargaagaagcagaggttgaaaktkytgaasaakctgtgttccaagargaggawakycaagacacagtygaagaaartcwggattyagagccagytgtagrrgtttctcaaraagaartmgaagaattwccamactcasaagaaktmmcagaggaakagwagcttgagywyswagrractrtagaagaaaataattytgaagtkcttgaaccagaarskcctcaarcagaagaaacygttcaggaaaaatatgaccgcagtctyaagaaractcgyacrggyttcggtgcycgcttgaaygccttctttgctaacttccgctctgttgacgaagaatttttcgaggaactggaagaactgytgattatgagtgatgttggtgtccaagtcgcttctaacttaacggaggaactacgttacgaagccaagcttgaaaatgccaagaaacctgatgyacttcgtcgtgtcatcattgagaaattggttgagctttatgaaaaggatggtagctacgatgaaagcatccacttccaagataacttgacagttatgctctttgttggtgtgaatggtgttgggaaaacaacttctatyggaaaactagcccaccgctacaaacrarctggtaagaaggtcatgctggttgcagcagataccttccgtgcgggtgcagtagctcagctagctgaatggggccgacgagtagatgttccagtagtaactggacctgaaaaagctgatccagccagcgtgrtctttgayggtatggaacgtgccgtgrctgaaggtatcgatattctcatgattgatactgctggtcgtctgcaaaataaggataaccttatggctgagttggaaaagattggtcgtattatcaaacgtgttgtgccagaagcaccacatgaaaccttcttggcacttgatgcatcaacaggtcaaaatgccctagtacaggccaaagaattttcgaaaatcacacctttaacgggaattgttttgactaagattgatggaactgctcgaggaggtgtggttctagccattcgtgaagaactcaatattcctgtaaaattgattggttttggtgaaaaaatcgatgatattggagagtttaactcagaaaacttyatgaaaggtctcttggaaggyttaatckmrctaat

SEQ ID NO: 2563 - DNA, 272 bp, Streptococcus pneumoniae
  misc_feature (1)..(272): tiling:Spneumo1:WAN024F4Y; Cluster includes WAN0244OJ spr0 175||15902219|NP_357769.1|184352..184618|+|267 bp|Hypothet ical protein|S.pneumoniae|R6|NC_003098.1|ORF|111
atgggatttactgaagaaacagtacgttttaaattggacgattccaataaaaaagaaattagcgaaactttgacagatgtttatgcttcgttgaacgataagggttacaacccaatyaaccaaatcgtaggttacgtattgagtggagaccctgcctacgttcctcgttataataatgcacgaaatcaaatccgtaagtatgagcgtgatgaaatcgttgaggaattggttcgctactayctcaaaggacaaggagtcgatctataactaat

SEQ ID NO: 2564 - DNA, 504 bp, Streptococcus pneumoniae
  misc_feature (1)..(504): tiling:Spneumo1:WAN024CF7; Cluster includes WAN023RW6 cont ig_1609_38||||27210..27713|-|504 bp|Glimmer 2.02 orf predi ction|S.pneumoniae|670|WAN01UDCD|ORF|002
atgggatttttgaaatcgtctattaaatctgtcggtacattactactggcagattttctattttacggggtggctcaatcagctacccctattttttatgaaaggattgattacatgaagaaaatacgaagctataccagtatctggtctgtggaaaaggtactgtattctatcaatgattttagacttccgtttcccataacctttacgcaaatgacatggtttgtcgtgtcactctttgcagtgatgatacttggcaacttgccccctctttccatgatagagggagcatttctcaaatactttgggattcctgtggctttcacatggtttatgtctacaaaaacttttgatggtaaaaagccttatggatttttgaagtctgtcattgcttatgcactgcgaccaaagctgacctatgcaggaaaaaaagtaacgcttggcagaaaccagccacaagaagccattacagcagttaggagtgaattttatggcatatccaat

SEQ ID NO: 2565 - DNA, 105 bp, Streptococcus pneumoniae
  misc_feature (1)..(105): tiling:Spneumo1:WAN024CO2; Cluster includes WAN0246SS 5613 45-54-8||||||105 bp|DNA Streptococcus pneumoniae phage Dp- 1 open reading frame 250|S.pneumoniae||WAN0246SS|ORF|000
atgggcaaacatggaagattgacgaagactcagtcgactataaacctactcgagaaattcgaaactatattcgacaacttatcaaaaagcaatcacgctttatga

SEQ ID NO: 2566 - DNA, 351 bp, Streptococcus pneumoniae
  misc_feature (1)..(351): tiling:Spneumo1:WAN024FKN; Cluster includes WAN023L25 3149 09_2540||||1354283..1354633|+|351 bp|EGAD orf prediction|S .pneumoniae|R6|NC_003098.1|ORF|110
atgggcaaagtcgtccaacaaggcaatggttcttgtaaaggtatgcggttgaaagactgctacaatttccttgcttgggtatttctgacgagccgcatccaaggtcgcaataatttctgttggatgrtgggcaaagtcatcrataatcactgtatcattgacaattttctcagtgaaacgacgtttaacaccggcaaatgttttcaagtgctcacgcaccaagttcaaatcaaatcctgctgtgtaaagaagaccaataacggctgtcgcattcatgatattgtgacgaccaaaggttggaatgtggaattgccccaagttttgtccacggaaatgaacggtgaaggttga

SEQ ID NO: 2567 - DNA, 297 bp, Streptococcus pneumoniae
  misc_feature (1)..(297): tiling:Spneumo1:WAN024FGL; Cluster includes WAN023KW3 3138 50_2806||||1494480..1494776|+|297 bp|EGAD orf prediction|S .pneumoniae|R6|NC_003098.1|ORF|110
atgggcaacctgataaaaaccttggtgcaagatgctcatatcggagtcggatatattgaccttattcatctctgtcggttgcagttgctgaatcaagtcacccagtcctcccttatcattattaccataaatgccttcaacaatacgaggagccacacgaacaccattatttgcaatagttgctacatactgagccaactgcatcggcgtatagttatcaaactgcccaaaggcattagtaatgtaattagcaaagctatactctttgggaacaaatccagtagattcatctggtag

SEQ ID NO: 2568 - DNA, 264 bp, Streptococcus pneumoniae
  misc_feature (1)..(264): tiling:Spneumo1:WAN024CHN; Cluster includes WAN023MF2 3144 15_82a||||42835..43098|-|264 bp|EGAD orf prediction|S.pneu moniae|R6|NC_003098.1|ORF|110
atgggcaacctttttcagagccttttgctgactctctgctcgactataggtaaaggatttcttcagataatccacaaattccttgtcaattttttggtaacgctgactttcactggtcaaggacttgatagtctcaataccgttgatgtcctcaatgatagaagaagacagaaccgcattggcttccatggtatcccgattcatcttttcaaacggcttcataaaggcaaagataatcactgtgtagataggaagcgccaataa

SEQ ID NO: 2569 - DNA, 228 bp, Streptococcus pneumoniae
  misc_feature (1)..(228): tiling:Spneumo1:WAN024FS7; Cluster includes WAN023L60 3148 98_2354||||1260995..1261222|+|228 bp|EGAD orf prediction|S .pneumoniae|R6|NC_003098.1|ORF|110
atgggcacccttttgaatagcaagagttgctgtggcaaatttttcatagtcgacttgccaatccagaccaactaccacgtaggcaggkttttccttgtcttccacataaccagccgccttgatggcttccttgagtcctgcttctccgacgacatagacggtcttttcaagccccaaatcattcatatagtcgatggttgccaaagtcgctgtgtagacagtcgatag

SEQ ID NO: 2570 - DNA, 206 bp, Streptococcus pneumoniae
  misc_feature (1)..(206): tiling:Spneumo1:WAN024EXH; Cluster includes WAN024454 spr0 874||15902918|NP_358468.1|866108..866308|-|201 bp|Hypothet ical protein|S.pneumoniae|R6|NC_003098.1|ORF|101
atgggcataaaaggtacaaccaaagaaatactggctcctgtcagaaaattaccaaaccaggcaatrcgcagattatccttccagttaatctctgtcatcttgcctacctccctcaagaaggatatgcacttgattaagaagctggttctgattgccattattatcaagaacctggctggccaaatctttctttttttctaactaat

SEQ ID NO: 2571 - DNA, 276 bp, Streptococcus pneumoniae
  misc_feature (1)..(276): tiling:Spneumo1:WAN024GFC; Cluster includes WAN023LUU 3145 20_1118||||591069..591344|-|276 bp|EGAD orf prediction|S.p neumoniae|R6|NC_003098.1|ORF|110
atgggcatgaccaatctctctcaaaatagggcgaatcggaacctgaacatgcttgacatgcatgccaattgcagtgtctccgatatccaatccagcatgagccttgataaattcaacctcaactggatcctgcataaacttaaaggctgccaactgccccgaacctcctgcatgaagagtaggatggacactgacaatttccagaccaaactgctctgccacctgacgttcaacaacgagagcccgattgacatgctcacaaccttgaactgctaa

SEQ ID NO: 2572 - DNA, 249 bp, Streptococcus pneumoniae
  misc_feature (1)..(249): tiling:Spneumo1:WAN024G9J; Cluster includes WAN023LN9 3140 33_1542a||||821489..821737|-|249 bp|EGAD orf prediction|S. pneumoniae|R6|NC_003098.1|ORF|110
atgggcctgataaacccgactgattggaaaggcttgattgaccttgcggtgcatgcttcggcaggccgactcatcctcgtcaaagaagggactcccatgctggtaaatcatgatgccgtcttccttcagagctcgataactattgccgtagaattccttggtaaagagtccttccgtatggccaaatggatctgtcgcatcgttgatgataatatcgtaatcatcttcgcagtttcgcaaaaagcgtag

SEQ ID NO: 2573 - DNA, 273 bp, Streptococcus pneumoniae
  misc_feature (1)..(273): tiling:Spneumo1:WAN024CHM; Cluster includes WAN023MF0 3144 14_83||||43768..44040|-|273 bp|EGAD orf prediction|S.pneum oniae|R6|NC_003098.1|ORF|110
atgggcgtaaaagccwccctgtgcaagcaaatcagcatgctttccttcttcgacaatcttgccctgatccaagacaacyaccttctctgtccgctcagcaatagtcaagcggtgagcaatgaaaatcaaggtcttgtccaaagcaatgagattatcgacaatccgcttctctgtcaaaatatccaaactgctagtcgcctcatccaaaatcaagaccggcgcatctgtcaagagagcacgcgccaaagcgattctctgacgttgaccacctga

SEQ ID NO: 2574 - DNA, 387 bp, Streptococcus pneumoniae
  misc_feature (1)..(387): tiling:Spneumo1:WAN024EYH; Cluster includes WAN023L0X 3149 13_2586||||1375748..1376134|+|387 bp|EGAD orf prediction|S .pneumoniae|R6|NC_003098.1|ORF|110
atgggcgttttcctgttcttatggtttgatacggtgcaacatacgtgggaatggaatagcttcacggatatgttttgttcctgctgcgaaggttaccatacgttcgataccgataccaaatcctccgtgtggaactgtaccgtatttacgaaggtcaaggtagaattcatattctgtacgatccatgccaagttcatccatcttagcgacaagggcatcgtaatcttcctcacgcatagacccaccgataatttctccatagccttctggagcaagcaagtctgcacaaagcacgcgctctggatttccaggaactggtttcatgtagaaggccttgatggctgctggatagttcatgacaaatgttggcacaccaaagtggtttga

SEQ ID NO: 2575 - DNA, 237 bp, Streptococcus pneumoniae
  misc_feature (1)..(237): tiling:Spneumo1:WAN024GC9; Cluster includes WAN023LQZ 3146 87_1342||||710916..711152|-|237 bp|EGAD orf prediction|S.p neumoniae|R6|NC_003098.1|ORF|110
atgggctacaaaaatcccatcctccaccaagtcaaakatttttctggcaacttgcgaaaaatcaggtgcttgcgccagacgttggtctgtcaatcctgtcagttctttgatatgagcatccaagggttcatgtggattgacatccgtcgtatagtgatcgacgatttctccrtcctcaatcacgacaattcccacttggataattttagccttactacctgtgctagttgcctctaa

SEQ ID NO: 2576 - DNA, 135 bp, Streptococcus pneumoniae
  misc_feature (1)..(135): tiling:Spneumo1:WAN024B7F; Cluster includes WAN023VWS AX57 0981.1_1||||1..135|+|135 bp|Glimmer 2.02 orf prediction|S. pneumoniae||AX570981.1|ORF|000
atgggctcatatcaaaaagcacctcaaaaaggtattaccaagttgcaataccttttacgaggcttttttatcctgctcttgtttcaattgactatatatcacggatacagttgggaaagaagctatctaactaat

SEQ ID NO: 2577 - DNA, 141 bp, Streptococcus pneumoniae
  misc_feature (1)..(141): tiling:Spneumo1:WAN024B7J; Cluster includes WAN023VPA AX57 1523.1_1||||1..141|+|141 bp|Glimmer 2.02 orf prediction|S. pneumoniae||AX571523.1|ORF|000
atgggctcatatcaaaaagcacctcaaaaaggtattaccaagttgcaataccttttacgaggcttttttatcctgctcttgtttcaattgactatattagaggcgagacatttttcggttctttgtcaactgctaactaat

SEQ ID NO: 2578 - DNA, 648 bp, Streptococcus pneumoniae
  misc_feature (1)..(648): tiling:Spneumo1:WAN024FVS; Cluster includes WAN024104 |||A AF73818.1|||648 bp||S.pneumoniae||AF154044|ORF|000
atgggctggcaggagtggttagaccagatgttagcggaaatttcctatgatgaaaaccagcaagagctgatcttctttgtaggagaagcagactatcagcaagaactatctaaacgtggatttggcactgtcttgccagaaagaaagtttggtatctcggtgactatgattcgagaaaatccaagcaaatattggaaatacatcgctcaacccttccgtcgtcagtttaccaagaaagtattgatcatgggaagtgccagcaatgggaagaccactctagccaaggatttggctaggtattacgatgcgcctgtcagtctggaatacgcacgtgagtatcagattaaaaataacgtccgcgacgatgaattgactccaaaggattactactatctcctgttgggacagtatgaccagacctcaaagttaatcgatagcaatgccaatcgaggtttggtaatagccgataccaactccttggtaaccaagggctactatgattattacatggagacagagaaccaagtggacttatcaggagaaacctttgacaatctctttgtttcaatcttggccaaggaaaaatgggacttgattctctttgtgcacctgttggctcctatgtcaatgacggatttagagatatga

SEQ ID NO: 2579 - DNA, 744 bp, Streptococcus pneumoniae
  misc_feature (1)..(744): tiling:Spneumo1:WAN024FS6; Cluster includes WAN0243UA spr1 265||15903308|NP_358858.1|1261428..1262165|-|738 bp|Hypoth etical protein|S.pneumoniae|R6|NC_003098.1|ORF|111
atgggcttaacttatcaaatgaaaatgaaaattccttttgatatggctgatatgaacggtcatatcaaacttccagatgtgattttgctgtcactgcaagtttcagggatgcartcgattgaactgggagttagtgataaggccattttggaagamtataatctggtctggattatcgyagaatatgatattgaggtgkttcgtttgcctcgttttgcggaagaaattaccatcgaaacggaagccttgagctacaatcgacttttttgctaccgtygctttactatttataatgaagcggrgcaggagctcatccayatgatggcgacctttgttctcatggaccgcgacagtcgaaaagtccatgytgttgaacctgagattgtggctccttaccagtctgattttgataaaaaacttatccgtggaccgaagtatgartccttggaagarcygatcagcaaggattaccatgttcgtttttacgacttggatatgaatggtcatgtcaataacagtaaatacttggactggatttttgaggtcatgggagcggattttttgacccactatattcccaagaaaatcaacctcaagtatgtcaaggaagttcgaccaggtggggtgattacatcggctgttgaacggactggactggaaagcaagcatgaaattacaagtgatggggttatcaatgcccaagcaatcattacttggcaagaaataaaaraggctytarctaat

SEQ ID NO: 2580 - DNA, 318 bp, Streptococcus pneumoniae
  misc_feature (1)..(318): tiling:Spneumo1:WAN024G5W; Cluster includes WAN023LI9 3131 82_1857||||996771..997088|+|318 bp|EGAD orf prediction|S.p neumoniae|R6|NC_003098.1|ORF|110
atgggcttctgtaatagttataaaggcttgaggatcgattcgatgaatcatttccttcgttttcacaatttcatttcttccgacaatacagtagatgattttcaaattttctttactatagtagccttgaccagaaataaaagtaacacctcttccgaggtcatcattaatcgccttagcaagttggtcaggacgttttgtgataatcataaagcctttgccggcatatcctccttcaccaatcaaatcaataacacgagaaacaataaaatcaaacaaaagcgtgtaggaaaccaatctcaaatccttgaagattag

SEQ ID NO: 2581 - DNA, 99 bp, Streptococcus pneumoniae
  misc_feature (1)..(99): tiling:Spneumo1:WAN024DNQ; Cluster includes WAN023SIH NC_0 03098.1_1963||||1531978..1532076|-|99 bp|Glimmer 2.02 orf prediction|S.pneumoniae|R6|NC_003098.1|ORF|101
atgggctttaaaaaatatttgaagaatttaccgaaaaactctggatttttgatttggagttggattcaacttatctggtttgaaacatggttttgggga

SEQ ID NO: 2582 - DNA, 171 bp, Streptococcus pneumoniae
  misc_feature (1)..(171): tiling:Spneumo1:WAN024CMA; Cluster includes WAN023SE5 NC_0 03028.1_707||||535336..535497|+|162 bp|Glimmer 2.02 orf pr ediction|S.pneumoniae|TIGR4|NC_003028.1|ORF|010
atggggaaaattgttgctattgatttatttaacggtgcaggtggcactacaagtggccttaaaaaatcaggcatagatgttcaagttgctgttgaaattgattccgtagctgttaaaacttataagttaaataatcctgaggtgtctgtaatagatatggagctaactaat

SEQ ID NO: 2583 - DNA, 695 bp, Streptococcus pneumoniae
  misc_feature (1)..(695): tiling:Spneumo1:WAN024C3Z; Cluster includes WAN0244K2 spr0 336|csrR|15902380|NP_357930.1|341169..341858|+|690 bp|Resp onse regulator|S.pneumoniae|R6|NC_003098.1|ORF|111
atggggaaacggattttattacttgaraaagaacgaaatctagctcattttttaagtttggaactccagaaagagcagtatcgggttgatctggtagagraggggcaaaaagccctytccatggctcttcagacagactatgatttgatkttattgaacgttaatctgggagatatgatggctcaggattttgcagaaaaattgagycgaactaaacctgcctcagtcatcatgattttagatcattgggaagacttgcaagaagagctggaagttgttcagcgttttgcagtttcatacatctataagccagtcyttatcgaaaatctggtagcgcgtatttcggcratcttccgaggtcgggacttcattgatcaacactgcagtctgatgaaagttccaaggacctaccgcaatcttaggatagatgttgaacatcacacggtttatcgtggtgaagagatgattgctctgacmcgccgtgagtatgaccttttggcgacacttatgggaagcaagaaagtattgactcgtgagcaaytgttggaaagtgtttggaagtatgaaagtgcgaccgagacaaatatcgtagatgtctatatccgctatctacggagcaagcttgatgttaaagghcaaaamagctacattaaaacygtgcgtggtgttggwtayaccatgcaagaatarctaat

SEQ ID NO: 2584 - DNA, 876 bp, Streptococcus pneumoniae
  misc_feature (1)..(876): tiling:Spneumo1:WAN024FOS; Cluster includes WAN023P5H pne5 5_14||||9655..10530|+|876 bp|Type 27 capsule operon, Glimm er 2.02 orf prediction|S.pneumoniae||WAN01UCGU|ORF|000
atggggaaagaaattaaagctgtttatgcgatattaaattacaatacttgggaagatactgcgcgtttagcacagaaagttgcaacatttcagcatattcaatctgtgataatagtggataatctatcaacagatgattcataccattatttaaaaagacttgagggagagaaaatttcagtttatcaaacacaaagaaatggtggatattctgttggaaataatgttgcagcacgaaaagcttataatatgggagttgatattcttttcatttcaaatccagacgttgatattgatgaaaaagattccttgatgattgcacaaaatttgtataaaaatagttcatatgcactgctatcaggtatagaatataatgctatgaaggagatagatttgccaattgtctggcatgaaaattcctattacgatgacttacttgattgtttgtttttaaccagaaaattgcgaagaaaaaaagaagatatcaatttgtcaatgattaaatcatctataatagatgtagatcttgttaaaggctcgttttttgctgtaaggctgtctgattttcatgatgttggttattttgatgaatctgtatttcttttttgtgaagagagaatattagccaaaaagttacaaaaagcaaataaaaaaataggtattctgcctgaagcgaaatattaccacaatcattcaacttctataaacgagaagtataaaaagaaaaaagaacagatagttttactatataatgctcgttattattacaatgtgacgtatcaaaatattagctttttgaaaaaaatttgcctaaaactattcatgtttttatctattattgaatactcgatactagattatattaaacgaaaggga

SEQ ID NO: 2585 - DNA, 2236 bp, Streptococcus pneumoniae
  misc_feature (1)..(2236): tiling:Spneumo1:WAN024CTY-5; Cluster includes WAN0244DP sp r0565|bgaA|15902609|NP_358159.1|572123..578809|+|6687 bp|b eta-galactosidase precursor|S.pneumoniae|R6|NC_003098.1|OR F|331
atggggaaaggycattggaatcggaaaagagtttatagcattcgtaagtttgctgtgggagcttgctcagtaatgattgggacttgtgcagttytattaggaggaaatatagctggagaatctgtagtttatgcggatgaaacacttattactcatactgctgagaaacctaaagaggaaaaaatgatagtagaagaaaaggctgataaagctttggaaactaaaaatrtagttgaaaggacagaacaaagtgaacctagttcaactgaggctattgcatctgagaagaaagaagatgaagccgtaactcmaaaagaggaaaaagtgtctgctaaaccggaagaaaaagctccaaggatagaatcacaagcttcaartcaagaaaaaccgctcaaggaagatgctaaagctgtaacaaatgaagaartgaatcaaatgattgaaracaggaaagtggattttaatcaaaattggyactttaaactcaatgcaaattctaaggaagccattaaacctgatgcagacgtatctacgtggaaaaaattagatttaccgtatgactggagtatctttaacratttcgatcatgaatctcctgcacaaaatgaaggtggacarctcaacggtggggaagcttggtatcgcaagactttcaaactagatgaaaaagacctcaagaaaaatgttcgccttacttttgatggygtctayatggattctcaagtttatgtcaatggtcagttagtggggcattatccaaatggttataaccagttctcataygatatcaccaaataccttyamaaagatggtcgtgagaatgtgattgctgtccatgcagtcaacaaacagccaagtagccgttggtattcaggaagtggtatctatcgtgatgtgactttacaagtgacagataaggtgcatgttgagaaaaatgggacaactattttaacaccaaaacttgaagaacaacaacatggcaaggttgaaactcatgtgaccagcaaaatcgtcaatacggacgacaaagaccatgaacttgtagccgaatatcaaatcgttgaacgaggtggtcatgctgtaacaggcttagttcgtacagcgagtcgtaccttaaaagcacatgaatcaacaagcctagatgcgattttagaagttgaaagaccaaaactctggacygttttaaatgacaaacctgccttgtacgaattgattacgcgtgtttaccgtgacggtcaattggttgatgctaagaaggatttgtttggttaccgttactatcactggactccaaatgaaggtttctctttgaatggtgaacgtattaaattccatggagtatccttgcaccacgaccatggggcgcttggagcagaagaaaaytataaagcagaataycgycgtctcaaacaaatgaaggagatgggagttaactcyatccgtacaacccacaaccctgctagtgagcaaaccttgcaaatcgcagcagaactaggtttactcgttcaggaagaggcctttgatacktggtatggtggcaagaaaccttatgactatggacgtttctttgaaaaagatgccactcacccagaagctcgaaaaggtgaaaaatggtctgattttgacctacgtaccatggtcgaaagaggcaaaaacaaccctgctatcttcatgtggtcaattggtaatgaaataggtgaagctaatggtgatgcccactctttagcaactgttaaacgtttggtyaaggttatcaaggatgttgataagactcgctatgttaccatgggagcagataaattccgtttcggyaatggtagcggagggcatgagaaaattgctgatgaactcgatgctgttggatttaactattctgaagataattacaaagcccttagagctaagcatccaaaatggttgatttayggwtcagaaacatcwtcagcwacccgtacacgwggaagttactatcgccctgaacgtgaattgaaacatagcaatggacctgagcgtaattatgaacagtcwgaytatggraatgatcgtgtgggttgggggaaaacagcaaccgcttcatggacttttgaccgtgacaacgctggctatgctggacagtttatctggacaggtacggactatattggtgaacctacaccatggcacaaccaaaatcaaactccygttaagagctcttactttggtatcgtagatacagccggcattccaaaacatgact

SEQ ID NO: 2586 - DNA, 341 bp, Streptococcus pneumoniae
  misc_feature (1)..(341): tiling:Spneumo1:WAN024D78; Cluster includes WAN0243T4 spr1 307||15903350|NP_358900.1|1299186..1299521|-|336 bp|Hypoth etical protein|S.pneumoniae|R6|NC_003098.1|ORF|231
atggggaacttcatttccaatcaacgrattgaatctatgggagatgaagagaatgctaagtggactgaacgtggtgttctcatggatgtcaccatcaagaagaakgatggaaaaacaactatcggaacagctaaagmtcatcctacttgggtcaatcgaacaccaaagggaaccttttcaccagaaggatatcccttgtatcattaccaaacttatattttggaagattttatagaggrtggcagtcatcgtgaccagttagatgaagcgactamggaacgaattgatacagcctataaagaaatgaatgaacatgtgggattgaagtggtattarctaat

SEQ ID NO: 2587 - DNA, 1446 bp, Streptococcus pneumoniae
  misc_feature (1)..(1446): tiling:Spneumo1:WAN024FTH; Cluster includes WAN02402L |cps 19bJ||AAB66524.1|||1446 bp|putative oligosaccharide repeat unit transporter|S.pneumoniae||AF004325|ORF|000
atggggaataaatccataaagttgaatgcattattaaatattgtcctgacgctatcaaatatcattttcccattaatcactttyccttatatatctagaatattgaatccaaatggtataggtttaacttcattttttagttcaatagggaattatggtattttacttgcttctctgggaatttcaacttayggtatcaaagcagtagcaagtgttagagatgatagagataagttgtcaaaagtagtacaggagttaatgattataaacgttgctatgtctataataacaactgcaatactattatttatgactatayttataacacaattgaatagagaattttcactcctattgatcacatgtgggactattttatcttctcctttcgccttaaattggttgtatagtggaatggaagaatatacgtatattactactaggtcagtagtgtttamaattctatcattaatattgatttttctacttgtgaaaaggccagaggattatattgtttttgctagtatttcattgttttcttctctaagttcaaatatcttaaatctatggcatagccgacatttcattaatattaaattatataaaaatttacaatttaaatatcattttaaaccaatgtggtatttatttgcctcattacttgcagtaaatatttatactaatttagatacagtgatgctcggttttattaatggtaatgaggctgtgggatactattctgtggcatcaaaggttaagtggattttgctttctcttattacatctattagtgcagttttgctacygagactttcattttatattagtaaaaatgacacctcgaattttataaaaatgttaaaggagtcatctgcggttatattttttattgcgattccattgatggtattctttattgtagaggcgaaagatagtatcttattactaggaggaagtcagtatcttcctgcgactttagcgatgcaaatacttatgccaattttacttatttctggtttctcgaatattacaggaaatcaaatattgattccaatgaatagagaaaaatattttatggttgcagtaacgattggtgctgtgattaatcttattttgaatctactgttaatgcctaagtttggaattattggtgcttctgtcgcaactctttttgcggaattgtcgcagatgacggtacaattacatttttcaaaagaatatttagtatcaaatatatcgataaagagtttggttaatgtgataattgcaacagttgtttctayaataccactaatcattttgaatcagctgataacgataactataccattttattctctaatgctagcaggttttgctttcttttcattatatttagtaattctgcttttattaaaggaggaagtgacgattcaattattttctcttcttgcaaagaagaagtaa

SEQ ID NO: 2588 - DNA, 240 bp, Streptococcus pneumoniae
  misc_feature (1)..(240): tiling:Spneumo1:WAN024CAS; Cluster includes WAN023LL6 3146 50_1649||||874365..874604|-|240 bp|EGAD orf prediction|S.p neumoniae|R6|NC_003098.1|ORF|110
atggggaataataggaatattttccttgcgggcaaagtcttccaattctttcaagaaacctgtgacctgcttttgacgctgacgcatcaagtctacaatttcttctttgacgacaggacgacgcatgttatggttagcattcttactatacgattcaaccattttatgccaatcctaatttttcaacaagggcttcaaactcatttaaacggcgttcaaagactgcaaaggcatcgttga

SEQ ID NO: 2589 - DNA, 252 bp, Streptococcus pneumoniae
  misc_feature (1)..(252): tiling:Spneumo1:WAN024GO9; Cluster includes WAN023LPH 3146 70_1424||||752541..752792|-|252 bp|EGAD orf prediction|S.p neumoniae|R6|NC_003098.1|ORF|110
atggggaggaatgtctgtggcataaccagccgaaatcccagtcgaaccattgaccaagaggtttggaaaggctgctggcaagaccgttggttctttctccgtatcgtcaaagttccatgcaaaaggaactgtctttttctcgatatcctgaagaaggtagcctgcaatttcagacaaacgtgcctcagtataacgcatagccgcaggaggatctccgtccatagaaccgttattaccgtgcatttcaactag

SEQ ID NO: 2590 - DNA, 912 bp, Streptococcus pneumoniae
  misc_feature (1)..(912): tiling:Spneumo1:WAN024FV8; Cluster includes WAN0240UM |wci W||AAK20715.1|||912 bp|WciW|S.pneumoniae||AF316642|ORF|000
atggggatgaatatagaaaaattaaaactatctttkaaaaatrgaacgttttttyctgttgttattcaygccttacgwaaycgttggccyttrtggtggattsggaryaaggctattcgagaagtrcaacttgaagatagggcctacagaatactaaaaaagaaatacggytcyttaatttcaarctcttttgataaakcatayttatcagaaraagttcccaagcaaatctggatttgytggyttcaaggtatggagaatgctccagakttggtgaaatcatgttatagatcactwaaaaarcaatttcctgaatatgtcattacggttatttcttcagaraatatttyygaatatgtagaratayctgatattmtwtatraaaartgggkraatggtgtaataggmaatgctcatttttctgatatccttcgggtagagytgttacgtaagtttggrggaatatggattgactcwacagtgtattgtacaggaattactaccatasagayaattgraaaaaatmcattttttatgtataaaagtktatmttcrgtygaggagagratytcctcttccaactggatgattgcttctgttccyaatcatccattyatgrttacgatgagcamactyttgcaatcttattggtcaaaagaagttatagcaattcattattatctatttcatattctttttacgattatgatwgaatcacttyctgagttgtggcagcttgtacccacctatacgaacgcarcaccacatataatgrttgatgaattaaataatrttttttcaaaggaacgttaycagcaattgtgtcaaatttcagattttcataaattaaattataaaaaaaattacaatgataaatcagagagtttgtacagtyayttactgaatcagtag

SEQ ID NO: 2591 - DNA, 819 bp, Streptococcus pneumoniae
  misc_feature (1)..(819): tiling:Spneumo1:WAN024CHS-5; Cluster includes WAN0243HB sp r1733||15903775|NP_359325.1|1709432..1709794|-|363 bp|Hypo thetical protein|S.pneumoniae|R6|NC_003098.1|ORF|423
atggggatgattttactagccattctctttacttgcttttcggtctatctagagttggaagtgccgacctatatctcgaaaattacggatttrctaggtagtcaagraactaatttagatgagttgtggcagycggcaagcatgatgatgggaatgyyctttcttgccttcttgtccgtagttgcagttggattttttgcatcccgagtggcggcttcttatactagtaggctgagaagtgatatttttaaccgagttttggattactcgcagacagagattaagaaattttcaattcctagcctcttgaygcgtactaccaatgacattactcaagttcaaatgttgattactatggrcttgcaagtggtaacgygtggtycaattatggctatytgggctattgggaagattttaggtcattcagaatactggctytgggccgtacttgtggyagtgattrtcaacgtcytgatgacgaccgttttgatgacgctagmctttccaaaacagtccttgattcaggggytgayagataaactgaacagtatcactcgtgagagtttaacaggtattcgtgtcgttcgtgcctacaatgcagaggattatcaaaatgaaaaatttgcagcagtaaatgatgaattgacccgttwraatttgtttgtcaaccgtcttatggctattttgaatcctatcatgatggggatttcaagtggtttgagtgtrgcgatttactggattggggcctatgtgattaacgacgctgctccgatagcgcgtctgcctytctttagtgacatgattgttttcatgtcttat

SEQ ID NO: 2592 - DNA, 642 bp, Streptococcus pneumoniae
  misc_feature (1)..(642): tiling:Spneumo1:WAN024CL3; Cluster includes WAN02436U SP00 69||15900014|NP_344618.1|72674..73309|+|636 bp|choline bin ding protein I|S.pneumoniae|TIGR4|NC_003028.1|ORF|010
atggggatggcagcttttaaaaatcctaacaatcaatacaaagctattacaattgctcaaactctaggtgatgatgcttcttcagaggaattggctggtagatatggttctgctgttcagtgtacagaagtgactgcctcaaacctttcaacagttaaaactaaagctacggttgtagaaaaaccactgaaagattttagagcgtctacgtctgatcagtctggttgggtggaatctaatggtaaatggtatttctatgagtctggtgatgtgaagacaggttgggtgaaaacagatggtaaatggtactatttgaatgacttaggtgtcatgcagactggatttgtaaaattttctggtagctggtattacttgagcaattcaggtgctatgtttacaggctggggaacagatggtagcagatggttctactttgacggctcaggagctatgaagacaggctggtacaaggaaaatggcacttggtattaccttgacgaagcaggtatcatgaagacaggttggtttaaagtcggaccacactggtactatgcctacggttcaggagctttggctgtgagcacaacaacaccagatggttaccgtgtaaatggtaatggtgaatgggtaaacctarctaat

SEQ ID NO: 2593 - DNA, 294 bp, Streptococcus pneumoniae
  misc_feature (1)..(294): tiling:Spneumo1:WAN024G85; Cluster includes WAN023LKO 3146 47_1695||||902139..902432|-|294 bp|EGAD orf prediction|S.p neumoniae|R6|NC_003098.1|ORF|110
atggggctccaaaatcaagcaaatacactgttcaattccgtctgcttccatttgaccgatcacatctggaataaagggactggaaaacttattagcaaagtagacactgtattcaytccccagcctagcttctaccaaggyaacctcttgacgggtaattttttgcagaggcgtgcctccaattcgtacataattatcataragagtctgaatctcgtggtcttggggtctcaccccacgacgaatatttgtgaaaaaatcagctacaccttcaaagrtaatctcttctggtga

SEQ ID NO: 2594 - DNA, 213 bp, Streptococcus pneumoniae
  misc_feature (1)..(213): tiling:Spneumo1:WAN024D24; Cluster includes WAN0243EY spr1 818||15903860|NP_359410.1|1788261..1788467|-|207 bp|Hypoth etical protein|S.pneumoniae|R6|NC_003098.1|ORF|121
atgggggaagaagagatgagaaataaaatgattattgcaatgagtttagtagtagcaggagttatgacctatctcatgttttcgggattggatgagrrtttctaycattttccttggragstctttgctggctttggaatsatgtcttggcttgttagagaaggtttgaaattagtcrgagatgtgaaaaaggagyttgargaaykaactaat

SEQ ID NO: 2595 - DNA, 1431 bp, Streptococcus pneumoniae
  misc_feature (1)..(1431): tiling:Spneumo1:WAN024FR8; Cluster includes WAN023PVT pne0 8_21||||15772..17202|+|1431 bp|Type 7A capsule operon, Gli mmer 2.02 orf prediction|S.pneumoniae||WAN01UCKE|ORF|000
atgggggatgttatgaaaacaataaaaaattatgcttataaatctttttatcaactatttttgataatagtaccttttataacaatcccatatgtttctagaattttaggagcagagttaatagggataaattcttatacaaacactataataagttattttgtgttaatagcaaatcttgggattttgatatatggtaatagaaccatagcatatcatagagaaagtattgaggagcgtagtaaaaaattttgggaaattgtctcaattaagttgctggtagcaattgttgcctatgtcatatttattatatttttattcttttattcaaaatatagttgggtttttgtgattcaatctgtacaaattatagctacggcatttgatatatcttggctttttgatggtgtagaagattttaaacgtacagtagtgagaaattttctggttaaaataatttccattattctaatttttacttttgtcaagtctacagaggactttgacaaatacatatggataacagtaggctctactttaatgggtaatttgacattatggagttatttacaccattatattattaaaattccgataaaaagccttaagttgagtgaacacttagttcccattttgactttattcataccacaaattgcttctattgtatttatgtcaatcaataaaattttactaggtaatatttcgacgatatcgcaagcaggctactttgagaatgcggataaggtgattagaattcttctggctttagtatcatctattggagtagttgtttttcctaaagttgctcatgcgtataggagtggtgatatgaagagagtattagggttgacttatatgacttttgatgcagttaatattataactattccaattgtagttggaatagtttctattagccctacattctcttctattttttttgggacggaattccaaggaatagataaggttctgtctgttctagtattggagttaattttcatgggatatacttcggttttaggtagtcaatatctcattgtaacagggcaaacttactttttaagtatctcggtgttcctaggaatattttctacagtgatatcttctttctttttcattccgatatacggagcgcttggaagtgcgatttcatctgtaattggagaagcatctattatgattggtgaaatttacttgttaaggaatcaagttgatttctattatctatatagggatgtaccgaaatacatgattgctagcgctgttatgtatattagtatctcgtcattgaattattttatttcttcgccatttgtatctttgctatcaagtattgctatgggtgcagtgacttatgttactgttgtcttattactatgcccaagaatagtaataaaattattaaataaaaacacaagatttttt

SEQ ID NO: 2596 - DNA, 246 bp, Streptococcus pneumoniae
  misc_feature (1)..(246): tiling:Spneumo1:WAN024CBJ; Cluster includes WAN02435F SP01 23||15900065|NP_344669.1|127291..127536|-|246 bp|competenc e-induced protein Ccs1|S.pneumoniae|TIGR4|NC_003028.1|ORF| 110
atggggtggaattttcgtgtcgtaaatctactatctctacattcccaaacaaaaaaccccagcataarcagggcatctaagcatttaatycaaagtaaaatacaaaccaaacgacataggtcacgaggaggagaaaaagcgagtagagagtcacaaaggtcattttccacaagaacttggtttgtcrtcgttccagtttggcaaatagaagattyccyscataaacgcaagcaacaaaaacrataa

SEQ ID NO: 2597 - DNA, 623 bp, Streptococcus pneumoniae
  misc_feature (1)..(623): tiling:Spneumo1:WAN024GHG; Cluster includes WAN0244F1 spr0 517|cysE|15902561|NP_358111.1|518039..518656|+|618 bp|Seri ne acetyltransferase|S.pneumoniae|R6|NC_003098.1|ORF|111
atggggtggtggcrcgaaaccattgatatygtaaaagaaaatgatccagcggcccgcaccactttggaggttttgctgacttatccaggtgtcaaggccttggcggcccaccgtctctcgcattttctctggaagyacgrcttcaaactmttagctcgtatgyacagtcagtttkggcgcttttggactcagattgagattcatccaggagcccagattgattcaggtgtytttattgaccatggttctggtctggtgattggagagacagcgattgttgaaaaaggcgttcttctctatcacggagtgactctcgggggaacagggaaagactgtggcaaacgccatccgactgtacgaaagggagcyctcatatcagcccatgcccaagttatcgggcctgtggaaattggtgaaaatgccaaggtcggtgctgcagcagttgtcgtagcagatgtacctagtgaygtgacggttgtcggtattccggccaagattgtccgtcttcatggtaagaaagatgagcctgtyattcacgaagtcgaagaaaaacgrgagtattatgtcaataaactcgagcaggctaaagatgccagtcacagatcgtctggtttgtarctaat

SEQ ID NO: 2598 - DNA, 237 bp, Streptococcus pneumoniae
  misc_feature (1)..(237): tiling:Spneumo1:WAN024DPM; Cluster includes WAN023KG6 3148 13_3520||||1885100..1885336|+|237 bp|EGAD orf prediction|S .pneumoniae|R6|NC_003098.1|ORF|110
atgggtaaaataatcaaggctatagctagaaggagggaccaatccactactaatcctaagaacaaaacactcaagagagcagaagagagaggttcactggcactgataacggcaaccaccaaaggagaaaccaaggacacagccttcatggaaatgaaaaaagcaaaagccgttccaaagaaagcgataatgaggcaaatcaagatactccaaatatcaagagtaaaggaaagctga

SEQ ID NO: 2599 - DNA, 282 bp, Streptococcus pneumoniae
  misc_feature (1)..(282): tiling:Spneumo1:WAN024GMY; Cluster includes WAN023M23 3145 49_765||||396855..397136|-|282 bp|EGAD orf prediction|S.pn eumoniae|R6|NC_003098.1|ORF|110
atgggtaaacaggttgttgaccttggtgaatctcgacttcaacgtcttcgaattcttctacgatttcttgagcgatttcattggcaagttcttcgcttccgtcttcacckacatagaaggttacgatttcactgtcttcatccaacatatgtttcaaggtttcagtcaatgtttggtgcatatcagggtttgacacaagaatttttccatccaccatacctarattatcgttttcatggatttctaagccatcgatcgttgtatcacgcacggctgttgtga

SEQ ID NO: 2600 - DNA, 1358 bp, Streptococcus pneumoniae
  misc_feature (1)..(1358): tiling:Spneumo1:WAN024FJI; Cluster includes WAN0243Q2 spr1 417|glmM|15903460|NP_359010.1|1403479..1404831|-|1353 bp|P hosphoglucosamine mutase|S.pneumoniae|R6|NC_003098.1|ORF|1 11
atgggtaaatattttgggactgatggagtccgtggagaagctaacctagarctaacaccagaattagcctttaaactaggacgttttggaggctatgttcttagtcaacatgaaacggaagcgccgaaagtctttgtaggacgtgacacacgtatttcaggggaaatgytggaatcggccttggtggcaggtctcctttcagtagggattcacgtatacaaacttggtgtccttgcaacaycagcagtagcttacttggttgaaactgaaggagcaagtgccggtgtcatgatttytgctagccacaacccagcccttgataacggaatcaagttctttggcggtgatggcttcaaactagatgatgaaaaagaagcagaaattgaagccttgctagatgctgaggaagacactcttcctygkccaagtgcagaaggyttaggaatyttggtagattatccagaaggcytgcgtaagtatgaaggataccktgtktcaactggaactcctcttgatggaatgaaggttgccttggatacagctaatggagcagcttctaccagtgcccgtcaaatctttgcagaccttggtgcccaattgayggttatcggggaaacaccagacggtcttaacatcaaccttaatgttggttcaacacatccagaagcccttcaagaartggtcaaagaaagtgggtcagctattggtttggcctttgrtggagacaktgaccgcttgattgctgttgatgagaatggtracatcgtygatggtgacaagattatgtacatcatcggaaaatacctywctraaaaaggmcaatwrgctcamaatacaattgtgacaactrttatgtctaaccttggtttccacaaggccttgaatcgcgaaggtattaacaaggcagttactgcagttggtgaccgctacgttgttgaagaaatgagaaaatcaggytacaaccttggtggtgaacagtctggtcacgttatcttgatggattacaataccacaggtgatggtcaattatcagcagttcaattgactaaaatyatgaaggaaactggtaagagcttatcagagttggcggcagaagtaacgatttatccacaaaaattagttaatatccgagtggaaaacgycatgaaggaaaaggccatggaagtgccagctatcaaggccatcatcgagaagatggaagaagaaatggcggggaacggccgtatccttgttcgtccaagtggaacagarcccctcttgcgtgttatggcagaagcgcctacaacagaagaagtrractactatgttgatacyatcacagatgtagttcgtgctgaaattgggattgaytaactaat

SEQ ID NO: 2601 - DNA, 395 bp, Streptococcus pneumoniae
  misc_feature (1)..(395): tiling:Spneumo1:WAN024FRZ; Cluster includes WAN0243U8 spr1 267||15903310|NP_358860.1|1263384..1263773|-|390 bp|Conser ved hypothetical protein|S.pneumoniae|R6|NC_003098.1|ORF|1 11
atgggtaaattatcctcaatccttttaggaacsgtttcaggtgcagctcttgccttgtttttaacaagtgataagggcaaacaagtttgcagtcaggctcaagattttctagatgatttgagagaagatccggagtatgccaaggagcaagtctgtgaaaaactgacagaagttaaggagcaggctacagattttgttctgaaaacaaaagaacaggttgagtcaggtgaaatcactgtggacagtatacttgctcaarctaaatcctatgcttttcaagcgacagaagcatcaaaaaatcaattaaataatctcaaggarcaatggcaagaaaaagccgaagctcttgatgactcagaagagattgtgattsatataacagaagaataactaat

SEQ ID NO: 2602 - DNA, 615 bp, Streptococcus pneumoniae
  misc_feature (1)..(615): tiling:Spneumo1:WAN024CB5; Cluster includes WAN0244P6 spr0 152||15902196|NP_357746.1|160263..160877|+|615 bp|Conserve d hypothetical protein|S.pneumoniae|R6|NC_003098.1|ORF|111
atgggtagatttttagactttgwctttaatcgtttctttttagggatgattgcgacagccttcttttggctattaactttagcaggagggattatccttggtctagcgccggctagtgccaccttgatgagcttatatgcagaacatggttatagctttcgggaatacagtttgaaggaggcttggtctctttacaagcaaaattttrtctcaagcaacctgattttctatagctttttaggtgtgggtctagttttgacctatggtttgtatctcttggtgcaattgcctcatcagaccattgttcatttgattgcgacccttttgaatgtcctagtagttgccctgatctttttggcttatacagtatctttaaaattacaagtttattttgccttgtcctatcgaaatagtctcaaattatccttgattggcatctttatgagtctagcagctgtggcyaagrttctccttgggactgtgctacttgtagcaattggttaytatatgcctgccctgctattttttgtaggaattgggatgtggcatttctttatcagtgatatgttggaacctgtctatgaaatcatccatgaaaaattggcgwcaaaatag

SEQ ID NO: 2603 - DNA, 365 bp, Streptococcus pneumoniae
  misc_feature (1)..(365): tiling:Spneumo1:WAN024GFO; Cluster includes WAN0244DM spr0 568||15902612|NP_358162.1|580123..580482|-|360 bp|Hypothet ical protein|S.pneumoniae|R6|NC_003098.1|ORF|211
atgggtatgattttaatgaaattagcatctattttattattgatactgaccttagtcgtctgcattatcctaaccaaactttttagattaaaaaaactaggacgaaactttgcggatttggcttttccrgtcttggtatttgartattacytgattacarctaaaacctttacccataatttcctccctagactggggctarccctctcrwtcctagccattattctcgtctttttcttccttttgaaaaaacgcagcttttactaycctaaattyatcaaattcttctggcgtgcaggattcttattaacccttatcatgtatrtagaratgattgttgaattgttcttaatgaaatarctaat

SEQ ID NO: 2604 - DNA, 270 bp, Streptococcus pneumoniae
  misc_feature (1)..(270): tiling:Spneumo1:WAN024GDK; Cluster includes WAN023LSG 3140 52_1246||||660224..660493|-|270 bp|EGAD orf prediction|S.p neumoniae|R6|NC_003098.1|ORF|110
atgggtcaattctgtccctttttcttgataaaggtattgggcgtagtcgtccattcggtactggttgatataaaccacgcgcttgcagccgacctgaagcaattgttttgtacagttgagacaaggaaaatgggttacataggctgtaaagcctttgggaacaccacgctcagcaccttgaaggatagcattgacctcagcgtgaagggtgcgaacgcagtggccttcaatgaccaaacattcgtgatcaatacaatgctcagtccctga

SEQ ID NO: 2605 - DNA, 330 bp, Streptococcus pneumoniae
  misc_feature (1)..(330): tiling:Spneumo1:WAN024ES7; Cluster includes WAN023KKK 3139 05_3329||||1780776..1781105|+|330 bp|EGAD orf prediction|S .pneumoniae|R6|NC_003098.1|ORF|110
atgggtcactggatcaaaatgagccttgccatctggaaaaattttccccatattggcctgatggacaatatcaaaaatacgttctgggtccacccccatcaagacaaaactgccgtaggtgaagtaaagcgtgtcaatcaaggcatccacttgccctatcaaatcttgctgagcaggtgtcttcttggctactttayctgctgccttatcaagggcctgatgaagttgcgatacagcttgaccaaaatcttcttcagaaggactggctgctcgaacaaactccaccaattcttctattttaaaaccagccctatgggttgcaccctctaa

SEQ ID NO: 2606 - DNA, 716 bp, Streptococcus pneumoniae
  misc_feature (1)..(716): tiling:Spneumo1:WAN024DGL; Cluster includes WAN0244DF spr0 575|ccdA|15902619|NP_358169.1|585634..586344|+|711 bp|Cyto chrome c-type biogenesis protein|S.pneumoniae|R6|NC_003098 .1|ORF|111
atgggtcatattttcttttttctaagtgtctttttggcagggattctatccttcttttctccttgtatcttacctttgttaccggtctatacaggagtgttactagatgataaggatggtgctcaggcttctagcggcaaattttcaatytcagttactagtttattacgaactctggcctttatagcaggaatttcctttatatttattttgttgggctatggagctggttttttaggcgatttgctttatgcttcttggttccaatatcttactggggcaattattatccttcttggtttgcaccaaatggagattctacactttaaggggctttataaggaaaagaggctacaactgcaaggacaggggcaaaatggtaagggctatagtcaggcatttttattgggcttgacctttagttttgcttggacgccttgcgtggggccggttctggggtctgttttggccttggcggcttcaggtggttcaggagcttggcagggagctggtctcatgttggtgtatacgctgggcttggcgctaccattcttgcttctagctctgacctctagttatgttttgaaacatttccgaaaacttcatccctatctcggaatcctcaaaaaagtgggtggttttctcattattgtgatgggmytcttggttctgtttggaaatgcttcaattttaagtcaattatttgaataactaat

SEQ ID NO: 2607 - DNA, 1391 bp, Streptococcus pneumoniae
  misc_feature (1)..(1391): tiling:Spneumo1:WAN024GDX; Cluster includes WAN0244BU spr0 632|ABC-NBD|15902676|NP_358226.1|640145..641530|+|1386 bp| ABC transporter ATP-binding protein - cobalt or other cati on transport|S.pneumoniae|R6|NC_003098.1|ORF|111
atgggtctggaactacgagcgattcagtccccaatyttctctgagccgtttgattttacttttcatgcgcaagcctttaccttgttagttgggagyartggktcwggaaaatccagcctytttcaartsattgcccaagtyagttctcttccctatagyggtcaagtcctgatagatgggagcgaggtcagtcagctttctatcrtcgmacgtgtccagamggttggyattctcttkcaaaatcyyaatcatcaatttaccatggagarcttgtttgaggagytgrttttyaccwtggaraatatcggctatcaccttcaggaaattgattctaaaatagcagaggttgtccagcaatgtcgttgcraggmmatcttrcaccgtcycatycatcacytatcaggtggggaaaagcaaaaagcagcgmtggctgtcctctttgccatgaatcctagggtmtatctcttggatgagcccttcgcttccattgaccgcaagagyagaatcgagatattggagattctaaaagagttggctcttgatgggaagacagtyattttgtgcgaccatgatttatctgactataaagcctatatcgacyatatggtkgagctaagagacggaaaactaagggaagtgtttcaaatcccttcctatgagatgacacaggttgcttcaaaggaagttgctkctagcccggaaytattccatatgraymgwrygactkgtgagyttggwaatcgcyccctcttttcrattgctgatttyacattytaycaaggratttcctgtatcctgggtgacaatggtgtygggaaatcaaccctctttcgstctattcttcaatttcaaaagtataaggggmgcattrcwtggaagggkwcrgtcctgaaaaagaaaaagagtttgtaycgtgawctgackrgtrttgttcaggaagctgagaagcagtttatccgagtcagtctgcgagaggagcttcaattagatggacctgattctgaaagaaatcagcggatttttcaagctttacgatattttgatttggagcaggcagtcgataagagtccctatcaattaagtggtggtcagcaaaaaattcttcagctcytgaccatcttgaccagtaaggcttccgtgatcttgctagatgaaccttttgcaggtttggatgatagagcctgccattatttttgcaagtggattgtggaggagaggaaycaaggaagaagttttctgctcattagtcatcgtttagaccctttgatttctgtggttgattattggattgagatgactagtcagggtcttcggcatgtgaaagaagtgaccattaccaaaccacttacatctcagagtagcaatacccaaggggaggtgagatarctaat

SEQ ID NO: 2608 - DNA, 873 bp, Streptococcus pneumoniae
  misc_feature (1)..(873): tiling:Spneumo1:WAN024FX2; Cluster includes WAN02418A |ant ||AAO34534.1|||873 bp|aminoglycoside adenylyltransferase|S .pneumoniae||AY167641|ORF|000
atgggtcttaacatgagagctgaaacagaaatgctagatctgattttacagactgccaaaactttacaagtcaaagctgtcgccatgtctggttcacgaactgatacaaaagcaccaaaagatgagtttcaagactacgatgtggtctatgtcgtggatgattttgataatctgacgagtgacctttattggctagaccagtttggcaaacgcattattgagcaagaggttgctcttgaccatcgtcgtctaaatcttatgctttttgaagacggcaatcggataaatttgactctttgcccaaaagagcacatcaaagagtgggtggatagcgaagcggaattcatagttttagaagataagaagggcttgtttgagtcatattctcccagtccaaagcgtttctggatacatccagctactgaaacggattttgaaaagacctgcaatgaattttggtgggtgtcagcctatgtggtgaagggcattcatcggaaccacttggtctatgcgacggatcatctctatggaatttgccaacaagaattgctcaagcttttagctttgcaagtggcagcagataagggaacggtcgatgttggcaagaactacaagtacctctttcagtatttacccactgagaaagaaaaggaattctcagatttgcttgatttttcaagtatagataaaatcactcagtctttattggctacgatgcaacttttccatagagaagctcaaagacttgctcaaaagctgggctttgactacgataaagaagtggctgagaagatgattgagtatgctgaggaaagagtgaagaagtttgggaataactggaaaaatgaaaaagcgagaggagaagactcatga

SEQ ID NO: 2609 - DNA, 471 bp, Streptococcus pneumoniae
  misc_feature (1)..(471): tiling:Spneumo1:WAN024CRG; Cluster includes WAN023MBB 3144 01_255a||||132307..132777|-|471 bp|EGAD orf prediction|S.p neumoniae|R6|NC_003098.1|ORF|210
atgggtggctgtacgcacaccgacagccttgccatcttccaccaaaatctcatcaatcatggtttgacgaagggtcagattttcttgattttcaactgtcttgcgcatctccttagagtaaagttccttgtcagcctgcgcacgaagagcacggacagctggccccttccctgtgttgagcatcttcatctggatgtaagtcttgtcaatrgtyttggccatctcgccaccgagggcatcgacttcacgyacgacaatccccttggcagaaccaccgatagagggattacaaggcatgaaagccagcatttcaatattgatggtcgcaagcaggaccttacagcccatacggctagcggccaaggaagcctcaaccccagcgtgtcccgcaccaattacaataatatcgtattcttcagtaaaatgataaatcatgtttctctcctattcctcaagatgaatgtgtcttag

SEQ ID NO: 2610 - DNA, 755 bp, Streptococcus pneumoniae
  misc_feature (1)..(755): tiling:Spneumo1:WAN024C8A; Cluster includes WAN0244NB spr0 219|gpmB|15902263|NP_357813.1|212409..213158|+|750 bp|Phos phoglycerate mutase 2 paralog|S.pneumoniae|R6|NC_003098.1| ORF|221
atgggtggcttttattttatcattcatgatataatagaagcaaacggaggacggaaaatggtaaaagtacgattgtatttggtacgtcatggcaagaccatgtttaacacgattggtcgcgcgcaaggttggagcgatactcccttaactgctgaaggtgaacgagggattcaagagttaggaatcggtttgcgagaatctgatctacagtttgagcgygcttattcgagtgattctggtcgtaccattcagaccatgggaattatmcttgaagaacttggcttgcaggggraaatcccttatcgcatggacaagcgtatcagagaatggtgtttcggtagttttgatggagcctatgatggcgatcttttcatgggcattattcctcgtatctttaatgtggaccacgttcaccaattgtcttatgctgaactggctgagggcttggtagaggtcgatacagctggttgggctgaaggytgggaaaaactcagtggccgaatyaaggaaggctttgaaatrattgcaaaagaaatggaagatcaaggtggaggtaacgcccttgttgtcagccatggaatgactattggaaccattgtttatctgattaatggcatgcatccgcatggtctrgataatggtagcgtgacratycttgaatatgaggacggycagtttagggttgaagttgtcggtgaccgtagttaccgagagctaggacgtgagaagatggaagaaggytctatttaactaat

SEQ ID NO: 2611 - DNA, 882 bp, Streptococcus pneumoniae
  misc_feature (1)..(882): tiling:Spneumo1:WAN024DQ5; Cluster includes WAN02449U spr0 704||15902748|NP_358298.1|703224..704099|+|876 bp|Hypothet ical protein|S.pneumoniae|R6|NC_003098.1|ORF|111
atggmtgatgaraaatcaacttgcccttagtggcgaaaaaattcttgaaaaaatttatcctcaactatttcaccaygtcggcatgattcgtggggaatayttrttgagagagctyaatcaaaayatmmtattasmaagttgtcagsaatttgtraaagattatctwgakactatytgctccytktactyagrtrargaagtttggtatcgttttwctgaattaacgaatacagaagccaattgtttagyggggactaragagttttttgacgaagggcatccctygtttggctatagaggaacyaggygtttactggcgtgtttggatgaatttcaggcwgaagcacatgtcgttacagaagtttatcaaaccaacyccaatctatctgttatytttccttttgtcaatgatgccgaccaattaaaacaagctattacagyattgcgtcagyakggytttactgggaaagtcggaacgatgattgaattaccgtcagcgtattttgacttrkmtagkatactggaaacgggcatttcaaagattgtagttggaatgaatgatttgacttcctttgtttttgcgactatgagaaacagtcaatggcatgatmtggaaagtccaataatgttagatatgctaagagatatgcaggataaagcaagaaagaacaagattrattttgctgtagcaggctatctgaatacttctttcatacaaaaaatgaatcagttgggtatcaagtgcattatccactacagttctattccagagatttttgatttagagattgaccatccagatcatcttaaacacataaaagaagaaagtaaaaaattacaaaggagyacccatgayaccgcaagaaatgtggaataactaat

SEQ ID NO: 2612 - DNA, 1083 bp, Streptococcus pneumoniae
  misc_feature (1)..(1083): tiling:Spneumo1:WAN024CFK; Cluster includes WAN023RWM cont ig_1609_17||||9942..11024|-|1083 bp|Glimmer 2.02 orf predi ction|S.pneumoniae|670|WAN01UDCD|ORF|001
atggraatagaagaatgtaagmaaatttcaattcttgatgtagcmartcgtttrggkatctcctttaaacaagtttcgagcagtgtctatgaacatcctgaacacgattcatttcggattttttcaactaccaatacttttaaatggttttcaagagatattcaaggtgatgtcattgattttgttcracttgttaagggaatttcctttaaagaagctctagcctttctttctraagaaccttttcaaaaagaarctrttcaagaaaawagagagagaccattttattaycctttaaagagartagaagattctmactgyagtytgrcyagayattayttaacagaatgtagaggaatytcagaagaaatcrtacaaaagatgattcaacaaggtttgatagcacaagcyagttggaaaacaaatgaaacwgttgaacctgttawygtttttaaaagctttratcatcghcacaarctgcaggcagcaagyytmcaaggratwtataagaatcactctyttccwagagaraggttaaaaacgattctaaaaggaagccayggacatgttggaatatcctttgayattggtaaaccwaatagactggtcttttgtgaatcgttyatcgacttratgagctattacgaacttcatcaacaaartctawytratgttcgtttggtatctatggarggattaaaaaggtctgttgttgcttatcaaactttacgactratagctgaagaaaatcagargttggaattyttrgatacagtaayaccttcaaagttattgcmtttratsaatacaattcgtgataccaccasctatttygataatcatcctgatttattgacactkgcrgtagattgtgatgatgcaggwaaagatttttctgataagttatctmratcaggatttcctgtttthctggatttmcctrataatraatctgggaaagaaaaavkagactggaaygatrtycttmgagaaaagaaatcagatttwcaattkawgmtygaravtgyaaaagagacattkrgraatcmaccagtaagrmaaammtctcaatgtttagaattg

SEQ ID NO: 2613 - DNA, 770 bp, Streptococcus pneumoniae
  misc_feature (1)..(770): tiling:Spneumo1:WAN024G7A; Cluster includes WAN02442Y spr0 952||15902996|NP_358546.1|935359..936120|+|762 bp|Conserve d hypothetical protein|S.pneumoniae|R6|NC_003098.1|ORF|112
atggraatccaagattatacygatagtvaattyaaacakgctytagcamggaaymttcgytcactgacaagaggaaaaaagtccagtaarcaacctatagcgattttgctyggaggkcaaagtggtgccggtaagactacaattcatcgtattaaacagaaagaatttcaaggaaatattgttatcatagatgghgatagttttcgttctcagcatccacactatttagaactkcagcragaatatggcaaagayagygtwgaatayaccaaakattttgcaggdaaaatggtagagtctttastaasmraattkagtmrtttgrgatacaatcttttgathgarggaactttacgaacwrttgatgttccaaagaaaacrgcacaactcttgaaaartargggatatgaartacaattrgccttrattgcgacaaagcctrarytgtcstatctragyacycttatccgwtaygaagaactgtacrytatyaayccaaatcaagcacgcgcaactccaaaagaacatcatgatttcattgtaaatcatctagttgataayacacgamaattggaagaaytrgctatctttgaaagaattcaaatttaycaacgagatagargttgtgtatatgatkcarragaaratamaayttcagcrgcarawgtkctwcaagartwmytsttyggrrartggagymargtagagrargakatgttrmakstggrrrarraragaytkrawgawttamytrawmrataactrattgt

SEQ ID NO: 2614 - DNA, 469 bp, Streptococcus pneumoniae
  misc_feature (1)..(469): tiling:Spneumo1:WAN024F9D; Cluster includes WAN0243H7 spr1 737||15903779|NP_359329.1|1711861..1712205|-|345 bp|Conser ved hypothetical protein|S.pneumoniae|R6|NC_003098.1|ORF|1 11
atggrtaaaccgatgttagtctttaagcgttttggtcatcaaaytyacctgatggtgcaaaaggaagccaaacgttgcggcattgaatttatgggtgggccgcaaggtcaggttgtgcrttttttggataatcgcgagaaaaaccaagacttggtcttgattaaagatatcgakcaggaactcaatattaccaagyctgttgctagtaatctggttaagcgtatagtgcaaaatggtttggtggaattggaggcgagtcctgttgataagcgggctaagtttgttcgtctgacggacaaagcrcgttctcagatrcaacaggttaaggctttttttgaacgcatagacaagcagttgatggaagacattgatgaagatgaattactgatttttgagaargttctcggtcaactacaggcaaaatatcaagggaataggaggagagaaywaaswaattagtcaaaagaat

SEQ ID NO: 2615 - DNA, 621 bp, Streptococcus pneumoniae
  misc_feature (1)..(621): tiling:Spneumo1:WAN024CB6; Cluster includes WAN0244P7 spr0 151||15902195|NP_357745.1|159559..160128|-|570 bp|Hypothet ical protein|S.pneumoniae|R6|NC_003098.1|ORF|211
atggtaaaaaatgagaattgtgaaaaaattatcaggagacaattcatgaagaaatctatcttaactacactgctttttgcagttctttacttcctctgcatggggattggtgtccttttgggcaatctctttgaccaaackggaaacatgttttatgcgcctgcctttactgcccttgtcggcggtagcgtctatatgatcctagtcgcaaaagttccgcgctttggagccattaccactatcggccttgtcattgccytctttttcttgggaactaaacacggtgctggttccttccttcctggaattatctgtggcctcctagcagatgragtagctcatttaggaaaatacaaggacaaaacaaagaacttcctttctttcattattttcgcctttagtacaacaggaccaatcttgcttatgtggattgcgcccaaagcctatatggctactcttctggcaagaggaaaatcccaagaatatatcgaccgtatcatggtcgctccaaaccctggaactgtccttctatttatcgcaagtattgtcatcggagccctagtgggtgccttgattggacaagccttgagtaaaaaatttgcmcagaaaatcykaactaat

SEQ ID NO: 2616 - DNA, 887 bp, Streptococcus pneumoniae
  misc_feature (1)..(887): tiling:Spneumo1:WAN024EVV; Cluster includes WAN0243BB spr1 950||15903991|NP_359541.1|1931774..1932655|-|882 bp|Conser ved hypothetical protein|S.pneumoniae|R6|NC_003098.1|ORF|1 21
atggtaaaaacaatgaccattgcaacgattgatatcggagggactgggattaagtttgccagtctgactcctgatgggaaaatactggataagacaagtatttcaacgcctgaaaacttggaggatttactagcgtggctagatcaacgcttgtcagaacaggattacagtgggattgctatgagygttccaggtgcrgtcaatcaagagacaggtgtgattgatggcttcagtgcggtgccctacatccatggcttttcttggtatgaggcgcttakctcttatcagctacctgtccatttagaaaatgatgccaactgcgttggactcagtgaactactagctcatccagakcttgaaaatgcagcctgtgtcgtgattgggacagggattggcggagccatgattatcaatggtagacttyatcgaggtygccacggyytgggtggagaatttggctacatgacaacccttgcccckgctgaaaaacttaataactggtcgcaactagcatcaactgggaatatggtacgatacgtgattgaaaaatctggtcatactgattgggacggtcgcaagatttaccaagaggccgcarctggtaatryyctttgtcaagaagccattgagcgcatgaaccgcaatctgrcgcaaggcttgctcaatatccagtatctsatcgatccagrtgtcatcagtctgggtggctctatcagtcaaaatccagattttatccaagrtgtyaagaaggctgttgawractttgtcgatrcctacgaagaatacacggtcgcaccagttatccaggcctgcacctatcacgcagatgccaatctctacggtgcycttgtcaactggctacaggaggaaaagcaatggtaactaat

SEQ ID NO: 2617 - DNA, 978 bp, Streptococcus pneumoniae
  misc_feature (1)..(978): tiling:Spneumo1:WAN024AWN; Cluster includes WAN0240V0 |fol P||CAC39134.1|||951 bp|dihydropteroate synthase|S.pneumoni ae||AJ311336|ORF|001
atggtaaaaagccttgagggagtgaccgatatgtcaagtaaagymaatcatgcaaagacagctatttgcggaatyatcaatgtaaccccagaytccttttcggayggtggtcaattttttgctcttgagcargcactycagcaggctcgtaaattgatagcagaaggrgctagtatgctmgatatcggcggagaatcgactcggccgggaagwagyagctatgttgagatagaagaggaaatccagcgtgttgttccagtratyaaagckattcgcaaggaaagtratgtcctcatctctattgatacttggaagagtcaggtagcagargctgctttggctgctggtgccaatctagtyaatgatatcactggtctyatgggtgatgaraaaatggcssakgtggttgcwaakgctgkagcgaaagtrgtcatyatgtttaatccagtyatrgcdcgacctcagcaycctagctcgctcatmtttcctcattttggttttggwcaagcttttacagarraagagttagctractttgaaamattgccaatmgaagasttgatggagactttytttgammgwgcmytagcgagassaraksaagctggdattgcwcaagaaaayatcytgytggatcyaggaattggctttggtytgaccaagaaagaaaatytgcttcttttacgggatytggataaactacatcagaaaggctatccaatctttctyggagtgtcgcgcaagcggtttgtcatcaatatycttgaagaaaatggktttgaagtcaatcctgagacagaacttggtttccrcaatcgagayacggcttcggctcatgtaaccagtatcgctgygagacagggtgtggaagtggtgcgcgtgcatgatgtagytagtcacaggatggcagttgaaattgcctccgcyattcgtctggctgatgaagcggaagatttagatttaaaacaatataaataa

SEQ ID NO: 2618 - DNA, 560 bp, Streptococcus pneumoniae
  misc_feature (1)..(560): tiling:Spneumo1:WAN024GC8; Cluster includes WAN02449L spr0 713|thiJ|15902757|NP_358307.1|714601..715155|+|555 bp|4-me thyl-5(b-hydroxyethyl)-thiazole monophosphate biosynthesis protein|S.pneumoniae|R6|NC_003098.1|ORF|111
atggtaaaagtagcagttatrttagctcagggctttgaagaaattgaagccttgacagttgtagatgtcttgcgtcgagccaatatcacatgtgatatggttggttttgaagagcaagtaacgggttcgcatgcaatccaagtaagagcagatcatgtctttgatggagatttatcagactatgatatgattgttcttcctggaggtatgcctggttctgcacatttacgtgataatcagaccttgattcaagaattgcaaagcttcgagcaagaagggwagaractagcagccatttgtgcggcaccaattgccctcaatcaagcagagatattgaaaaataagcgatacacttgttatgacggcgttcaagagcaaatccttgatggtcamtacgtcaaggaaacagtagtggtagatggtcagttgacaaccagtcggggtccttcaacagcccttgcctttgcctacgagttggtggagcaactaggaggggacgcagagagtttacgaacaggaatgctctatcragatgtctttggtaaaaatcagtaactaat

SEQ ID NO: 2619 - DNA, 698 bp, Streptococcus pneumoniae
  misc_feature (1)..(698): tiling:Spneumo1:WAN024FH6; Cluster includes WAN0243NS spr1 499|gpmA|15903542|NP_359092.1|1478450..1479142|-|693 bp|Ph osphoglyceromutase|S.pneumoniae|R6|NC_003098.1|ORF|111
atggtaaaattggtttttgctcgccacggtgagtctgaatggaacaaagctaaycttttcactggttgggctgatgttgatttgtctgaaaaaggtacacaacaagcgattgaygctggtaaattgatcaaagaagctggtatcraatttgaccaagcttacacttcagtattgaaacgtgctatcaaaacaactaacttggctcttgaagcttctgaccaattrtgggttccagttgaaaaatcatggcgcttgaacgaacgtcactacggtggtttgactggtaaaaayaaagctgaagctgctgaacaatttggtgatgagcaagttcacatctggcgtcgttcatacgatgtattgcctccaaayatggaccgtgatgatgagcactcagctcacacagaccgtcgttaygcttcacttgacgactcagtwatcccagatgctgaaaacttgaaagtgactttggaacgtgcycttccwttctgggaagataaaatygctccagctcttaaagatggtaaaaacgtattcgtaggagctcacggyaactcaatccgtgcccttgtaaaacayatcaaaggtttgtcagatgaygaratcatggacgtggaaatccctaacttcccaccattggtattcgaattcgaygaaaaattgaacgthgtttctgaatactaccttggaaaataactaat

SEQ ID NO: 2620 - DNA, 297 bp, Streptococcus pneumoniae
  misc_feature (1)..(297): tiling:Spneumo1:WAN024D4C; Cluster includes WAN0243JL spr1 651||15903693|NP_359243.1|1622786..1623082|-|297 bp|Hypoth etical protein|S.pneumoniae|R6|NC_003098.1|ORF|111
atggtaaagataaataaaatttgttcgatacaaggaagttccgtagaaaatgaggataytgtaggttcacaaaatcagtattttkggattattgrtggagctacagatttatataattctaaagaggagataggttattcagtctcagaagttgtacatattttatcaraaagtttgtcggttaattgtaaagaatcaaaaactcttaaacaaatatttgaaactgctttactcgaggttaaagatgaaatcggtttaaactcatatraattaacagagtatartaaaatgaaataa

SEQ ID NO: 2621 - DNA, 321 bp, Streptococcus pneumoniae
  misc_feature (1)..(321): tiling:Spneumo1:WAN024G4V; Cluster includes WAN023LHA 3140 04_1900||||1025201..1025521|-|321 bp|EGAD orf prediction|S .pneumoniae|R6|NC_003098.1|ORF|110
atggtaacggaaaaagctttccaaatcccaaagggcttgtttgatttgctcggtcagtttttctttttcactggtaaaatcagctttctcaaatcctttgaggaaagattcactcagccacttttgaggattactggtggattggaggaagtcatagattttatagacctgctggcgcagaccccgttcgtccttgccacgcccagcaaagtttttcagcaaatgactaaaggtctctttctgtttaccttggtaatgcgcttcaaagacctcatgaaagacttcgttttcgagaataagttgctcgctttggttttgtaa

SEQ ID NO: 2622 - DNA, 1886 bp, Streptococcus pneumoniae
  misc_feature (1)..(1886): tiling:Spneumo1:WAN024EVX; Cluster includes WAN0243BC spr1 949||15903990|NP_359540.1|1929900..1931780|-|1881 bp|Hypot hetical protein|S.pneumoniae|R6|NC_003098.1|ORF|111
atggtaagatttayaggacttagtcycaaacaaacgcaagctattgaggttttaaaaggtcayatttctctaccagatgtggaagtggctgtcactcagtctgaccaagcmtctatctctatcsagggtgaggaaggtcactatcaattgacctaccgcaaacctcaccaactytatcgtgccttrtccttgttggtaacagttctagcagaagctgataaagtagagattgaggaacaagcagyttaygaagatttggcttacatggttgactgttctcgaaatgcggtgctgaatgtsgcttctgccaagcagatgatwgagrtmttggctctcatgggctactcaacctttgagctytacatggaagacacttamcagattgaaggrcarccttactttggctatttccgtggagcttattcagcwgaggagttgcaggaaatcgaagcctatgcycaacagtttgacrtgacctttgtaccatgcatccagaccttggcccacytgtcrrcctttgtcaaatggggtgtcaaggaagtgcaggagctccgtgatgtagaggacattcttctcattggcgaagaaaaggtttatgacytgattgatggcatgtttgccacgttgtctaaactgaagactcgcaaggtcaatatcgggatggacgaagcccacttggttggtttgggacgctacctgattytgaacggtgttgtggatcgtagtctcctcatgtgccaacacttggagcgcgtgctggatattgctgacaaatatggtttccactgccagatgtggagtgatatgttcttcaaactcatgtcagcggatggccagtacgaycgtgatgtgraaattccagaggaaactcgtgtctacctagaccgtctcaaagaccgtgtgactctggtttactgggattattatcaggatagcgaggaaaaatacaaccgtaatttccgcaatcatcacaagattagccatgaccttgcatttgcagggggagcttggaagtggattggctttacacctcacaaccattttagccgtctagtggctatcgaggctaataaagcctgccgtgccaatcagattaaagaagtcatcgtaaygggttggggagacaatggtggtgaaactgcccagttctctatcctaccaagcttgcaaatctgggcagaactcagctatcgcmatgacctagatrgtttgtctgcgcayttcaagaccaatactggtctaacggttgaggattttatgcagattgaccttgccaacctcttaccagacctaccaggyaatctcagyggyatcaatcccaaccgctatgtyttttatcaggatrttctytgtccgatwcttgaycracacatgacacctgaacaggacaarccrcacttcgctcaggckgckgrrackmttgctracattaaagaaaaagctggaaactatgcytatctctttgaaactcaggcccagttgaatgctattttaagtagcaaagtagatgtgggacgacgcattcgtcaggcctaccaagcggatgataaagaaagtttacaacaaatcgccagacaagaattaccagaacttagaagccaaattgaagacttccatgccctctttagycaccaatggytgaaagaaaacaaggtctttggtttggatacagttgacatccgtatgggcggactcttgcaacgcatmaaacgagcagaaagccgtatcgagktttatctggctggycagcttgaccgcatcgacgagctggaagttgaaatcctaccatttactgacttctacgcagacaaggatttcgcagcaactacagcyaaccagtggcataccattgcgacagcktcgacgatttatacgacttaactaat

SEQ ID NO: 2623 - DNA, 2870 bp, Streptococcus pneumoniae
  misc_feature (1)..(2870): tiling:Spneumo1:WAN024CA4; Cluster includes WAN0244ON spr0 171|uvrA|15902215|NP_357765.1|179215..182046|+|2832 bp|Exc inuclease ABC - subunit A|S.pneumoniae|R6|NC_003098.1|ORF| 331
atggtaagcaataatggactagaaagaacaaagatgcaagataaaattgtcattcatggggcgcgtgcccataatttaaaaaatattgatgtggagattccgcgagacaagttggttgtcgtgactggcttgtcaggttcagggaagtccagtctggcttttgatactctctatgcggagggacaacgtcgctatgtagagagtttgtcygcctacgctcgtcagttcttgggaaatatggaaaaaccagatgtagatgccattgatggtctcagcccagctatttccatcgaccagaaaacgactagtaaaaatcctcgctcgacggtgggaacracgactgaaatcaatgactatctgcgtctcctctacgcacgtgtggggacgccttactgtatcaacggacatggagctatcaatgcttcttctgtggagcaaatcgttgataaggttttggagttacctgaacgccagcgcttgcagatcttggctcctgtcatccgcaagaaaaaaggccaacataagagtgttatcgagaaggttcagaaagacgggtatgttcgtgtycgtgtggatggggaagtctatgatgtgaccgaagtgccagagttgtctaagagcaagcaacacaatatcgatgtcgtggttgaccgtattgttatcaaggagggcattcgtagycgtctctttgattccattgargctgcccttcgtatygcagaaggttatgtsattatcgacaccatggacgaytckgagttgytsttctctgagcattatgcctgtccagtttgtggwtttactgtcccagagttagarcctcgtctcttytctttcaatgctccytttggctcttgtagtgagtgtgacggcttgggsatyaagctggaggtggatactgatttggtagtgccagatgcyagcaaaaccttacrtgagggagcgctrgcaccttggaatcctatctcatccaactactatccaaacatgttagagcaggccatgaaagtctttggagtggctatggataagccttttgaggacctgtcagaagaagataagaacttgattctctayggstcagatggtaaggaattccatttccaytatgaraatgaatttggtggygtgcgcgatatcgacattccgtttgagggagttatcaataatatcaaacgtcgttaccatgaaaccaatagcgattacactcgcactcagatgcgtctctayatgaatgagctgacctgcggaacctgtcaaggctatcgtctcaatgaccaggccttgtctgtccgtgtgggcggccagcaagggccacatattggagaaatctcagacctgtctatcgctgaccacttggacttggtgagccagttaactttgtctgaaaatgaagccatcattgctcgtcccattctcaaggaaatcaaggatcgtttgaccttccttaataatgtgggtcttaactatctaaccctgtcacgttcagcaggaaccctttcaggtggggaaagtcagcgcattcgtttggcaacccagattggttccaacctatcaggygtcctctatatcctagacgagccgtcaatcggtcttcaccagagggacaatgaycgcctgattgccagtctgaaaaagatgcgtgacttgggcaatactcttatcgtggtggaacacgacgaagataccatgcgtgargctgattatctgattgacgttggtcctggtgccggtgtttttggtggtgagattgttgcagcaggtacacctaagcaagtggctcgcaacagcaagtctatcacaggtcagkacttgtcaggcaaacgtgtcatcccagtaccagaagagcgccgtgtcggaaatggtcgttttattgaagtgayaggagcgcgtgagaacaacttgcaaaatgtcacggctcgctttccactaggaaaatttatcgcagtgacaggtgtgtcgggttcagggaaatcgactctaatcaacagcattctcaaaaaagccattgcccagaagctcaaccgtaattcagacaaacctggtaagtttaagactattacagggattgagcatgtcgaccgtttgattgatattgaccagagccctatcggacggacgccgaggtctaacccagcyacctatacaggagtttttgacgatatacgtgacctttttgctcagacaaatgaagccaagattcgaggctacaagaaggggcgcttcagtttcaacgtcaagggaggtcgctgtgaagcttgctcaggtgacgggattatcaagattgagatgcacttcttgccagatgtttatgtggcttgtgaagtttgccacggaacccgctataacagtgaaaccctagaagttcactacaaggaaaagaatatttcgcaggtcttggatatgacggtcaacgatgcggtagaatttttccaacacattccgaaaattcaacgcaaactccagaccatcaaggatgtaggkctaggctatgtgaccttgggacagccagctaccaccctttctgggggagaagcccaacgtatgaagttagctagcgaactccacaaacgmtcgacaggaaaatctttctacattctggatgagccgacgacagggcttcatacagaggacattgctcgcctgctcaaggttttagctcgctttgtagacgmyggcaatacagtcctcgtcatcgagcacaatctggatgttatcaagacggcagaccatatcattgacttgggacctgagggcggtgtcggtggtggaaccatcatcgtaacaggaactccagaagaagtagctgccaacgaagccagctatacaggacactatttgaaaggaaagttacatcatgaataactaat

SEQ ID NO: 2624 - DNA, 708 bp, Streptococcus pneumoniae
  misc_feature (1)..(708): tiling:Spneumo1:WAN024FMA; Cluster includes WAN023P1H pne6 1_13||||7600..8307|+|708 bp|Type 33B capsule operon, Glimm er 2.02 orf prediction|S.pneumoniae||WAN01UCGA|ORF|000
atggtaagtgttaaaagtatagaacaaaaaacgatgacggaagaaaagaaaagggaagcaaaaaaagacatttttgctttctatgtaggtagacctctatcatacatattgacaattccttttcttaaaacaaaaatgacaccgaatcagatttctatattgtctattgtacctttaattatcggaacagctttggtaacagtaagttctaatcagtttgtactattgctaaattggctttgttttttcttatggaatttacttgacggtgttgacggaaatgttgctcgtttcaagggaattacctctcctatgggaagtgttatagatgcaatggcaggctatgctgcaatgtatttatcattcctcackatgggaattattgcaagtgactatagtcaaacactattctttacacaaaaaacatatttaattttagggtcactatctggtgtttttgttttgtttcctagattaattatgcacaaagctataaatactgtaggaagtaagaatagtgagcagtacaaaggtagaaaaaattttggtgttatagaaatgattgcacttaatgtaacctctataacaggatttgctcaattgtttatgcttattgcaatattattaaaattgagcgacttatttacactagtttatttcctcattaatttattagttatggtgatctctattaaaaagatagtaaaa

SEQ ID NO: 2625 - DNA, 335 bp, Streptococcus pneumoniae
  misc_feature (1)..(335): tiling:Spneumo1:WAN024D9H; Cluster includes WAN0243WV spr1 172|crcB|15903215|NP_358765.1|1173956..1174285|-|330 bp|Cr cB protein|S.pneumoniae|R6|NC_003098.1|ORF|110
atggtaatcgtctatcttgcaatygcytgtggyttsggagcactcgtacggtatttcttttctcgctataatcaagcttctaaattgccactcggaacgctcatagctaatcttttaggttgttttttaattggagtattytacaatcatgtagagtctaaggaagtatatgctattctagcaacaggattttgtggcggtttaacaactttttcgaccttgaatgacgaacttcaaagrytgctaagygataagaaggtmttttattcttacctgaytttgacytacmtaggtggtttggttgcgatttttttaggaattttgctataactaat

SEQ ID NO: 2626 - DNA, 294 bp, Streptococcus pneumoniae
  misc_feature (1)..(294): tiling:Spneumo1:WAN024GFN; Cluster includes WAN023LV3 3140 59_1100||||580985..581278|-|294 bp|EGAD orf prediction|S.p neumoniae|R6|NC_003098.1|ORF|110
atggtaatctcgttgcatacgagtatttgtcataagatggagcaaatgcagtttaatcccttgaatatcgttatycgtgacacaacggcggacattttcaaccatcatctcatgggtttcaccaggcaaaccattratcaaatgggaaacaatctcaatyttkggatactttctcaaacgcttgaccgtttccacctacaattcataagaatrcgcacggttaatcaggtcagargttgcttcataagtagtytrcaagcccaattcaaccgtcacatgcatgcactccgataa

SEQ ID NO: 2627 - DNA, 306 bp, Streptococcus pneumoniae
  misc_feature (1)..(306): tiling:Spneumo1:WAN024CP3; Cluster includes WAN023LFJ 3139 94_1959||||1058742..1059047|+|306 bp|EGAD orf prediction|S .pneumoniae|R6|NC_003098.1|ORF|110
atggtaatgatctccatgaggaacgatataagcatcaccagtatcctctatgatatcagaagcattaaagatataaccatcatctgtagtatagcgtccttgcgaacgtgccaaggcaacagcaccatcgtttcttggagtyccaccttcacgatgttgactatgytcttgtttttgtcgattgatttcctcttttgtacggacgttatccgcgtgggcagcatccttaaggtaaacatagtattttccatctaccttgataacatatccacccttgacctcattaacaatatcctcatcttttag

SEQ ID NO: 2628 - DNA, 246 bp, Streptococcus pneumoniae
  misc_feature (1)..(246): tiling:Spneumo1:WAN024FEP; Cluster includes WAN023KST 3138 68_2929||||1559463..1559708|+|246 bp|EGAD orf prediction|S .pneumoniae|R6|NC_003098.1|ORF|110
atggtaatggctccatccgcaaacaaattatgccctgcaaaatgcccctgctccttaaccagaccagtggttgctaaaagggaattattcgcctccaacaaggcttggatttcctcttttcgacttaggtctgttacacgaatactggctttgtttcgcactaacaggctttcaaagatggcttttgctctctcctctccgtattcttccttgagtttggcaactagccaaactgggagagaatag

SEQ ID NO: 2629 - DNA, 876 bp, Streptococcus pneumoniae
  misc_feature (1)..(876): tiling:Spneumo1:WAN024FLJ; Cluster includes WAN023OV9 pne7 0_16||||13860..14735|+|876 bp|Type 32F1 capsule operon, Gl immer 2.02 orf prediction|S.pneumoniae||WAN01UCC2|ORF|000
atggtaatttttgtggtgttgcattacatggtttttaaagaaactaaacaatgcgtcaattcaattaagaataatgttaaaggagaaaagaaaattataattgttgataattgttctcctaatggctcatatagtagtttagtagatgcttttggttgtgataaagatattattattatgaagtcagatagtaatttaggctttgctaggggaaataatcttggttataaatatgcagttgaaaattttaatccagattttattgttgtaatgaacaatgatatggaaatatttcaagaagattttattgataaactgtatgaaagttacgcaaagtatggctactatatattaggtccagatatatattcaactaaacaggaatatcatcaaaatcctcagacaagaaaggttctggataggtctgatttgaagttattatatcgaaagctagttattaaagataggctaaggttcttagttcctgtaaaatggtggtttaaaaatatattaattaaaaataaaagtgtagataataattcaaaagataaaaatgaatatgttcaaaatatagtaaaaaatccgttattacatggctcgtgttatgttttttctaagaagtttactgaaaaacatcaacacacatgtttttatgataaaacgtttatgtatatggaggcagaaattttacattatatggcattgaagaacaatgaattaatgctttattacccagatttaaaagtttaccatcatgaagatgtggcaacagattcaacgtttgtaaagcaatataagaaatcgttcttctcaatcaggtgtctactgcagtcaacaaaagcgtttattgatttaattgattcagataaaaaagag

SEQ ID NO: 2630 - DNA, 1133 bp, Streptococcus pneumoniae
  misc_feature (1)..(1133): tiling:Spneumo1:WAN024GHU; Cluster includes WAN0244FB spr0 507|pheS|15902551|NP_358101.1|505506..506633|+|1128 bp|Phe nylalanyl-tRNA synthetase alpha chain|S.pneumoniae|R6|NC_0 03098.1|ORF|111
atggtaccgcgtgtcaacgctccgagtggagtttttggcatgtggttttctttttatctacgagagactgatggaggaaatatgtcaactattgaagaacaattaaaagcgcttcgcgaagaaacgctgrctagcttgaagcagattactgctggaaatgaaaaagagatgcaagatttgcgtgtctctgtccttggtaaaaagggttcgctcactgaaatcctcaaagggatgaaagatgtttctgctgagatgcgtccaatcatcgggaaacacgtcaatgaagctcgtgatgtcttgacwgctgcttttgaagaaacagctaagctcttggaagaaaagaaagtcgcgkctcaactggctagcgagagtatmgatgtgacgcttccaggtcgtccagttgcgactggtcaccgtcacgttttgacacaaaccagtgaagaaatcgaagatatcttcatcggtatgggttatcaagtcgtggatggttttgaagtggagcaagactactataactttgaacgtatgaaccttccaaaagaccacccagctcgtgatatgcaggatactttctatatcactgaagaaatcttgctccgtacccacacgtctccagttcaggcgcgtgctatggatgcccatgatttttctaaaggtcctttgaagatgatctcgccagggcgtgtcttccgtcgcgatacggacgatgcgacccacagtcaccaattccaccaaatcgaaggcttggtagttgggaaaaatatctctatggctgatcttcaaggaacgcttcagttgattgtccaaaaaatgtttggtgaagagcgtcaaattcgtttgcgtccatcttacttyccattcacagagccatctgttgaggtggatgtttcttgcttcaartgtggtggagaaggctgtaayrtatgtaagaaaacaggttggatcgaaattatgggrgccggtatggttcacccacgtgtccttgaaatgagtggtatcgatgcgactgtatactctggytttgcctttggtcttggacaagagcgtgtagctatgctccgttatggaatcaacgatatccgtggattctaccaaggagatgtccgcttctcagaacagtttaaataactaat

SEQ ID NO: 2631 - DNA, 276 bp, Streptococcus pneumoniae
  misc_feature (1)..(276): tiling:Spneumo1:WAN024GO8; Cluster includes WAN023KL7 3147 99_3303||||1766954..1767229|+|276 bp|EGAD orf prediction|S .pneumoniae|R6|NC_003098.1|ORF|110
atggtacgacggtttaataattcatcaatattgccagaggcatgttggagatgtttttgtgccttgaccagaataccaccaaacttgccaaactcggtcttgacactggcaagagtcttgctgatatggtcggcactcttttggatattaagggtcttgaaaccaactgatagggagttaagaagggctgatagggtacttggtcctgcaacrataatctgttcttcccgtctcaaatcatcaaagaagaccggattgcgsacratytctgartar

SEQ ID NO: 2632 - DNA, 354 bp, Streptococcus pneumoniae
  misc_feature (1)..(354): tiling:Spneumo1:WAN024G52; Cluster includes WAN023LHG 3140 06_1895a||||1022750..1023103|-|354 bp|EGAD orf prediction| S.pneumoniae|R6|NC_003098.1|ORF|220
atggtacggtattgggacaaactcattccagaatggagcaaggctaggaagtcttccagactaacctgtgaaccagcaaaaacagtcgcaaattgttctaaaacatggcagaaagccttccaaacttcggcttgtctttcctgttctacagcttccaaagtggttgtcaaatcttgtaactgcttggtcacagctccttcttttagaaagacactccatttttgtaggagtttttcagccttttgttttcggctggcaaagagggtttcaagaggtgctaaaattctcaggcggaggacattcaaacgctcaagattaaattttccatggtgggatttggtgaaggtttgctga

SEQ ID NO: 2633 - DNA, 869 bp, Streptococcus pneumoniae
  misc_feature (1)..(869): tiling:Spneumo1:WAN024E2H; Cluster includes WAN0243E7 spr1 845|sga|15903887|NP_359437.1|1821802..1822665|-|864 bp|Hex ulose-6-phosphate isomerase|S.pneumoniae|R6|NC_003098.1|OR F|112
atggtacgtccaattggaatttatgaaaaggcaaccccaacacactktacttggctagaacgtttaaattttgccaaggagttaggctttgattttrtcgagatgtctattgacgaacgtgacgagcgtttagcaagacttgactggagtaaggaagaacgcttggaagttgtcaaagmaatctatgaaactggtgttcgtattccttctatctgtttttcaggccatcgtcgctacccattgggwtcaaaagatycagttctagaggaaaaatctctagaactcatgaaaaaatgtatcgaattagctcaagacttgggagttcgtacgattcaattagctggttacgatgtttactatgaggaaaagtcaccccagacacgccaacgttttatcaaaaatttgagaaaagcctgtgactgggctgaagaagctcaggtggtacttgctattgaaattatggatgatcctttcatcartagcatcgaaaaatatttggctatagaaaaagagattgactctcccttcctctttgtatatccagatattggtaatgtgtctgcatggcataatgatatctatagtgagttttatcttggtcatcatgccatcgcagctctccatctcaaggatacttatgcagtgacagaaagttcaaagggccagttccgagatgtacctttygggcaaggttgtgtcaaatgggaagaagctttcgatattttaaaggaaaccaattataatggacctttcctaatcgaaatgtggtctgaaaattgtgaaacagtagaagaaacacgcgcagccrttcaagaggcgcaagcttttctctatccactcattaagaaagcaggtttgatgtaactaat

SEQ ID NO: 2634 - DNA, 618 bp, Streptococcus pneumoniae
  misc_feature (1)..(618): tiling:Spneumo1:WAN024CJ4; Cluster includes WAN0242AR SP13 15||15901169|NP_345773.1|1238532..1239143|-|612 bp|v-type sodium ATP synthase, subunit D|S.pneumoniae|TIGR4|NC_00302 8.1|ORF|011
atggtacgtttgaatgtaaaaccaactcgtatggaattgaataacttaaaggaacgtttgacaacagctgaacgtggacataagttattaaaggataaaagagatgaattgatgaggcgatttatttctttgattcgtgagaataatcaacttcggaaagaagtggaaagttatctaattgataatctaaaatcctttgcagttgctaaatcattaaagaattctcaaatggtggaggaattattttcaattccatcgaaagaaattgaattatttgttgagaaagaaaatatcatgagtgtaacagttcctagaatgcatatgaatattacttctcaaaatgagaacagtgaatacagctatttatcttctaatagtgaaatggatgatgtatttgctacaatgaatagtttaatttataaattactaagactggcagaagttgaaaaaacgtgtcagttaatggctgatgaaatagaaaaaacacgtagacgtgtaaatggtttagaatactcgattattccaaacttgtcggaaactattcattatatagaattgaaactagaggaggcagaaagagccaatttagttcgtattatgaaagtgaagctarctaat

SEQ ID NO: 2635 - DNA, 1680 bp, Streptococcus pneumoniae
  misc_feature (1)..(1680): tiling:Spneumo1:WAN024E2M; Cluster includes WAN0243E9 spr1 843||15903885|NP_359435.1|1819244..1820917|-|1674 bp|Conse rved hypothetical protein|S.pneumoniae|R6|NC_003098.1|ORF| 111
atggtactggataaggcaagttgtgatttgcttcaatatttgatggatcaagaaacgtccaaaacgattatggcratttcgaaagatttgaaagagtcaagaaggaaaatttattatcacattgacaaaatcaatgctgctctggktgacgaggcgcttcacatcattagtattccacgaattggtattcacttaacggaagagcagagagatgcttgttgtaaactattatcggaagtagattcgtacgattatatcatgagtgcgcatgaacgtatgatgataatgttactatggataggtatttctaaagaacgtattackattgaaaaattgatagagttaacagaggtatctaggaatactgttctcaatgatttgaatagyattcgttatcaactaactttggaacaatatcaggtgaycttgcaagtgagcaagtcacagggatacmaccttcatgcccaccctcttaataaaattcagtatcttcaatcgcttctatatcatatttttatggaagaaaatgccacttttgtatctattttagaagataagatgaaagagaggttagatgatgagtgtttgctttctgttgaaatgaaccaattttttaaggaacaggttcctttagttgaacaagatttagggaagaaaataaaycatcatgaaataacttttatgttgcaggttctaccttatttgctgttaagctgtcataatgttgaacagtatcaagaaagacatcaggatatagagaaagaattttctttgataagaaaaagaatagagtatcaggtgtctaagaaattaggagaacggttgtttcaaaagtttgaaatttctttgtcaggacttgaagtttctcttgtagctgttctcctcctctcctatcgtaargatttggatattcatgcagaaagtgatgattttcgkcaattaaaacttgctttagaagaatttatctggtattttgaatcacaaatccgaatggagattgagaacaaggatgatttgttacgaaatttgatgatccactgtaaakccttgttatttagaaagacttacggtattttttctaaaaatcctctaacaaaacaaattcgatccaagtatggagaattatttttagtcactagaaaatctgcggaaattttagaaggagcatggtttattcggctaacagacgatgatattgcctatttgacgattcatattggaggatttttaaartatacaccatcrtctcaaaaaaatatgaaaaaagtttatctcgtttgtgatgaaggtgttgcggtttcgagacttttgctgaaacaatgcaaactttattttccaaatgagcaaattgacactgtatttacaacagaacaatttaagagtgtggaagatattgcacaagttgatgtagtgattactactaatgatgatttggatagcagatttccgattttaagggttaatcctatccttgaagcagaagatattttgaaaatgctagactatcttaaacacaatatatttcgtaatragagcaaaagtttcagtgaaaatctttctagtcttatttcgtcttatattgtagacagcaagttggctagtaagttccaagaagaggttcaaacacttataaatmaagaaatagtagttcaagcttttttggaagrtattykaactaat

SEQ ID NO: 2636 - DNA, 1008 bp, Streptococcus pneumoniae
  misc_feature (1)..(1008): tiling:Spneumo1:WAN024FDD; Cluster includes WAN0241Y0 SP17 99||15901628|NP_346232.1|1715310..1716311|-|1002 bp|sugar- binding transcriptional regulator, LacI family|S.pneumonia e|TIGR4|NC_003028.1|ORF|011
atggtagaacaaagaaaatcaattaccatgaaagatgttgctttagaagcaggagttagtgttggaactgtttcacgtgtaattaataaagaaaaaggcattaaagaagtaactttgaaaaaagtggaacaagcgattaaaactttgaattacattccagattactaygctagaggaatgaaaaaaaatcgaacagaaacgattgcaatcattgtaccaagtatctggcatcccttcttttcagaatttgctatgcatgtggaaaatgaagtctataagagaaataacaaattactcttatgttctatmaatggtacaaatagagagcaagactatctggagatgttgcgtcataataaagttgatggagtggttgccattacctatagkccaattgaacattacttgacgtcaggaattccctttgttagtattgaccgcacatactcagakattgccattccttgtgtttcayyarmtaatgatgcaggtggaagagaagcagctaaacaattaattagtaaaggatgtcagcatttagcctttgtgggcggacataatacaaccattaatgaaaccaaacgtcgtagaatttcatttgaaaagtatgtccaagagcataaaatacctcttagtatttttgatttggatgagacagttactgactattatggaaagctagagagtttcttggaagaaaattcttctatagatggaatttttacaatcaacgattttacagctttggatgtgattgaaatactagaaaaaaatggyaaacgtattcctcatgatgtccaaattattggatacgatggaattaaaatggctggagatagagattatctactttcaactattgaacaaccattggaagaaatggcaaaagaagcggttcgtattttgtttgatataattgatggaaagactgttaatttgcagacaatcctaccagtaaaatttgttgaaggaaaaacaacaaaaaatgaaaataagtctykaactaat

SEQ ID NO: 2637 - DNA, 519 bp, Streptococcus pneumoniae
  misc_feature (1)..(519): tiling:Spneumo1:WAN024FIY; Cluster includes WAN02403Q |||A AC33862.1|||519 bp||S.pneumoniae||AF055720|ORF|000
atggtagaattgaaaaaagaagcagcaaaagatgtcgcaacattaacaaaagcagcgccagtagcattggcaaaaacaaaggaagtattgaaccaagctgttgctgatttgtacgtagcccacgttgctttgcaccaagtacactggtatatgcgtggacgcggttttatggtatggcatccaaaaatggatgagtacatggatgctcttgatggtcatttagatgaaatcagcgaacgattgattacacttggaggtagcccattctctacattgacagagttccttcaaaacagtgaaatcgaagaagaagctggtgaataccgtaatgttgaagaaagtttggaacgtgttctagctatttatcgctacctcatcrctcttttccaaaaagcgttggatgtgactgaygaagaaggcgatgatgttacaaacgatatttttgttggtgctaaggctgaacttgagaaaacagtttggatgcttgcsgcagaacttggacaagcacctggtttrtaa

SEQ ID NO: 2638 - DNA, 1136 bp, Streptococcus pneumoniae
  misc_feature (1)..(1136): tiling:Spneumo1:WAN024D6Z; Cluster includes WAN0243PI spr1 437|msmK|15903480|NP_359030.1|1420581..1421711|-|1131 bp|A BC transporter ATP-binding protein - multiple sugar transp ort|S.pneumoniae|R6|NC_003098.1|ORF|111
atggtagaattgaatcttaaaaatatttacaaaaaatatccaaacagcgaacactattcagttgaagatttcaacttgaacatcaaagataaagaattkatcgttttcgtaggaccttcaggatgtggtaaatcaactacactccgtatgattgctggtcttgaagacatyacagaaggtactgcatctatcgatggcgtrgttgtcaacgacgtasctccaaragaccgtgatatcgccatggtattccaaaactacgctctttacccacacatgactgtttatgacaacatggctttcggtttgaaattgcgtaaatacagcaaagaagacattaacaaacgtgttcaagaagcagctgaaatacttggattgaaagaattcttggaacgtaaaccrgctgacctttcaggtggtcaacgtcaacgtgttgccatggggcgtgcgattgtccgtgatgcgaaagtattcttgatggacgaacctttgtcaaacttggatgccaaacttcgtgtatcaatgcgtgctgaaatcgctaaaattcaccgtcgtatcggagctacaactatctatgtaactcacgaccaaacagaagcgatgacacttgcagaccgtatcgttattatgtcagctactaagaaccctgctggtacaggtactatcggacgtgtagaacaaatcggtactcctcaagaagtttacaaaaatccagttaacaaattygttgcaggattcatcggaagcccagctatgaayttcatcamcgtgaaattggttggtagcgaaattgtttctgacggtttccgtttgaaagtgccagaaggagcattgaaagttcttcgtgaaaaaggctacgaaggaaaagaattgatctttggtatccgtccagaagacgtgaatgcagaacctgctttccttgaaacattcccagactgtgttgtaaaagcgactatctctgtatcagaactgcttggttcagaatctcacctttactgycaagttggtaaaracgagtttgttgcaaaagttgatgctcgtgactacttgcaaacaggtgcaacagttgagcttggatttgacttgaacaaagcacacttcttcgatgtagaaactgaaaaaacaatytactaactaat

SEQ ID NO: 2639 - DNA, 1055 bp, Streptococcus pneumoniae
  misc_feature (1)..(1055): tiling:Spneumo1:WAN024C7F; Cluster includes WAN0244MK spr0 246||15902290|NP_357840.1|242225..243274|+|1050 bp|Conserv ed hypothetical protein|S.pneumoniae|R6|NC_003098.1|ORF|11 1
atggtagaattgggaatttcaacatttggggaaataacggagcttgaagggactggacaaacttacagtcatgctgaacgcattcgccagttggtggcagagattgagctggctgacaaggttggtttggaygtatatgggattggygagcaccatcgggcggattttgcagtatcagccccagagattgtyctggcygctggggcagtcaataccaagaaaatccgtttgaccagtgcagtcagcattctgtcaagcatggayccgattcgtttgttccaacagtatgccactatcgatgctttgtcaaatggacgakcggagattatggctggaaggggctctttcacggaatctttccctctgtttggttatgacttgaaagactacgactctctttttgatgagaaattagacttgcttcagttagtcaatgaaaagaccaagttagactggcaaggtcgattgactcaaacgattgctggtaaagaagtttatcctcgtccagttcaggacaaattgcccttgtggatagctacaggtggtcatgtcgaatcaacagtgaagattgctcaggctggtctaccgattgtatatgctattattggtggtaatccacgttattttaaaaagttgattcaggcttatcgtgagattggaagcgaagmrggycatgctgacaaagacttgaaagtgggagcccattcttgggggtggattgcggaagatggtgagcaggcggtgaaagattatttccatccgactaagcaagtggtggatgctatttccaaagaccgtccgcactggcaggaattgcgttatgagcaatatttggagcaggtagggccaaatggcgccatgtttgttggcaatccagatcaggtggccgaaaaattgattcgcatgatagaggatttaggattggaccgcttcatgcttcatctaccgcttggttctatgcctcatgaccaggttctgagagctattgaactcttcggaacacaagttgcacccaaagtacgagcttattttgctatgaaagaggcttaactaat

SEQ ID NO: 2640 - DNA, 99 bp, Streptococcus pneumoniae
  misc_feature (1)..(99): tiling:Spneumo1:WAN024FQX; Cluster includes WAN023PT9 pne1 3_21||||15962..16060|+|99 bp|Type 9A capsule operon, Glimm er 2.02 orf prediction|S.pneumoniae||WAN01UCJY|ORF|000
atggtagcttgtgagtccttgcttgtcggtgatggtaacaaccgctacaacaaaggttttatgcacatcaatgccacaacaattaggatagataatttt

SEQ ID NO: 2641 - DNA, 243 bp, Streptococcus pneumoniae
  misc_feature (1)..(243): tiling:Spneumo1:WAN024CJO; Cluster includes WAN0242LT SP08 88||15900771|NP_345375.1|837760..837996|+|237 bp|hypotheti cal protein|S.pneumoniae|TIGR4|NC_003028.1|ORF|011
atggtagtaaaaacaagaaaacaaggaaattcaatcacyattacgattccaagtgaatttaatattccaagtggtgttaaatacgaagcgaaattgttaccaagtggtgagattatctttactcctgaagaattggggcagcaggtttcttatgtatctgatgatgcctttgacttaaatttagataaaatatttgacgaatacgacgatgttttcaaagctttggtggaaaaaykaactaat

SEQ ID NO: 2642 - DNA, 1206 bp, Streptococcus pneumoniae
  misc_feature (1)..(1206): tiling:Spneumo1:WAN024DBH; Cluster includes WAN02442T spr0 957|relaxase-truncation|15903001|NP_358551.1|938857..93947 4|+|618 bp|Tn5252, relaxase, truncation|S.pneumoniae|R6|NC _003098.1|ORF|202
atggtagttactaaacactttgcgacgcacggaaaaaaatatcgtaggcgtttgattaaatatatcctcaatccagataaaacagataatctaaaattagtatctgattttggcatgagtaattacttagattttcctagccatacagaaatggtagaaatgtacaatgttaactttactaataacgacaagttgtacgagtccagaaatgaccgacaagaaaaacaccaacaaactattcatgcccatcatctcatccaatcattttctcctgaagataatctgacacctgaagaaattaaccgcattggttatgagaccatgatggaattgacaggaggtcgttttaagtttatcgtagcaactcacacagacaaagatcatgttcataatcacatcctaatcaacgctattgaccgcaattcagataaaaagttkatatggaactatgccttggaacgaaacctccgtatgatttcagaccgtatttctaaaatggctggtgcaaaaattattgagaaacgttattcttatcgaggttataaaaaatatagggaatctagtcataartttgaattgaaacaacgtctttattttttgmtkcagcaatctaaatmgtttgatgattttttagagaaagcaaagcagttgcatgttcagattgattttagtcaaaagcatagycgwttywtgatgacrgatmgarcratgayaaaaccwattcgaggrcgccaactcagcaaacgagatctatatgatgaagaattttttagaacgcattttgctaagcaagagattgaaagtcgtttagaatttttgttraaccgtgtcaattctttagaagakttaataacaaaagcaaaagaattgaatctaaccattgacttaaaacaaaaaaatgtaacttttatcctgraagaaaataatcaaaagataagtttgggwcatcaaaaaataagtgataagaaattatatgatgtcaaattttttcaagattattttaaaaataaggaagtcrttgcttcagaaggattagagaatttacaggaacagtaccatgctttccaagaagaacgagataaggataaagtatccactgaagagattgagraagcctttaagacatttaagaarmmtttaagacatttaaggaaaaatgagataccgttcgtgaatttgaagtggaacttgcagagaaccaaatag

SEQ ID NO: 2643 - DNA, 1179 bp, Streptococcus pneumoniae
  misc_feature (1)..(1179): tiling:Spneumo1:WAN024FTK; Cluster includes WAN0243V3 spr1 236||15903279|NP_358829.1|1232951..1234123|-|1173 bp|Conse rved hypothetical protein|S.pneumoniae|R6|NC_003098.1|ORF| 211
atggtagttatgaatagaataagagtcagcaaaagggttgaaaagaagcttgctaaggggctagttttactagaagccagtgatcttgagaatgtcaatcttaaggatcaggaagtagaggtgcagggtcaggaaggaaactttcttgggactgcctacctttctcagcaaaacaagggcttgggctggtttrtcagcaaagacaaggtggccttcaatcaarctttctttgaaacgttgtttagaaaagccaaagaaaagagaarcgcctactatcaagaygatttracaactrcctwtcgtctctttaatcaagagggagatggctttgggggtctgacagtggacctttatggcractacgccgtcttttcttggtataactcttatgtttatcagattcgtcagactatatcagaagcctttagacaggttttccctgaggttttaggrgmttatgagaaaatccgctttaarggtttkgactatgaatctgcccatgtttatggtcaagaagcacctgactttttcamtgttttagaaaatggtgtcctgtatcaagtctttatgaatgatggcttgatgacaggmattttcctagaccagcatgaggttcgcggtagtttagttgacggcttgrctatgggtaaatccttrctcaatatgttttcmtacacagcggctttttcagtagctgcggccatgggaggagctagccakacaacttctgttgatctagccaaacgttcacgagaattgtctcaagcgcattttcaggcaaatgggctcagcacagacgarcatcrttttatagtyatggatgtctttgagtatttcaaatatgccaaacgcaaaracttgacctacgatgtgattgtcctagatccgcctagctttgctcggaataaaaaacaaactttctctgtggccaaggattatcacaagttgatttcccagagtcttgagattttaaatccgggagggattatcattgccagtaccaatgctgccaatgtttcccgtcagaaatttacagaacaaattgataaaggytttgcaggaagaagttaccagattttaaacaaatatggtcttccagcagattttgcctataataaaaaagatgaaagtagtaattacctcaaggtgattagtatgaaggttagtaaaykaactaat

SEQ ID NO: 2644 - DNA, 941 bp, Streptococcus pneumoniae
  misc_feature (1)..(941): tiling:Spneumo1:WAN024DFD; Cluster includes WAN0244AQ spr0 672|pyrDA|15902716|NP_358266.1|677862..678797|+|936 bp|Dih ydroorotate dehydrogenase|S.pneumoniae|R6|NC_003098.1|ORF| 111
atggtatcaacgaaaacacaaattgctggttttgagtttgacaattgcttgatgaatgcagcaggtgtggcttgtatgacgatagaggagttagaagaggtcaaaaactcagcggcaggaacctttgttactaagacagcgaccttggacttccgtcaggggaatcctgagccacgctaccaagatgttccacttggttccatcaactctatgggcttgccaaataatggcttagactattatttggattatcttttrgatttgcaggaaaaagagtcgaaccgaactttcttcttatctctggtcggcatgtctccagaggaaacccatactattttgaaaaaagtycaagagagtgattttcgtggtctgactgagctaaatctttcctgtccaaatgttccaggtaaacctcagattgcctatgattttgagacaacagaccggattttggcagaagtgtttgcttacttcaccaaacctcttggaattaaattgccaccttattttgatattgttyactttgaycaagcggcagctattttcaacaaatatccgctcaagtttgtcaactgcgttaactctakcggaaacggcctctatatagaagacgaatctgtcgttattcggcctaagaatggttttggtggaattggtggagaatacatcaaaccgactgctytagccaatgttcacgccttttatcaacgtttaaatcctcaaatccaaattatcggaacaggtggcgttctgactggtcgagatgcctttgaacacatcctytgtggagcaagtatggtgcaggtgggaacgacccttcacaaagaaggcgtcagtgcttttgaccgcattaccaatgaactgaaagcaatcatggtggaaaaaggctacgagagcttagaagatttccgtgggaaattgcgctatattgactaactaat

SEQ ID NO: 2645 - DNA, 237 bp, Streptococcus pneumoniae
  misc_feature (1)..(237): tiling:Spneumo1:WAN024F5Z; Cluster includes WAN023M7O 3143 86_461||||237313..237549|-|237 bp|EGAD orf prediction|S.pn eumoniae|R6|NC_003098.1|ORF|110
atggtatcttcaccagagactatccatttgagcaattctgccttgatttcttcttgcacttctrcaggaatttcgtcaaatgagrcaactgacttgtccaagacaacccagcggtcaaggtctgtacgagcagatgtaatggccataaattcttggctatccttaccacccatggctccaccgtcaccaataatagccttgaagtctaaaccactacgagtgaaaatacgctcatag

SEQ ID NO: 2646 - DNA, 252 bp, Streptococcus pneumoniae
  misc_feature (1)..(252): tiling:Spneumo1:WAN024DM6; Cluster includes WAN02435S SP01 09||15900052|NP_344656.1|110794..111081|+|288 bp|bacterioc in, putative|S.pneumoniae|TIGR4|NC_003028.1|ORF|011
atggtatgtggtatacttgctactacaaatgctttagcagtatgggttgagggtggtcaatggaactatggagtaggttggacaggaacttttggatattctgattacttacattctactcgatatcatacagcaactgttagacatgggggtagaacctctaaggattatgcaaaacctgaggcatgggctagagcttccctcaccaagattccgccaacaggaatggaatatttctatggatttgagtaa

SEQ ID NO: 2647 - DNA, 1808 bp, Streptococcus pneumoniae
  misc_feature (1)..(1808): tiling:Spneumo1:WAN024CAZ; Cluster includes WAN02444W spr0 882|pepB|15902926|NP_358476.1|872639..874441|+|1803 bp|Gro up B oligopeptidase|S.pneumoniae|R6|NC_003098.1|ORF|331
atggtattacaaagaaatgaaataaatgaaaaagatacatgggatctatcaacgatctacccaactgaccaggcttgggaagaagccttaaaagatttaacagaacaattggagacagtagyccagtatgaaggccatctcttggatagtgcggataacctactagaaatcactgaattttctcttgaaatggaacgccagatrgagaagctttacgyttatgctcatatgaagaatgaccaggatacacgtgaagctaagtatcaagagtactatgccaaggccatgacactytacagccagttagaccaagccttttcattctatgagcctgaatttatggagattagcgaaaagcagtatgctgactttttagaagctcaaccaaagctgcaggtttatcaacactattttgacaagctyttgcaaggcaaggatcacgttctttcacaacgtgaaraagaattattgsctggagctggagaaatctttggttcagcaagtgaaaccttckctatcttggacaatgcggatattgtgttcccttatgtmctagacgatgatggtaaagaagttcarctatctcatgggacttacacacgtttgatggagtctaaaaaacgtgaggttcgccgtggtgcctatcaagctctttatgcgacttacgaacaattccaacacacctatgccaaaaccttgcaaaccaatgttaaggtgcaaaattaccgtgctaaagttcgtaactacaagagtgctcgtcatgcagccctcgcagcgaattttgttccagaaagtgtttatgacaatttggtagcagcagttcgcaagcatttgccactcttacatcgctatcttgagcttcgttcaaaaatcttggggatttcagatctcaagatgtacgatgtctacacaccgctttcatctgttgaatacagttttacctaccaagaagccttgaaaaaagcagaagatgctttggcagtcttgggtgaggattacttgagccgtgtyaaacgtgccttcagcgagcgttggattgatgtttacgaaaatcaaggcaagcgttcaggtgcctactctggtggttcttaygataccaatgcctttatgcttctcaactggcargacaatctggacaatctctttactcttgttcatgaaacaggtcacagtatgcattcaagctatactcgtgaaactcagccttatgtttacggrgattactctatctttttggctgagattgcctcaactaccaatgaaaatatcttgacggagaaattattggaagaagtggaagacgacgcaacacgctttgctattctcaataacttcctagatggtttccgtggaacagttttccgccaaactcaatttgctgagtttgaacacgccattcaccaagcagatcaaaatggggaggtcttgacaagcgatttcctaaataaactctacgcagacttgaaccaagagtattatggtttgagtaaggaagacaatcctgaaatccaatacgagtgggctcgyattccacacttytactataactactatgtatatcaatattcaactggmtttgcggccgcctcagccttggctgaaaaaattgtccatggtagtcaagaagaccgtgaccgctatatcgactacctcaaggcaggtaagtcggactatccacttaatgtcatgagaaaagctggtgttgatatggagaaggaagactacctcaacgatgcctttgcagtctttgaacgccgtttaaatgagtttgaagcccttgttgaaaaattaggattggcataactaat

SEQ ID NO: 2648 - DNA, 533 bp, Streptococcus pneumoniae
  misc_feature (1)..(533): tiling:Spneumo1:WAN024CY2; Cluster includes WAN0243A1 spr1 996||15904037|NP_359587.1|1989728..1990255|-|528 bp|Conser ved hypothetical protein|S.pneumoniae|R6|NC_003098.1|ORF|1 11
atggtattagcgattattttagtaacattcyttattcgattgatttttttaaagcgttcgatagagaatgagaaacgaatccttagcaatggcgggaaagaatttggagttgagaatacaaaacgattaackwtggctcatattgttttttatctctcttgcytsgttgargcaatggtgcayaagacaatktttgatggyatgrgcatggttggtttrgtcttgcttattttttctatgctratgttgatgttggtgattcacttgttgggagatatttggacagtgaagcttatgcttgtcaataatcacaaatatgtagatcatatcttgtttaggacagtaaaacaycctaattactttttaaatattytwcctgagttgattggcttgaccttgttgagtcatgcytatrtgacttttgttttagtttttccagtttatgcagttattttgtatcgacgaatagctgaagaggaaaagytattacatgaagttataatccyaaatggaagmataaagrkataactaat

SEQ ID NO: 2649 - DNA, 1037 bp, Streptococcus pneumoniae
  misc_feature (1)..(1037): tiling:Spneumo1:WAN024DNR; Cluster includes WAN0243MK spr1 543|aroG|15903586|NP_359136.1|1525279..1526310|-|1032 bp|h ospho-2-dehydro-3-deoxyheptonate aldolase (DAHP synthatase isozyme)- possibl...|S.pneumoniae|R6|NC_003098.1|ORF|111
atggtatttacagcaaaaagctctaaaataaatatagaagaagttcgtgccttgtcaaaattagaaggtcaggctttggagaggaaatcacagcgagatcaagagctagaagccattatacgtggagaagaccagcgaattctcttggtaatcgggccatgctcatctgacaacgaagaagctgtccttgaatacgctaakcgtttggcagtcctacaagaagaagtggcagatcgtatctttatggttatgcgtgtttatactgccaaaccccgtaccaacggagatggctataagggyttgattcaccagcctaacgcgacagaagcgcctagtcttatcaatggaatcaaagccgttcgccatcttcactatcgtgtcatcacagaaacagggatgacaactgctgatgaaatgctttatcctgaaaaccttccgcttgtagatgatttgatttcttacatggcagttggtgcccgytcagttgaagaccagcaacaccgctttgtggcaagtggggcaggattttctactggttttaaaaatccaacctctggaaatctcaatgtcatgtttaatgggatttatgctgctcaaaacaaacaaagtttccttttcttaggaaaagaagtagaaacaactgggaacccgctttcacacgctattcttcgtggtgctcttaatgagtatggaaaaaatattcccaactactattatgacaatttaattgataccattgcccagtatgagaaaatgggyttggaaaatccttttatcatcattgataccaatcatgacaattctggtaagcagtatattgaacagatccgaattgtccgccagaccttgattaaccgtgcttggaatgaaaaaattaagcagttcgttcgtggttttatgattgagtcttatctggaagatggtcgacaaaatgagccagaagtatttggtaagtctatcacagacccttgcctgggttgggataacacagaagctcttgtcagagaaatttacaaaacgttaggagaataactaat

SEQ ID NO: 2650 - DNA, 2675 bp, Streptococcus pneumoniae
  misc_feature (1)..(2675): tiling:Spneumo1:WAN024CHZ; Cluster includes WAN0244SI spr0 032|polA|15902076|NP_357626.1|31306..33939|+|2634 bp|DNA p olymerase I|S.pneumoniae|R6|NC_003098.1|ORF|121
atggtattttttgattctttcctttataatgggtgtatggataagaaaaaattattattgattgatgggtcttctgtagcttttcgggcgttttttgcgctgtatcagcagttggaccgttttaagaatgyggctggtttgcataccaatgcgatttatggtttycagttgatgttgagtcatttrttggagcgggttgagccgagtcatattttggtggcttttgatgcgggaaagacgaccttccggacagagatgtatgcggactataagggtggtcgggccaagactcctgatgagtttcgtgagcaatttcctttcattcgtgagttgctggatcatatggggattcgtcactatgakctsgctcagtatgaggcggatgacatcattgggacgctggataagctagcagagcaggatggttttgatattacyattgtcagtggggacaaggatttgattcagctgacggatgagcatacggtggttgaaatttccaagaaaggtgtggctgagtttgaggcctttacgccagattacctcatggaagaaatgggcctcacaccagctcagtttatcgatctcaaggcgctcatgggtgataagtcggataatatccctggggtgaccaaagtcggtgaaaagacgggtattaagctcttgctggagyatggttcgcttgaggggatttatgaaaatattgatggaatgaagacttctaagatgaaggaaaatctcatcaatgacaaggaacaggcctttttgtctaaaacactagcgaccattgataccaaggcaccgattgcgattggtttagaggacttggtctatagtggtccagatgttgaaaatcttgggaaattytacgatgagatgggmttcaaacagctmaagcaggctttaaatrtgtcgtcagctgatgtgkctragrgtttggattttactattgttgaccaaatcagtcaagatatgctgagtgaagagtctatcttccactttgagctttttggtgagaattaccatacrgataatttggttggatttgyctggtcttgtggggatmagctctatgccacagacaagcttgagctgttgcaagacccgattttcaaggatttcttagaaaaaacatctctgagagtttatgactttaagaaggttaaagttcttttgcaacgttttggtgtrgatttgcaggcgcctgcttttgacatccgtttggctaaatacctcctttcgactgtggaggacaatgaaattgcgaccatcgctagtctttatggtcagacttacttggttgatgatgaaactttctacggtaagggtgttaaaaaggccattcctgaacgtgagaaattcttggaacacttagcttgtaaacttgctgttttggtagaaacagagcctattttacttgaaaaactcagcgaaaatgggcaattagagcttctttatgatatggagcaacctctggcttttgtycttgccaagatggaaattgctggrattrtggtyaagaaagagaccttgcttgagatgcaggctgaaaatgagcttgtcattgaaaaactgwctcaagagatttacgagctggctggtgaggagtttaatgtcaactcgcctaagcagttgggcgtgcttctctttgagaaattgggacttcctctagaatacactaagaaaaccaagacaggttattcgacagcagtggatgtkttrgagcgtctcgctcctattgctccgattgttaagaaaatcctggattaccgtcaaatkgctargattcaatctacttatgtaattggcttgcaggactggattttggctgatggaaagattcatactcgctatdtgcaggatttgacccagaccgggcgtttgtctagtgtggatccaaacttgcaaaatattcctgcccgattggaacargggcgcttgattcggaaggcttttgtgccagagtgggaggatagtgtgctactcagctctgactattcacagattgaattgcgcgttttggcgcatatttctaaggatgagcacttgattaaggccttccaagagggggcagatatccatactkcgacagccatgcgggtctttggcattgagcgtcctgatratgtgactgcaaaygaccgtcgyaatgccaaggcagttaactttggagtggtttatgggatttcagactttggcttgtctaataatttgggaattagtcgtaaggaagcyaaagcctacattgatacctactttgaacgttttccaggtattaaaaactacatggatgaagtggtgcgggaggcgcgtgataagrgctatgtagagaccctctttaagcgtcgccgtgagttgccagatatcaattcgcgcaacttcaatattcgtggttttgcggarssaactgctatcaactcacctatccagggttcggcagcagatattctcaagattgccatgattcagctrgataaagccttggttgcaggtggttatcagacyaagatgctgttacaagtgcacgatgaaatcgtccttgaagtgcctaaatctgaattggtagagatgaaaaaattggtgaaacaaaccatggaagaagccattcaactcagtgttcctcttatcgcagatgagaatgaaggrgcaacctggtacgaggctaaataactaat

SEQ ID NO: 2651 - DNA, 656 bp, Streptococcus pneumoniae
  misc_feature (1)..(656): tiling:Spneumo1:WAN024GDV; Cluster includes WAN0244BT spr0 633||15902677|NP_358227.1|641532..642182|+|651 bp|Conserve d hypothetical protein|S.pneumoniae|R6|NC_003098.1|ORF|221
atggtcaaagtagcaacccagacaccgattatcagtctcttcttgctgattttatccttggaaacatctttcattccttcgattgctctgamtctttcggtagtcgcattttgtattctctttatgytctattaccgtcgatttaaaatgttagcttggatgatcatacttgccattttaccatcttttgccaactactgggcagttcagttacacggagatgcttcacaggcagtcatgcttggaacgagggcytttgtgacagtttgtatcggccttgtctttgtttcctctrtttcactaaaagagcttctcttgtacttggctcaaaaggggctatcacgctcttggtcctatgccttgattgtggtattcaattcytttcctctcattcagcaagaaatcaagtccctcaaagaagcttgcctattacgtggtcaagaactrcatttttggtcgcccttgatttacagtaaggttctgatgacagtctttaggtggcgccatctttacctgagagctctrtctgctcayggatatgacgaacatgcacagttgaagaatagctatcggactttttatattcctaaaaaaacaaaattaatctacctgcttttctttttattgcttcaaaccagtctatttttataactaat

SEQ ID NO: 2652 - DNA, 603 bp, Streptococcus pneumoniae
  misc_feature (1)..(603): tiling:Spneumo1:WAN024EU5; Cluster includes WAN0244K8 spr0 330|recU|15902374|NP_357924.1|335019..335615|-|597 bp|Reco mbination protein U|S.pneumoniae|R6|NC_003098.1|ORF|111
atggtcaactatccacataaastttcatcacaaaaaagacaamcatctctttctcaacccaaaaatttcgcaaatcgaggaatgtcttttgaaaagatgatcaatgctaccaacgactactatttgtctcagggcttggctgtyatacayaagaaaccaactcctattcaaatcgtacragtggactatccacaacgaagtcgtgccaagattgttgaagcctattttcgacaagcttcaacgacggactattctggcgtttataatggatattacatcgactttgaagycaaggaaacaaaacaaaaacgtgcgattccgatgaaaaattttcatccacatcagattcagcatatggaacaagtccttgcccaacaaggaatctgctttgtccttcttcacttttcttctcagcaagaaacctacttattgccggcattcgatttgattcgcttctatcatcaagataagggacaaaaatcaatgccacttgratatattcgagaatatggatatgaaatcaaggctggtgccttccctcaaattccttatctcaatgttatcaaagaacatttattaggtggtaaaacaagaykaactaat

SEQ ID NO: 2653 - DNA, 102 bp, Streptococcus pneumoniae
  misc_feature (1)..(102): tiling:Spneumo1:WAN024CNK; Cluster includes WAN0246SB 5613 45-71-9||||||102 bp|DNA Streptococcus pneumoniae phage Dp- 1 open reading frame 267|S.pneumoniae||WAN0246SB|ORF|000
atggtcaaggtctgttctaggttcaggaagaacaaacgggaagtgaatgttattttcttcagcgaagtcttttgcttcataccaaacattaatcgtagatag

SEQ ID NO: 2654 - DNA, 231 bp, Streptococcus pneumoniae
  misc_feature (1)..(231): tiling:Spneumo1:WAN024FS8; Cluster includes WAN023L61 3148 97_2353||||1260587..1260817|+|231 bp|EGAD orf prediction|S .pneumoniae|R6|NC_003098.1|ORF|110
atggtcagaaggatkgagagggagaggagaaagagcatagagccccaaaagrtcaatttagttttcatcaaaatcccactccgcaaggctagaaaccacatgtgtcggtgcgattggcaggccagctacttcttctgccttrgtaaaacctgtcgtcaccaagagygttggaatgccattgtcaatcccagcccgratatcagtcaaataattgtccccaaccatgattaa

SEQ ID NO: 2655 - DNA, 270 bp, Streptococcus pneumoniae
  misc_feature (1)..(270): tiling:Spneumo1:WAN024CH7; Cluster includes WAN023MEO 3143 20_95||||48785..49054|-|270 bp|EGAD orf prediction|S.pneum oniae|R6|NC_003098.1|ORF|110
atggtcagcttggmtkgcttcaaactgagcaaaatttttcttaatcaagtcaaaatcaatctctgcagagagggcttgacctgggatgtagtagatattttccccaacagctttaaattctggagagagcaccttacggctatctgccgtcgtcaccccaaaggcarccaaggttggcggaacggtcaattcttcaaaggtaccagacatggagtccttaccaccgatagatggcaagccaagytgaatytgwgcttcaatagarcctag

SEQ ID NO: 2656 - DNA, 216 bp, Streptococcus pneumoniae
  misc_feature (1)..(216): tiling:Spneumo1:WAN024BEX; Cluster includes WAN02434V SP01 47||15900085|NP_344689.1|145086..145295|+|210 bp|hypotheti cal protein|S.pneumoniae|TIGR4|NC_003028.1|ORF|021
atggtcagtaagtatcttttattagcagttattttctctggcttggtgacytggattccccgtatgattcccttcatcttggtcaagtataagggcctgcctrcgattgttgagcgttttttgaagtttttgcctgtttccattatctttgccytgattctttcaagmgtagtgacaggtaaggttggsarycttcctcaaatcaaaykaactaat

SEQ ID NO: 2657 - DNA, 1830 bp, Streptococcus pneumoniae
  misc_feature (1)..(1830): tiling:Spneumo1:WAN024CT9; Cluster includes WAN0242HI SP10 56||15900926|NP_345530.1|992014..993837|+|1824 bp|Tn5252, relaxase|S.pneumoniae|TIGR4|NC_003028.1|ORF|010
atggtcatcactaaacactttgccattcacggaaagagttaccgcagaaagcttatcaagtacattctcaatcctgagaaaaccaataatcttgccttggtgtcggactatggcatgaagaattttctggactttcctagctatgaggaaatggtgcagatgtatcatgaaaatttcatcagcaacgatacgctttacgattttcgccacgacaggatggaagaaaatcaacgaaaaatacacgctcaccacatcattcagtctttctcgccagaggatcatatcactcctgaacaaatcaatcggataggttatgagactgtgaaggaattaactggtggcaaatttcgttttatcgttgcgacccatgttgataaagaccacctgcacaatcacatcattatcaattcagtagatagcaattctgacaaaaagctcaagtgggactacaaggtggagcgaaatcttcgcatgatttctgaccgtttttctaaaatcgcaggtgctaaaatcattgagaaccgctattctcaccagcggtatgaagtctatcgtaagactaatcacaagtatgaactcaagcagcgactctattttttgatggaacattctagggactttgaggatttcaaaaagaatgctccgctactacatgtggagatggatttccgtcacaagcatgccaccttttttattacggactcaactatgaaacaggtggtgcgtggcaagcaactcaatcgcaagcagccttacacagaagaattttttaagaactactttgccaaaagagaaatagaaagtctcatggaatttttattgctgaaagttgagaatatggatgatttacttcagaaagcaaaactttttggactaactatcaatcctaaacaaaagcatgtttcttttcaatttgcaggagtggaggtaaaggagacagagctagaccagaaaaatctttatgatgtagagtttttccaagattattttaaaaatagaaaagattggcaagctccagaaactgaggatttcgttcaactttatcaagaagaaaagttatccaaagaaaaagaacttccaagcgatgagaagttctgggagtcctatcaagagttcaagagtaacagagatgccgttcatgaatttgaggtggagttgtcactcaatcaaattgaaaaagtagtggatgatggaatttacgtcaaggtcaagtttggtattcgtcaggagggacttatctttgtgccgaacatgcagcttgatatggaagaggataaggtgaaggttttcatcagggaaaccagctcctactatgtctaccacaaagacgctgccgagaaaaattgttatatgaaaggtcgaaccttaattagacagttcagctatgaaaatcaaaccattccattacgcagaaaagcgacagtcgatatgattaaagagaagattgcggaagtggatgctttgattgaactggaagtagaaaatcaatcttatgtcacgattaaagatgagttagtgcatgaactagcagcgtctgaattgagaatcaatgagttgcaagaacgaatgtcaaccttgaatcaagtagcagaatatctactggcttcagttgaaagtaagcaagaaatgaaattaaatctttcaaaactgaatataactgagaatatcagtgctaatattgttgagaaaaaattgaagagcctggggaatcaactggaattggaaaggggcaggtatgaaaagatggtagtcaggctagataaatttataaatcgcttaaatacaggactttcaaaaggagatgggatagattttcaaaaactarctaat

SEQ ID NO: 2658 - DNA, 1830 bp, Streptococcus pneumoniae
  misc_feature (1)..(1830): tiling:Spneumo1:WAN024CTB; Cluster includes WAN0240CS |||A AC98433.1|||234 bp||S.pneumoniae||L29324|ORF|001
atggtcatcactaarcaytttgcsattcayggaaararttatcgyaghaaamtwrtcaartatattytkaatccwrrtaaracmaaraatctwrcaytrgtwtcrgaytwtggyatgagaaattwtytrgattttcctagytatrawgarmtrgtgmagatgtaymatgawaattttwtmagyaatgatrskctttatrawtttcgkcatgmtaggywagargwaaakcaacgaaraattyatkcycatcayatyattcagtcyttttctccagatgaycatctyactcctgaacaaatcaatcgrattggttatgagrcagytaaagagttgacaggwggtagatttcgttttatygtagcaacwcatgtcgataaagrtcatatccacaatcacatcatcctaaattcaattgatmagaattctgataaaaartttctatggrattataarkcagaacrtaatctamgaatggtttcwgatcgtctytcaaaaattgyaggbgcaaarattatagaaaatcgttattckcatcrtcagtatgaagtttatcgmaaaacmaattacaaatatgaaataaaacaacgrgtatattttctaatygagaactcgaaaaattttgaagatytyargaaaaaagcwaaagmtttacatttaawaattgattttagacacaagcatgttacttwttttatgactgattcaaatatgaaacaagtcgtacgtgatrrtaaattgartagaaaacaaccttataatgaaacwtattttragmaaaagtttgttcaaagggaaatyataaacatmttagaatttytrcttccraaaatgaagaatatgaatgaattgattcaacragcagaaktttttgrcttaaaaataattcygaaagmaaaacatgttytatttgartttratgggattaagyttkcagarcaggaattrgkaaaawbsaatcwgtayagtgttagttattttcaagactattttaataacaaaaatgawactttygkmttagataataawaatttarttgaactttacaatraagaaaagmtaattaaagaaaaaragttgccgwcagaagakrtggtatggaaatcytatcaagatttcaagagaaatagrgatgctgttcatgagttwgaagtagagttgaatcttaatcaaatagaagmagtagtagassatggaatttacattaaggtacagtttggtatccgacaagaaggacttatttttgtaccaaatattcaratcaatatggaagaagwaaaagttaaagtatttctcagagaaactagttcttactatgtatatcataaagattyagcagamaaaaatcgctttatgaaaggtaaaactttrattagrcaatttamkcttcagyatgaacmgcagyatatgtatagaagaatwyctcttagcaaaattaaagaaaaaatagaacaattagattttcttatrtctgcrgaaaatagtccgaatgattttgaagatataacaaatgatttcattgcccaaatatcatatctagagaatatgattgaacaagtccaaaataaaattgatgatttaactaatttagaggaagtattgttgaawratacgacaaatagttctagcaatttagaaaatagtattcaagrtaaaagttcagtagatamratagagaaggatttatacatwtataaaggaaagattgaaamactgaaggaacaacatrgagaagcaataaatttatttgaaatgtttaataaaacaataaagaaatataagraaaaacaaaatatgaaatctattraggaaaatgagatacatttagagtaa

SEQ ID NO: 2659 - DNA, 346 bp, Streptococcus pneumoniae
  misc_feature (1)..(346): tiling:Spneumo1:WAN024DU5; Cluster includes WAN023KBG 3130 99_3733||||2016520..2016825|+|306 bp|EGAD orf prediction|S .pneumoniae|R6|NC_003098.1|ORF|210
atggtcatccctgactggtggagttttttgaacagggtcatcaactcttttctccctagaggatctagaccagctgttggctcatctaagactaatatagmtggctccatggcaagtatgcctgcaatggcaacacgtctcatttgtccccctgacagctcaaacggactacgatcaaaaagtgattcatcaattccaaccagagccagtttctcacgcgcagtcttcacagcatcttcttcagaaactccaaaattttgcggtccaaaagcaacgtccttcaaaaccgtttcttcaaaaatctgattttcagcaaactgaaataccaagccaacctgttttctaa

SEQ ID NO: 2660 - DNA, 258 bp, Streptococcus pneumoniae
  misc_feature (1)..(258): tiling:Spneumo1:WAN024F44; Cluster includes WAN023KMM 3134 53_3242||||1729843..1730100|+|258 bp|EGAD orf prediction|S .pneumoniae|R6|NC_003098.1|ORF|110
atggtcattggatttcttaagaaaagaagtgttgctaaaatagtcaccaacactgtcttttttctgtccagcatagcaagaaaatcgcgcacgtattttttcaagggtaaaaaaatcagcaaatctagcccaaataggaaaaagaaggatggcaataaaaagtcaactaattcttgctgcagcgtatttttgatgaacaagttatctgacaaaacaagaacagctcctaacaaattaattaagagtaacatactgtaa

SEQ ID NO: 2661 - DNA, 279 bp, Streptococcus pneumoniae
  misc_feature (1)..(279): tiling:Spneumo1:WAN024GA5; Cluster includes WAN023LO8 3140 36_1488||||785345..785623|-|279 bp|EGAD orf prediction|S.p neumoniae|R6|NC_003098.1|ORF|110
atggtcccattcttgcttgaagtgattgatatcgtcttctgtctcaagtttaaaggttgcggctgctcccactccattatcaggtttggcaatcattggaagaccgatttctttcactgcttgatcaacatctgcttccgtcttgataacagctccaggtaccacaggaacacctgcttttttgaaaagtttcttcatttcagacttatatttcgtctttttgagatcctctggtttggcaccaaaaacattgaattgttctctgagtgttgcgtctag

SEQ ID NO: 2662 - DNA, 357 bp, Streptococcus pneumoniae
  misc_feature (1)..(357): tiling:Spneumo1:WAN024DV8; Cluster includes WAN023KD4 3130 90_3650||||1967818..1968174|+|357 bp|EGAD orf prediction|S .pneumoniae|R6|NC_003098.1|ORF|110
atggtcgataccagaagagctcctgctgcaggaatcataagggcaatagccacccctgtcaccatgttaaaaagaatggacatggtacgaactggcaagccatccacaaaggccgtatcttcgtcaaaagttaagatatacataggacgaagaaagagaaaggtcaaaatcaaaacaaccgccgcaatgacaaagagggaaatgacctgttcttcactgatagtcacgatcgaaccaaagagatattggtccaaactcattgaactcgagcttttacccttgctcatgacaatcagagaaacagccagacctgttgacatgaggatagctgtcccgatttccataaagctcttgtaa

SEQ ID NO: 2663 - DNA, 971 bp, Streptococcus pneumoniae
  misc_feature (1)..(971): tiling:Spneumo1:WAN024FF2; Cluster includes WAN0243LV spr1 569|scrR|15903611|NP_359161.1|1550199..1551164|+|966 bp|Su crose regulon regulatory protein|S.pneumoniae|R6|NC_003098 .1|ORF|111
atggtcgcaaaactaactgatgtcgccaaacttgcaggcgtcagtcctactaccgtttctcgggttatcaataaaaaaggrtatctatctgagaaaaccatccaaaaagtcaatgaagccatgmgagaattrggctataaacccaacaacctggctcgtagtctgcaaggaaaaycagctaagttaatcggcttgattttccccaatatttccaatgttttctatgcagaattgattgataaattggaacaccaactcttcaaaaatggttacaagaccatcatctgcaacagtgaacatgattctgagaaggaacgygaatacatcgaaatgttggaagccaatcaggtrgacggcatcatttctggtagtcacaacctargaatcgaagactacaatcgtgtgacagcgccgattatttcctttgaccgaaacctatcgccagacatccctgtygtctcctctgacaactatgctggtggggttcttgctgcccaaaccttggtcaagacaggtgcccagtctatcatcatgattacagggaatgacaattcyaattcgccaaccggactgcgccacgctggttttgcatccgtactcccaaaagctcctattatcaatgtttccagtgacttttctcccgtcagaaaagaaatggaaatcaagaatatcttgacccgggaaaaaccagatgccatttttgcttcggatgatttgacagctattctggtcattaaaatcgctcaagaattgggmatttctgtcccaaaagagctcaaggtcatcggctatgatgggacctactttatcgaaaattactaccctcaattggctactatcaagcaacctttggaagagattgcttgtctcactattgatcttctcttgcaaaagattgaaggcaaggaagtcgccacaactggttacttcttaccagttacgctattaccaggaaaaagtatttaactaat

SEQ ID NO: 2664 - DNA, 288 bp, Streptococcus pneumoniae
  misc_feature (1)..(288): tiling:Spneumo1:WAN024G9H; Cluster includes WAN023LN6 3145 08_1545a||||822694..822981|-|288 bp|EGAD orf prediction|S. pneumoniae|R6|NC_003098.1|ORF|110
atggtcgcaracattgtagatrtagatagtcttttyracrccrtctttgacacctgtaaagatacatccaatattggtttttccgactgtacgtggsccaagrctrgcaggatctggaagcaaggctttcaaaaattgaattggaacaatttcttggccgttaaagttaatggtatccgtacgaaggagtccaacattttcaagacatttcatgtgcgtcaagtaagattgaccaaaagtcataaagaaacgaatgcgtttgacacctggaatgttcttggccaatga

SEQ ID NO: 2665 - DNA, 228 bp, Streptococcus pneumoniae
  misc_feature (1)..(228): tiling:Spneumo1:WAN024GHK; Cluster includes WAN023LXO 3143 40_982||||514240..514467|-|228 bp|EGAD orf prediction|S.pn eumoniae|R6|NC_003098.1|ORF|110
atggtcggaatcgccaaatcattttggataaagtcagccaaacgaaccgtcgtttccttgatattaaatttattattgctggcagttacactgataaaatggggagccaactcctgcatatcctgcaaggctgaaataatgttatcattacccacggctgggkttggagggaacacttcaaatgagagtgacggtgtttggcgtgacatatgtaataaccttttctag

SEQ ID NO: 2666 - DNA, 260 bp, Streptococcus pneumoniae
  misc_feature (1)..(260): tiling:Spneumo1:WAN024DQH; Cluster includes WAN0244CR spr0 599||15902643|NP_358193.1|611615..611869|+|255 bp|Hypothet ical protein|S.pneumoniae|R6|NC_003098.1|ORF|111
atggtctatttagtcctaggaattttactgctcctactctatgtatttgcgacaccagaaagcattaaagggacwgtcaatatcgtcgctatggtatgtattttagtggcactcttgattttattggttctatcttttctgaaaatttttcaattaccaacagaaatattcctagcaatagccatgttgmtcctagcttactttagtgttagagacatyacactcatgccagtcaaaaaaagtaaaagaagataactaat

SEQ ID NO: 2667 - DNA, 255 bp, Streptococcus pneumoniae
  misc_feature (1)..(255): tiling:Spneumo1:WAN024CP6; Cluster includes WAN023LKT 3145 00_1685||||893899..894153|-|255 bp|EGAD orf prediction|S.p neumoniae|R6|NC_003098.1|ORF|220
atggtctgtcgaaggaggggtcaaacctttctctttagcataagcctgggctgccgctctctcagcttcagacaaactatcttttttaatccagtggctatgggtcatatgtggagttacataggcatccccctcatcactggttatatcacgaggatcaaagatataaccgtcttctgttgtgtacttgcctgccaacttggctacttgaatctcatcatcagtgtaggtaatttgcgcatttggttttcctaa

SEQ ID NO: 2668 - DNA, 1892 bp, Streptococcus pneumoniae
  misc_feature (1)..(1892): tiling:Spneumo1:WAN024G3H; Cluster includes WAN0243ZD spr1 082|lepA|15903125|NP_358675.1|1077369..1079192|-|1824 bp|G TP-binding protein LepA|S.pneumoniae|R6|NC_003098.1|ORF|23 1
atggtcttgtcaaaatatcaaaaacaatttataataaatagataccctgaaaggaagagaatcatgaacttagaagaattgaaaaaacgacaggrgaagatccgtaacttctctattatcgcccatattgaccacggraaatcaactctagcagaccgcattttggaaaaaacagagacggtttcaagtcgtgaaatgcaggcccagcttttggatagcatggakctagagcgggaacgtggaattactattaagttgaatgccatcgagttgaattacactgcaaaagatggggaaacttatattttccacttgattgacacaccagggcacgttgactttacctatgaagtttcacgttcgctagctgcctgtgagggtgctattttggtggtcgatgcggctcaaggaattgaggctcaaactcttgccaacgtttatctrgctttggataatgatttggaaatcatgcctatcattaataaaattgacctgccggctgcagatccggagcgcgtgcgtacagagattgaagatgtgattggtttggatgccagtgaagcagttttggcttctgccaaggctggkattgggattgaagaaatcctcgagcaaattgtagaaaaagtaccagcaccaacgggtgatgtgacggcgccacttaakgccttgattttcgactctgtttacgatgcttaccgtggggttatcctmcaagtgcgtgtcatggacggmrtggtcaaacctggtgataagattcagctcatgagcaatagtaagacctttgatgtggccgaagtcggtatttttasmccamaagcggttggtcgtgatttccttgcgactggtgatgtyggytacattgcggcgtctatcaagacggttcaggatactcgtgtgggtgataccgttaccttggcaaccaatcctgcggcagaaccattacatggttataagcagatgaatcctatggtctttgcgggtctctacccaatcgaatcaaacaartacaatgacctgcgtgaagcgcttgaaaaattgcaactgaatgatgctagtcttcagtttgaaccagaaacatctcaggcacttggatttggtttccgttgtggatttcttggacttctccatatggatgttatccaggaacgtttagagcgtgagttcaatattgacctcatcatgacagctccgtctgttatttacaaagttaatttgaccgacggtgagtctatggatgtgtctaacccatctgagtttccagacccaactaagattgcgaccattgaagagccttatgtcaaggcgcaaatcatggtaccacaggagttcgtcggagcagtaatggagctagctcagcgtaagcgtggggactttgtgactatggactatattgatgataaccgtgtcaatgttatctatcaaattcctcttgctgaaattgtctttgacttctttgataaacttaagtcttcracacgtggttatgcaagctttgactacgaattgtcagaatatcgcccatctaagctggtgaaaatggatatycttctcaatggagataaggtggatgcyctcagctttatcgttcacaaggactttgcctacgaacgtgggaaactcatcgttgataaactcaagaaaatcatccctcgccaacaatttgaagttccaatccaagcggctattggacacaagattgtcgctcgtactgatatcaaggcccttcgtaagaacgtacttgctaaatgttatggtggtgacgtttctcgtaagcgtaaactccttgaaaaacaaaaagctggtaagaaacgcatgaaatccatcggatcagttgaagttccgcaagaagccttcctcagcgtcttgagtatggatgaagaataactaat

SEQ ID NO: 2669 - DNA, 234 bp, Streptococcus pneumoniae
  misc_feature (1)..(234): tiling:Spneumo1:WAN024GAV; Cluster includes WAN023LPC 3140 41_1429||||755060..755293|-|234 bp|EGAD orf prediction|S.p neumoniae|R6|NC_003098.1|ORF|110
atggtgaaaatgtactcttctgccggttttaccccgataatatctccgacaccaatcaaaagagggcgaagatataaggttccacctrttccgtatrgtggtacgtattcttcattcgcacggacaactgctttacaagcttctacaaacatgtctgtcggaacttgtggcatcaagagacggtcacatgtacgttgcagrcgtttagcattttcatcaggacggaacagttga

SEQ ID NO: 2670 - DNA, 314 bp, Streptococcus pneumoniae
  misc_feature (1)..(314): tiling:Spneumo1:WAN024DKE; Cluster includes WAN0244N0 spr0 230|PTS-EIIB|15902274|NP_357824.1|220809..221117|+|309 bp| Phosphotransferase system sugar-specific EIIB component|S. pneumoniae|R6|NC_003098.1|ORF|111
atggtgaagattggtttgttttgtgcagcaggtttttctactggtatgcttgtaaataatatgaaaattgcagcgcaakctagtggagttgaggcagaaatagaggcgttttctcagtctaaattagcggattatgcgccaaatatagatgttgcactattgggtccacaagttgcttatacattagataaatcaaaagaaatttgtgataagtgtgatgttccgatagctgttattccgatgatggactatggtatgttagatgggaaaaaagtattagatttggccctatctttgattagtgggtaactaat

SEQ ID NO: 2671 - DNA, 924 bp, Streptococcus pneumoniae
  misc_feature (1)..(924): tiling:Spneumo1:WAN024CI3; Cluster includes WAN0241Y2 SP17 97||15901626|NP_346230.1|1713341..1714258|-|918 bp|ABC tra nsporter, permease protein|S.pneumoniae|TIGR4|NC_003028.1| ORF|011
atggtgaaggaatttaaggaggaaagtatgaaaaattcgattatggatacaaaatttgatagacgtatcttactcttaaataaaatcattattgtctttatcgttttgatgactttgcttcctttactttatatcgtcgtagcatcctttatggatcctaaggttctggttagtagagggattagctttaatccagccgattggactgtagaaggttaycagcgtgtattcagtgaccaatctattctaagaggttttatcaattctctactatactcttttggatttgcagctttaacagtmttgctatctgtgtttacagcttatcctctttctaagaaagacttggttggacgtcgttggattaactacttcttgattgtractatgttctttggtggtggtttagtcccaacttacttgctcgtaaaagaattgggaatgctcaatactccatgggcwatcattgttccaggtgctgtyaaygtttggaatattattcttgctagggcctatttccaaggattgcctgaagaattagttgaagctgctgtcattgatggwgcraatgayttrcagattttcttyaaaatcatgcttcctcttgcaaaaccaattatgtttgttctcttcctytatgcttttgtaggacagtggaactcatactttgatgcaatgatttatatcaaggatccaaacttggaaccattgcaacttgtacttcgtaaaattctcattcagagccaaccaggtcaagacatgattggagcacaagcggctatgaatgaaatgaaacgtttagctgaattgattaaatacgcaactattgtcatttccagcttgccattgattgttatgtatccattcttccaaaaatactttgataaaggaattatggctggttcacttaaaggactaactaat

SEQ ID NO: 2672 - DNA, 108 bp, Streptococcus pneumoniae
  misc_feature (1)..(108): tiling:Spneumo1:WAN024COR; Cluster includes WAN0246T3 5613 45-43-5||||||108 bp|DNA Streptococcus pneumoniae phage Dp- 1 open reading frame 239|S.pneumoniae||WAN0246T3|ORF|000
atggtgaagtatttcctatcgaagaatgtcctttcgaccatcctaatggaatgtgctaccaaactgtatggtacgaaaactcactcgaagaaatcgctgatgagttga

SEQ ID NO: 2673 - DNA, 1758 bp, Streptococcus pneumoniae
  misc_feature (1)..(1758): tiling:Spneumo1:WAN024CWF-5; Cluster includes WAN0244T8 sp r0006|mfd|15902050|NP_357600.1|4756..8265|+|3510 bp|Transc ription-repair coupling factor|S.pneumoniae|R6|NC_003098.1 |ORF|111
atggtgaccttattagatttattctcagaaaatgatcagattaaaaaatggcatcaaaatttaacagataagaaaagacaactaatacttggtttatcaacatctactaaggctcttgcaattgcaagcagtttagaaaaagaagataggattgtgttattgaygtcaacttatggagaagcagaaggacttgttagtgatcttathtctatcttgggtgaggaactcgtctatccatttttggtagatgatgctcctatggtggagtttttgatgtcttcacaggaaaaaattatttcacgggttgaagccttgcgttttttgactgattcatctaagaaagggattttagtttgtaatatcgyagcaagtcgattgattttaccgtctcccaatgcattcaaagatagtattgtaaaaatctcagttggtgaagaatatgatcaacacgcgtttatccatcagttaaaggaaaatggctatcgaaaagttactcaagtacaaactcagggcgaatttagtcttcgaggagatattttagatatttttgaaatrtcccagttagaaccttgtcgaattgagttttttggtgatgaaattgatggtatcaggtcatttgaagtagaaacacaattatcgaaagaaaataagayagaactcactatctttccagctagtgatatgcttttgagagaaaaggattatcaacgaggacagtcagctttagaaaaacaaatttcaaaaactttatcacctattttgaaatcatacctagaagaaattctttcaagttttcaycaaaarcaaagtcatgcagaytctcggaagtttttatctttgtgctatgataagacatggactgtctttgattatattgaaaaagatacyccaatattctttgatgattatcaaaaattgatgaatcagtatgaagtctttgaaagagamttagcgcagtactttacagaagaattacagaatagtaaagcattttctgatatgcagtatttttctgatattgaacaaatctataaaaaacaaagtccagtgacctttttytctaatcttcaaaagggtttaggaaatctcaaatttgacaaaatttatcaattcaatcaatatcctatgcaggaatttttcaatcagttttcttttctaaaagaagaaattgaacgatataaaaaaatggattacaccattattctgcagtctagcaattcaatgggaagtaaaacattggaggatatgttagaggaatatcagattaaattggattctagagataagacaartatctgtaaagaatctgtaaayttaatagagggtaatctcagacatggttttcattttgtagatgaaaagattttattgataactgaacatgagatttttcaaaagaaattaaagcgtcgttttcgaagacaacatgtttcaaatgcagagagattaaaagattacaatgarcttgaaaaaggggmmtatgttgtccatcatatccatgggattggtcaatatctaggaattgaaaccattgaaatcaaggraattcatcgygattatgtcagtgtccartaccaaaatggtgatcaaatttctatycccgtggaacagattcatctactgtccaaatatatttcaagtgatggtaaagctccaaaactcaataaattaaatgacggtcattttaaaaaggccaagcaaaaggttaagaaccaggtagaggatatagctgatgatttaatcaaactctactctgaa

SEQ ID NO: 2674 - DNA, 1268 bp, Streptococcus pneumoniae
  misc_feature (1)..(1268): tiling:Spneumo1:WAN024G9B; Cluster includes WAN024469 spr0 833|proA|15902877|NP_358427.1|834084..835346|+|1263 bp|Gam ma-glutamyl phosphate reductase|S.pneumoniae|R6|NC_003098. 1|ORF|221
atggtgagtagacaagaacaatttgaacaggtacaggctgttaaaaaatcgattaacacagctagtgaagaagtgaaaaaccaagycttgctagccatggctgatcacttagtggctgctactgaggaaattttagcggctaatgccctcgatatggcagcggctaaggggaaaatctcagatgtgatgttggatcgtctttatttggatgcagatcgtatagaagcgatggcaagaggaattcgtgaagtggttgccttmccagatccaatcggtgaagttttagaaacaagtcagcttgaaaatggtttggttatcacaaaaaaacgtgtagctatgggkgtcatcggtattatctatgaaagccgtccaaatgtgacgtctgatgcggctgctttgactcttaagagtggaaatgcggttgttcttcgtagtggtaaggatgcctatcaaacaacccatgccattgtcacagccttgaagaagggcttggagacgactactattcayccaaatgtgattcaactggtggargatactagccrtgaaagtagttatgctatgatgaaggccaagggctatctagacctyctcattcctcgtggaggagctgrcttgatyaatgcagtrgttgagaatgcsattgtrcctgttatcgagacaggractgggattgtccatgtytatgtsgataaggaygcagaygamgacaaggcrctgtctatcatcaacaatgcyaaaaccagtcgtccttctgtytgyaatgccatggaggttctgctggttcatgaaracaaggcagcaagcwtccttcctcgcttggakcaartgytggttgcagakcgwaargaagctggrytggaaccaattcaattccgcytrgatagcaaagcaagccagtttgtttcaggtcaagcwgctsarrcmcaagactttgayaccgagtttttagactatrtyctwgctgttaaggttgtgagcagtttagaagaagcggttgcgcayattgaatcccacagyacccatcattcggatgctattgtgacggaaaatgctgaagctgcagcatactttacagatcaagtggactctgcagcggtgtatgttaatgcctcaactcgtttcacagatggaggacaatttggtcttggttgtgaaatggggatttctactcagaaattgcacgcgcgtggtccmatgggcttgaargarttgacyagctacaagtatgtggtyrcyggtgatggrcagataagggagtaactaat

SEQ ID NO: 2675 - DNA, 270 bp, Streptococcus pneumoniae
  misc_feature (1)..(270): tiling:Spneumo1:WAN024B69; Cluster includes WAN023M6N 3143 79_506a||||260065..260334|-|270 bp|EGAD orf prediction|S.p neumoniae|R6|NC_003098.1|ORF|110
atggtgcaagtacgattggttctgctccataggcagcttgttcttctgctgtcagcaattccttacgaacaacgatttggtatgtgtattcgtccatccaagcgtctgaggcaacaaagtaaccatctgtaccgaccttgtctccccatgagttttcaaccttccacttggttgatttaccattttcgtccaagtcaacacctgtcaagaccatggcgtgggtcatcaagctttcactatagtccaaacgtccagccttgtcttgagtaa

SEQ ID NO: 2676 - DNA, 333 bp, Streptococcus pneumoniae
  misc_feature (1)..(333): tiling:Spneumo1:WAN024C3P; Cluster includes WAN023M3X 3142 80_664a||||348953..349285|-|333 bp|EGAD orf prediction|S.p neumoniae|R6|NC_003098.1|ORF|110
atggtgctgaaaggcatagacagccgcctgggtacgatcgctgacttcaagtttggcaagaatattggacacgtgggtcttgaccgtcttgagagagataaagaggtcatctgcgatgcgctgattttcgtagcccttggcgatgagttggagaacatctcgctcacgcgcagtcaattcttcatgaagttccatatgattgcggtggtattcaaccttcttgctaacctcttgctcaatggccagctcgccagcagctaccttactgacggcatgaagcaattcatctgcactagaagtcttgagcatatagcctttggcaccagcatctaa

SEQ ID NO: 2677 - DNA, 327 bp, Streptococcus pneumoniae
  misc_feature (1)..(327): tiling:Spneumo1:WAN024CB8; Cluster includes WAN023MAE 3153 70_302||||156507..156833|-|327 bp|EGAD orf prediction|S.pn eumoniae|R6|NC_003098.1|ORF|110
atggtgctgcatatattttctcaaagcactcaagcgagctgtgatatgacccttgtcgtcatcaaccccacgcccatacatgaagccattgcggaccgaaagcgtaaaaggatcctctgtccagacctgatccccatccgctggcacagtgtcatagtggttatagaaaatcaaggtcttggcatctggacgcgaactcttgaaatgtgccatgacaaagggcgctgtatagctctcatcaatctccacttcagctccaacacgcttgaaaatctcacccagataatttgcgacttccttgagtccaacctgctgggcaaagactga

SEQ ID NO: 2678 - DNA, 186 bp, Streptococcus pneumoniae
  misc_feature (1)..(186): tiling:Spneumo1:WAN024B2M; Cluster includes WAN0244JM spr0 352|IS861-truncation|15902396|NP_357946.1|352405..352590|- |186 bp|Degenerate transposase (orf2)|S.pneumoniae|R6|NC_0 03098.1|ORF|100
atggtggagtccttctttgggattctgaaatcggaaatgttttatggctatgagaaaacatttaaatcacttaatcaattggaacaagcyattatagactatattgattattacaacaacaagagaattaaggtaaaactaaaaggacttagtcctgtgcagtacagaactaaatcctttggataa

SEQ ID NO: 2679 - DNA, 639 bp, Streptococcus pneumoniae
  misc_feature (1)..(639): tiling:Spneumo1:WAN024FVQ; Cluster includes WAN024102 |||A AF73820.1|||639 bp||S.pneumoniae||AF154044|ORF|000
atggtggcctactgctttgtcgaaggaaaaatcaaactcttgctgattcgtcgcaaggctcacccttatcaaaactatttagccttagttggaggctttatggacaagggagaagatgctgcacatgcctgtcagcgcgaagtgaaagaagaagtcaatctcgatcttcctttggaaaaaatcgagcagttaatgaccgtatcgacccctggtcgtgatccacgggggtggacagtgaccattgcctatttagtgtacctacctagtcgtgcattagaactggttcaggcaagtgacgatgctaaggatgttgtttttgtagatgttgactttcagacggggaaatgctaccttgagggagtggagctggacgagcaagccttagcctttgaccattatgccattatccaaaaatccatcaaacgaatccaaggccgtatcgactggaacccgaccttcctttatctgttggaagaagagtttactgtctatgaaggaaccgaactggtcaatttcatcaaccccggtcgcccaatcgtcagcaataactttctcgtaaaatacggcgaatatgtagaagaagtcggactcaaacgagtacctaaaaagaaaccaagaaaaacctatcgattgaaataa

SEQ ID NO: 2680 - DNA, 1109 bp, Streptococcus pneumoniae
  misc_feature (1)..(1109): tiling:Spneumo1:WAN024FUV; Cluster includes WAN0243VF spr1 224||15903267|NP_358817.1|1221532..1222689|-|1158 bp|Conse rved hypothetical protein|S.pneumoniae|R6|NC_003098.1|ORF| 121
atggtggctaagaaaaaaatcttattttttatgtggtctttttctcttggaggtggtgcagagaagattctatcaaccattgtttcaaatctggatccagaaaagtatgatattgatattcttgaaatggagcactttgacaagggatatgaatctgttccaaagcatgtacgcattttaaaatcccttcaagattatcgccaaaccagatggttacgagcttttttgtggakaatgagaatttattttccaagactgrmtcgtcgtttgcttgtaaargatgattatgatgttgaagtttcttttaccattatgaatccaccactgttgttctctaaaagaagagaagtcaagaagatatcttggattcatggaagtattgaagaacttcttaaggatagctctaaaagagaatcacatagaagccagttggatgctgcgaatacaattgtagggattycaaaaaagaccagcaattctatcaaggaagtttatccagattatrcttctaaattacagacaatctacaatggatatgattttcagactattctagaaaaatctcaagagaagatcgatatcgagattgctcctcaaagtatctgtactatcggacggatygaggaaaataagggttctgaccgtgtagtggaagtgatacgattattacaccaagagggaaaaaactatcatctctattttatcggggctggtgatatggaagaggaactgaaaaaacgagtcaaagagtatgrgattgaggactatgtacatttccttggttatcaaaaaaatccttatcagtatytatctcagacgaaagttctyttgtctatgtctaaacaagaaggttttcctggagtgtatgtggaggccttgagtctgggactcccttttatctctacgracgttggaggggctgaggaattatcccaagaaggacgatttggacaaatcattgagagcaatcaagaggcagctcaggcgattactaattacatgacttctgcctcaaactttgatgtcgatgaggctagccaattcattcaacaatttacaattacaaaacaaatcgaacaagtagaaaaactattagaggagtarctaat

SEQ ID NO: 2681 - DNA, 297 bp, Streptococcus pneumoniae
  misc_feature (1)..(297): tiling:Spneumo1:WAN024FXP; Cluster includes WAN023LA9 3142 09_2186||||1175600..1175896|-|297 bp|EGAD orf prediction|S .pneumoniae|R6|NC_003098.1|ORF|110
atggtggtcaatcttaatgagaaaatcaccttgactatagcgcttatcatcgatacgagcagtattagctgtatcacagacgatgacaagtgcgccttggtaggctctatcttcaacaagatccatctcagccatccaagtaagagttggttcatcaaaaccgacggctttgatggttttttctgggaaatgatgttccagcaaggctttcaatcccacctgacttcccaaggcatcagggtctggtttcatatgacgatgaatgataatggtgtcgtattctttaattttttctaa

SEQ ID NO: 2682 - DNA, 342 bp, Streptococcus pneumoniae
  misc_feature (1)..(342): tiling:Spneumo1:WAN024F49; Cluster includes WAN023M3J 3137 36_695||||364233..364532|+|300 bp|EGAD orf prediction|S.pn eumoniae|R6|NC_003098.1|ORF|110
atggtgtcgccaggcattccaatcacgcgcttgacgatgtccttattgccatcttcctcatgggccaccacgatatcaaaacggtcaataggraggtgyttwacaacraagagratttcrccatccgctagggtcggatccatggaatgtccttctacgcgaacattgctccaaaaaaagatacgrctyaaagctagtaatgacagaatyaggaggaayaatccccactcttttaagaaatttttaaatraattcataacttacctttctaagcgttttttcgctttttcagtrtttttaaagtgcaatttggcgcagaagctgagtccctgcataccatag

SEQ ID NO: 2683 - DNA, 176 bp, Streptococcus pneumoniae
  misc_feature (1)..(176): tiling:Spneumo1:WAN024D9V; Cluster includes WAN0243Y0 spr1 131||15903174|NP_358724.1|1136240..1136410|-|171 bp|Hypoth etical protein|S.pneumoniae|R6|NC_003098.1|ORF|121
atggtgtctatggtcgataaggacggcaaactcatcccagaacaaggaggagcacgttcaacttcaccagcwccagttgtgatccgtaaagggcttgacattgatawartmawratgcacctgtcagatacttttaactcatgggactaccgtcaggttgagtattattarctaat

SEQ ID NO: 2684 - DNA, 261 bp, Streptococcus pneumoniae
  misc_feature (1)..(261): tiling:Spneumo1:WAN024B82; Cluster includes WAN0244SZ spr0 015||15902059|NP_357609.1|20593..20751|-|159 bp|Hypothetic al protein|S.pneumoniae|R6|NC_003098.1|ORF|560
atggtgtgkttaatgttggtaagaraaahttctgaaacyawrcttcaaaaaagtcgctcgtcatcrtctcttcgtaagtyattggarcgattaaytcaccattkrttagacctgcaaccaaagaaatcctctgatatcttcttccagatactttrcctcttmttaaytgacyttttaatgagcgaccatattctcgataaaaataagtatcgaatcctgtttcrtcaatctaaacaggtgytaggtgctttaaactattaa

SEQ ID NO: 2685 - DNA, 212 bp, Streptococcus pneumoniae
  misc_feature (1)..(212): tiling:Spneumo1:WAN024D4Y; Cluster includes WAN0243KN spr1 613||15903655|NP_359205.1|1587834..1588040|-|207 bp|Hypoth etical protein|S.pneumoniae|R6|NC_003098.1|ORF|120
atggtgttgtcaggaggtaaaagcgctatgcctatgacacaaaaagagatggttaaactccttacggcccatggttggataaagactagaggcggtaaaggctcccatattaaaatggaaaagcaaggggaaagacctatcacaatccttcatggtragctgaataagtacactgaaagagggataagaaagcaagctgggttgtaactaat

SEQ ID NO: 2686 - DNA, 279 bp, Streptococcus pneumoniae
  misc_feature (1)..(279): tiling:Spneumo1:WAN024C9W; Cluster includes WAN023M9G 3143 93_344||||182392..182670|-|279 bp|EGAD orf prediction|S.pn eumoniae|R6|NC_003098.1|ORF|110
atggtratggcttctcccaactccactggtttgtgcattggatgggcatggggtttagaagaattgataccgctagctaggatcgtatcaaaagataagccagatgctcccaactcacgcatgcggaaatcaaggaagttggcaatctcaatttcagtttttcctggtttgataaagtcaagcgcatcgcggaaagcttggtctgagatagaacaagccttgcgaatcgctgcaatctctgcctcatccttaatcatacgaagaccttccacaaactga

SEQ ID NO: 2687 - DNA, 240 bp, Streptococcus pneumoniae
  misc_feature (1)..(240): tiling:Spneumo1:WAN024GIY; Cluster includes WAN023LTY 3133 16_1157||||609690..609929|-|240 bp|EGAD orf prediction|S.p neumoniae|R6|NC_003098.1|ORF|110
atggtrattccacgctctttttcgatatcgtttgagtccatagcacgctctgccaattcagtmcgtgcatcaagcgtttctgattgtttcaataattcgtcaaccagggttgttttaccgtggtcaacgtgggcgataatcgcaatgttacggatatcttctcttaattttgtcatgatttcctctataatattcaaaatttattttctaactgaacgattataccataatttcaaataa

SEQ ID NO: 2688 - DNA, 1022 bp, Streptococcus pneumoniae
  misc_feature (1)..(1022): tiling:Spneumo1:WAN024D34; Cluster includes WAN0243GL spr1 759|lytR|15903801|NP_359351.1|1727640..1728656|-|1017 bp|R egulator of lytRABC operon|S.pneumoniae|R6|NC_003098.1|ORF |111
atggttaaaaaaattattggaatggtgctagctttactttctgtaactgtagtaggagtaggtgtttttgcttatactatttatcaacaagggacagaaacyttagctaaaacctataaaaaaatcggygaagaaaccaaggttattgaagcgactgaacctctaaccattctgttaatgggagtggacaccggaaatgytgaacgaactgaaacttgggtcggtagaagtgatagcatgatcttgatgacagtgaatcctaaaacgaaaaaaacaacaatgatgagtttagagcgggatattctgacgcgcattgaatcagggaatggtcaggctcatgaagcgaaactgaactcagcatatgcagatggtggagcagagcttgctatagaaaccattcaaaaaatgatgaatatccatattgatcgctatgtgatggtcaatatgagaggrttgcaaaaaytagtggatgcagtaggaggtattacagtcaataatatcctaggtttcccaatttctatcagtgaccaagaagaatttaatacyatttctatcggtgttggggagcaacatattgggggagaagaagccctagtctatgcacgaatgcgttaccaagatcctgagggggattatggtcgtcaaaaacgtcaacgtgaagttattcaaaaagtcatggaaaaagctctcagtttaaatagcrttggtcattatcaagagattctaaaagctttgagtgacaatatgcagaccaatattgatttgtctgcaaaaagtatccctaacttgctaggctataaagattcatttaaaaccattgaaactcagcagttgcagggtgaaggagagatacttcaaggtgtttcttaccagattgtttcgagagcacatatgttggaaatgcaaaatmtactccgacgttctttgggacaagaagaagttactcagcttgaaaccaatgcggttttatttgaagatttatttggcagagcacctgttggtgatgaagataattaactaat

SEQ ID NO: 2689 - DNA, 114 bp, Streptococcus pneumoniae
  misc_feature (1)..(114): tiling:Spneumo1:WAN024DTE; Cluster includes WAN024368 SP00 93||15900036|NP_344640.1|96628..96741|-|114 bp|hypothetica l protein|S.pneumoniae|TIGR4|NC_003028.1|ORF|010
atggttaaaataaggacaagagaaaacatggatatctatatccttgtgccaaaaaaaccactgccctccccagaccaacctgaggaaagcagtgattcttattttaggagttag

SEQ ID NO: 2690 - DNA, 890 bp, Streptococcus pneumoniae
  misc_feature (1)..(890): tiling:Spneumo1:WAN024FGB; Cluster includes WAN0243MU spr1 533|ABC-MSP|15903576|NP_359126.1|1511158..1512042|-|885 bp |ABC transporter membrane-spanning permease - sugar transp ort|S.pneumoniae|R6|NC_003098.1|ORF|111
atggttaaagaacgtaatttaactcgctggatatttgttttgccagctatgattatcgtaggattactctttgtttatccgtttttctcgagtattttttatagctttaccaataagcatttgattatgcctaattataaatttgttggtttggctaactataaagytgtgctatcagatcccaacttctttaatgcgttctttaattcaattaagtggaccrttttctcattagttggtcaagttttagtagggtttgtattggctttagctcttcacagagtacgccacttcaagaaattatataggacmttattgattgttccttgggcatttcctaccatcgtyattgccttytcttggcagtggattctaaacggggtttatggctacttacctaatctaatcgtaaaattaggtttaatggaacatacacctgcatttttgacagatagtacatgggcattcctatgtttggtgtttatcaacatttggtttggagcaccaatgattatggttaatgtgctttcagctttgcaaacagtaccagaagaacaatttgaggctgctaagatagatggtgcttcaagttggcaggtgttcaagtttatcgtctttccacatattaaagtggttgtaggacttctagttgttttgagaactgtatggatctttaataactttgacattatctacctcattactggtggtggaccagccaatgctacaacgacgcttccaatttttgcttacaacctgggytggggaactaaattgttgggtcgtgcttcagcagttacagtaytgctctttatcttcttggtggcgatttgctttatctactttgctatcatcagtaagtgggaaaaggagggtagaaaataactaat

SEQ ID NO: 2691 - DNA, 287 bp, Streptococcus pneumoniae
  misc_feature (1)..(287): tiling:Spneumo1:WAN024CZM; Cluster includes WAN0243E4 spr1 848|PTS-EII|15903890|NP_359440.1|1823913..1824194|-|282 bp |Phosphotransferase system sugar-specific EII component|S. pneumoniae|R6|NC_003098.1|ORF|111
atggttaaagtattagcagcgtgcggaaatggaatgggttcatcaatggttatcaagatgaaggttgaaaatgctctccgtaagcttaatcaaacagattttacagtcaattcatgcagtgtcggtgaagctaaaggtttagcagtaggatatgacatcgtaatcgcttctcttcatttgattcaagaattggaagggcgaactaatgggaagttaattggrcttgataacttgatggatgataaagaaatcaccgaaaaactcagtcaagcactacagtaactaat

SEQ ID NO: 2692 - DNA, 1109 bp, Streptococcus pneumoniae
  misc_feature (1)..(1109): tiling:Spneumo1:WAN024EXQ; Cluster includes WAN0243MX spr1 530||15903573|NP_359123.1|1507099..1508202|-|1104 bp|Conse rved hypothetical protein|S.pneumoniae|R6|NC_003098.1|ORF| 111
atggttaaatacggtgttgttggarcagggtattttggagctgaattggctcgctayatgcaaaaraatgatggagcagagattactcttctctatgatccagataatgcagaggcgattgcagaagaattgggagcaaaagtagcaagttccttagatgagttggtttctagcgatgaagtagaytgtgttatcgtcgcaactccaaataatcttcataaggaaccggttattaaggctgcacagcatggtaaaaatgttttctgtgaaaaaccaattgcgctttcttatcaagattgtcgcgagatggtagatgygtgtaaagaaaacaatgtaacctttatggcaggacatattatgaatttctttaatggtgttcatcatgcaaaagaactcattaatcaaggagttatcggagacgttctatattgtcatacagctcgtaatggttgggaagaacaacaacygtcagtatcatggaaaaaaattcgtgaaaaatcaggtggtcacttgtatcaccacatccatgaattggattgcgttcaattccttatggggggcatgcctgaaactgtaaccatgacaggtggaaatgtggcccatgaagkkgaacattycggtgatgaagatgatatgatttttgtcaatatggaattttctaataagcgttttgcyttgttagaatggggttcagcttatcgttggggtgaacattatgtcttaatccaaggaagcaaaggtkccatccgcttagacttattcmactgtaaaggaactcttaagctagatgggcaagaaagctatttcttgattcacgaatcgcaagaagaagatgatgatcggactcgtatctatcatagtacagagatggatggagcaattgcttatggtaaaccaggtaaacgtactccattatggctatcatctgtcattgataaagaaatgcgctatctgcatgagattatgsaaggagctccagtatcagaagaatttgcaaaacttttgacaggtgaagctgccctagaagcaattgctactgcagatgcttgtacccagtctatgtttgaagatcgcaaagtaaaattgtcagaaattgtaaaataactaat

SEQ ID NO: 2693 - DNA, 942 bp, Streptococcus pneumoniae
  misc_feature (1)..(942): tiling:Spneumo1:WAN024CVW; Cluster includes WAN024448 spr0 906|lmb|15902950|NP_358500.1|891426..892361|+|936 bp|Lipop rotein|S.pneumoniae|R6|NC_003098.1|ORF|111
atggttaaggagttgttcatgaagaaacaaaatttatttttagtcctgttaagtgtctttcttttrtgcttgggggcttgtggtcaaaaggaaagtcagacaggaaaggggatgaaaattgtgaccagtttttatcctatctacgctatggttaaggaagtatctggtgacttgaatgatgttcggatgattcagtcaagtagtggkattcactcctttgaaccttcggcaaatgatatcgcagccatctatgatkcagatgtctttgtttaccattctcatacactcgaatcttgggcaggaagtctggatccaaatctaaaaaaatccaaagtgaaggtcttagaggcttctgagggaatgaccttggaacgtgtccctsgactagaggatgtggaagcaggggatggagttgatgaaaaaacgctctatgaccctcacacatggctagatcctgaaaaagctggagaagaagcccaaattatcgctgataaactttcagaggtggatagtgagcataaagagacttatcaaaaaaatgcgcaagcctttatcaaaaaagctcaggaattgactaagaaattccarycwaaatttgaaaaagcgactcagaaaacatttgtaacacaacatacagccttttcttatctagcgaagagatttgggcttaatcaacttggtattgcaggyatctctcctgaacaagaaccaagtccacgacaaytaacagaaattcaggaatttgttaaracctataaggttaaaacgatttttacagaaagtaaygcttcttcaaaagtagctgaaactcttgtcaaatcaacaggtgtrggtcttaaaactctgaatcctttagagkcagacccacaaaatgacaagacctatttagaaaatctkgaagaaaatatgagtrttctagcagaagaattaaagykaactaat

SEQ ID NO: 2694 - DNA, 2025 bp, Streptococcus pneumoniae
  misc_feature (1)..(2025): tiling:Spneumo1:WAN024C85; Cluster includes WAN023QR1 cont ig_1344_1||||34..291|+|258 bp|Glimmer 2.02 orf prediction| S.pneumoniae|670|WAN01UE6G|ORF|000
atggttacaataaaagatattgcaagagtgtctggagtctcacatgggacagtttcaaacgttttaaataaaaaaggtaatgtctcagcagctaaaataaagttagtagaagagactgcgaaaaaattgggttataatatgaattctcaagctcagtttcttcgaaaaggcgcttctagtaaatgttttttcttgttatttaataatgcacgcaaaaagtatgctgagtattttgcagaaattgatcagttatctttagatgtagaatatgtttacttacataaattctcagagattaaaaataagatatctgcaattttaagtgaaaatcctcaatttatagtttgcttaggtttttctccaaaaagattcgttgatattgaagataatattccratttttgaagtagatacatatcaatctaataaaactttatcttcctttgatagtgataaaatatttgagattgtacttgagttggttcggactgaaaagctatctaatttatattttatttcacttactaatgaaaaagaacattctttatttgaatatttractcaaaaaataaaaaactcaactcatatacaagtgcaagaacgtttacaattgttgtctctatatcctactctaaaaaactttgcaaagtatgattgtatatttgttgatgatgaagatttgatgcacacgctattagacttatttgattggtttactataattgatagaccaaaaatatgtttgataggttcacgtgtttggttcgaaaaaagaaatcttttttatatacatttagattatagaatattggcactcaatactgccgaaaatttagaaagtggaaatagttcaattgtaccagttaaagatggcaaacaaattttaaytratcaattatttgatggagaatgtgatgatatttatttacttactgtccattcaccaatgaataaagccttagaaattttatcagaaaagtataaacaaatttctgggaaaaatattaaaattatcgagaaaagatatgatgaacttttggagatgattgagtctggcgatgtttcatccagttttgatatgattagaatggatatggcttggcttccaacatttgggaaaaagtattttcaagagattacaagctttagacaaacaaaaagtattaatcaaaatatttctaagtcggtgtctcgagartatatgtatattgatcagaagcartatacttttccattggatgttagtagtcagattttagtatatagaaaagacttatttgaagattcatttttacaaagacgatactttgaaaaaacaaaaagaaaattaactgtaccaaaaagttatcaagagtttgatgagttaagtgaattttttacattaacagaaaatccattttcacctacactttatggccatagtttagctttaagttcttcagtgagagcagcatgtgaatttattcctcggtttcgtgagagattagcacaatctagaatgaatcttgctgtacttcctcaggttttaacygagtatgagaaaagttatcagtttaccgaaaaatcatttaattcttcgtggaacgatttcgttacgaacttaaacagtggtwaaacttcaatggaaataattttttcaaattatactagtccattatttgatggtctcaatgtttctgctcagtttgagtttgcaactgccactatacctggtaatactcctgtgataggtggtggctcaattggaatttctaaatattcaaatagagtggaagaatgtctaaactttatyaattggttatattctgaagagatttctattttactaacatctctgggtggttttttaccatcaaagtatgtcatgcaaaataggatgttacaatttcaatayccatggttatctagtttagaagatacatttagtattgggagtagaacaaaatggtacggctttaatactgattttagatttgagcagatgttagggcaagagttaatagaaagtgtgaagcatagatatgga

SEQ ID NO: 2695 - DNA, 570 bp, Streptococcus pneumoniae
  misc_feature (1)..(570): tiling:Spneumo1:WAN024DLV; Cluster includes WAN0244PN-5 sp r0135|epsG|15902179|NP_357729.1|142595..143809|+|1215 bp|G lycosyltransferase involved exopolysaccharide (EPS) synthe sis|S.pneumoniae|R6|NC_003098.1|ORF|111
atggttacaatgcaatatagttgtggaaaaataaatattaatatccctgatggatatggagacattaaggatatagtgttttcggctcatattatagttaggtataataatggacattgtggaggtatagatccgcatataattggactttgtaaaaagcagatcagaaggatgtctctatatcctattttgataatygtatctagagattcaaaggttattgatgattataaaaatttagatattgcctatgttgattgtactcaatgttcaaataattttgaaactgccttacacgttaaaaatattttaaaattattaaaaatccaacttatacactgtcatggctactcaactaattattttttatatatgttaaaaaaacttgacaagaatggatttggaaaggttaagacagtgataacatgccatggatgggttgaatataacttaaaaaagaaattcttgacttattttgatttttggacatattctatgggagatgcttttatttgtgtatctgaaactatgaaaaaaaagattggagagtataataaaaaamtaactaat

SEQ ID NO: 2696 - DNA, 978 bp, Streptococcus pneumoniae
  misc_feature (1)..(978): tiling:Spneumo1:WAN024FXG; Cluster includes WAN0241AB |cps 15bM||AAP76298.1|||978 bp|putative O-acetyltransferase|S.p neumoniae||AY250187|ORF|000
atggttactaaagataaaggattaacatataatagtactttgcatgcaataaaagtattagcatgttttagtgttgttgctattcatatatggctaccaggaaaaattggagcgttttatcaaataatagcacgatttgcagttccaatgttctttttgatttctggcttttattcatataatatttcaaagaataaaatacrgaatagaattaaaaaaatatttagattgatattaagaagtacatttttttatgtaataatatttgtatggatgttttggagagaaggtaatatgcagtttatttttcaaaactttaatttaacaaatattataagatttgtgatttttaatagratttcagatttaataggctatctagcaacaccgttrtggtatttatttgcyataytatatatatatatwtayctttatttttccaataaaagactactattgacaaaacgatggatytctatrcttttactattttctttcattatggaagctacaattagcgattcaattttttatagaaattttttatttatgggaataccattttttggaataggaattcttattgcacagaakcaaaagragattattaattgtaaaataataaacaaaatattaatcttgggaacaattatctatccaatactaatatttttagaatattatatcttgggtaattcttttgagrtctatataagttctgtgctagcaaccataatattgatgattttcgcgattaaatcacctaaagcgattaatatmaaaatactgaatgraattggagataaatatgcgacttttgtttacattatacaccagtttatcattgtgatatttaaatttttagtatctaatgtttatattctcaaatttgggacgatatttgtctttttgatatgttgttttctaggggttctatttcaatttatcaaaaacagactattaaaaaggtttagttaa

SEQ ID NO: 2697 - DNA, 386 bp, Streptococcus pneumoniae
  misc_feature (1)..(386): tiling:Spneumo1:WAN024GET; Cluster includes WAN0244CV spr0 595||15902639|NP_358189.1|608131..608511|+|381 bp|Conserve d hypothetical protein|S.pneumoniae|R6|NC_003098.1|ORF|111
atggttacttggattttgtgggcacttatactagcaatgttggcgtggatgggctttaactatcttcgtattcgccgtgcggctaaaattgtggacaatgaggagtttgaagccttgattcgtacgggtcaattgattgatttgcgcgacccagcagaattccacagaaaacatatccttggtgcacgcaatattccttcaagtcagttgaaaactagtcttgcagcccttcgtaaagataaacctgtccttctctacgaraaccaacgtgcgcaacgagttacaaatgcagctctttacttgaaaaaacaaggtttttctgagatttatatcctttcttatggcttggattcttggaaagggaaagtgaagactagctaactaat

SEQ ID NO: 2698 - DNA, 549 bp, Streptococcus pneumoniae
  misc_feature (1)..(549): tiling:Spneumo1:WAN024CJ6; Cluster includes WAN0242DY SP11 89||15901054|NP_345658.1|1126059..1126601|-|543 bp|hypothe tical protein|S.pneumoniae|TIGR4|NC_003028.1|ORF|010
atggttagtggttctgtatttgcagatagtgccctaactacagtagataaagcaaatgatattgttttgaatgttgatgggaataaattttataatgtttcggtttcagaagatattgtaaatgctggtcaaattttggaagattatttttatgtagataaatttggaaatataaatttaaaaggcactcctgaagagttagcaaaaaatattggtatttctgtacaagaagcaagtttgatgtatggagctgtaaaagagttacccaacgtttacgaaagaggtcctgtaggttttcgtttcaatcttggtcctcaagtgagggggatgggtggctgggctgctggagctttcgctactggatatgctggatggcatttgaaacaatttgcggttaatcctgttacatctggatttgttgctgtaataagtggtgcgattggctgggctgtaaaaactgctgtagaaaattattggacagttgctgtagctacagtagaagtgccgtttgtgaaccttgtttacaccatagatttacctctarctaat

SEQ ID NO: 2699 - DNA, 404 bp, Streptococcus pneumoniae
  misc_feature (1)..(404): tiling:Spneumo1:WAN024C8U; Cluster includes WAN0244NR spr0 203|rpsH|15902247|NP_357797.1|202737..203135|+|399 bp|30S Ribosomal protein S8 (S8)|S.pneumoniae|R6|NC_003098.1|ORF| 111
atggttatgactgacccaatcgcagacttcctaactcgtattcgtaatgctaaccaagctaaacacgaagtacttgaagtacctgcatcaaacatcaaaaaagggattgctgaaatccttaaacgcgaaggttttgtaaaaaacgttgaaatcatygaagatgacaaacaaggcgtcatccgtgtatttcttaaatacggaycaaatggtgaraaagttatcactaacttgaaacgtgtttctaaaccaggacttcgtgtctacaaaaaacgtgaagaccttccaaaagttcttaacggacttggaattgccatcctttcaacttctgaaggtttgcttactgataaagaagcacgccaaaagaatgttggtggtgaggttatcgcttacgtttggtaactaat

SEQ ID NO: 2700 - DNA, 761 bp, Streptococcus pneumoniae
  misc_feature (1)..(761): tiling:Spneumo1:WAN024DLT; Cluster includes WAN0244PK spr0 138||15902182|NP_357732.1|147164..147919|+|756 bp|Hypothet ical protein|S.pneumoniae|R6|NC_003098.1|ORF|111
atggttatgagtracaatactaagtatatctttttatctccacatttagatgacgcaattttttcctgtggtgattatatttcaaaattaacttcagaaggagaaattgtacttgttattactatattttctggttaccctttgagccaacagctacagycctctgctaagcaatttcataagttgtgtaaccttgggaaatatccgattgaagaaaggaagaaagaagacaggttagcttgtgaacgtctacartgtgattttagacacttatcgtactatgaatgtctctataggaaagatagaaatggcaattttctataccgtcatatctatagtgaattaaaaaatgaggacacattaaagaatgatatcataaaagagctgttaatgcatttagacgacaaatgtgtcgtatattgtccgctttcacttggtgaccatrttgmtcatgtttttgtgaatagtattggaagggcgcttgaatttatgcgttataaagtaatatattatgaggayttcccatatgtaagtgatagtagtatggttagttatatgggaaaaactaaagaattaaaaatrtatcaagaggaacttgatraaaaamattatattgatagaatatcatcaatattgtgctataaatctcagattttgataatctggaaatcagttgaaaaacttttaaacaatattaaagagttgtatttaaggaatggggcagcttattctattakattttggattaagaaataactaat

SEQ ID NO: 2701 - DNA, 1304 bp, Streptococcus pneumoniae
  misc_feature (1)..(1304): tiling:Spneumo1:WAN024GOJ; Cluster includes WAN0243FL spr1 795||15903837|NP_359387.1|1766854..1768152|-|1299 bp|Conse rved hypothetical protein|S.pneumoniae|R6|NC_003098.1|ORF| 111
atggttatgtggtcgtactgcatagcaaggacaggaggtaggatggaaagtttacttattctattattaattgccaayctagctggtctctttctgatttggcaaagrcaggataggcaggagaaacacttaagtaagagcttggaggatcaggcagatcatttgtcagaccagytggattaccgctttgaccaagccagacaagccagccagttagaccaaaaagatttggaagtggytgtcagcgaccgtttgcaagaastrckrattgaattgcaccaaggyctgacccaagtccgtcaagaaatgacagataatctcctccaaactagagacaagacagaccaacgtctccaagccttgcaggaatcaaatgagcaacgtttggaacaaatgcgccagacggtcgaggaaaaactagaaaagaccttgcagacacgcttacaggcttcctttgagayagtttctaaacaactggagtctgtcaatcgtggycttggagaaatgcagacagttgcccgtgatgtcggagctcttaacaaggttctctctggaaccaagacgcgagggattctgggagaattgcaactggggcaaattattgaagacatcatgacacctgcccagtacgaacgagaatacgcaacggttgaaaactctagtgaacgagtggagtatgccatcaagttacccggacaaggcgaccaagaatacgtctayctrccaattgactctaagtttccactggcagattattaccgcttrgaagaagcctatgarryaggtgacaaggatgaratygaacgctgtcgtaagtcactcctagcaagygtcaagcgytttgcyarggatatyargarcaagtacatagcaccrcctcggacraccaattttggartyttgtttgttccgacagaaggtctytaytcagaratygtscgcaatccggtcttctttgatgatttgagacgggaagaacagattatygttgcaggaccaagtaccctatcagcccttcttaactccctatcagttggtttcaagacccttaatatccaaaagagtgccgaccatatcagcaagactcttgccagtgtcaagaccgagtttggcaagtttggtggtattctggtcaaggcacaaaaacatctccaacatgcctctggcaatattgatgaattattaaaccgtcgtaccatagctatcgagcggacgctccgtcacattgagttgtcagaaggygagcctgcgcttgatctactccattttcaagaaaatgaggaagaatatgaagattarctaat

SEQ ID NO: 2702 - DNA, 1230 bp, Streptococcus pneumoniae
  misc_feature (1)..(1230): tiling:Spneumo1:WAN024G47; Cluster includes WAN023P5G pne5 5_15||||10542..11771|+|1230 bp|Type 27 capsule operon, Gli mmer 2.02 orf prediction|S.pneumoniae||WAN01UCGU|ORF|000
atggttattaactttagtaaatataattggattttaattttaattttatcgagctcagaactgttttctaaagaaacaaatctatttttattactatttattctactatactatgttttagttcgtggaggtagactaccaatttcaattccaggagcgaaatattattttactttattaatggtggggctatttataggtattgggaatgtaataattaacgaaaatacagtatttaattttgtaaagcattttatctattacttattacctctatttttttggcagtttggatgtgttctgtcaaataacgataatttatcttacaagcaaaacaatattaaggaatcaattgttataacagcatttctattatcttcttatgatttaataggttcaatcattagtttcttgtctagaactaaggaaattgttgatttatatagtttacggtcagagtttggtcgaggttcctatataccaattattgcactgtatttagttcttgtttattctagagaaataaagttgagcaaaaattttaagggatttttgttattactgtttacaatctcgattttgatacatttttctaggacacattttattattttattgattctagtatttttttcaggatttgaaaaaaatatgaaaagtattaaaaaaataatgtttgcaggaacattgatattagcaggtgtaggtgttttatatttatattttccaaatttagttatagatttttataataaaatatctcaatcaacgacggaaatcacgttttctaaatcgtcatggtcccataaagatatcatatggaattggcgtggatatgaaatgtactctgccttaaatcattttaaatcttcaactttattagagcaaattttaggaggaggatttggaacagttttatacataggcgaatatgcgtatttcgtaagcgatttaccgtatcttctttttttacataatggatatttcactactttacttgtttttggtgttagtggggtcatactattcgttttatgggtacttagtttatttagttatagcaagtatgttaatgatacccaagattcaaattttataaaaggtcttgctgtggttatattatttaccacatattttgtaaatggtcctcttttttctgtttcacaagccaccttcttgctttattttgcactttttagtaataatcatggagaattagatgaagatttt

SEQ ID NO: 2703 - DNA, 315 bp, Streptococcus pneumoniae
  misc_feature (1)..(315): tiling:Spneumo1:WAN024EZP; Cluster includes WAN023Z7D-5 AL 449925.1_82||||71169..72263|-|1095 bp|Glimmer 2.02 orf pre diction|S.pneumoniae||AL449925.1|ORF|000
atggttcaactagccgatagctcttgtaggcataagaaaacacctytgtgttatacttgttgttcaaccacaaacacaagaaaggcrcagagatgcaaraccattatactacaaaaggcgaacaaagggaaatcaaatagagaaattgcctctctgcttggaaaagttcctcaaactatccacactgaaatcaagcgtrggacagtccgacaatgtcttggaaaagggcgcttcaaagaggtttattctgccgactatgctcaacagtcttatgaaaacaatcgcaagcgctcggtcargaaattaagcgtgacc

SEQ ID NO: 2704 - DNA, 840 bp, Streptococcus pneumoniae
  misc_feature (1)..(840): tiling:Spneumo1:WAN024CZH; Cluster includes WAN0243DP spr1 864|cglA|15903905|NP_359455.1|1834558..1835499|-|942 bp|Co mpetence protein|S.pneumoniae|R6|NC_003098.1|ORF|111
atggttcaagaaattgcacaagaaatcattcgytcrgctcggaaaaaagggrcgcargayatytattttgtcccyaagttagacgcctatgagcttcatatgagggtaggagacgagcgctgtaaaatyggtwgytatgattttgaaaagtttgcrgccgtyatcagtcactttaagtttgtggcgggtatgaatgtkggagaaaarmgacgtagtcaactgggttcctgygattatgcctatgacsakmagatrgcgtcwctacgtttatctacygtaggygattatmgrgggcatgagagtttrgttatycgtttgttgcaygatgagragcaggasytgcatttttggtttcaggatattgaagaattrggcaagcagtacaggcaacgkggwctctatctytttgctggyccrgtyggsagtggyaagacraccttgatgcatgaattgkcyaartcwctctttaaaggacagcaagttatgtccatygaagatcctgtcgaaatcaagcaggacracatgctycagttgcagttgaaygaagcratyggbctwacctatgaaaatctaatcaaactttccttgcgycatcgaccagatctcttgattatcggagaaattcgtgacakcgagacggcgcgtgcagtggtcagagctagtttgacaggtgcgacagtcttttcaaccattcaygccaagagtatycgaggtgtttatgagcgyctgctggagttgggtgtgagtrarrarraattrgcagtygttctkcaaggagtctgctaccagagattaatcgggggaggaggaatcgttgactttgcaarcaragaytatcaa

SEQ ID NO: 2705 - DNA, 267 bp, Streptococcus pneumoniae
  misc_feature (1)..(267): tiling:Spneumo1:WAN024FZR; Cluster includes WAN023LCU 3146 23_2078a||||1121187..1121453|-|267 bp|EGAD orf prediction| S.pneumoniae|R6|NC_003098.1|ORF|110
atggttccagctacaaagtcgttaattgggctttgttggcctgtgatagactcgatgaagtttggaattccccagaagatgaaggctgcaagaatcatcaatggaataccacgaataacgtcaacgaaaatctcagagatgacgcgaagagatttgtatgggctaacgctaaacataccgaagataattccgatgacaatggcaatagcaaatgagataagagctagagcaagagtgataccaagaccgctaaggagttgtttgtag

SEQ ID NO: 2706 - DNA, 710 bp, Streptococcus pneumoniae
  misc_feature (1)..(710): tiling:Spneumo1:WAN024CA8; Cluster includes WAN0244OP spr0 169||15902213|NP_357763.1|177444..178148|-|705 bp|Hypothet ical protein|S.pneumoniae|R6|NC_003098.1|ORF|211
atggttctaagaggagttcctatgtctcaaattgatctacaaaaattaactaagaaaaaccaagagtttgtccacattgctacccaacaattcatcaaagatgggaaaacagacgctgaaatccagactatttttgaggaagtcattccccaaatccttgaggagcaatctaaaggtacaactgcccgttccctatacggcgcaccaactcattgggctcatagcttcactgtcaaagagcagtacgaaaaagagcatccaaaagaaaatgatgayccaaaactgatgattatggactcagctcttttcatcactagcctctttgcccttgtcagcgccctcacaaccttctttgcggcagaycaagctttcggctatggattgattactcttctakwagttggactggttggtggatttgccttctacttgatgtactactttgtttaccaatactatggaccaratatggatcgcagtcaacgtccacctttctggaaatctgtactagttatcctarcttctatgttcctttggttgcttgtcttctttgcaacaagcttcctaccagctagccttaacccagtactggatccattgccactagctattattggagyagccctcctagcccttcgcttctatctcaagaaacgcttgaatatccgtagtgyaagtgcaggaccaacacgctatcaagaataactaat

SEQ ID NO: 2707 - DNA, 1371 bp, Streptococcus pneumoniae
  misc_feature (1)..(1371): tiling:Spneumo1:WAN024B62; Cluster includes WAN0243TI spr1 293|ABC-NBD|15903336|NP_358886.1|1288223..1289587|+|1365 b p|ABC transporter ATP-binding protein - unknown substrate| S.pneumoniae|R6|NC_003098.1|ORF|121
atggttgaaataaaaaatttaagtcttgattatggtgaagagcatatattagatgatatatcactatccatagccgagggagagtgcgtgctatttacaggaaaaagtggaaatggtaagtcatctttaataaattcaatcaatggactagctgtaaggtatgataacgcaaagacaaagggcgaaataattattgatggtaagaatataaaaaatttggaactttatcaaatctcaatgcttgtttcaactgtttttcaaaatcctaagacatatttttttaatgtcaatacgacattagaattattattttatttggaaaatatcggtcttgcaagagaagagatggacaggcgtttgaaggatatrcttragatattcccgataaaaaatcttttraacagaaatatatttaatctatccggcggtgaaaaacaaattctttgcattgcagcttcttatatagcaggtacaaagattatagttatggatgagccttcatcgaatttagatattaaaagcataagtgttttggcaaagatgctaaagatattaaaagagaaaggcataagcataattgttgcagagcatagaatttattatttgatggacatagttgaccgtgtatttttaatagataaaggaaagcttaaaaaaacttatactagaagtgaatttttaaagctagataaaaatgaattaaatgctttaagtttaagagataaagaattaagtaaattaaaagttccttatttaaaagaaggtggagagtatcagataaaaaatcttagytacaaatttactgatgatgagtgtttaagcttaaaagatatttcrttcaagcttgggaaaatttatggcataataggatccaacggacgaggaaaatcaacgcttttaagatgtttaataggtcttgagaaaaaatcaaaagaagaaatttattttaagggagagaagctatctaaaaaagaaagactcaaaaactcttcacttgttatgcaagatgtaaatcatcaattattcacagatgaagtattcaacgagcttagattaggagtaaagaattttgatgaagaaaaggcgaaaatcattttaaamsawttakkcmyssacraatytawykaawggcatccgatgagtttatcaggagggcaaaagcaaaggcttgcaatagcatctgttatgtgcaagaattctccatttrtcttttttgacgaaccttcaagtggtatggattattccaatatgataaaaatatctgaactgattaataagtataaaaccatggataaaataatttttattgtttcccaygatatagaatttttaaatgaagtggcagatgaaatttttgaattgywaamtaat

SEQ ID NO: 2708 - DNA, 332 bp, Streptococcus pneumoniae
  misc_feature (1)..(332): tiling:Spneumo1:WAN024FNG; Cluster includes WAN0243SH spr1 330||15903373|NP_358923.1|1317741..1318130|-|390 bp|Hypoth etical protein|S.pneumoniae|R6|NC_003098.1|ORF|221
atggttgaatatattagtcgcaagtatttcttgacagaagaggaatttcaagcggaaaaaatttgtaatcartctctygtagaactttttcagaagaagtatrgttggcattcattgaatgattttggttcttcgacttatgataagaaytatgcaagtattttttaygaatactggcgyagytttttgacartagataagttggtagaaaatytaggtagtgtacaagcggtcttmgattcttatcatytatgggcaaatacagawaaaactyttcccttgttarattggtttgttcagcagaaattaattgaaaaagaratataactaat

SEQ ID NO: 2709 - DNA, 720 bp, Streptococcus pneumoniae
  misc_feature (1)..(720): tiling:Spneumo1:WAN024CAX; Cluster includes WAN02444V spr0 883||15902927|NP_358477.1|874443..875156|+|714 bp|Conserve d hypothetical protein|S.pneumoniae|R6|NC_003098.1|ORF|111
atggttgaatcgtatagtaagaatgctaaccataacatgcgtcgtcctgtcgtcaaagaagaaattgtagacttgatgcgtcagcgtcawaagcargtcacaggtttcttgaaagaattggaagactttgcccgcaaggaaaatattcctattattccccatgaaacggttgcttatttccgttttcttatggaaaccatgcagcctaaaaatattctggaaattgggacggctatcggtttttcagctctcttgatggctgaacatgcgccaaatgctaagattacaactattgatcgtaatccagaaatgattggttttgccaaggaaaattttgcccagtttgacagtcgcaagcaaatcactctcctagagggagatgcggtggatgtcttatctacactgacagagtcttatgatttcgtmtttatggattctgccaagtctaaatacatcgtctttctgccagaaatyctcaaacatttggaagttggtggtgtggttgtcttggatgatattttycaaggyggtgatgttgccaaggayattatggaagtccgtcgwggtcagcgaaccatytatcgaggccttcaaaraytatttgaygcaaccttagacaatycagaactcaccgcaacattagtgcctttaggagatggtattctcatgcttcgtaaaaatgtagcagatgttcaaytgyctgamagcgaaykaactaat

SEQ ID NO: 2710 - DNA, 252 bp, Streptococcus pneumoniae
  misc_feature (1)..(252): tiling:Spneumo1:WAN024DVR; Cluster includes WAN023KDK 3130 89_3636||||1959838..1960089|+|252 bp|EGAD orf prediction|S .pneumoniae|R6|NC_003098.1|ORF|110
atggttgacattcctccatacacagaacaaatgaatccaatcaacaagaatacccacatatttttcttgagcatcatatttaaaagcataccaaaaccaattgaaggtagtaaagcacctgcagagttaagtccctgcataacgattggtggaaccttagcaaacaagtctgccacatattcccctccaagcataatagctaggaaaattggtacaattttaaataamgtgattaaaaccaaacttgaataa

SEQ ID NO: 2711 - DNA, 619 bp, Streptococcus pneumoniae
  misc_feature (1)..(619): tiling:Spneumo1:WAN024GNN; Cluster includes WAN023M35 3152 74_713||||372883..373251|+|369 bp|EGAD orf prediction|S.pn eumoniae|R6|NC_003098.1|ORF|220
atggttgactatgtaaggtgtgatgacttcagtatagccttcttttccatgttcatccaacataaagttgtagatagcacgttccaaacgagcaccgaggcctttatagaagaggaagcgagcgcctgttaccttaccaccgcgttcccagtcaaggataccaaggtcttcaccgagatcccagtgagctttaggttcgaagtcaaactcgcgtggagtaccccaacggcgaacttccacattgtcgtcttcgtcagccccaacaggaacgctgtcagctgggatatttggaagagtcgttgtaaattctgtcaatttagcatcgatttctgccaattcagcatccaaggctttaacctcagcagatagattttgcatggcagcaatcttgtcatctgtattttccttgttgcgcttagcttgggcaatctcagcagaaactgtgttacgttctgctttgagagtttcaaccttgaccaagatgttacgacgtttagcatcgatttctttcatttcattcaagacagcagcatctacaccacgtgtagctaatttttctgcgacagcttcaaaatctgtacgaatacgtttgatatctaacataagaactcctttatga

SEQ ID NO: 2712 - DNA, 2339 bp, Streptococcus pneumoniae
  misc_feature (1)..(2339): tiling:Spneumo1:WAN024GKF; Cluster includes WAN0244GW spr0 450|hsdR|15902494|NP_358044.1|456379..458712|-|2334 bp|Eco A type I restriction-modification enzyme R subunit|S.pneum oniae|R6|NC_003098.1|ORF|221
atggttgagtttataaagtctaagaaagaaatgagtgaggaggatattaaagcaaatttcatcactcctgctattgtatccaaaggatggaaaaatggtgagcatatcgcttacgaagaatacttcactgatggtcgaattgargttagaggagataaggctcgtcgtaaagaaggaaaaaaatcagactattcactgtattaccaatttggaactcgaattgcaattgttgaggcaaaggataataaacacagcgttcgagcaggattacaacaagctattgaatatggagagattttagatgttccatttgtttattcttcgaatggtgatggctttattgaacacgaccgtatcacgagagaagaacgtgagctggagttagacgaattccctactcgtgaagaattattttctcgtatgacgaaggaaaaaggattgacgtacgaaattacagaagctatctcaactccatactatacagacgccttctcaatgaaaacgccacgctattatcagcaaatagctatcaaccgtactattgaaacagttgccagaggacaaaaacgagtaatgtttgtgatggcaacaggaacggggaaaacgttcatggcttttcaaattattcatcgccttcgaaaagctggtttggctaaacgagttttattcttagcrgatagaaacatcttagtagaccaaacgatggctgaagactttargccattcgaaaaggtaatgacgaaaattacaccaaaacttttgactgctcctgaaaaattaaattcttttgaaatttatctagggctttatcagcaactaactggtgaagatggaactgaaacacattatcaaaaatttgayaaagacttctttgatttaatcgtaattgatgaagcgcaccgtggttcagctaaggaaracagtaactggcgtaagrtrattgattatttcagttctgcgacacagattgggatgaccgctactcytaaagaaaccaagaatgcttccaatacggaatactttggtgagccaatctatacttatagtttaaaacagggaatcgaggatggttttttggctccatatcgtgttatgagrgttaatttagatgtrgatgtggatggttatcgtccagaaactggaaaagttgatrctaacggacaattaatagaagataggtactacggcaggaaagattttgataaaaccattgtcattgatgatagaacgcaaagagttgccaagtttgtttctgattatatgaagcaaaacaatgcacgatttgataaaacaattgttttttgtgttgatattgaccatgccgagcgaatgcgtgctgcacttgtaaaagagaatctagacttagtccaagaagactatcgttatgtcatgcaagtaactggtgacaacgctgaaggaaaagctcaactggataactttatggatgtcaattctaattttcccgctatkgtaacaacgtctaaattattaacgacaggagttaatgctaaaacatgtcgtttgattgttttagactctaatatccaatccatgactgaatttaaacaaattattggtcgtggcacacgtctttatcctcaaaaggggaaagaattttttacgattattgattttcgaaatgttaccaatttgtttgctgaccctgattttgatggtgakccagtgaaggtgctrgaaacaggtgcgaaaacagtcagtggttcyacgccyggtttcgtarrtgaggaaggtgacccagtagaaaaatatatcgttacagacaagcaggttaccattcttaattctactgttcaagtattggatgaaaacgggaaactgattaccgaaagcctgaccgactacactcgraagaatatcttaggtagctacgccactttgaacgattttatcacagtttggcatacggcrgataaraagaagcttatcttagacgaactttataaaaaaggagtttatctagatgctattcgagagtcggagggaatatcagaacaagaaatcgatgattttgatttactcctaaaacttgcctatggtcaaaaagaattaaccaaaacggaacgtatcaataarctcaaacaaagcggatatttatataaatatagtgaggaagcgcgtgctgttttggaaattttactgaacaaatacatggataaaggtattggagaactcgaaagcattgaaacattaaaacttccagaatttcagatatatggtggaascttcaaaatcatcaatacttattttggagataaaaaacgatatttacaagcaattaaagaattggagcaagagctatttacagtagcttaactaat

SEQ ID NO: 2713 - DNA, 297 bp, Streptococcus pneumoniae
  misc_feature (1)..(297): tiling:Spneumo1:WAN024GBR; Cluster includes WAN023LQ6 3146 82_1381a||||731760..732056|-|297 bp|EGAD orf prediction|S. pneumoniae|R6|NC_003098.1|ORF|110
atggttgataccagcaccgttaaagatatcgttgattttacccacagcataagtatcgataccagcctcattcaatttatccaaaacagttgggraaaatggagatacagccaagtcacgacggtttgccgtacgagtgaagttacctggttcacctacataagggcgagcaatgatgcgaccaagaagggcaggacgctcaagggtaatcgaacgagcgtattcacagatacggtacaattcatccaaaggaataatgtcttcgtgggcagcaatctgcaaaacagggtcagctga

SEQ ID NO: 2714 - DNA, 141 bp, Streptococcus pneumoniae
  misc_feature (1)..(141): tiling:Spneumo1:WAN024CGE; Cluster includes WAN023RQ2 cont ig_1586_4||||3345..3476|-|132 bp|Glimmer 2.02 orf predicti on|S.pneumoniae|670|WAN01UDG3|ORF|000
atggttgcccagtcggattttgagcccatgatgatggaaattactggtttcatttcttctcctttttcctctttttcaacaatcaccttagcttgtgagggacggcagcagccaccaaaggtgtctcatgccctaactaat

SEQ ID NO: 2715 - DNA, 105 bp, Streptococcus pneumoniae
  misc_feature (1)..(105): tiling:Spneumo1:WAN024CNX; Cluster includes WAN0246SP 5613 45-57-1||||||105 bp|DNA Streptococcus pneumoniae phage Dp- 1 open reading frame 253|S.pneumoniae||WAN0246SP|ORF|000
atggttgcgtctataatagaaccgatgttgctagacaaagcatttgcaatcttcgagtctaatttattcgagagcttgtcgaatataaagacacttgctttttga

SEQ ID NO: 2716 - DNA, 333 bp, Streptococcus pneumoniae
  misc_feature (1)..(333): tiling:Spneumo1:WAN024G2D; Cluster includes WAN023LDO 3133 44_2046||||1105739..1106071|+|333 bp|EGAD orf prediction|S .pneumoniae|R6|NC_003098.1|ORF|110
atggttggcctcgataagataaccatccgcattttcgacaatgcccgccatacggtcactgacataacctgtatctgtcaagaggacaaaactcttatcatccttcataaagcgatagaactgcggtgcgactgcatcatggcttacaccaaaactctcgatgtcgatatctccaaaggttttggttttacccatttcaaaaatatgcttttgcgaagaatccaccttgccaagatatttactattttccatagcttgccaggtcttttcattggcataaagatccataccatacttgcgagccaaaacgcctactccatggatatgatctga

SEQ ID NO: 2717 - DNA, 2330 bp, Streptococcus pneumoniae
  misc_feature (1)..(2330): tiling:Spneumo1:WAN024GM5; Cluster includes WAN0244HV spr0 415|pfl|15902459|NP_358009.1|412113..414437|+|2325 bp|Pyru vate formate-lyase|S.pneumoniae|R6|NC_003098.1|ORF|111
atggttgttaagacagttgttgaagcacaagatatttttgacaaagcttgggaaggcttcaaaggcgtagattggaaagaaaaagcaagtgtatcacgmtttgtacaagctaactacacaccttatgatggagacgaaagcttccttgcaggaccaacagagcgttcacttcacatcaagaaaattgtagaagaaactaaagcacactacgaagaaactcgtttcccaatggacactcgtccaacatctatcgctgatatccctgctggatttatcgacaaagaaaatgaagttatcttyggtatccaaaaygatgaactcttcaaattgaacttcatgccaaaaggtggtatccgtatggctgaaactactttraaagaaaatggatacgaaccagacccagctgttcacgaaatcttcactaaatatgtaacaacagttaacgacggtattttccgtgcctacacttcaaatattcgtcgcgctcgtcaygcacacactgtaactggtcttccagatgcatactcacgcggacgtatcatyggtgtttacgcacgtcttgctctttacggtgcagactacttgatgcaagaaaaagtaaaygactggaatgcaatcaaagaaatcgatgaagaaacaatccgtcttcgtgaagaagtaaaccttcaataccaagcattgcaacaagttgttcgcctgggtgacctttacggggttgatgttcgcaaaccagcgatgaacgtgaaagaagcaatccaatgggttaacattgctttcatggctgtctgccgtgtgattaacggtgctgctacatctctaggtcgtgtaccaatcgtattggacatctttgcagaacgtgaccttgctcgtggtacatttactgaatcagaaatccaagaattcgttgatgatttcgttatgaaacttcgtacagttaaatttgctcgtacmaaagcttatgaccaattgtactcaggtgacccaacmttyatyacaacttctatggctggtatgggtaacgacggtcgtcaccgtgttactaagatggactaccgtttcttgaacactcttgacaacatcggtaactcwccagarccaaacttgacagttctttggactgacaaattgccatacaacttccgtcgctactgtatgcacatgagccacaaacactcttctatccaatacgaaggtgtaacaacaatggctaaagacggatatggtgaaatgagctgtatctcatgctgtgtgtctccacttgatccagaaaatgaagaacaacgccacaacatccagtacttcggtgctcgtgtaaacgttcttaaagcccttcttactggtttgaatggtggttacgacgatgttcacaaagactacaaagtatttgatatcgaaccaatccgtgacgaagttcttgaattygaatcagttaaagcgaactttgaaaaatctcttgactggttgactgacacttacgtagatgccttgaacatcatccactacatgactgataggtacaactacgaagctgttcaaatggccttcttgccaactaaacaacgtgccaacatgggattcggtatctgtggatttgctaacactgttgatacattgtcagctatcaaatacgctacagttaaaccaatccgtgaygaagatggctacatctacgattacgaaacaatcggtgactacccacgctggggtgaagatgacccacgttcaaacgaattggcagaatggttgatcgaagcttacacaactcgtctacgtagccacaaactatacaaagacgcagaagctacagtatcacttttgacaatcacatctaacgttgcttactctaaacaaactggtaactcaccagttcacaaaggtgtatacctcaacgaagatggttctgtgaacttgtctaaacttgaattcttctcaccaggtgctaacccatctaacaaagctaaaggtggttggttgcaaaacttgaactcactttctagccttgactttagttatgcagctgacggtatctcattgactacacaagtatcacctcgcgctcttggtaagactcgtgatgaacaagttgataacttggtaacaatycttgatggttacttygaaaacggtggacaacacgttaacttgaacgttatggacttgaacgatgtttacraaaaratcatgtcaggygaagacgttatcgtacgtatctctggatactgtgtaaayactaartacctcactccagarcaaaaaactgaattgacacaacgtgtcttccacgaagttctttcaatggatgaygccttggatgcattgagctaactaat

SEQ ID NO: 2718 - DNA, 417 bp, Streptococcus pneumoniae
  misc_feature (1)..(417): tiling:Spneumo1:WAN024GNI; Cluster includes WAN023M2Z 3145 51_723a||||378486..378902|-|417 bp|EGAD orf prediction|S.p neumoniae|R6|NC_003098.1|ORF|110
atggttgttaatttaccgatatgccccccagcttccattccttctgcaataacagcgtctgcaccgattttttccatgcgtttagctaaagcgacactaggaacracaggaataacgattatcccagcttcatggaaacgttccatatacttgcttggatttcctgctcctgttgtgacaactttaacaccttcttcaataacgagatccacgatrtcttccacaaagggagataagagcatgatgttgaccccaaagggtttatcagtcaatgatttgattttatcaatattggccttgacaacttctttcggggcatttcccccaccgataattcctaatcctccagccttggaaacagcccctgccaaatcaccatcagcaacccaggccatccctccttggaaaataggatar

SEQ ID NO: 2719 - DNA, 816 bp, Streptococcus pneumoniae
  misc_feature (1)..(816): tiling:Spneumo1:WAN024DBQ; Cluster includes WAN024435 spr0 945||15902989|NP_358539.1|929141..929956|+|816 bp|Hypothet ical protein|S.pneumoniae|R6|NC_003098.1|ORF|111
atggttgtttatattagacaaagtaaattaccaagtgaggtttcaattaataaatacmatgctcaagtaggtgcctacttacaaggagaagaagytrttttatatcaatctttttctgaaataaaagagttaacaagtgaagatatagttgtagattatataatggagactagagcattactaaaaatgatgggcttaaacgttccggttyatgactatcctattgagcttaaagagttttatggtcgaaagatttatgctggtattttaggagagattgtgaatatacytgataattggggaaaatttattaagcctaaagctggttcaaaagtctttactggaagagttgttaatgraacccatgatttaataggtattggtctacctttcgactatcctatatggattagtgaggttgtagaattcatagctgaatggcgttgttttgtgttagatggtcgcgtattagatgttcgaccctatacaggtgattatcatgcacaatttgatgcaagtgtaattgatgaagcgatatcatgttggaaagatgcgccaatagcttatggactagatatcggtgttactcgcgatggcagaacacttgttgttgaagtaaatgatggttatgcattgggaaattatggcctatctcctttaaaatcaatcaattttcatagagctaggtggaaagaaatggtaaaaccctattttgaaaaaatgaaatttttaaaatccaacaggatgttattttcywaamtaawtatggtagataaccaatataaaaagcatcaaaatgaacaaggaggaatctga

SEQ ID NO: 2720 - DNA, 255 bp, Streptococcus pneumoniae
  misc_feature (1)..(255): tiling:Spneumo1:WAN024GD4; Cluster includes WAN023LS6 3140 50_1267||||673100..673354|-|255 bp|EGAD orf prediction|S.p neumoniae|R6|NC_003098.1|ORF|110
atggtttaccttcaagacttactgtgtccaaaccaatgtgaaccaatacttcaagacctgcttccgtcacaataccaaaagcatgttttgttgggaagatgcttgayacagtacctgaaactggagatacaatgtttccatttgcaggttctactgcaaatccatcacccatcattttttgagcaaatactggatcctttacttgttccaaagcaacaacttgaccgtctgctactgagtaaacttcctcagtaa

SEQ ID NO: 2721 - DNA, 788 bp, Streptococcus pneumoniae
  misc_feature (1)..(788): tiling:Spneumo1:WAN024FIB; Cluster includes WAN0243PB spr1 444|cobQ|15903487|NP_359037.1|1429735..1430517|+|783 bp|Co byric acid synthase|S.pneumoniae|R6|NC_003098.1|ORF|221
atggtttatacttcactttcctcaaaagatrgcaattacccctatcagctcaacattgcccacctctacggaaatctcatgaatacctacggggacaatggaaacatcctcatgctcaartatgtggctgaaaaactgggagcccatgtgaccgttgacatcgtttctctccatgatgactttgatgaaaatcactacgacatcgcctttttcggtggtggtcaagactttgaacaaagtatcattgcagacgacctacctgctaaaaaagagagcattgacaactacatccaaaacgacggtgtagttctggctatctgcggtggtttccaactattgggtcaatattatgttgaagcttcaggaaaacgtatcgaagggctaggggtcatgggacactacacgctcaaccagaccaataaccgttttatcggtgacatcaagattcacaatgaagatttcgatgaaacctactatggatttgaaaatcaccaaggycgtaccttcctctctgatgaccaaaaaccgctgggacaggttgtctatggaaatggaaacaacgaagaaaaggtcggtgaaggggttcattataagaatgtctttggttcctacttccacgggcctatcctctctcgtaatgccaatctggcttatcgcctagttactactgccctcaagaagaaatatggtcaggayatccaactccctgcctatgaggayatyctcagccaagaaatcgctgaagagtacagtgacgtcaaaagcaaggctgacttttcttaactaat

SEQ ID NO: 2722 - DNA, 330 bp, Streptococcus pneumoniae
  misc_feature (1)..(330): tiling:Spneumo1:WAN024DBI; Cluster includes WAN02442U spr0 956||15903000|NP_358550.1|938505..938834|+|330 bp|Hypothet ical protein|S.pneumoniae|R6|NC_003098.1|ORF|101
atggtttatcgctatcgtaccaatctcaaaaaagtatttctaactgatccagaattacaccaattgaatgaacggattgctaagagcaattgtcaaaatttttcagtctatgccagaaaagttttgcttaatcccaatatgtcatttgtcacgattaacactgatacttatgaccagttagtttttgaattgagacgtattggaaataacatcaatcaaattgcgcgtgcgattaatcaaagccatctgatttctcaggaccaattacaagaattgagtaaaggagtcggagagttaattaaggaagtggacaaagaatttcaagtgtag

SEQ ID NO: 2723 - DNA, 1086 bp, Streptococcus pneumoniae
  misc_feature (1)..(1086): tiling:Spneumo1:WAN024CH2; Cluster includes WAN0244S2 spr0 048|purM|15902092|NP_357642.1|51793..52815|+|1023 bp|Phosp horibosylaminoimidazole synthetase|S.pneumoniae|R6|NC_0030 98.1|ORF|221
  misc_feature (11)..(11): n is a, c, g, or t
  misc_feature (30)..(30): n is a, c, g, or t
  misc_feature (46)..(46): n is a, c, g, or t
atggtttatcnaaaaatacgtcgcagtctntctcaaaaaaagaaanggaaaaataaaatgrcaaataaaaatgcrtaygcycartckggtgtggatgttgaagcgggttatgaagttgttgaacggattaaaaagcacgtggcccgtacggagcgtgcaggtgtcatgggagctcttggtggctttggtggtatgtttgacctttccaagactggggttaaagaacccgtcttgatttcagggactgacggtgtcggaaccaagctcatgttggctatcaagtacgacaagcacgataccatcgggcaggactgtgtggccatgtgtgtcaacgacatcattgctgcaggtgcggaacccctctattttctcgactacgtagcgacagsgaagaatgaaccagctaagctagaacaagtggttgctggtgtggcagaaggttgtgtgcaggctggtgctgccctcatcggtggggaaacggctgaaatgccgggcatgtacggcgaagacgactatgacttggctggttttgcggtcggtgtggctgaaaaatctcaaatcattgacggttcaaaggtggtagagggagatgttcttctcggacttgyttcaagtgggattcactcaaatggttactctttggttcgtcgtgtctttgcggattacacaggtgaggaagtcctaccagaattggaaggcaagaaacttaaggaagttctacttgagccgactcgtatctatgtcaaggctgtcttgccgctcatcaaagaagagttggtcaacggcattgcccacatcacaggtggtggctttatcgaaaatgtccctcgtatgtttgcagatgacctagctgctgaaattgatgaaagyaaagttccagtgcttccaattttcaaarcccttgaaaaatayggtcagattaaacacgaagaaatgtttgaaatcttcaatatgggtgtgggactyatgttggcggtcagccctgaaaatgtagagcgtgtaaaagaattgttggatgaagcagtctatgaaattggtcgcatcgtcaagaaagaaaacgaaagtgtcattatcaaaykaactaat

SEQ ID NO: 2724 - DNA, 1757 bp, Streptococcus pneumoniae
  misc_feature (1)..(1757): tiling:Spneumo1:WAN024DWC; Cluster includes WAN0243B7 spr1 954||15903995|NP_359545.1|1939038..1940789|-|1752 bp|Hypot hetical protein|S.pneumoniae|R6|NC_003098.1|ORF|111
atggtttattatccacaacctgtggataatcttgtgaacaagagaagttgcaaaagaaggagatatataacgatgaagaaaatcaaaccgcatggaccgttaccaagtcagactcagctagcttatctgggagatgaactagcagcytttatccayttyggwcctaatacyttttatraycargaatggggracwggwcaggaggatcctgagcgctttaacccgagtcagttggatgcgcgtgagtgggttcgtgtgctcaaggaaacgggcttcaaaaagttgattttggtggtcaagcaccacgatggctttgtcctttatccgacagctcacacagattattcggttaaggtcagtccttggaggagaggaaagggcgacttgctccttgaagtatcccaagctgccacagagtttgatatggatatgggggtctacctgtcaycgtgggatgcccatagtcccctctatcatgtggaccgagaagcggactacaatgcctattatctggytcagttgaaggaaatcttatcaaatcctaactatgggaatgctggtaagttcgctgaggtttggatggatggtgcyagaggrgarggsgcscarmaggtyaattatgaatttgaaaaatggtttgaaaccattcgtgacytgcagggcgattgyttgattttttcaacagaaggcaccagtatccgctggattggcaatgaacgagggtatgcaggtgatccactgtggcaaaaggtgaatcytgataaactaggaacagaagcagagctgractatcttcagcacggggatccctcgggcacgattttttcaatcggagaggcagatgtttccatccgtccaggctggttctaccatgaggatcaggatcctaagtctctcgaggagttggtcgaaatctactttcactcagtagggcgaggaactccactcttgcttaatattccgccgaatcaagctgggctctttgatgcaaaggatattgaacgacyttatgaatttgcgacctatcgcaatgagctctataaagaagatttggctctgggagctgaggtatctggtccagctctttccgcagactttgmttgtcgccatttgacagacggccttgagaccagctcttgggcaarcgatgcagmcttgcccatccagttagaactcgayttaggttytcctaaaacttttgatgtaattgagttaagagaagatttgaagctagggcaacgaatcgctgcttttcatgtgcaagtagaggtggatggtgtctggcaggartttggyhvgggkcwtacwgttggtyayaarcgyctcttrcgaggwscrstwgtwgargcacaraagrtrcgygtrrtsattacmgarkcacarkytwtbcctktrttgaccaagatttcmctytataaaactcckrrrttatcamaaamagwagytgttcaggrrctagcatttgcagaaaaaagcctagctgtggcaaagggagaramtgcytattttasrrttrarcgyagwgaawgtagtsstcctttagargctaagatttcgattcaaccggggacaggtgtccatggtgtcgcctatcaggaygagattyawgyccttsmrttycaarcwggkgarasygaaaaaagkytgmmkctaccaaccytgtatttcgcaggagataaaaccttggatttctatctgaacctaacggtggatggtcagcttgtggatcaacttcaagtccaagtttcataactaat

SEQ ID NO: 2725 - DNA, 294 bp, Streptococcus pneumoniae
  misc_feature (1)..(294): tiling:Spneumo1:WAN024CBF; Cluster includes WAN023MAN 3131 97_283||||143473..143766|-|294 bp|EGAD orf prediction|S.pn eumoniae|R6|NC_003098.1|ORF|110
atggtttctacaaacattttttgcacagaaaaatgttttcttatttttgatttactattctcacctatatatttcaaatactcagaatcattgagtaaaaaattagcacaagcacacactccctcaacatcttccttctcaaataaaaatccatcaaccctatgttcaataatttcacttaacccgccaacattactagctaaaaccgragttccttgtgacattgactctaaaacacacataggtattccttctgtatcagaaggaatatacaataaatccgatatttggtaa

SEQ ID NO: 2726 - DNA, 1037 bp, Streptococcus pneumoniae
  misc_feature (1)..(1037): tiling:Spneumo1:WAN024CAA; Cluster includes WAN0244OQ spr0 168||15902212|NP_357762.1|176158..177189|-|1032 bp|Conserv ed hypothetical protein|S.pneumoniae|R6|NC_003098.1|ORF|33 1
atggtttctactattggtattgttagtttatctagtggcattatcggagaggattttgtcaaacacgaagtggacttgggtatccaacgtctcaaggwtctgrgactcaatcccatctttttgccccattcgttaaaaggattagactttatcaaggaccatcctgaagctcgtgcagaggatttgattcatgccttttctgatgatagcatcgacatgatcctatgtgccatmrgtggagacgatacctatcgcttgctaccttatctttttgaaaatgaccaactccaaaaggytatcaarcmaaaaawttttcttggcttctcggatacaaccatgaaccacctcatgttgcataaattaggaatcaagactttttatggtcaatcctttttagcagacatttgtgaattagacaaagaaatgctagcctatagccttcactactttaaagaattgattgagacgggaagaatttcagaaatccgccctagtgacgtttggtatgaggaacgaactgattttagtcccacggccctgggaacacctcgtgtcagtcatacaaatacaggttttgacttgttgcaaggaagtgcycagttcgaggggaaaatcctcggtggttgcctcgaatccctctacgatatctttgacaactctcgatacgcagatagcacggarctstgccaaaaatacaaacttttccctgacttgtcagactgggaagggaaaatcctcttgctcgaaacaagcgaagaaragyctaagccagaagacttcaaaaagatgttgctaactttaaaggacactggcatattcgcggtcatcaatggactcttggtcggaaaacctatggatgaaactttccatgacgactataaagaggcactattggatatcattgacarcaatatcccgattgtctataatctgaatgtckgccacgcaactccaagagcaattgtaccctttggggtycatgctcatgtagatgcacaggaacaagtcattckctttgactataacaaataactaat

SEQ ID NO: 2727 - DNA, 456 bp, Streptococcus pneumoniae
  misc_feature (1)..(456): tiling:Spneumo1:WAN024B5W; Cluster includes WAN02418F |||A AP94621.1|||456 bp|IS1380-Spn1 putative transposase|S.pneu moniae||AY336008|ORF|000
atggtttcttttttcacccaatgggtgttttttactagacaaaaaagagtttcccctttatggtataagtgtagaaaaaaacacaaaaagaaaggaaactcacatgaacagtttaccaaatcatcacttccaaaacaagtctttttaccaactatctttcgatggaggtcatttaacccagtatggtggtcttatcttttttcaggaacttttttcccagttgaaactaaaagaggtgacttccaaactttaacaatcaaacgcttccgccatctttttcttcacgtggtaggaaaatgtgttcgaacaggacgcaagcagctcctcaaattgtctagtctctatgcctattccgaattgttttcagcactttattctaggattagaaaagtcaacctgaatcttcctgttccttatgaaccacctrgaagaaaagcrtcgttaatgatgcattaa

SEQ ID NO: 2728 - DNA, 1247 bp, Streptococcus pneumoniae
  misc_feature (1)..(1247): tiling:Spneumo1:WAN024CPR; Cluster includes WAN0244MC spr0 254|pepS|15902298|NP_357848.1|256296..257537|+|1242 bp|Ami nopeptidase|S.pneumoniae|R6|NC_003098.1|ORF|111
atggttttaccaaattttaaagaaaatctagraaaatatgcgaaattrttggttgcgaacggaatyaacgtgcaacctggtcacactttggctctctctatygatgtggagcaacgtgarttggcwcayytaatygtsaaagaagcttatgcyttgggtgcgcatgaggtyatygttcagtggacagatgatgtsattaaccgtgagaaattcctccatgcsccgatggagcgtttggacaatgtgccagaatacaagattgctgagatgaactatctyttggagaayaaggctagccgtcttggrgttcgttcwtctgayccaggtgccttgaacggagtggacgctgacaagctttcrgcttctgctaaagctatgggacttgcyatgaagccwatgcghatcgcaackcaatcyaacaargttagctggactgtrgcagcygcwgcwggacttgagtgggctaagaaagtcttyccaaatgctgcgagcgacgaagaagcagtygatytcctttgggaycaaatyttcaaaacttgycgwgtctacgaagcagatcctgttaaggcytgggargarcatgcagcyatyytsaagagcaaggccgatatgcttaataargagcaattttcagcccttcactayacagcgccaggracagatttracactkggtttgccraagraccacgtttgggaatcagctggtgctrtcaatgcacagggcgaagrattcttgccaaatatgccdacagargargtyttcacagcgcctgayttccgtcgtgcagatggytatgtmacttctacaaaaccgcttagctayaacggaaatatcatygaaggmattamrgtraycttyaargawggwcaaatcgtagatatcactgctgagaagggtgatcaggtyatgaaagaccttgtctttgaaaatrygggtgcgcgtgccttgggtgaatgtgcmttggtaccagatccaagyccaatttctcagtcaggcattaccttytttaacacccttttcgatgaaaatgcgtcaaaycacttggctatcggtgcagcytatgcgactagcstwgttgrtggagcggagatgagcgaagaggagcttgaagctgcrgggcttaaccgttcagatgttcacgtrgactttatgattggktctarycaaatggatatcgatggtatycgtgaggatggracrcgdgtaccwctyttccgtaayggrrattgggcaaattaactaat

SEQ ID NO: 2729 - DNA, 914 bp, Streptococcus pneumoniae
  misc_feature (1)..(914): tiling:Spneumo1:WAN024EX4; Cluster includes WAN0243L4 spr1 596|corA|15903638|NP_359188.1|1573474..1574370|-|897 bp|Co rA - magnesium and cobalt transporter|S.pneumoniae|R6|NC_0 03098.1|ORF|111
atggttttagaaaagcagttgggcmatggttgtacctggatagacctagacctaggaaagttgaataaactagaagacctttctgaaatttacggtttggacaaggaaaccattgaatacgcactggatagaaacgagcgcgcccacatggactaccaccgtgaaagtgrgacggttacctttatctataatgtcytagacgtaaaaaaggacaaggcctactatgagacttttcccatgacctttatygtcgagcatcgtcgcctgattaccattagtaataccaagaacgcctatgtcattgaacagatgactcgttatctggagaaccatgacacgctttcgatttataagtttctctttgccagtctggaaatcatcagcaatgcctactatcctgtcattgagcagatggacaagagtagggatgaggtcaatgacctcttgcgccagcgaactaccaagaaaaacctctttgycctgtctgatttggagactggtatggtttatctgacggcagctgccaaacaaaatcggattttgttagagcatattcaaggtcatgccttgtatcgtagttttgatgagattgagagagaacagtttgatgatgccatgattgaggctcatcagctggtatccatgacagacctaatctctcagattttacagcagctttcagcctcttacaacaatattctaaacaataatctgaatgacaatttgacaaccttgactatcatttcagtcttgctagctgttttggcagtcgtgacaggctttttcggaatgaatgttcccttacctttaacagatgagccccatgcttggctctatatcagtttggctagtgcaggtttgtggattgttttatccttgttactaaggaaaattgcgaaaaaaagttaactaat

SEQ ID NO: 2730 - DNA, 348 bp, Streptococcus pneumoniae
  misc_feature (1)..(348): tiling:Spneumo1:WAN024EY8; Cluster includes WAN023KXT 3138 43_2717||||1446756..1447103|+|348 bp|EGAD orf prediction|S .pneumoniae|R6|NC_003098.1|ORF|110
atggttttgaccttttccttggtcatgagattgagcttgtccaccatgtgtttggctcgtagctcggtcacaatcccagaaaaagcgttaaagcagataacagcaaagaagaccagattgctccaagcctgcacaaaggcaagrgccaaagcaatggcaaagttcaaagcgttaaaaagggtaaagacatttcgtttaacgatttgccaagtgctggtactggctgatgcggtaaagtcattgaccaaaccctcagcctgtctttccttgacttctctttgggttaatcccataatcttatttttatccataaattctattatatcattttttttaacagaattctaa

SEQ ID NO: 2731 - DNA, 1248 bp, Streptococcus pneumoniae
  misc_feature (1)..(1248): tiling:Spneumo1:WAN024FQN; Cluster includes WAN023PR1 pne1 7_12||||6777..8024|+|1248 bp|Type 10A capsule operon, Glim mer 2.02 orf prediction|S.pneumoniae||WAN01UCJH|ORF|000
atggttttgttattacttrcttttgcattctttttagttttccctgtgytgtcaataagtttaagtgttatagggctagtaaatgacaaaaagcgttcaaaaatctatttactwctaattagttttgcaatatcaattrttgcgctgcgytatattcctcatcctayggatgatggcgcttttcattttcgtgcgactackrcccttattcgctatgatagtattttcgaaatgtttaaagcrttttctaatggrtggakagtagggawctatgactatggytccataccaatttttacytcattaatgtatyttgttcgmaayacycatcactatagtttactgagttttatttcagctttyataacttactttagttttggttacgtagttgttgasytatttaaggayytgggcaagktttctaaactatcgtatgctacagtatthattgctgtactatgtttaaataattayagatatacaactagtggaatgagattttgtatggcagttgccttgatgatgcttttactatatttggagtcaaaaaaaggctatactagkttaaaaacaacyatwtggtatttgttrccwktaggtatccattcagcggttatttattttattggtttaaggttcttatttccattaatyargaaagtgacrctygctaaaagtttatttgtattattaggttttcctgttttgttcaacctagttccatggttagcaaatytgattggttggacttacttacaatywtttattcgraaaattgaagtctaytctgacaattcatcctattcccagttttttaataccacattaacratgaggctatatgttggaatagtrctgatggttttatttgtattgttatatttgggaatagtaaattcattgaaaayaastgatgattggcgttttagttttgttacaatgachtattatgtaactctgttatctatgrgttcaataccatttcgtaatatttatgatagaaatcttttcttgctccttcctatgattgtagtttcaacctacatattrtttacatatagayrtcarttgaaaattcttactaatcgtaatattgtttatggaytracgatrggtattctttgtctatcctgtgcagttggtgyattttataataataatttcccttttrsttttattgattttagtaaracrgayttactcmtaaaaaatatttttcaattcttttcaaatttaccttttacr

SEQ ID NO: 2732 - DNA, 1238 bp, Streptococcus pneumoniae
  misc_feature (1)..(1238): tiling:Spneumo1:WAN024DGV; Cluster includes WAN0244ED spr0 541|murN|15902585|NP_358135.1|541544..542776|+|1233 bp|Ala nine adding enzyme|S.pneumoniae|R6|NC_003098.1|ORF|111
atggyactaacwacactcacgaaagaagagtttcrkrcttattctgatcaggtttcttctcgttcctttatgcaatckgtccagatgggggayttgytagamaaaagaggggctcgaattgtttatcttgctttgaaacaagaaggagarattcaagttgcagctctggtttatagcytrcccatgctgggkggkctgcatatggarmtcaattcgggkccratttatacccaacaagatgctcttccagttttttatgcrgagttaaaagaatatgcyaagcaaaayggtgtattagagttgcttgtaaaaccytatgaaacktaycaaacttttgatagysaaggtaatycaatagatgctgagaaaaaaagtatyattcaagrtttractgatttaggttatcaatttgatggmttracrayrggktayccaggtggagaaccagattggttatactataaagatttractgaattaactgaaaagartttgcttawaagttttagcaaaaarggkaarccyttggtgaaraagkctgaaacstttggcattcggttgaaaaagttaaaacgtgaagaactatcgatttttaagaatwtaacaaaagaaacctctgaacgtagagaatatagtgataaaagtttagaatattatgagcayttttatgatwcwtttggagaacargcggagtttctyatagcaagcttraatttttcggastatatgagcaaattgcaaggtgaacaaagtaaactagaagaaawmttggacaagttgcgacttgatttgagtaaaaatcctcattctgagaaaaaacaaaatcaactgagagaatattctagtcaatttgaaacktttgaagttcgaaaagcagaagcgmgagacttgattgaaaaatatggagaagaagatattgttttagcygggagtttatttgtttatatgyctcaggaaacgacttatctctttagtggttcytacactgagtttaataagttctatgcccctgcmctgcttcaaaaatatgttatgttggaaagcataaaacgtggaatacctaaatacaacttcctaggcattcaagggatttttgatggaagtgatggtgttttgcgttttaaacagaattttaatggctatattgtacgcaaagcrggtactttccgktaccatccatckcctttaaaatacaaagctatccagttactcaaaaaaatagtaggacgttaactaat

SEQ ID NO: 2733 - DNA, 365 bp, Streptococcus pneumoniae
  misc_feature (1)..(365): tiling:Spneumo1:WAN024D9T; Cluster includes WAN0243XY spr1 133|leuD-truncation|15903176|NP_358726.1|1137026..1137385| -|360 bp|3-isopropylmalate dehydratase small subunit, trun cation|S.pneumoniae|R6|NC_003098.1|ORF|111
atggyagggtcttcgagggaayacgctgcttgggytctagcggactatggttttaaggtcgtgattgcaggatctttcggtgacattcattacaataatgaactcaataatgrcmtgttgccaatcgttcagcctagagaggttagagagaaactagcccagctaaaaccaaccgaccaggtaactgtggacttggaacaacaaaaaatcatctcaccagttgaagaattcaccttcgagatagatagcragtggaaacataaactcctaaatagtttggatgatatcggtattaccttgcagtatgaagagttgattgctgcttatgaaaaacaacgaccagcctactggcaggattarctaat

SEQ ID NO: 2734 - DNA, 111 bp, Streptococcus pneumoniae
  misc_feature (1)..(111): tiling:Spneumo1:WAN024FO2; Cluster includes WAN023PGG pne3 6_19||||15225..15335|+|111 bp|Type 18A capsule operon, Gli mmer 2.02 orf prediction|S.pneumoniae||WAN01UCHT|ORF|000
atggyagtaatttttaaagatgtacttgttgaagagaaractgatgaagaaaaacaacatattttatctattttaratgatgagaatgttagagcttttgattgtggatat

SEQ ID NO: 2735 - DNA, 1628 bp, Streptococcus pneumoniae
  misc_feature (1)..(1628): tiling:Spneumo1:WAN024F5E; Cluster includes WAN0243HM spr1 722|groEL|15903764|NP_359314.1|1702403..1704025|-|1623 bp| Chaperonin GroEL|S.pneumoniae|R6|NC_003098.1|ORF|111
atgkcaaaagaaattaaattttcatcagatgcccgttcagcyatggtycgtggtgtcgatatycttgcagayactgttaaagtaacyttgggaccaaaagrtcgcaatgtcgttcttgaaaartcattyggytcaccmttgattaccaatgacggtgtgacyattgccaaagaaatygaattrgaagaccattttgaaaatatgggtgcyaarttrgtatcagaartrgcttcwaaaaccaatgatatcgcaggtgayggractacractgcaacwgtyttgacccaagcwatcgtccgtgaaggaatcaaaaaygtcacagcaggtgcaaatccaatcggtattcgtcgtgggattgaaacagcagttgccgcagcagtygaagctttgaaaaacaacgycatccctgttgccaataaagaagctatckctcaagttgcagcmgtatcttctcgttctgaaaaagttggtgagtacatctctgaagcaatggaaaaagttggcaaagacggtgtcatcaccatcgaagagtcacgtggtatggaaacagagcttgaagtcgtagaaggaatgcagtttgaccgtggttacctttcacagtacatggtgacwgatagcgaaaaaatggtggctgaccttgaaaatccgtacattttgattacagacaagaaaatttccaayatccaagaratcttgccacttttggaaagcattctccaaagcaatcgtccactcttgattattgcggatgatgtggatggygaggctcttccaactcttgttttgaacaagattcgtggaaccttcaacgtagtagcagtcaaggcacctggttttggtgaccgtcgcaaagccatgcttgaagatatcgccatcttaacaggcggaacagttatcacagaagaccttggtcttgagttgaaagatgcgacaattgaagctcttggtcaagcagcgagagtgaccgtggacaaagatagcacggttattgtagaaggtgcaggaaatcctgaagcgatttctcaccgtgttgcggttatcaagtctcaaatcgaaactacaacttctgaatttgaccgtgaaaaattgcaagaacgcttggccaaattgtcaggtggtgtagcggttattaaggtyggagccgcaactgaaactgagttgaaagaaatgaaactccgcattgaagatgccctcaacgctactcgtgcagctgttgaagaaggtattgttgcaggyggtggaacagctcttgcmaatgtgattccagctgwwgctaccttggaattgacaggagatgaagcaacaggacgtaatattgttctccgtgctttggaagaaccygttcgtcaaattgctcacaatgcaggatttgaaggatctatcgttatcgatcgtttgaaaaatgctgagcttggtataggattyaacgcagcaactggcgagtgggttaacatgattratcaaggtatcattgatccagttaaagtgagtcgttcagccctacaaratgcagcatctgtagccagcttgattttgacaacagaagcagtcgtagccaataaaccagaaccagtagccccagctccagcaatggatccaagyatgatgggyggratgrkskaactaat

SEQ ID NO: 2736 - DNA, 434 bp, Streptococcus pneumoniae
  misc_feature (1)..(434): tiling:Spneumo1:WAN024E28; Cluster includes WAN0243DS spr1 861|cglD|15903902|NP_359452.1|1832869..1833351|-|483 bp|Co mpetence protein|S.pneumoniae|R6|NC_003098.1|ORF|222
atgkrggrgcaaatcgtaaagtcaatgattaaggcctttaccatgctggaaagtctcttggytttgrgwcttgtgagtatccttgccttgggcttrtccrgctctgtycagtccacttttkcrgcrgtagaggarcagattttctttatggagtttgaagaactctatcgggaaacccaaaaacgcagtgtagcyagtcarcaaaagactartytraayttrgatgggcagaygmttagcaatggcagtcaaaagttgmcagtycctaaaggaattcaggcmccatcaggccaaagtattacatttgaccgwgctgggggcaattcgtccctggctaaggttgaatttcagaccagtaaaggagcgattcgctatcaattatatctaggaaatggaaaaawtaaacgcattaaggaaacaaaaaattarctaat

SEQ ID NO: 2737 - DNA, 1379 bp, Streptococcus pneumoniae
  misc_feature (1)..(1379): tiling:Spneumo1:WAN024CB9; Cluster includes WAN0244PA spr0 148|dapE|15902192|NP_357742.1|156408..157781|+|1374 bp|Suc cinyl-diaminopimelic descuccinlyase (ArgE/DapE/Acy1 family protein)|S.pneumoniae|R6|NC_003098.1|ORF|111
atgktttttcctagcgaacaagaacagattgaaaaatttgaaaaggatcatgtagcccagcattattttgaggttttgcgtaccttgatttctaagaaatcagtctttgcccagcaggttggactcaaggaagtcgcaaaytatctgggtgagattttcaagcgtgttggagctgaagtggagattgatgagagctatacagcgccctttgtcatggcacatttcaagagttcgcgtccagatgccaagaccttgattttctataaccactatgacactgtgccagcggatggggatcaggtctggacagaggatccktttacgctttcggtccgcaatggcttcatgtatgggcgtggrgttgatgacgacaagggtcatatcacagctcgcttgagtgctttgagaaaatatatgcagcaccatgatgatttacctgtcaatatcagctttatcatggagggagcggaggaatcggcttcaacagacctagataagtatttggaaaagcatgcagacaaactccgtggggcggatttgttggtctgggaacaagggaccaaaaatgccttggaacagctggaaatttctggtggcaataaggggattgtgacctttgatgccaaggtaaaaagcgctgatgtggatatccactcgagttatggtggtgttgtggaatcagctccttggtatctcctccaagccttacagtctcttcgtgctgcggatggccgtatcttggttgaaggcttgtacgaagaagtacaagagcccaatgaacgagaaatggccttgctagaaacttatggtcaacgaaacccagaggaagttagtcggatttatggattggagttgcctctcttacaggaggagcggatggcctttctaaaacgtttctttttcgakccagcgcttaatatcgaaggaatccagtctggttatcaaggtcagggtgttaagactattttrcctgcagaagccagtgccaagctagaggttcgtctggttccgggcctagaaccgcatgatgttctggaaaaaattcggaaacagctagacaaaaatggctttgataaggtagaattatactataccttgggagagatgagctatcgaagcgatatgagcgcaccagccattctcaatgtgatcgagttggccaagaaattytatccacagggcgtttcagtyttgccgacgacagcggggacaggacctatgcatacggtytttgatgccctagaggtaccaatggttgcattcggtytaggaaatgccaatagccgagaccacggtggagatgaaaaygtgcgaatcgctgattattacacccatatcgaattagtagaggagctgattagaagctatgagtarctaat

SEQ ID NO: 2738 - DNA, 414 bp, Streptococcus pneumoniae
  misc_feature (1)..(414): tiling:Spneumo1:WAN024C5F; Cluster includes WAN023Q7X cont ig_1255_3||||523..936|+|414 bp|Glimmer 2.02 orf prediction |S.pneumoniae|670|WAN01UEGK|ORF|000
atgmaaattgaatttttcaattttctaagaagtgtcrtacagactgaagatggtttggtcttgtacgctctagcactgattgtctcaatggaaatcattgattttgtsacagggacgattgcggcrattatcaatcctgacatcgagtacaaragcaaaatcggcattaacgggctccttcgtaagatttcaggggttctcttactgatgatcctcattccggcgtccgttttgttgcctgaaaagacaggttttgyattcttgyactcaatctrtctcgggtacatcgcatttacttttcaatctctcattgaaaattaccgcaaattaaaaggaaatgttactctttttcagccgattgtaaaagtatttcagcgattacttgaaaaagatgatgatacgaaaaaaggagaa

SEQ ID NO: 2739 - DNA, 693 bp, Streptococcus pneumoniae
  misc_feature (1)..(693): tiling:Spneumo1:WAN024B4M; Cluster includes WAN024144 |cap 1C||CAB05936.1|||693 bp||S.pneumoniae||Z83335|ORF|000
atgmargawcamaacrctttggaaatcgatrkattkcarctatycagrdytttatggaaaagraagttrgtyattttattagtggcaattataacttcttyrgttgcttttryctacagtacttttgttatcaaacctgagtttactagtayracycggatttatgtagttaaccgtdrtmaggragagaaryctggtttaaccaatcargacttgcaggcaggwdcdthyytggthraagactaycgtgarattrtcctwtcgcagkatgttttggaggarrtkrtttctgrtttgrarytasatttgaygccaaaagrtttggctartaaaatyraagtrayagtaccarytgatacccgtattgtmtctrtytcagttartgatcgagttyctgargargcragccgtatcgctaactctttragaraagtagctgstmaaaaaattatyagtattactcgtgtttcygatgtgrcaacactrgaggargcaagrccgrcgayatcvccrtcttyrccaaatmttaaacgcartayactaattgkttttttggcaggrgkgvktggaactrgtgttatagttyttmttcttgaayttttrracactcrtgtgaaacgtccrraagatatcgaaratrcaytrcakatgacacttttggkarttrtaccaaacttrrrtaagttgaaatag

SEQ ID NO: 2740 - DNA, 75 bp, Streptococcus pneumoniae
  misc_feature (1)..(75): tiling:Spneumo1:WAN024CVR; Cluster includes WAN023Y13 AL44 9936.1_17||||19646..19720|+|75 bp|Glimmer 2.02 orf predict ion|S.pneumoniae||AL449936.1|ORF|000
atgmtaaatttcccctatactattgtggatgaaarttttaagagtattgtcattggtaaattgatagtattttat

SEQ ID NO: 2741 - DNA, 431 bp, Streptococcus pneumoniae
  misc_feature (1)..(431): tiling:Spneumo1:WAN024DZO; Cluster includes WAN0243DF spr1 874|marR|15903915|NP_359465.1|1843781..1844119|-|339 bp|Tr anscriptional regulator - MarR family|S.pneumoniae|R6|NC_0 03098.1|ORF|311
atgmtagagattcaagatttactgtatcaactccgcttgtctgagcaagcgagtacgcaattgtttgaaaaaaggcttgggattagtttgacacggtatcagattttactgtttttgctggagcattctccttgtaaccaaatggcggttcaggagcgtttgaaaattgatcaggctgctttgacacggcatttcaarattttggaaacggaaggtttggtggagcgtcatcgtaatcctgaaaatcagcgggaagtgttggtagaggctgcgaagtatgccaaggagcagttagtggtgaatccccctctgcaacatatcarggttaaggaagagatrgaaagtatcttaacagagtttgagagaacagaactcagccgtttattaaataaattggttttgggtattgaaaatatagaaatttaactaat

SEQ ID NO: 2742 - DNA, 84 bp, Streptococcus pneumoniae
  misc_feature (1)..(84): tiling:Spneumo1:WAN024DN8; Cluster includes WAN023SHO NC_0 03098.1_2435||||1893741..1893824|-|84 bp|Glimmer 2.02 orf prediction|S.pneumoniae|R6|NC_003098.1|ORF|110
atgmttgactgkstacttttarkattkattttggaggaagattttgtctctattatttattattttaaatttatttattttgta

SEQ ID NO: 2743 - DNA, 780 bp, Streptococcus pneumoniae
  misc_feature (1)..(780): tiling:Spneumo1:WAN024B5A; Cluster includes WAN023OZG pne6 4_21||||17161..17940|-|780 bp|Type 10F1 capsule operon, Gl immer 2.02 orf prediction|S.pneumoniae||WAN01UCFF|ORF|001
atgraacaattacattttatcacaaaaytactmgayatyaaagacacaaatatccaaattatagatgtcgtcaatagggattcacacaaagaaatcatcgccaaactggactacgacgcmccatcttgccctgagtgcggaarycaawtgaagaaatatgactttcaaaaaccktctaarattccttaycttgaracractggtatgcctactagaattctccttagaaarcgycgwttcaagtgctatcactgttcaaaaatgatggtcgctgaaacttctatcgtcaagaagaatcaccaaatccctcgtatcatcaaccaaaarattgcgcaaaagttrattgaraagawttctatgacyratattgcycatcagctkkccatytcaacttcaactgttattcgtaagctcaatgaytttcactttaaacatgatttttcttgtcttcctgagattatgtcttgggatgagtatgcttttacaaagggaaagatgagcttcattgcgcaagattttaacaatctcaatatcatcactgttcttgagggwagaacacaagctrtcattcgaaatcactttcttmamtaygatagagcygtccgatgtcrmgtsaaaatyattactatggatatgtttagyccttactatgacttggctaaacagcttcgctttcaaatttctaggctcaggctgaaacagtctcccagactgtttcactcccgaatgctaaaatcgttcttgatcgctttcacattgtacaacatcttagccgtgcta

SEQ ID NO: 2744 - DNA, 303 bp, Streptococcus pneumoniae
  misc_feature (1)..(303): tiling:Spneumo1:WAN024C7O; Cluster includes WAN023M7Z 3143 89_446a||||228757..229059|-|303 bp|EGAD orf prediction|S.p neumoniae|R6|NC_003098.1|ORF|110
atgraagaaggaaccatcacgtttttcaaccttgtcggttgccacaagagcaccacggtggtcacggtagcttgttcccaaaatcatcccttggttaaagagtttttggaatggttccttagtcggaacaacaccgaggtcatagaggaatttatgccagaaacgagcataaagcaagtgaagtacagcatgttccgcaccacccacgtagatatctactggcaaccattgtttgaggaggtcctcatcagccaatttctcagtattgtgcgggtcaatatagcggaggtagtaccagcttga

SEQ ID NO: 2745 - DNA, 1265 bp, Streptococcus pneumoniae
  misc_feature (1)..(1265): tiling:Spneumo1:WAN024FAQ; Cluster includes WAN0243HW spr1 712|msmE|15903754|NP_359304.1|1684518..1685777|-|1260 bp|A BC transporter substrate-binding protein - multiple sugars |S.pneumoniae|R6|NC_003098.1|ORF|111
atgraatggtataaaaaaatcggacttcttgyaactacaggtttagctttgkttgggctcggcgcttgctccaactatggtaaatctgcggatggcacagtgaccatcgagtatttcaaccagaaaaaagaaatgaccaaaaccttggaagaaatcactcgtgattttgagaaggaaaaccctaagatcaaggtcaaagtcgtcaatgtaccaaatgctggtgaagtattgaagacacgcgttctcgcaggagatgtgcctgatgtggtcaatatttacccacagtccatcgaactgcaagaatgggcaaaagcaggtgtytttgaagatttgagcaacaaagactacctgaaacgcgtgaaaaatgsctacgctgaaaaatatgctgtaaacgaaaaagtttayaacgttccttttacagctaatgcttatggaatttactacaacaaagataaattcgaagaactgggcttgaaggttcctgaaacctgggatgaatttgaacagttagtcaaagatatcgttgctaaaggacaaacaycatttggaattgcaggtgcagatgcttggacactcaatggttacaatcaattagcctttgcgacagcaacaggtggaggaaaagaagcaaatcaataccttcgttattctcaaccaaatgccattaaattgtcggatccgattatgaaagatgatatcaaggtcatggacatccttcgcatcaatggmtctaagcaaaagaactgggaaggtgctggctataccgatgttatcggagccttcgcacgtggggatgtcctcatgacaccaaatgggtcttgggcgatcacagcgattaatgaacaaaaaccgaactttaagattggraccttcatgattccaggaaaagaaaaaggacaaagcttaaccgttggtgcgggagacttggcatggtctatctcagccaccaccaaacatccaaaagaagccaatgcctttgtggaatatatgacccgtccagaagtcatgcaaaaatactacgatgtggacggatctccaacagcgatcgaaggggtcaaacaagcaggagaagattcaccgcttgctggtatgaccgaatatgcctttacggatcgtcacttggtctggttgcaacaatactggaccagtgaagcagacttccataccttgaccatgaactatgtcttgaccggtgataaasaaggcatggtcaatgatttgaatgccttctttaacccgatgaaagcggatgtggattarctaat

SEQ ID NO: 2746 - DNA, 236 bp, Streptococcus pneumoniae
  misc_feature (1)..(236): tiling:Spneumo1:WAN024GL5; Cluster includes WAN0244SA spr0 040|thmA|15902084|NP_357634.1|39514..39744|+|231 bp|Amphip athic pore-forming peptide precursor|S.pneumoniae|R6|NC_00 3098.1|ORF|121
atgratacaaaaahgatgtcacaatttkmwrttatggatactgaratgcttgcttgcgttgaaggtggcggatgcaattggggagattttgccaaagcaggtgttggaggaggagyagyamgaggtcttcarctaggmattaaaacargaacatggcaaggtgcagcaactggtgctgygggwggagctatacttggaggtgtrgcctatgcagcracatgttggtggtaactaat

SEQ ID NO: 2747 - DNA, 848 bp, Streptococcus pneumoniae
  misc_feature (1)..(848): tiling:Spneumo1:WAN024FN7; Cluster includes WAN0243SF spr1 332||15903375|NP_358925.1|1318774..1319616|-|843 bp|Conser ved hypothetical protein|S.pneumoniae|R6|NC_003098.1|ORF|1 11
atgratacctatcaattaaataatggagtaraaattccagtattgggatttggaacttttaaggctaaggatggagaagaagcctatcgtgcagtgttagaagccttgaaggctggttatcgtcatattgatacggcrgcsatttatcagaatgaagaaagtgttggycaagcaatcaaagatagcggagttccacgwgargawwtgttcgtaactaccaagctktggaatagycarcaaacctatgagcaarctcgtcargctttkgmarartctwtagaraarctgggyttggattatttggatytgtatttgattcattggccraayccaaaaccgctyagagaaaatgacsmatggaaaayycgmaatgcrgaagtttggagagcgatggaagacctctatcaagaagggaaaatccgtgcyatcggygttagyaattttcttccccatcatttggatgccttgcttgmaacwgcaamwatysttcckgcggtcaatcargttcgcttggcrccaggtgtgtatcaagaksaagtcgtagcttactgtmgwgaaaarggaattttattggaagcttggggrccttttggwcarggagaactrtttgatagyaagsaagtscaagaaatmgcagcaaatcayggaaartckrttgctcagatagccttggcctggagcttggcagaaggatttttaccacttccraaatctgtyacarcmtctcgtattcargctaatcttgattgctttggaattgaaytgagycatgaggagasagaaaccttaaaaacgatwgctgttcawtckggtgctccacgagytgatgatrtggatttytarctaat

SEQ ID NO: 2748 - DNA, 945 bp, Streptococcus pneumoniae
  misc_feature (1)..(945): tiling:Spneumo1:WAN024CDC; Cluster includes WAN0240Y5 |cps 6bP||AAL68409.1|||945 bp|putative galactosyl transferase|S .pneumoniae||AF246897|ORF|000
atgratatagtwtatgcsacagataataattttgtagatgtattgagtgcwtcyatcaartcrctttacactactaattcagatttggatttaaatttatggattattgctgataaagtttcggatagaaataaagaaaagataaatagattatcaaaacaatttgcgcagagagaaattaattggatagagaacgttgagatyccatttaaattacatttagataggggatcaattagttcatttagcagattatttctgggaagtgttcttccatcttcaatgagtaaagttctytatcttgayagtgatattattgtwatggattctttacgaagtattyttgatattgattttaargrtaaaattctctatggggtraatgatacttttaataaagaatacaagcaggtgttgggkataccaatygacaarccaatgtttaatgctggagttatgctkattaatttagagttatggagaaataataacgtcgaagaaaratttttgcaagtaattcaaaagtttaatggtactatattacaaggwgatttaggrgttttaaatgcagttttatataactcatttggtgtacttcctccagaatataattatatgaccatatttgaagatttgacttatgaagaaatgatagtttttaaaaaaccaattaaytattattcaaaagargaaattaaaaatgcyagagaacgtatagtcttgcgmcatttcacaackwgttttytatcamwmagaccttggcaagaaartagtgaggtrrcgcatgtggaaatatttaaaaaatactatagaggarcatacaaacaagyatctccatctaagttatyaarwatttataaaattttacckaaaaaaatgtcgctctatytactaggttttattcaatcaaaagtgcgtccaaaactgtatagaattwyraaataa

SEQ ID NO: 2749 - DNA, 315 bp, Streptococcus pneumoniae
  misc_feature (1)..(315): tiling:Spneumo1:WAN024GNA; Cluster includes WAN023ZC3 AL44 9924.1_102||||72735..73049|-|315 bp|Glimmer 2.02 orf predi ction|S.pneumoniae||AL449924.1|ORF|001
atgratgaaagtaatttagaatctgyaatggggctaattatgtatggtggggaagccaaaagtaatgctatggaggctattcaggcagcaaaaaaaggggatttctctaaagccaatcgaagattagctgatgcgaatgctgccttattacaggcgcataaggctcaaacagaaatgttgacaagagaggcacagggggaaraaacatcaattagcctcttgatggtacacgcgcaagatcatttaatgacgagtytgacttttgttgacttggcgaaagaagtggtagaagtatacgaacgatttgaaaaaaat

SEQ ID NO: 2750 - DNA, 201 bp, Streptococcus pneumoniae
  misc_feature (1)..(201): tiling:Spneumo1:WAN024BGP; Cluster includes WAN023SCB NC_0 03028.1_1336||||1000817..1001008|+|192 bp|Glimmer 2.02 orf prediction|S.pneumoniae|TIGR4|NC_003028.1|ORF|010
atgratgatgaagcaagtaaacaattragcgatagccgtttcaagatccttgtaggtgttcagcgcacgacttttgaagagatgttagctgtgttaaaaacagcttatcaacgtaaacgcgcaaaaggtggacgaaaaagcaaattaagcctaracgatctccttatggtaactattcaatacatgcgagaactaactaat

SEQ ID NO: 2751 - DNA, 1332 bp, Streptococcus pneumoniae
  misc_feature (1)..(1332): tiling:Spneumo1:WAN024DTR; Cluster includes WAN02438R spr2 042|comD|15904083|NP_359633.1|2033991..2035316|-|1326 bp|H istidine protein kinase|S.pneumoniae|R6|NC_003098.1|ORF|21 1
atgratttwytykkattwgkgabrkttatwkkwyatyttttaattattagtcayarytaccrtttwatttgtaaagrtcraataaawwsaaargaaytatwydtttttggtgcttatacattactarywgaaryagtayttgahyttyyctthtatmttctawatttagatrrrdyagkgattgmaabatttttatttcctttgggmytatattcctattttckatggatdaaacagtatgagagggatagaggaykattyctaagtttactactatctcttttatatgagagcaytcataactttctgyccgtaaykttctcytctataacaggagayarttttgtttyacartatyatkbccyattctttttcgytgtracggtgttracytatwtygttaymktaamaatcattyrytayttccatttggaactrrmctattttgacrargaytacctttatcctttcttgaaaaaagtattttttgctttactaytgctacatattgtatctttygtttcagatatggtaagtacgattaaacatttgaatagttttggaagtattttrtcatctatygtctttatytctctccttttgaccttctttgcaatgaattckcataaagktcaaatggagaaagagattgctttgaagcrgaagaaatttgaacagaaacatttacrgaattacacagatgaaattgtyggtctgtataatgaaatccgtggktttmgacatgattatgctggratgcttgtcagyatgcagatggcaattgacagtggtratttacaggaaattgacagartttacaatgaagttttrgtcaaarcmaatcataaaytrcgttcagataagtacacttactttgatttgaacaacatagaagaytcagckttacgaagtttggttgcwcagtcmattgtytatgctcgaaataatggtgtagagtttacactggaagtaaaagatayrattacyaagmttccaatwgamctwytggatttrgtkcgtatyatgagygttttattgaayaatgctgtcgaaggatcrgctgatagytataaaaarcagatggaagtagcagttattaagatggaaactgaaacagtkrtkgtgattcagaattcatgtaaaatgacgatgactccttcaggagatctatttgccttrggattctcyactaagggaagaaatcgcggagtmggattaaataatgtgaaagaactactagataagtacaacaayatyattttagaracagagatggaaggcagtacatttagacaaatcattagatttaagaggrarkttgaaykaactaat

SEQ ID NO: 2752 - DNA, 1202 bp, Streptococcus pneumoniae
  misc_feature (1)..(1202): tiling:Spneumo1:WAN024F3L; Cluster includes WAN0244H5 spr0 441|pgk|15902485|NP_358035.1|446182..447378|+|1197 bp|Phos phoglycerate kinase|S.pneumoniae|R6|NC_003098.1|ORF|221
atgrcaaaacttactgttaaagacgttgmcttgamaggtaaaaaagtcctcgttcgtgttgacttcaacgtaccattgaaagatggcgtaatcactaacgataaccgtatcacagcagctcttccaactattaagtacatcatcgaacaaggtggacgtgcaattcttttctctcaccttggacgtgtgaaagaagaakctgataaagctggtaaatcacttgctcctgtagcagcwgacttggcagcaaaacttggtcaagatgttgttttcccaggtgtcactcgtggtgctgaattrgaagcggcaatcaacgytcttgaagatggacaagttctcttggttgaaaacactcgttacgaagatgttgacggcragaaagaatctaaaaacgatcctgaacttggtaaatactgggcatcacttggagatggtatcttcgtaaacgatgcattcggtacagctcaccgtgcacacgcatctaacgttggtatctcagcaaacgttgaaaaagcagttgctggtttccttcttgaaaacgaaattgcctayatccaagaagcagttgaaactccagaacgtccattcgtggctatccttggtggttcaaaagtttcagacaagatcggtgttatcgaaaacttgcttgaaaaagctgataamgtccttatcggtggtgggatgacttacacattctacaaagcacaaggtatcgaaatcggtaactcacttgtagaagaagacaaattggatgttgcgaaagctcttcttgaaaaagcaaatggtaaattgatcttgccagttgactcaaaagaagctaacgcatttgctggttacactgaagtgcgtgacactgaaggtgaagcagtttctgaaggcttccttggtcttgacatcggtccaaaatctatcgccaaatttgacgaagctttgactggtgccaaaacagtygtatggaacggacctatgggtgtatttgaaaacccagatttccaagctggtacaatcggtgtgatggacgctatcgtgaaacaaccaggagttaaatcaatcatcggtggtggtgactcagctgccgcagcgattaaccttggccgtgcagacaagttctcatggattagtacgggtggtggagcatcaatggaacttcttgaaggtaaggttcttccasracttgcagccttgacagaaaaataactaat

SEQ ID NO: 2753 - DNA, 1184 bp, Streptococcus pneumoniae
  misc_feature (1)..(1184): tiling:Spneumo1:WAN024FCA; Cluster includes WAN0243J4 spr1 668|galK|15903710|NP_359260.1|1640591..1641769|-|1179 bp|G alactokinase|S.pneumoniae|R6|NC_003098.1|ORF|221
atgrcacaacatcttactrctgaaryycttcgcaaagactttcttgctgtttttggtcaagaagyagaycaaachttcttttcaccaggycgyatyaatttgattggtgaacacacrgactayaayggtggrcaygtwtttccwgytgctatttccttrggaacwtayggygcagytcgyaagcgtgaygaccaagtcttgcgtttctactcagcyaactttgaggacaagggcatwatygaagtgcctctygctgacctcaagtttgaaaaagagcacaactggaccaaytatccaaaaggkgtycttcatttcttgcaaraagctgggcaygtgattgacaaaggttttgatttttatgtttatggraatatyccaaatggtkctggyttgtcttcttcwgcatccttggarmtcttgacaggrgtmgtggcwgagcatctctttgatttaaaaytagascgtytsgatttggttaaaatcggmaaacaaacagaaaayaactttatcggagtmaaytctggyatyatggaccartttgctattggtatgggggcwgaycaacgtgctatttacytwgatacyaayacyttagartaygayttggtgccacttgatttgaaggacaatgtcgttgttatcatgaacaccaacaaacgccgtgaattggcggactctaaatacaatgaacgtcgtgctgagtgtgaaaaagcagtggaagaattgcaagttkccttggatattcagacyctgggtgaattggacgagtgggccgttgaccaatatagctatytgattaaagatgaaaatcgtttgaaacgtgctcgccatgctgtgcttgaaaaccaacgtaccctyaaagctcaagyagcmctycaagcaggwgatttggaaacatttggwcgyttgatgaatgcgtcacacgtttctctggagcrtgattatgaagtaactggtttggaattrgatacycttgttcacacagcttgggcacaagaaggagttctcggtgctcgtatgacaggggctggttttrgtggctgtgccattgccttggttcaaaaagatactgttgaggcctttaaggaagctgtaggcaaacactacgaggaagtagttggatacgctccaagcttctatatcgctgaagttgcaggtggcactcgcgtccttgactarctaat

SEQ ID NO: 2754 - DNA, 1340 bp, Streptococcus pneumoniae
  misc_feature (1)..(1340): tiling:Spneumo1:WAN024GIJ; Cluster includes WAN0244FW spr0 486||15902530|NP_358080.1|487231..488565|+|1335 bp|Conserv ed hypothetical protein|S.pneumoniae|R6|NC_003098.1|ORF|11 1
atgrcagatgaacggattcatrtcctacgggatattttrttagaattgcayaatggcgcctctcctgagtcggttcargakcgytttgatgcgacctttrcgggygtstcagccatygagatttcccttatggagcacgagctgatgaactcrgaytcrggygtcacytttgaagatgttatggaactctgtgatgtccatgccaatctttttaaaaatgctatcaaaggtgtcgaagtttyagatacygarcayccwggkcacccagttcgtgtcttyaargaagaaaatytggcyctccgtgcrgcyttgattcgcattcgtagattgttagatacctatgagtykatggaagacgaggaaatgctkgcggagatgcgyaagggyttggtgcgtcagatgggacttgtgggkcaatttgacatccattaccaacgtaargaagaactcttctttcctatcatggagcgctatggacacgattcacctcccaaagttatgtggggagtggatgatcagattagggaactctttcaaacagctctaacgayagccaagtcactaccagaagtgtcaattagcagtgtaaaggaagcttttgaagcttttgcgacagagtttgaaagtatgattttcaaggaagagtccatcctsctcatgattctccttgagtcttttactcaggatgactggmttcagattgcggakgagagygatgcctatggctatgccatcatccgtccgtcagagaaatgggtgccagaacgacagakctttattgaggaaaagattgcagaggagcctgtacagctagatacggcagaaggtcaagttcaacaagtcatagatacgccagaaggccattttaccattacctttacccctaaggaaaaggaagctgtgctggaccgccatagtcaacaggcttttggtaatggctatctttcagtcgagcaggccaatctcatcctcaatcayctccctatggagattacctttgtcaataaagawgatattttccagtattacaatgacaatacgccagctgatgagatgattttcaaacgracgccgtcycaagtcgggcgcaatgtcgaactctgycatccgcctaagtayttggacaaggtcaarrctatcatgaagggrcttcgtgagggrascaargacaagtatgaaatgtggttcaagtctgagtcgcgagghaagtttgtccacatcacctatgctgcagtacacgatgaaracggagaattccaaggwgtrytggartaygttcaggatatccagccctaccgtgagattgatacggactatttycgtggattagaataactaat

SEQ ID NO: 2755 - DNA, 611 bp, Streptococcus pneumoniae
  misc_feature (1)..(611): tiling:Spneumo1:WAN024EXK; Cluster includes WAN024455 spr0 873||15902917|NP_358467.1|865592..866224|+|633 bp|Conserve d hypothetical protein|S.pneumoniae|R6|NC_003098.1|ORF|111
atgrgaaaaatcatcggaatcactgggggaattgcctcwggtaagtcaactgtgacaaattttctaaracascaaggctttcaagyagtggatgccgacgcagtsktccaccaactacagaaacctggtggtcgtctgtttgaggctytagtacagcactttgrgcaagaaatcattcttgaaaacggagaactcaatcgccctctcmtagctagtctcatcttttcaaatcctgawrarcraraatggtckaakcaaattcaaggggagattatccgtgaggaactggctactttgagagaacagttggctcagacagaagagattttcttcatggatattcccctactttttgarcaggactacagcgattggtttgctgagacttggttggtctatgtggaccgagatgcccaagtrgaacgcttaatgaaaagggaccagttgtccaaagatgaagctgagtctcgtmtggcagcccagtggcctttagaaaaaaagaaagatttggccagccaggttcttgataataatggcaatcagaaccagsttcttaatcaagtgcatatccttcttgagggaggtaggcaagatgacagagattaactaat

SEQ ID NO: 2756 - DNA, 189 bp, Streptococcus pneumoniae
  misc_feature (1)..(189): tiling:Spneumo1:WAN024GIO; Cluster includes WAN0242U5 SP05 59||15900471|NP_345075.1|527660..527842|+|183 bp|hypotheti cal protein|S.pneumoniae|TIGR4|NC_003028.1|ORF|011
atgrrwcyyatmaaarctytwgmtaaaatttatggtaattactttttgaccgtgcaaggtgtaaaagtgatgaaaacgataaagaaagctgaccatgtcgttgttggtctgggvaaactttttattgcmgayaagytaatggatacggctcggtggctcattargccagaggagagagaaykaactaat

SEQ ID NO: 2757 - DNA, 375 bp, Streptococcus pneumoniae
  misc_feature (1)..(375): tiling:Spneumo1:WAN024GL8; Cluster includes WAN023M12 3142 66_829a||||441890..442264|-|375 bp|EGAD orf prediction|S.p neumoniae|R6|NC_003098.1|ORF|110
atgrtaacgtccatagttataggtcatggcatcgtaccaagaatacttgattggatggtttaccttagcagcatattccttgctatagagcataaactggcgcatcttttctccaagaggtttaaccaaatctccagttgtttcttggttgatgaaatagccatcatagccataatacttggccatgtctaccaatttacgggcaattgggaagctaccatctgcgtcttgcttcaaagcttcagcaaatctttcttgatctgcaatactattagaccagttgaagaagagtgtaccgtatacaggaaccccgttacggtgacctgcatcaataacgtcaggagttggtacgagaccttcccagaagaccattga

SEQ ID NO: 2758 - DNA, 486 bp, Streptococcus pneumoniae
  misc_feature (1)..(486): tiling:Spneumo1:WAN024F34; Cluster includes WAN023LW6 3142 43_1059a||||553781..554266|-|486 bp|EGAD orf prediction|S. pneumoniae|R6|NC_003098.1|ORF|110
atgrtccaaragccattgggctgctttttcttctgtyaccaaatcaccatcagtcccaatcacatcaaaggccaagcctgtctggtgttcgctatarccaggwcgrgcagartaacggtcrgcwgctkcyttyccatcttgrttracataatcttgatagagyttggtctgagtttcataacttctaaaaccactgtaatgatcrctaatrgggaaacctgcctcttgcatsgctttgatgagtttgaccaactctgccttggctgttggattttcccctggattatagtctttagacaatggatagtgtttgttggctacgatgatttcatcgtatttcccttgaatgctgtagtaatcacctttattgaccacttctgctttcttctgggcagctccttgagacttactaccgactgttccatcagctttggctgtctgttctgtcttagtttctccatcttcattttttgttttttcttgtga

SEQ ID NO: 2759 - DNA, 379 bp, Streptococcus pneumoniae
  misc_feature (1)..(379): tiling:Spneumo1:WAN024CI4; Cluster includes WAN023MG2 3128 80_36||||24127..24387|-|261 bp|EGAD orf prediction|S.pneum oniae|R6|NC_003098.1|ORF|220
atgrttragacgctcatctgtcaagatatygtacaaactyccagcagcgccaaatttctggtttttagccccatagaccacatttggaatrcgggcaagcccaatcgcyccactacacatgacacaaggttcaatggtcacaaaaagtgtgcaatccagcaagcgccagctctcctcactcaagttcgcatcctctatagccataatttccgcatgcataaccgctcgctgtaattcctcacgcgcattatgcccacgaccaatgatttccccatctttgacaatcacacaaccaattggaatttcatcgtgttcaagagcaatctcagcctctctcaaagcctccctcataaagacttctttttcttcaagcgtataa

SEQ ID NO: 2760 - DNA, 803 bp, Streptococcus pneumoniae
  misc_feature (1)..(803): tiling:Spneumo1:WAN024G2L; Cluster includes WAN0243YY spr1 097|nirC|15903140|NP_358690.1|1093679..1094476|-|798 bp|Fo rmate-nitrate transporter|S.pneumoniae|R6|NC_003098.1|ORF| 211
atgrtttcttcrgaatttatctcaaagattgaatttgcttgcaataagaaagaaagtctttatagtcaaagcaaatttaagtatgcgattcgttcgatgttcgcaggtgcatttttaaccttcagtactgctgcaggtgcagttggggctgacttgattaataaaattgcaccaggtagtggacgcttcctctttccattcgtttttgcttggggcttggcctacattgtttttttgaatgccgagttggtcacttcaaacatgatgttcttgactgctggtagtttmttaaaaaaaatctcttggagaaaaacagctgagattttactatactgtaccttgttcaaccttatcggagccttgatagcagggtggggctttgctcattcggcagcctatgcgaatctgacacacgatagtttcatctcaggkgttgtwgagatgaagttaggccgctcaaatgaattggtcttgcttgaggcgattttggcaaatattttygtaaayattgcsattctktcatttrttttggtcaaagatggtggtgccaaactttggcttgtgttgtcagctatttacatgtttgtattcttaacaaacgagcacattgcggcgaactttgcttctttcgcgattgtgaaattcagtgttgctgcggattcaattgccaacttcggtgttggaaatatgcttcgccactggggtgtgactttcatcggaaactttatcggaggaggcctcttgatgggtcttccatatgccttcctcaataaaaacgaagatacttatgtagattaactaat

SEQ ID NO: 2761 - DNA, 488 bp, Streptococcus pneumoniae
  misc_feature (1)..(488): tiling:Spneumo1:WAN024DFB; Cluster includes WAN0244AL spr0 677||15902721|NP_358271.1|682441..682908|+|468 bp|Hypothet ical protein|S.pneumoniae|R6|NC_003098.1|ORF|111
atgrykaaraaraswkatawtmatmttwwgrtctggggagtsrytktytatagcmtwtgcattgtctrtttttgctttactcctcaagaacaatctaccgtgggagtgggaactccaggtattcagcatcttggacgcctggtttttcttttgactcctttcaattctctctggaaactgggcgaagtgagtgacattggacaattatgttggatttttttacaaaatrtcctcaatgtcttcttgttttttcctctgattttccaactcctttatctatttccaaatttgcggaaaacaaaaaaggtccttctttttagttttcttgtgagtcttggaatcgagtgtacgcaattaatcttggactttttctttgatttcaatcgcgtctttgagattgatgatttgtggaccaayactttgggtggctatctggcttggctcctttataaacgattacataaaaacaagrtaaggaattaactaat

SEQ ID NO: 2762 - DNA, 243 bp, Streptococcus pneumoniae
  misc_feature (1)..(243): tiling:Spneumo1:WAN024CH3; Cluster includes WAN023MEJ 3144 11_100||||50236..50478|-|243 bp|EGAD orf prediction|S.pneu moniae|R6|NC_003098.1|ORF|110
atgscgcttcagttgtccttgatcattggagaggattcctgccccctcctgaccacggtgttgaagactgtggagtccaaaataggtcaacttagcagcatctggatgtccccaaataccgaaaacaccacattcttcattaagagattttacttcgtatgtcattttttatacctaattttcatttgtaatcatcaagagctagatttacatgacttttacattactgatactatctattag

SEQ ID NO: 2763 - DNA, 733 bp, Streptococcus pneumoniae
  misc_feature (1)..(733): tiling:Spneumo1:WAN024F83; Cluster includes WAN0244KE spr0 324|transposase G-truncation|15902368|NP_357918.1|323782.. 324228|+|447 bp|Transposase, uncharacterized, truncation|S .pneumoniae|R6|NC_003098.1|ORF|111
atgswgayktwcccagttgaaasagargaaatyacctayaaacgtaagaaakctaaagggaaacgycaagctcttcttgcccaatttgattcagaaraagttcatcatcaagtagaagagagcatttgccctgattgtcaggrwgatctaaaagagattggagcaacccttcaacgacaagaattagtctttattcctgcgcaattaaaacgaatagatcatatccaacacgcttataagtgccaagcatgcagtgataaaaatcsgagtgataaaatcgtgawakcttsytrttsstgmwrrycyctttggcgcatagcyttggctcagyttctattatcgctcacaycatccatcagaagwttawtytgaaggtacccaattatcrycawgaagaagattgggctargatgggtttaccaatcacacgtaaggaaatykctaattggcatatcaaggcragtcaatactatttrgagyccctttataabcttttacgagaaaagttgttwgamymasctcttcttcmtgcrgatgaaacytcytatmgggtbytagrragtgatagycakytgmcytactattggacytttttrtcwggkaaakcwgagaawcaagbratyacgctktaccaycatgrtcaghgtcgragtggttyrgtagtvcaagaattcctaggarattattctgsctatgykmakygtsmhawgttkmggcagyaaggcgacgctaa

SEQ ID NO: 2764 - DNA, 78 bp, Streptococcus pneumoniae
  misc_feature (1)..(78): tiling:Spneumo1:WAN0249VO; Cluster includes WAN024E9Z-rc R 6.IG_1580||||1512043..1512120|-|78 bp|Between spr1533 (- s trand) and spr1534 (- strand)|S.pneumoniae|R6|NC_003098.1| IG-rc|110
atgtaaaagactagaaaataggtgggmtagtgagctgaaaagctctagcccaatcttgtaaaagaagggagaaggaga

SEQ ID NO: 2765 - DNA, 450 bp, Streptococcus pneumoniae
  misc_feature (1)..(450): tiling:Spneumo1:WAN024D32; Cluster includes WAN0243GJ spr1 761||15903803|NP_359353.1|1729172..1729615|-|444 bp|Conser ved hypothetical protein|S.pneumoniae|R6|NC_003098.1|ORF|1 11
atgtacacaaaaaatgaagaagagttgcaagccttaggggagcgtttgggccatctattagcaaagaatgatgttttaatcttaaytggagaactgggtgcaggtaaaacgacctttactaaaggacttgcaaaaggattacagatytctcaaatgattaaaagtccyacctatactatcgtgagagagtatgaaggtcgacttccactttatcacctagatgtttatcgtattgaaggagatgctgattctatcgacttggatgagtttatctttggtggcggcgtgactgttattgagtggggaaatctcttaggagatgccttgccagatgcttatttagaattggaaattctaaaagaagcagatggacgccgtttaaattttcaggcaaagggtttgcgtgctgagaaattgttagaggagcttcaatatggagtaykaactaat

SEQ ID NO: 2766 - DNA, 234 bp, Streptococcus pneumoniae
  misc_feature (1)..(234): tiling:Spneumo1:WAN024GI9; Cluster includes WAN023LY0 3145 34_964a||||500856..501089|-|234 bp|EGAD orf prediction|S.p neumoniae|R6|NC_003098.1|ORF|110
atgtacaccaactccaaaggaacgttaataaacatctctgtaaaacgggtcatattatctctatttttgagaaaaaaacttttctcaatatcaattggatttactttatctccartttttcttccaaaagctattccccttccaaaaagaagaatatcgatatcttttttactttgcgcaattacggcattgtggtttagtattcgttttatgatcataaaatttcccttttaa

SEQ ID NO: 2767 - DNA, 222 bp, Streptococcus pneumoniae
  misc_feature (1)..(222): tiling:Spneumo1:WAN024G6T; Cluster includes WAN02442E spr0 972||15903016|NP_358566.1|955253..955474|+|222 bp|Conserve d hypothetical protein|S.pneumoniae|R6|NC_003098.1|ORF|100
atgtacagacgtttgagagatttgagggaagatcacgatttgacccaaaaacaaatagctaaaatactttcgtttacaaactcagcttatgctaaaattgaacgrggtgagcatacgttaacagcagatgtattggtaactctctcaaacttttacgatgtcagtacagactacctattggaattgacagattttcctgataaaattcgctttagaaaataa

SEQ ID NO: 2768 - DNA, 258 bp, Streptococcus pneumoniae
  misc_feature (1)..(258): tiling:Spneumo1:WAN024E2C; Cluster includes WAN023KJ8 3148 06_3404||||1824821..1825078|+|258 bp|EGAD orf prediction|S .pneumoniae|R6|NC_003098.1|ORF|110
atgtacataaagaaatcttgtttagcaggattgaatagagttcctgaagtgatgacttctttattagacataatgtctggacccaagattaaaagaatggcyccgaagaatacgagcatcaaggtagcagatgcaacaactgtatcgtggaagattgagaggaacttaggtaatttaagattgtctaaactttcttctttcttaccaaagcgtcctgctactttatctacaaaccagattgcaaattgctgttggtga

SEQ ID NO: 2769 - DNA, 747 bp, Streptococcus pneumoniae
  misc_feature (1)..(747): tiling:Spneumo1:WAN024GDO; Cluster includes WAN0244BD spr0 649|mta|15902693|NP_358243.1|656131..656793|+|663 bp|Regul ator of the multidrug efflux pump pmrA|S.pneumoniae|R6|NC_ 003098.1|ORF|221
atgtaccatataaaagaarctgcgcagctttcaggtgtctctgtcaagaccctgcatcactatgacaagataggactcttggtccccttaaagtcggaaaacggctatcgaacctayagtcaagaggatttggaacgccttcaggtcattctttactacaaatatctaggcttttctttagagaaaatagcagagctgttaaaggaagaaaggacagatttattgccccatttractaggcagttggactatctmactcgcgaaaggcaacatctggataccttgatttccaccttgcaaaaaactattcaagaacaaaaaggagaaagaaaaatgaccattgaggaaaaattcacgggatttagctatcaagacaatcaaaaataccaccaagaagcggtagagaaatatggtcaagaagtcatgggacaagcgctcgaacgccaaaaaggtcacgaagacgaggctacggccgcctttaaccaagtctttcaaactttggcacaaaatcttcaagttggtttacctgcaacagcaaccgaaaaccargagcaagcagccaagctcttgcaagcyattcgcacttatggatttgactgctctattgagrtattcggtcatatcggtaaagrttacgtctacaacccagagtttaaggaaaayattgacaagtttggttctgraacagcccagtacacgtcagatgccattgcrgyttacgttcagacaaatgcagaahwaatarkc

SEQ ID NO: 2770 - DNA, 1226 bp, Streptococcus pneumoniae
  misc_feature (1)..(1226): tiling:Spneumo1:WAN024DH2; Cluster includes WAN0244EE spr0 540|murM|15902584|NP_358134.1|540319..541539|+|1221 bp|Ser ine/alanine adding enzyme|S.pneumoniae|R6|NC_003098.1|ORF| 111
atgtaccgttatcaaattggcattcccacattagaatatgatcagtttgtcaaagaacatgaattagcyaatgtattacaaagyagtgcttgggarraagtkaartctrattggmawcatgagaartttggtgtytayrrrgargrraarttactggckryrgctagtattytsatwarawctctkcckytaggctataaaatgttttayatyccaagaggwcctatattggattayrgggatawagaactyttraaktttgycmtkcagtcyattaagtcytatgctcgcagyaagagagykrtttttgtgacttttgacccaagtatttgyctatctcaaagyttaatyaatcaggaaaarayagaatwtcctgaaaatctggctattattgatagtttgcaacaaatgggagtaaggtggtcaggaaaaacrgaggaaatgggagacaccattcaacctcgtattcaggcgaaaatatacaaggaaaattttgaagaagataaactttcyaartcaacrarrcargctatycgaacagcacgaaacaaagggcttgarattcaatatggtggactggaactattagattcattttcggagttgatgaaaaaaactgagaagcgaaaagagattcatttgaggaatgaagcctattataaaaaattgttagataattttaaggacaaggcctatatcaccttggccaccttggatgtttctaaacgttcgcaagarttagaagaacagttagcgaaaaatagagccttggaagagacstttactgagtcgactcgaayttcaaaagtagaagcgcagaagaaggaaaaagaacgtttgttagaggaattgaccttcttgcaggaatatatagatgtaggtcaagcgagagttcctttagcggctactttgagtttggaatttggtactacctctgtyaatatatatgctggtatggatgatgattttaaacgttacaatgcaccaattttaacwtggtatgaaacggctcgctatgcctttgarcgargtatgrtytggcaaaatttaggkggtgttgaaaactctctcaatggtggactttatcattttaaggaaaaatttaatccaacgattgaagaatacttgggtgaatttacaatgcccactcatcctctctatcctctgttaagacttgctcttgatttccgtaaaacattaagaaaaaaacatagaaagtaactaat

SEQ ID NO: 2771 - DNA, 1222 bp, Streptococcus pneumoniae
  misc_feature (1)..(1222): tiling:Spneumo1:WAN024DGY; Cluster includes WAN0240RX |mur M||AAG34919.1|||1221 bp|MurM|S.pneumoniae||AF281138|ORF|00 0
atgtaccgttatcaaattggcattcccgcattagaatatgatcagtttgtcaaagaccatgaattagcyaatgtattacaaagtagtgcttgggaaraagtgaartctgaytggrawcatgagargyttggtgtytayrrrgargrraarttactggckryrgctagtattytsatwarrwctctwcckytrggstataaaatgttttayatyccaagaggwcctatattggattayrgggatrcrgaacttttrarktttgtcmtkcagtcyattaagtcttatgctcgyagyaagagagcggtttttgtgactttygayccaagtatttgtctatctcaacatttggttaatcaagataaaacagaatatcctgaaaawcttkctmttgttgagaytttrgggcaaytaggagtgaartggtctgggcrgacarccgaratggatgayacyattcagcctcgtattcaggcgaaaatatayaargaaaattttgaagaagataaactttcyaartcaacrarrcargctattcgaacagcacggaataagggkgtagagattcaatttggyggaactgaattattggagtctttttcctttttgatgaaaaaaaccgagaagcggaaagagattcatttgaggaatgaagcctattataaaaarttgttagataattttaaggacaaggcctayatcaccttggcaaccttggatgtctctaaacgttcgcaagaattagaagaacagttrgcgaaaaayagagccttggaagagacctttactgagtcgactcgmacttcaaaagtagaagcgcagaagaaggaaaaagaacgtttrkwagaggaawtagactttcytgcaggratatatrratryrggwmaakcrarmrttccyttagcggctactttgagtttggaatttggtactacctctgtcaatctatatgctggtatggatgatgmttttaaacgttacaatgcwccrattttaacttggtatgaaacggctygctatrcctttgagcgaggtatgktstggcaaaatttaggtggtgttgaaaactctctcaatggtggwctttatcattttaaggaaaaatttaatccaacgattgaagaatatttgggwgaatttacaatgccyacycatcctctctatcctctgttaagacttgctcttgatttccgtaaaacattaagaaaaaaacatagaaagtaa

SEQ ID NO: 2772 - DNA, 1222 bp, Streptococcus pneumoniae
  misc_feature (1)..(1222): tiling:Spneumo1:WAN024DGX; Cluster includes WAN0240RY |mur M||AAG34920.1|||1221 bp|MurM|S.pneumoniae||AF281139|ORF|00 0
atgtaccgttatcaaattggcattcccrcattagaatatgatcagtttgtcaaagaacatgaattagccaatgtattacaaagtagtgcttgggaagaagtgaagtctgaytggrawcatgagargyttggtgtctatsarggragaraamttactggckryrgctagtattytsatwarawctctkcckytrggstataaaatgttttayatyccaagaggwcctatattggattayrgggatayagaactyttrarktttgtcmtkcagtctattaagtcctatgctcgcagtaagagagcggtttttgtgacttttgayccaagtatttgcctrtctcaaagtttaatcaatcaggaaaaracagaatttcctgaaaatctggctattattgatagtttgcaacaaatgggagtaaggtggtcaggaaaaacagaggaaatgggrgacaccattcarcctcgtattcaggcgaaaatatacaaggaaaattttgaagaagataaactttccaagtcaacaaaacaggctattcgaacagcacggaataagggkgtagagattcaatttggtggaactgaattattggagtctttttcctttttgatgaaaaaaaccgagaagcggaaagagattcatttgaggaatgaagcctattataaaaagttgttagataattttaaggacaaggcctayatcaccttggcaaccttggatgtctctaaacgttcgcaagaattagaagaacagttagcgaaaaayagagccttggaagagacctttactgagtcgactcgcacttcaaaagtagaagcgcagaagaaggaaaaagaacgtttgttagaggaattgactttcctgcaggaatatatrgatgcaggtcaagcaagagttcccttagcggctaccttgactttagaattcggacaaacttctgtcaatctatacgcaggaatggatgaagattttaracgwtataaagctcctattttgacttggtatgagacagctcgatatwcctttgaacgtggcattttatggcaaaatttaggaggcgtcgagaatgctttagatggtggactctatcgttttaaagctaattttaatccaacgatygaagaatacttgggtgaatttacaatkcctacccatcctctctatcctctgttaagacttgctcttgatttccgtaaaacattaagaaaaaaacatagaaagtaa

SEQ ID NO: 2773 - DNA, 1096 bp, Streptococcus pneumoniae
  misc_feature (1)..(1096): tiling:Spneumo1:WAN024AXP; Cluster includes WAN023P7C pne5 3_12||||4247..5341|+|1095 bp|Type 25F capsule operon, Glim mer 2.02 orf prediction|S.pneumoniae||WAN01UCCQ|ORF|000
atgtacgactatctaatcgttggtgctggwttgtcrggwgcaatytttgcttatgaagcaaccaagcgtggaaaaaaagtaaaagttattgataaacgtraccacattggtggaaatatctactgtgagaatatagaaggagttaatgttcataaatatggtgcacatatcttccatacttctaataagaaagtctgggattatgtgaatcaatttgctgaatttaacaactacatcaactcgcctgtagctaattacaagggtagcctttataatctacctttcaatatgaatactttctatgctatgtgggggayaaaaactcctcaagaagtgaaaaataagattgctgagcaaacggctcacatgaaagacgttgaaccgaaaaacttggaagaacaggctatcaagttgatcggtccagatatttatgaaaagttgattaaaggatatactgaaaagcaatggggacgttccgcgactgaccttccaccgtttatcatcaaacgtctaccagttcgtttgacttttgataataactactttaatgaccgttaccaaggtattccaatcggtggctataatgtcattatcgaaaatatgctgaaagatgttgaagtagaacttggagttgacttttttgccaatcgtcaggaattagaagcttctgctgaaaaagttgtctttacagggatgattgaccaatatttcgattataaacatggtgagctagaataccgtagtcttcgttttgagcatgaagttctagataaggaaaattatcaaggaaatgccgttgttaattatacagaacgagaaattccttatactcgcattattgagcacaaacattttgagtacggaacacaagataaaacggttattactcgtgaatacccagctgattggaaacgtggagatgaaccttattatccaatcaatgatgagagaaacaatgccatgtttgctaaatatcaagaagaagcagtacagaatgataaggtaattttctgtggacgtttggctgattataaatactacgacatgcatgtggtyattgaacgkgcyytrrawgtkgtaaggaatgarttctmaa

SEQ ID NO: 2774 - DNA, 1005 bp, Streptococcus pneumoniae
  misc_feature (1)..(1005): tiling:Spneumo1:WAN024FQC; Cluster includes WAN023P0U pne6 2_12||||8484..9485|+|1002 bp|Type 33C capsule operon, Glim mer 2.02 orf prediction|S.pneumoniae||WAN01UCG7|ORF|000
atgtacgataaattagtracaatcatagtaccaatgtataatattgaacaatatattactaagtgyatagaatcatttaaacaagtagataaaaaatattatgcggattttgaagtgattgttgttaatgacggtagtacggataactcacttcaagttgtmgaagatttaattaytaatagtwgttgcctaaatattagagttgttaataaagaaaatggtggacatgggtcaacgattaatgttggtataaragaatctaaaggaaaattttttaaagttatygatggggatgaytggattgatgtaccaagttttgaaaaattattagaagaacttaarggtatagatgtmgatatgrttattacaaattatackgaacaacatayctataatcagactgaaaaagagattggyttttcygakatattagattgtaataaaatatatgagggaatacctttcaaacgkattccmatgcatgctctgacatacaaaacatctatattgaaagaatctrgaattaatataagtgaaaaraccttttatgtwgatatggartatactttgttacckttrcaataygtaaaaarttatgtttatattgatttraatgtttaccagtatttcttaggtagaaaagatcagagtatgaatttaaatgtgatgaaacaaaaagcagaycatcacaatagagtaacaaaaaaaattctcgattattatgargwaattcgmtttgataagaacwtagaaccagtagtcaragacgtattgacatacttaatcaacaagcaatgtcagttgtttataatgaataakaatatcgaggaagcgagccgattatttagttaygctcataaatgycattatagatggaaatatgatyattcgaaaaaaayagtctcactaatttatataaattmtagatttaaaaatatatttaatctcatcttaaaamcgytaatcaataagcaacaaaaagaatggagygagatggatgaatat

SEQ ID NO: 2775 - DNA, 917 bp, Streptococcus pneumoniae
  misc_feature (1)..(917): tiling:Spneumo1:WAN024FOQ; Cluster includes WAN0243SZ spr1 312|trxB|15903355|NP_358905.1|1302186..1303097|-|912 bp|Th ioredoxin reductase|S.pneumoniae|R6|NC_003098.1|ORF|111
atgtacgatactattattatcggtgctggacctgcagggatgactgcggccttgtatgctgctcgaagcaatctaaaagtagctttgattgaaggtggtctgccaggtggtcagatgaataatacatctgatatcgaaaattacccaggatacgctaatattagtggacctgaattggctgaaaagatgtttgaaccacttgaaaatcttggtgttgagcacatttatggttatgttgaaaatgtcgaagaccatggtgattttaagaaagtgatgactgatgaccaaacatatgaaacacgtacagttatcgtagcaactggttctaaacaccgtcctttgggagtrcctggagaagaagaactgaacagtcgtggtgtttcttactgtgctgtgtgtgatggtgctttcttccgtgaccaagatttattggtagttggtggtggagattcagctgttgaagaagccctcttcttgactcgttttgctaagactgttaccattgttcaccgtcgtgaccaacttcgtgcccaaaaggtwttacaagatcgcgcctttgcgaatgamaaaatcagctttatctgggattctgtagtrarggaaatcaagggtgaaaacmgagtagaatcwgtcgtwtttgaaaatgtgaaaacaggtcaagtgacagarcaagycttcggtggtgtctttatctatgttggwttggaccctcttagcgattttgttaaagaattgaatatccaagatcaggcaggmtggattgtgacagatarccacatgardactgcagtcgacggtatctttgcagttggagatgttcgcttgawagaccttcgccaagtaacaacagcrgttggagatggagctatcgctggtcaagaagcctayaarttyatyacagaacatagttaactaat

SEQ ID NO: 2776 - DNA, 1101 bp, Streptococcus pneumoniae
  misc_feature (1)..(1101): tiling:Spneumo1:WAN024AXM; Cluster includes WAN023PPQ pne1 9_20||||14185..15285|+|1101 bp|Type 10C capsule operon, Gl immer 2.02 orf prediction|S.pneumoniae||WAN01UCJ7|ORF|000
atgtacgattatcttatcgtcggtgctggtttgtctggagcaatctttgcacacgaagctacaaaacgtggaaaaaaagttaaagtgattgacaagcgtgaccacatcggtggaaatatctactgtgaaaatgttgagggcatcaatgtccacaagtatggtgcccacattttccatacttccaataaaaaaktgtgggactatgtyaaycaattcgctgagtttaacaactatatcaattcccctatcgccaactatcaagggcacctttacaatctgcctttcaatatgaacactttctacgccttgtggggaacaaagacaccccaagaagtcaaggacaagattgctgagcaracgactcayatgcaagatgttgagccaaaaaacctagaggaacaagccattaagttgattggtacggatgtctatgaaaagctgattaagggctatactgagaaacaatggggacgttctgctactgagctgccaccctttatcatcaagcgtttgccagttcgattgacctatgataacaattatttcaacgaccgctaccaaggaattcctattggtggttacaatgtcatcattgaaaatatgcttggcgatgtggaagttgagcttggtgttgatttctttgccaatcgtgaagagttagaagcatcagctgaaaaagttgtcttcacagggatgattgatcagttctttgactatcagtttggtgaactagagtatcgcagtcttcgttttgaacatgagattctggaccaagaaaactatcaaggaaatgctgtagtcaactatactgaacgtgatataccwtatacgcgtatcatcgagcacaaacattttgagtttgggacccaggacaagaccgttattactcgtgaatatccagcagattggaaaagaggggatgaaccctactatccaatcaatgatgctaaaaacaatgcaatctatgaacagtatctagcagaagccaagaaaaatgggcgcgtgatcttttgtggtcgcttggcagattataaatactatgatatgcatgtgacggttgaacgtgcattggatgtggtagaagaagaactagggagtatc

SEQ ID NO: 2777 - DNA, 885 bp, Streptococcus pneumoniae
  misc_feature (1)..(885): tiling:Spneumo1:WAN024AXS; Cluster includes WAN023PII pne3 3_27||||20276..20743|+|468 bp|Type 16A capsule operon, Gli mmer 2.02 orf prediction|S.pneumoniae||WAN01UCI4|ORF|000
atgtacgattatcttgttgttggtgcagtctttgcccatgaagcagccttagaaggaaaaaaagtaaaagttattgaaaaacgaaatcatatcgcgggtaatatctatactcgtgaagaggaaggaattcaagttcatcaatatggtgctcatatcttccatacttctgataaggagatctgggattatgtaaatcagtttgcagagtttaaccgttataccaattctcctgttgcaaactataagggtgagatttataaccttccttttaatatgaatacyttcaataaactctggggagttgtracgccagcagaagyacargctaagattgatgaacaacgtgctattttaaatggtaaaactcctgaaaatttggaagaacaggcgatttctcttgtagstacagacatctacgaaaaattaatcaaagactatacagagaaacagtggggcaaaccaactactgaacttccakcctttattattcgccgtttrccagtacrcctgacctatgataacaactattttaacgatacctatcaagggattccaattggtggttataatgttatcatcgaaaatatgctgaaggatgtagaagtagaacttggagtgaacttttttgccaatcgtcaagaattagaggcttctgctgaaaaggttgtctttacagggatgattgaccaatmctttgattataaacatggtgagttagaatactgtagtcttcgttttgatcatgaagttctagatgaggaaaactatcaaggaaacgcagttgtgaactatayggatgcagaaaccccatatactcgcattattgaacacaaacattttgagtttgggagtcaagcaaagactatcattactaatagaacattc

SEQ ID NO: 2778 - DNA, 1110 bp, Streptococcus pneumoniae
  misc_feature (1)..(1110): tiling:Spneumo1:WAN024AXR; Cluster includes WAN0240C2 |cap 33fN||CAA07407.1|||1110 bp|UDP-galactopyranose mutase|S.pn eumoniae||AJ006986|ORF|000
atgtacgattatmttattgtcggtgctggtttgtcaggagcaatttttgcttatgaggcgacyaagcgtggaaaaaaagtaaaagtgattgataaacgtraccacattggtgggaatatctactgtgagaatstagaaggagttaatgttcayaaatatggtgcccatatctttcatacttctaataagaaagtttgggattatgttaatcaatttgctgaatttaacaactacgtcaactcgcctgtagctaattacaagggtagcctctataatctacctttcaatatgaataccttctatgctatgtgggggacaaaaactcctcaagaagtcaaagataagattrctgagcagacagctgatatgaaggatgttgagccgaaaaatctggaagaacargctatcaagytgattggtccagatrtctaygaaaarttratcaagggttatactgaaaagcagtggggrcgctcagcaacrgaacttcctccatttatcattaaacgwcttccagttcgtytaacatttgataataactattttaaygaccgttaycaaggaattcctattggtggttayaatgtsatyatygaaaatatgcttaaagacgtwgaagttgarcttgrwgtwgatttctttgctcaycgtgaagrgttrgaagcatcwgctgaaaaagttgtcttyacaggratgatcgaccartattttgrctacaarcacggagagttagaataccgtagccttcgytttgakcatgarattttrgacgaggaaaattatcaaggaaatgctgtagtgaactatacggagcgtgagattccttatactcgtattatcgaacacaagcattttgaatatggaacrcaggcaaagacagttatcacgcgtgaatatccagctgactggaagcgtggggacgagccttactatccgatcaacgatgagaaaaataatgctatgtttgctaagtaccaagaggaagcttcaaagaatgataaggttattttctgtggacgtttagcagattataaatattaygatatgcatgtggtgattgaacgggcgcttgaggttgtggagaaagagtttggatatgacaaaaagtag

SEQ ID NO: 2779 - DNA, 599 bp, Streptococcus pneumoniae
  misc_feature (1)..(599): tiling:Spneumo1:WAN024F53; Cluster includes WAN0244OT spr0 165|ruvA|15902209|NP_357759.1|174163..174756|+|594 bp|Holl iday junction DNA helicase|S.pneumoniae|R6|NC_003098.1|ORF |111
atgtacgcatatttaaaaggaatcattaccaaaattactgccaaatacattgttcttgaaaccaatggtattggttatatcctgcatgtggccaatccttatgcctattcaggtcaggttaatcaggaggctcagatttatgtgcatcaggttgtgcgtgaggacgcccatttgctttatggatttcgctcagaggatgagaaaaagctctttcttagtctratttcggtctctgggattggtcctgtatcagctcttgctattatcgctgctgatgacaatgctggcttggttcaagccattgaaaccaagaacatyacctacttgaccaagttccctaaaattggcaagaaaacagcccagcagatggtgctggacttggaaggcaaggtagtagttgcaggagatgrccttcctgccaaggtcgcagtgcaagcaagtgctgaaaaccaagaattggaagaagctatggaagccatgttggctctgggctacaaggcaacagagctcaagaaaatcaagaaattctttgaaggaacgacagatacagctgagaactatatcaagtcggcccttaaaatgttggtcaaatarctaat

SEQ ID NO: 2780 - DNA, 482 bp, Streptococcus pneumoniae
  misc_feature (1)..(482): tiling:Spneumo1:WAN024FAH; Cluster includes WAN0244RC spr0 074||15902118|NP_357668.1|79660..80070|+|411 bp|Hypothetic al protein|S.pneumoniae|R6|NC_003098.1|ORF|111
ttgcctgaacatactttttatgtcgataatctctttgtctttacgccccttcagcaggtcaagaccatgtactatctgcctgtcgatttctatcgttatttgattgggcgtgaggaccagtctgtcaatgagcaagtgatgattaagtgcattgaccagcaactcaaggtcaatcgactcttgrtagaccaacttgatttgtcccaagtgagtcatcccaaaatgcgagaatatctgctgaatcatattgaamtcacgacggtgatttccagtaccctgctcaaccgatctggaacagcggagcatctggcaaaaaaacgccaattgtggacctatattcagcagaaaaatccagaagtctttcaggctattcgtaagaccatgttgagccgtttgaccaaacattctgtcttgccagatcgcaaactgtccaatgtcgtctatcaaatcaccaaatctgtttatggatttaattaactaat

SEQ ID NO: 2781 - DNA, 333 bp, Streptococcus pneumoniae
  misc_feature (1)..(333): tiling:Spneumo1:WAN024CDI; Cluster includes WAN0244QX spr0 089||15902133|NP_357683.1|96329..96655|-|327 bp|Conserved hypothetical protein|S.pneumoniae|R6|NC_003098.1|ORF|111
atgtactttccaamatcytctgccttgattgaatttctcatcttggcygtactggagcagggtgattcttatggttatgagattagccaaaccattaagctvatcgctaatatcaaagaatccacactctatcccattctcaaaaaattggaaggcaatagctttctgacaacctattctagagagttccaaggtcgcatgcgcaaatactactccttgacaaacggtggtatagagcagctcttgaccctaaaagatgaatggrcactctatacagacaccatcaatggcatcatagaagggagtatccgccatgacaagaayykaactaat

SEQ ID NO: 2782 - DNA, 130 bp, Streptococcus pneumoniae
  misc_feature (1)..(130): tiling:Spneumo1:WAN0249XE; Cluster includes WAN024EB2-rc R 6.IG_1502||||1438166..1438295|-|130 bp|Between spr1455 (ph nA) (- strand) and spr1456 (cmk) (- strand)|S.pneumoniae|R 6|NC_003098.1|IG-rc|110
atgtagaaaagccgatagattgatatcggtttttttctaaatttgtcaaaatgctgattttagggtataatagttgctgttcgagaaattttgattttcaaagaatagtgaatgatgataaggagaaacc

SEQ ID NO: 2783 - DNA, 234 bp, Streptococcus pneumoniae
  misc_feature (1)..(234): tiling:Spneumo1:WAN024F7L; Cluster includes WAN0244G9 spr0 473|blpZ|15902517|NP_358067.1|476922..477155|+|234 bp|Hypo thetical protein|S.pneumoniae|R6|NC_003098.1|ORF|111
atgtataaacacttatttttcctagattccaaaactttagatcggttgacaccctatattctagtcttggcttctgacaccattgcttttaatgtttttgtgctaacctttgtatctgcggtggtttttaatttcctaaattccatgctagctttaatggctatattcataggggctggctatgtggtcggattttggttactaatactcaatgaaaatcaaagagcaaactag

SEQ ID NO: 2784 - DNA, 585 bp, Streptococcus pneumoniae
  misc_feature (1)..(585): tiling:Spneumo1:WAN024CKM; Cluster includes WAN023P75 pne5 3_20||||10372..10956|+|585 bp|Type 25F capsule operon, Gli mmer 2.02 orf prediction|S.pneumoniae||WAN01UCCQ|ORF|000
atgtataaagttatcaaacgatttatagatatagctttagcyttgctaggaattgtattattatcaccactatttttaggaattatagtgttcataaaattagaatctaaagggmctattttctttaaacaaaaaagaattgggctacataaaaaagaattttacattctaaaatttagaacgatgagaattgacactccttcagctgtccctacacatcttttaaaaaatccttatcaatggattacaaaggttggtaaagtcttacgtagaacctctctggatgaattgccacagatttggaatattttggtcggtcacatgtcgcttgtaggaccaagacctgccctttggaatcaatttgatttgattgaagaaagagacaaatatggagcaaatgatattttacctggtttaacaggttgggcacaaatcaatggaagagatgaattatctattccagtcaaagccaaatttgatggctactatgtgaagaactgttcatttgttttagattgtcgatgtgttgtagaaagttttttagtagtatttaagagatatgggcatcgagaaggtggtgcagat

SEQ ID NO: 2785 - DNA, 239 bp, Streptococcus pneumoniae
  misc_feature (1)..(239): tiling:Spneumo1:WAN024EZF; Cluster includes WAN024451 spr0 877|secG|15902921|NP_358471.1|867599..867832|+|234 bp|Prot ein-export membrane protein secG|S.pneumoniae|R6|NC_003098 .1|ORF|111
atgtataacctattattaaccattttattagtattatctgttgtgattgtgattgcaattttcatgcaaccaaccaaaaaccaatccagcaatgtatttgatgccagttcaggtgatttgtttgaacgcagtaaagctcgcggttttgaagctgtaatgcagcgtttgacagggattttagtctttttctggctagccattgccttagcattgacggtattatcaagtagataactaat

SEQ ID NO: 2786 - DNA, 2285 bp, Streptococcus pneumoniae
  misc_feature (1)..(2285): tiling:Spneumo1:WAN024G5Q; Cluster includes WAN02440X spr1 025|pulI|15903069|NP_358619.1|1005556..1007835|+|2280 bp|T hermostable pullulanase|S.pneumoniae|R6|NC_003098.1|ORF|11 1
atgtataactaccctatgcgcattcattaccatcgtaagaatggagaatatgacacttgctcctttgtaaaaagtcaggatcaacgaattgatttgctaacctacaaagaagattattttggagctttatttagctttgaacacccaagttcacatgttatagaaagcttgaattttgtggttcatacaggtcaaactagtaaagaatattctatccgttttaatcactatcccctattracagaggtctggattttggaaggcgatgataggatttattactctgaaaatcctgctattgccagtcctttctataaaaatcaaaatcctttygcctttgataaggccattaacagtgctagttttgaycatcattggggttaccaaggagaattgggttgccgtgtagaggacaatcaggctcatttttcyctctggtcacctacagcgacaraagtgcaagttgtcgtttatgaatcagctgctaatgatgcacccgtttggaagacttttgagatgaaaagaggcaatagctactcttataatcataaggacaatacaatcggtgtctggagtttggatgttgarraagatttggtaggtaagrcttatcagtatcaagtccaattccctcatcaccaaacactgacacgtgatccttatacaatcgcgaccagccctgatggcaaacgttcagctattctgagccatgtagaaaagcaagttgaaaacttcgaggttaagcacggttcggaggctacttggcgcttggaaaatccatgtaaggcagttatctgtgaaatgcayattcgtgatttgactaaatcacctacatcgggtgtagatgaacatcttcgaggaactttcttgggtgctgctcaggctggaacagttaaccaatacggccagtcaactgcttttgattacatcaagaagctgggctacaattatgttcaattgcaaccaattgcagaccgtcataaagaatacgatgaggatggaaatgtaacctacaactggggttatgatccacaaaactataacgcgccagaaactagtttttcaactaatccagatgatccagctcaggtcattcgtgatttgaaggtgatggtycaascttatcacgatgcgggtattggagtcattatggatgtagtctataaccataccttctcagttgttgatgcaccattccaaacaacagtccctgattactattatcgtatgaatccagatggtaccttccagaatggaacgggtgttggaaatgaaacagccagtgaacacgaaatgtttcgcaagtatatgattgattctcttctatactgggtgcaggaatataatattgacggcttccgttttgacttgatggggattcatgatgtcaagaccatgcagatgattcgtcaaagcttggatgaaatcgactccaacattatcctctatggagaaggatgggatatgggaacaggtcttrccccttatgataaggccaagaaggacaatgcctaccagatgccaaatattggtttctttaatgacaatcagcgcgatgctgtcaaagggggagaagtttatggtgctatcaagtcaggttttgtcagtggtgctgcgacagagccaattctagctaaagcaatcctaggaagtcgtgaattaggaasctatacacatccaaatcaggtgcttaactatgtagaagcccatgacaattacaatcttcacgatttattggcaacccttcatccagaccaaagttcagagcaaatcatgcgcaaggtcgaaactgccacagccatgaatctgctcatgcaggggatggcctttatggaaatcggtcaagaatttggtcgtaccaaactggttgcgactggtgaaaatggtgagttgacccatgatgatagagagcgtgcgatgaatagctataatgctcctgacagtgtgaaccaagtgaactggaacttgattaatgagcgtcaagacagtattgagtttatccgtcaagtcatccgattgaagacaaaaactggtgccttttcttactctagctatgatgaaatttaccatcatgtctttgtgcattctgcgattgaacatagcggctrccttatytatgaagttcacggcaaagaacacctctkggtrgttgtgaatgctaaatcagaaccctatcaatttgaaaatgcaggaaatttagctatgttggtaaccaacagtcgctcaaaagaagataatgttttaaatgatattagtctagctgtcttgagtgttttataactaat

SEQ ID NO: 2787 - DNA, 326 bp, Streptococcus pneumoniae
  misc_feature (1)..(326): tiling:Spneumo1:WAN024CBK; Cluster includes WAN023MAT 3124 70_271||||136892..137155|+|264 bp|EGAD orf prediction|S.pn eumoniae|R6|NC_003098.1|ORF|102
atgtataacttatktgcttttgctatcggagytcgyttgktagcttttatygtttttgttgcttgcgtttatgsrggraatcttcyatttgccaaactggaacgaygacaaaccaagttcttgtggaaaatkacctttgtgactctctactcgcttyttctcctcctcrtgacctatgtcgtttggtttgtattttactttgrattaaatgcttarmtrmyctgtttatgctggggttttttgtttgggaatgtagagatagtagatttacgacacgaaaattccaccccatctatcaagatgaggtggtctttgcatttttctaa

SEQ ID NO: 2788 - DNA, 1367 bp, Streptococcus pneumoniae
  misc_feature (1)..(1367): tiling:Spneumo1:WAN024G4G; Cluster includes WAN024406 spr1 052||15903096|NP_358646.1|1047414..1048775|-|1362 bp|Conse rved hypothetical protein|S.pneumoniae|R6|NC_003098.1|ORF| 211
atgtataagacaaagtgtttacgagagaagttrgtattatttttaaaaattttcttcccaatcctgatytaccaatttgccaattattctgcctcttttgttgatactgcaatgacaggtcaatacaacactatggacttggctggtgtatctatggcaaccagtatctggaatcctttctttacatttctaacagggattgtgtcagccttggtgcctatcattggtcaccatcttggtcgaggmaaaaaggaagaagttgcgtctgatttttaccaatttatttatttggccttgggcctatctgtggtcttgctggggatggtacttttcttggcaccaayaatcttgaatcatattgggttagaagcagcagtagcggcagtagcggttcgctatctttggtttttatctatcgggattatccccttgttgctctttagcgtcattcgttccttgctggattcgctgggcttgaccaaactgtccatgtacctcatgcttttgttactccctctcaatagcggatttaactatctcttgatttacggtgcctttggtgttccagaactgggaggggctggtgctggtttaggaacatccttggcctactgggtcttgcttgggatttctgttctggttttatttaaacaggagaagctcaaagccttacaccttgagaaacgaattcyacttaatatggataaaattaaggaaggagttcgtttaggtctgcctattgggggaactgtcttcgcggaagtggctrtcttttcagtggttggcttgattatggctaagttttcgyccttgattatagctagtcaccagtcagctatgaacttttcaagtcttatgtacgcctttcctatgagtatctcatcggctatggctattgtcgtttcctatgaagtgggagccaagcgatttgatgatgcgaaaacctatattggtctaggaagatggactgccctcatttttgcggccttcaccttaaccttcctttacatttttaggggaaatgtggccagtctttatggtaacgacccaaaatttatcgatttgacagygcgttttttaacttatagtcttttcttccagttagcagatacctttgcggcgccgcttcagggaattttgcgggggtataaggatacagttattcctttttaccttggtttgcttggttattggggcgtagcaatccctgtgsstacgctatttgattccctaacagattttggagcttattcttactggatcggcttgattattagtttgattgtgagcggggcgctctaccgttggcgtttaactgtgattatgaagagatttgaatctttagcaaaatccaaaygctaactaat

SEQ ID NO: 2789 - DNA, 401 bp, Streptococcus pneumoniae
  misc_feature (1)..(401): tiling:Spneumo1:WAN024CTD; Cluster includes WAN0243HK spr1 724|ssbB|15903766|NP_359316.1|1704481..1704876|-|396 bp|Si ngle-stranded DNA-binding protein|S.pneumoniae|R6|NC_00309 8.1|ORF|111
atgtataataaagttatcwtgattggrcgtttracgtctacaccagaattgcacaaaaccaacaatgacaagtcrgtagcgcgagcaactatcgctgtsaaccgtcgttacaaagaccaaaacggtgaacgtgaagytgattttgtyaatatggtyctatggggcagactagcagaaactttggcaagctacgcaaccaaaggtagtctcatttccgttgatggagaattgcgtacccgtcgctttgagaaaaatggycaratgaaytaygtraccgaagtmcttgtvacaggattccaactcttggaaagtcgtgcycaacgtgcyatgcgtgaaaataatgcaggccaagatttggcagatttrgtcttggaagargaagaattgccattttaactaat

SEQ ID NO: 2790 - DNA, 1255 bp, Streptococcus pneumoniae
  misc_feature (1)..(1255): tiling:Spneumo1:WAN024FWA; Cluster includes WAN02413M |cap 3B||CAA87404.1|||1254 bp|Synthase of the type 3 pneumococc al capsular polysaccharide|S.pneumoniae||Z47210|ORF|000
atgtatacatttattttaatgttgttggatttttttcagaatcatgattttcatttctttatgttgttttttgtctttattcttattcgttgggcggttatatattttcatgctgtcagatataagtcctacagttgtagtgtaagtgatgagaagttatttagttctgtaattatccctgtcgtggatgaaccacttaatctttttgaaagtgtactgaatagaatttccagacataaaccatccgaaattattgtggttattaacggcccaaaaaacgagagacttgtaaaactttgtcatgattttaatgaaaaattagaaaataatatgactccaattcaatgttattacactcctgttcctggcaagagaaatgctatcckckttgggctggagcatgtggattcgcagagtgatattacagttctagtagatagtgatacagtatggacgcctagaaccttgagtgagttgctgaagccttttgtttgcgataaaaaaataggtggggtaacgacaagacaaaaaattcttgaccctgagcgtaatctcgtgacaatgtttgctaacttgttagaggaaattagggcagaaggaactatgaaagcaatgagtgtgactggtaaagtagggtgcttacctggtcgaacaattgcttttagaacakakaktskcagagagtgtatacawgagtttatagaatgagactttcatgggatttcataaggaagtttctgatgatagaagtcttacaaatttgactttaaaaaaaggctataaaactgttatgcaggatacttctgttgtgtatacagatgctcctacaagttggaaaaagttcattagacagcaactaaggtgggcagaaggttctcagtataacaatctaaagatgactccttggatgattagaaatgcccctcttatgttttttatttattttacagatatgattttacctatgctacttattagctttggtgtgaatatattcctgttgaaaatattaaatataactacaattgtttatacagcttcatggtgggaaattattttatatgttcttttgggaatgatttttagctttggaggaagaaactttaaagctatgtctagaatgaagtggtattatgtatttcttattcctgtttttataatcgttttgagtataattatgtgccctattaggctattaggacttatgagatgttctgatgatttagggtggggaactaggaatttaacagagtga

SEQ ID NO: 2791 - DNA, 597 bp, Streptococcus pneumoniae
  misc_feature (1)..(597): tiling:Spneumo1:WAN024CKN; Cluster includes WAN023PO0 pne2 5_8||||5114..5710|+|597 bp|Type 12F capsule operon, Glimme r 2.02 orf prediction|S.pneumoniae||WAN01UCBP|ORF|000
atgtatagagtaacaaaacgattaggggatattttactttctttaataggaataatagtactgtttccagtgtttattgtaattgcaattgcgataaacactgattcggagggtccgattatatttaaacaaaaacgatttrggatatacaaggaacctttttatatcctgaaatttaggtccatgaaaataggagcaccgaaaaatgtagctccacggaacttggataatccagaacagtggattaccaaagtgggagctttcttaagaaaaacatctttggacgaactgccacaattatggaatattcttattggtaatatgagcattgtaggacctaggccagcaggtataaatgagcttgatttgctcaccgaaagagaaaagtttggtgcgaatgatgtcttacctggattaactggatgggcacaaattaatgggcgagatactttgtcaatagagatgaaggcagaagcagatggttattatgtgaaacatatgtcgttaagcatggatcttagatgtatcattaggacaatcccctacgtattaaaacgtaagggaattgtggagggcagtggtaagaaagagttggat

SEQ ID NO: 2792 - DNA, 597 bp, Streptococcus pneumoniae
  misc_feature (1)..(597): tiling:Spneumo1:WAN024CKO; Cluster includes WAN023POS pne2 4_8||||5113..5709|+|597 bp|Type 12B capsule operon, Glimme r 2.02 orf prediction|S.pneumoniae||WAN01UCJ2|ORF|000
atgtatagggaaataaaacgattaggtgatattttactttctttcataggaataatagtactgtttccagtgtttattataattgcaatcgcaataaagcttgattcaaaaggtccagtaatatttaagcaaaagcgatttggacttcataagaaatcgttctatgtcttgaagtttcgaactatgaaggttgaatcgccaaaatatgtggcgactcgagacttagataaaccagaacagtggattaccaaagtaggagcttgtttgcggaaaacatctttagatgaactgcctcaactgtggaacattcttgttggtgatatgagtgttgtaggacctaggcctgtagctataaatgaacttgatttgataaaagaaagagaacagtatggtgccaatgatatcttaccaggattaactggatgggcacaaattaatggacgtgataatttgtcaacagagatgaaggcagagatagatggttattatgtaaaacatatgtcgttaagaatggatcttagatgtatccttagaacaatcccctacgtattaaaacgtaagggaattgtggagggtagtggtaagaaagagttggak

SEQ ID NO: 2793 - DNA, 503 bp, Streptococcus pneumoniae
  misc_feature (1)..(503): tiling:Spneumo1:WAN024FP5; Cluster includes WAN024459 spr0 869||15902913|NP_358463.1|862957..863454|+|498 bp|Conserve d hypothetical protein|S.pneumoniae|R6|NC_003098.1|ORF|111
atgtatattgaaatggtagatgaaactggtcaagtttcaaaagaaatgttgcaacaaacccaagaaattttggaatttgcagccmaaaaattaggaaaagaagacaaggagatggcagtcacttttgtgaccaatgagcgtagtcatgaacttaatctggagtaccgtracaccgaccgtccgacagatgtcatcagccttgagtataaaccagaattggaaattgcctttgacgaagaggatttgcttgaaaatycagaattggcagagatgatgtctgagtttgatgcctatattggggaattgttcatctctatcgataaggctcatgagcaggccgaagaatatggtcacagctttgagcgtgagatgggcttcttggcagtacacggctttttacatattaacggctatgatcactayactccggaagaagaagcggakatgttcggtttacaagaagaaattttgacagcctatggactcacaagacaataactaat

SEQ ID NO: 2794 - DNA, 1661 bp, Streptococcus pneumoniae
  misc_feature (1)..(1661): tiling:Spneumo1:WAN024F24; Cluster includes WAN024481 spr0 769|dnaX|15902813|NP_358363.1|763092..764747|+|1656 bp|DNA -directed DNA polymerase III chain|S.pneumoniae|R6|NC_0030 98.1|ORF|111
atgtatcaagcactttatcgaaaatatagaagtcaaaacttctcccagttagttggtcaagaagttgtggctaagactcttaaacaagcggtggagcaagagaaaataagtcacgctyatcttttttctggtcctcgtggaacgggaaaaaccagtgttgctaaaatctttgccaaggctatgaactgtcccaatcaagtgggtggcgaaccttgcaataactgctatatttgtcaagcagtgacggacggtagtttagaagatgtcattgaaatggatgcagcttctaataatggggtagatgaaattcgcgaaattcgtgataaatctacctatgcgcctagccttgctcgttataaggtttatatcatagatgaggttcacatgctgtctacaggggcttttaatgccctcytaaagacgctggaagaaccaacacagaatgtagtctttattttggccactactgaattgcacaagattcctgctactattctatcccgtgtgcaacgttttgagtttaaatcaattaagacacaggatattaaggaacatattcactatatcttagaaaaagaaaatatcagttctgaaccagaggctgtggaaatcattgccagrcgggcggaaggtggaatgcgggacgccttgtctattttggatcaagccctgagtttgacacagggaaatgagctgacgactgctatctctgaagaaattactggcaccattagcctaycagccttggatgattatgtggcggccttgtctcaacaggatgttcccaaagctttgtcttgcttgaatcttctttttgacaatggtaagagcatgactcgttttgtgaccgatcttttgcactatttaagagacttgttaattgttcaaacagggggagmaaatactcatcatagttcagtctttgtagaaaatttggcrcttcctcaaaaaaatmtgtttgaaatgattcgcttagcaacagtgartttagcagatattaagtctagtttgcarcccaagatttatgctgaaatgatgaccgtccgtttggcggaaatcaagyccgaaccagctctatcaggagcggttgaaaatgaaattgctacgctgagacaggaagttgcccgtctcaaacaagagctttctaatgyaggtgcggttcctaaacaagttgcaccagctcctagtcgaccagctacgggcaaaacagtctatcgtgtcgatcgcaataaagtgcaatctatcttacaagaggccgtcgaaaatcctgatttarcacgtcaaaatytaattcgtttgcagaatgcmtggggagaggtaattgaaagtctaggtgggccggacaaggctctgctagytggttctcaaccggttgctgccaatgaacaccatgctattcttgcttttgagtctaacttcaatgctggtcaaactatgaaacgagacaatctcaataccatgtttggtaatatcctcagtcaggcggcaggtttttcacctgagattttagctatttccatggaggaatggaaagaagttcgcgcagccttttcagccaaagccaaatcttctcaaactgaaaargaagtagaagaaagcctgattccagaaggatttgaatttttggctgataaagtgaaggtagaggaagactaactaat

SEQ ID NO: 2795 - DNA, 201 bp, Streptococcus pneumoniae
  misc_feature (1)..(201): tiling:Spneumo1:WAN024CIQ; Cluster includes WAN0244TB spr0 003||15902047|NP_357597.1|2722..2916|+|195 bp|Hypothetical protein|S.pneumoniae|R6|NC_003098.1|ORF|111
atgtatcaagttggaaattttgttgagatgaaaaaaycacacgcttgtacaatcaagtcractggtaaaaaggctaatcgttgggaaattacacgtgtaggagcagatatcaaaataaaatgyagtaattgtgagcatgttgtcatgatggggcgatatgattttgagcgaaaaatgaataaaattattgacykaactaat

SEQ ID NO: 2796 - DNA, 1467 bp, Streptococcus pneumoniae
  misc_feature (1)..(1467): tiling:Spneumo1:WAN024CSW; Cluster includes WAN0243TY spr1 277||15903320|NP_358870.1|1272232..1273692|-|1461 bp|Conse rved hypothetical protein|S.pneumoniae|R6|NC_003098.1|ORF| 331
atgtatccagatgatagtttgacattgcacacggacttgtaccagatcaacatgatgcaggtttactttgaycaagggattyacaataagaaggcggtctttgaggtgtatttccgccaacagccttttaagaacggctatgcggtttttgcaggtttrgaaagaattgtgaactatcttgaagrcttgcgtttttcagatagtgatatagcctatttggagtcgcttggttatcatggggcgttcttggattaccttcgcaatttcaagttggagttgaccgttcgttctgcccaagaaggggatttggtttttgctaatgaaccgattgtgcaggtggaaggacctctascccaatgtcagttggtcgaaacggctcttttgaacatcgtcaactaccagacyttggtggcgacraaggcagctcgtattcgttyggttatcgaagatgaacccttgatggagtttgggacacgtcgggctcaagaaayggatgcggccatctggggaacacgcgcagckgtgattggtggcgccaatggaaccagcaacgtgcgtgcgggtaagctctttgacattcctgttttgggaacccatgcccatgccttggtacaggtttatggcaatgactatgargctttcaaggcttacgctgcgacccacaaaaattgtgtctttcttgtggatacctatgayacccttcgcatcggtgtaccagctgccattcaggtggcgcgtgagctgggtgatcagattaactttatgggtgtgcggattgactctggggatattgcctacatttctaagaaagtccgtcagcaactggaygaggctggatttacagaggctaagatttatgcttctaatgatytrgaygaaaatacyatcctyaayctcaagatgcaaaaggccaagattgatgtctggggygtgggtaccaagctgattacagcytatgaccagccrgctcttggkgcrgtttacaagattgttgcaatcgaagatgaaamyggycagatgcgcaatacgattaagctgtctaataatgckgaaaaagtktckacgccaggtaagaagcaggtgtggcgcattaccagtcgtgaaaaaggyaagtcagaaggygaytayatcacttatgatggtgtggatattagcgacatgacagaaatcaagatgttccatccgacctatacatacatcaagaagacggttcgtaattttgatgcygttcctctcttggtggatatcttcaaagaaggwatattagtttacaacttgcctagtttgactgacattcaggattatgcccgtaargaatttgacaagttgtgggatgagtataagcgtgtgctcaatccgcagcactatccagtggatttggcgcgtgaygtatggcaagataagatggacttgattgataagatgcgcaaggaagcccttggtgaaggagaagaagaaykaactaat

SEQ ID NO: 2797 - DNA, 856 bp, Streptococcus pneumoniae
  misc_feature (1)..(856): tiling:Spneumo1:WAN024DAF; Cluster includes WAN0243ZN spr1 072|lacT|15903115|NP_358665.1|1070696..1071532|-|837 bp|An titerminator protein|S.pneumoniae|R6|NC_003098.1|ORF|111
atgtatcraattctaaatccaatgaatcacaatgtctcgcttgtcagaaatgataagggagaagaggtgattrtaattggtaagggrattgcattcggaaarargaagggrgatttgattgctgaaaatcakgttgagaaaatctttcggatgaagaccgaagagtccagagaaaactttatggctcttctcaaagatgttccgcttgattttatcacagtgacctatgaaatcattgataagctatcaaagaaatatcattatccgattcaagagtatctctatgtaaccttgacagatcatatttactgttcttatcaagctctaactcaaggaaggtacaaggatagtaatctgccrgatatttcygctaagtatcctgtcgcttttcaaatcgcaaatgaagcttttgaaatttacygtcagaagctagcagatcattttcctgaggacgarattattcggattgcttatcatttcatyaatgcygaaggtgaaaatgaagtggaacttgtggagtcgattgataagaggaaagaaattctcaggaatgttgaagaagtkytaamggrytatgcaattcaacgaacyaaaaaraataaycatttctatgatcgctttatgatycatttgaattatttcttggattatttagacagatctagagatgataaccaatcacttctggatatggaagatcatattaaacaatcctatccaaaagccttcgagattggttccaagatctatgatgtgattacgcaacatacgggtcttgatttgtataaaagtgaacgagtttatctagttctacatatccaacgtttattgtcataacwaatttatttaaaactat

SEQ ID NO: 2798 - DNA, 303 bp, Streptococcus pneumoniae
  misc_feature (1)..(303): tiling:Spneumo1:WAN024D6O; Cluster includes WAN0243OF spr1 476||15903519|NP_359069.1|1456835..1457137|-|303 bp|Hypoth etical protein|S.pneumoniae|R6|NC_003098.1|ORF|111
atgtatctcgttatagraattgtattagcctttatagtgtcattttggaaggataatagaagtttgtggaatccagtattatttttattatccctcatttcaagttatttttatctatcctaccttttttataaaaatggatacgagaatgttcagttagctttttatrtatttgcctttgtcttacttccttttttgctttttctaagtggcatctttttaatctataatggggtcattttgttgaarcgagagggacgttccaagcccmattatctytcaatgctmtttgatttttattga

SEQ ID NO: 2799 - DNA, 411 bp, Streptococcus pneumoniae
  misc_feature (1)..(411): tiling:Spneumo1:WAN024FQU; Cluster includes WAN023L4X 3128 20_2406||||1287740..1288150|-|411 bp|EGAD orf prediction|S .pneumoniae|R6|NC_003098.1|ORF|110
atgtatctggtcttggcaattggattttctattgcctttgtttctgccgcttttgcaatgtcatctgatatattagatgatataatgagtagtggcayagaaacatattcaagatatttgactgggtttttaaaayttatccctcttactctcatagccattttgatgtttttcttctcctccttaaaagatgggaagaatctaaacataaccgcaataggtatggatacattctttgaaatcttaagcttatccatcgatgaaattattgcgcctacatccgaggtctttatcataaagcttgctgccataaatggtaaaataaacattctaataacaataggtatactcaaaaacatcttaactatagggtttaattcagatarcaccataaaattaggcaaggagtaa

SEQ ID NO: 2800 - DNA, 851 bp, Streptococcus pneumoniae
  misc_feature (1)..(851): tiling:Spneumo1:WAN024ETW; Cluster includes WAN0244HX spr0 413|bacA|15902457|NP_358007.1|409666..410511|+|846 bp|A li pid kinase; may confer bacitracin resistance by phosphoryl ation of undecaprenol|S.pneumoniae|R6|NC_003098.1|ORF|111
atgtatcttattgaaattttaaaatctatcttcttcggrattgttgaaggaattacggaatggttgccgatttccagtacaggtcayttgattttagcagaggarttyatccaataccaaaatcaaaatgaagcctttatgtccatgtttaatgtcgtgattcagcttggtgctattttagcagttatggtgatttattttaacaagctcaatccttttaaaccgacyaaggacaaacaggaagttcgtaagacttggagactatggttgaaggtcttgattgcyactttrcctttacttggtgtctttaaatttgatgattggtttgatacccacttccataacatggtttcagttgctctcatgttgattatctacggggttgccttcatctatttggaaaagcgcaataaagcgcgtgctatcgagccaagtgtaacagagttggacaagcttccttatacgaccgctttctatatcggactcttccaagttcttgctcttttaccagggactagccgttcaggtgcaacgattgtcggtggtttgttaaatggaaccagtcgttcagttgtgacagaatttaccttctatcttgggattccygttatgtttggagctagtgccttaaagattttcaaatttgtgaaagccggagaactcttgagctttgggcaattgtttttgctcttggtcgcgatgggagtagcttttgcggtcagcatggtggctattcgcttsttgaccagctatstgaarawacacgacttcacccttkttggtaaataccgkatcgtgcttggtagtgttttgctactttacagttttgtccgtttatttgtataactaat

SEQ ID NO: 2801 - DNA, 114 bp, Streptococcus pneumoniae
  misc_feature (1)..(114): tiling:Spneumo1:WAN024AZU; Cluster includes WAN023S2S cont ig_1628_28||||22488..22601|-|114 bp|Glimmer 2.02 orf predi ction|S.pneumoniae|670|WAN01UD9N|ORF|001
atgtatgaagaaccagaagtagctccartgcatccgayaggtccaacaccagctacagaaactgttgattcaryaccrggatttgaagcaccgcaagaatcygttacaatttta

SEQ ID NO: 2802 - DNA, 75 bp, Streptococcus pneumoniae
  misc_feature (1)..(75): tiling:Spneumo1:WAN024DQR; Cluster includes WAN023SLV NC_0 03098.1_633||||500593..500667|+|75 bp|Glimmer 2.02 orf pre diction|S.pneumoniae|R6|NC_003098.1|ORF|101
atgtatgattttcatttctttagtgagactgttgccattatcacattcgaatcacacaaaataaaaaaattttta

SEQ ID NO: 2803 - DNA, 642 bp, Streptococcus pneumoniae
  misc_feature (1)..(642): tiling:Spneumo1:WAN024DGA; Cluster includes WAN0244CI-5 sp r0608||15902652|NP_358202.1|620916..621929|+|1014 bp|Hypot hetical protein|S.pneumoniae|R6|NC_003098.1|ORF|110
atgtatggagtgaggaaacttattgtcgctgattacgatataatagaaccatcaaatttaaataggcaaattctttatacagagtcgratgttggtaaggagaagattaatgttctttctgaaaaaatacacaagtataattcagatgttcaggtagtacctatttctattaaagtttcttcagtagaagaattagaaaaaattgttgcggaatatgggagtatagattttatcgttaaagcaattgatacgcccattgatattataaaaattgtcaatcaatttgctgtatcgcataagatatcctacatatcaggagggtttaatggatgctatcttattattgataatatatatatccctaccatcggttcttgctttggttgtcggaatataaacaaagatataaataagtacactttatctgataagacaaagtggccgactacaccagagatgcctgctattttgggagggataatgactaatttaataattaaaatatttctgggatgttataatgaaatcctaatagataacgcttacgtttataatatgagaaatcatgctctaagtcaagaaaaatatgttctggaaaacggagaatgtccaatttgtaaaaaaataataaagykaactaat

SEQ ID NO: 2804 - DNA, 1334 bp, Streptococcus pneumoniae
  misc_feature (1)..(1334): tiling:Spneumo1:WAN024CIE; Cluster includes WAN0244ST spr0 021|purA|15902065|NP_357615.1|22635..23921|+|1287 bp|Adeny losuccinate synthetase|S.pneumoniae|R6|NC_003098.1|ORF|111
atgtatgtgagaaaggaagagcctgakggctcagacaarattatgacttcagttgttgttgtaggtacccaatggggtgatgaaggtaaagggaagattacagacttcctttcagcgaatgcagaagtrattgcacgttaccaaggtggtgataatgctggtcacacgattgtgattgacggtaagaaatttaagttgcacttgattccatctgggattttcttccctgaaaaaatatctgtcattgggaatggtatggttgtaaatcctaaatctcttgtaaaagagttgagctatcttcatgaggaaggtgtaacaactgataacttgcgtatttctgatcgtgcgcatgttattttgccttatcatatcgagttggatcgcttgcaagaagaagctaagggcgacaataagattggtacgacaattaagggaattggtccagcttatatggacaaggctgctcgtgttggaattcgtattgcagatcttttagataaagatattttccgtgagcgtttagaacgtaaccttgctgaaaagaatcgtctttttgaaaaattgtatgacagtaaagcgattgttttcgatgatatttttgaagaatattacgaatatggtcaacaaatcaagaaatacgtgatagatacatctgttatcttgaatgatgcgcttgataatggcaaacgtgtgctttttgaaggtgcacaaggtgttatgctagatatcgaccaaggtacttatccatttgttacgtcatcaaaccctgtagctggtggtgtgacaattggttctggtgtcggtccaagcaagattgacaaggttgtaggtgtatgtaaagcttatacgagtcgtgtaggagatggtcctttcccaactgagttgtttgatgaagtgggagaacgtatccgtgaagtgggtcatgartatggtacaacaactggtcgtccacgtcgtgtaggttggtttgactcagttgtgatgcgtcatagccgtcgtgtttctggtattactaacctttctttgaactctattgatgttttgagcggtttggatactgtgaaaatctgtgtggcctatgatcttgacggtcaacgtattgactactatccagctagtcttgarcaattgaaacgttgcaagcctatctatgaagagttgccaggttggtcagaagatattaccggagttcgcaatttggaagatcttcctgagaatgcgcgtaactatgttcgtcgtgtgagtgaattggttggcgttcgtatttctactttctcagtaggtcctggtcgtgaacaaacaaatattttagaaagtgtttggtcctaactaat

SEQ ID NO: 2805 - DNA, 75 bp, Streptococcus pneumoniae
  misc_feature (1)..(75): tiling:Spneumo1:WAN024EVP; Cluster includes WAN023SNG NC_0 03098.1_39||||28542..28616|-|75 bp|Glimmer 2.02 orf predic tion|S.pneumoniae|R6|NC_003098.1|ORF|100
atgtatmrcttgtgcttttcacaagattttccatctaccattgtagcgctttttgcactatttttcaatcaaaaa

SEQ ID NO: 2806 - DNA, 473 bp, Streptococcus pneumoniae
  misc_feature (1)..(473): tiling:Spneumo1:WAN024CI5; Cluster includes WAN0244SS spr0 022||15902066|NP_357616.1|24122..24589|+|468 bp|Conserved hypothetical protein|S.pneumoniae|R6|NC_003098.1|ORF|111
atgtattatacgcttgaagaaaaagaagtctttatgagggaggctttgagagaggctgagattgctcttgaacacgatgaaattccaattggttgtgtgattgtcaaagatggggaaatcattggtcgtgggcataatgcgcgtgaggaattacagcgagcggttatgcatgcggaaatyatggctatagaggatgcgaacttgagtgaggagarctggcgcttgctggattgcacactttttgtgaccattgaaccttgtgtcatgtgtagtggrgcgmytsggcttgcccgyattccaaatgtggtctatggggctaaaaaccagaaatttggcgctgctggragtttgtacratatcttgacagatgagcgtctyaaycatcgtgtrgaggttgaaayrggaattttggaagatgaatgygcagctatcatgcaggayttttttagaaatagacggaaaaaataactaat

SEQ ID NO: 2807 - DNA, 1509 bp, Streptococcus pneumoniae
  misc_feature (1)..(1509): tiling:Spneumo1:WAN024CC4; Cluster includes WAN0240CX |||A AC98428.1|||1182 bp|integrase|S.pneumoniae||L29324|ORF|000
atgtattatgtaactaaaacaaattcaaaagggcarcccttatatcaagtggttgaaaagtacaaagatccactaacaggaaagtggaaatcagtaactgtaagttayactargaatactagtagggckaggaaacaagctgaaagagaggttcttgataaratagatagactaactacttcatttgaaagtcagtwtagycctgaactgattacaacatttggagagttaaaagaaaattggtttcagacttggtgtgtctctgttaaaccacaaacaattcagagagaactactggtkatgaagcgtcttgggaaaattataggagatgattttttrttagacaggattactccacttctgatgaaaaawagtctcaataaatatttagaaatrtatgatssatcrccttcaacaatgactcatataaaaagtacttgtaataagatttttaatcatggtgtgttatataatgtcattaagttytctccwatgactgcggtaaaactagatatttcactagagaaaaggcgtaaagcaaaagaaagacatgattctaaatttctagaaatccatgaattacaygcattttttgatgtrttamgccaatgcagaaatgcaaactattatgatcttgctatagtattgttgcttacaggtattcgaattagtgaagcwgcwtttttaccatcagatattgattttgaaaaaggaatcttgcatattgataargcacttcaatatcattgtttaaaagttraacaatttcaytttgatacaactaaaacactcaattcaattagagaagtagctttgcctgaagctgcaagcgaagctattaaaaggacaatacagagaaataaagagtttgatgmttatatgragaaacatccctgtcctgcttttacacattctgaaagtgtatttagaacagaatacggctctccaataacatcaagcacttttcgtcaaattttgaaacgaatagaaggaaaattattgacaaattgtttaagtgactatggttttaagtgggtaaaacatgttactccccattcgtttaggcatatgcatattagttaccttcaaagyaatgagatgcacatagcagtgaaagatattatgactagagtaggacaygctaactttgagacaacaatgggctatacacataatataaatcgttcacaagaaaatactgtaaaagccttaaatcaatttgtagaaaatcacaatttccattttgaagaattgaaaagttatacctgtaaatattccagaatrattgaaaaattcattgaaactagtgataatagcaataaagtagaattaagtgtygatgagttcaaagacttgttacatcttagtccacgttactcacctaaaaatattrtttcraatttactattaaaaatcaaaaaagatattgtcaaataccacccacagtttgatataaagattgtgaaatcaagygagaatcaaatcagaggtttttccattgcatggtag

SEQ ID NO: 2808 - DNA, 1587 bp, Streptococcus pneumoniae
  misc_feature (1)..(1587): tiling:Spneumo1:WAN024COI; Cluster includes WAN0241YZ SP17 62||15901593|NP_346197.1|1663957..1665537|-|1581 bp|hypoth etical protein|S.pneumoniae|TIGR4|NC_003028.1|ORF|021
atgtattattttattccagcttggtatgggtcagaaagaacatggcatgcagatatcactccatggtatttttctcattttcgtctagagtttgatgatacctttcaccagatycggctctttcaagagcaagatatagattctcgtctattagtattagcttaccagcctcatctacgttattttttatatagacatggtgtgttagaaayggatacttattccgtttttgatgttatgcaagattttcataatctccatacccaagttttaagcattagagatattgagtgggatgatgactgtgaatttatttatagtccctttacgattatcgttcaaaaaaatgggaagaaatttgctaaggttgaacatggagttgaaggcttcatcagtgatatacagtattttgaaccraatggtcaaatacatatgcaccatatcrtggatgatcgwgggtttgtatcgagcattatcttttttgaagatgggcaagcagcctatcaagaatatytgaacctcaagggagwktggcaattyagagagcgtttaaaagaaggaggacaggtagaagtcaatccaattttgggttatcgctttaaaatgcttacctatcaaaatatgggagatctggtggcagaattttttgagaattatctgcaaacgtatgtgaaggatcaggatatttttatgcttccttctcattctcatcatgaccagttggtactagatcgtttacctagtactaatcctaaactgttgagtctgttcattggacgtaatcctcaagatacctttagggatttagatgtaacttttgaaaaatcggatttgattttggtggatagagaggatagtttacgattgttgcaggagttgtatcctgaacgaatgcatcaatgttatcatttatcatcttttgacacccgattacgattgggacgaagccaaactaagaaagaatccatcatttattttcaactggattttgagcaggggattgataatcaagctctgcttcaagtcttgtcctttgtcgctgaaaataaggatactgaggtgatttttggagcctttgctgctagtcaggagcaaatgaatgaggttgaagggattgttgagtctttcatccaagaaaacattcaatccgaaaatctgggaaaggcgattgattatggtgatgcagaaaatcctctggaagaaaatcaacaccaggacttacgcttacagtttgttaacttgaatgatgagttagatttgataaaaacactagaatttgtccgtttgattgtggatttaaatagacatcctcatctctacacacagattgctgggattagtgcaggaattcctcaaatcaacctagttgaaaccgtctatgttgaacatttaaaaaatggttatttgttagcagatgttacagaattttctaaggctgcacattattacacagataggttgaaggagtggaatgagtccttgatatattcaattgataagattaaggagcacacaggacaacaatttcttggaaaattagagaaatggatagaggaggttaaaaatgtcaaaggaactctaactaat

SEQ ID NO: 2809 - DNA, 245 bp, Streptococcus pneumoniae
  misc_feature (1)..(245): tiling:Spneumo1:WAN024CO6; Cluster includes WAN023IM0 8604 0_2834||||1608725..1608955|+|231 bp|EGAD orf prediction|S. pneumoniae|TIGR4|WAN01UC25|ORF|010
atgtatttaaagataaaggttaaaactaaaccggggacagtcatcaataacaagagtttttgtttcttgattctttcccaaagagaaacttgcttcgctttgctattcatagcaacctccttttttgaaacgtttcatttttttctagaaaagatagcgcttggcgctgtctctttatttcttttttgaaacgtttcatttttgttttaaaaataaatcttttttatctgaattcattctatcat

SEQ ID NO: 2810 - DNA, 1773 bp, Streptococcus pneumoniae
  misc_feature (1)..(1773): tiling:Spneumo1:WAN024D2Z-5; Cluster includes WAN0243Y5 sp r1126|smc|15903169|NP_358719.1|1127135..1130674|-|3540 bp| chromosome condensation and segregation SMC protein|S.pneu moniae|R6|NC_003098.1|ORF|221
atgtatttaaaggaaatcgaaattcaggggttcaagtcttttgctgataagaccaaggtcgtttttgaccaaggtgtgacggcagttgttggacccaatggatctggaaagtccaatattacagaaagtctgcgttgggctttgggggagtctagtgtcaagagtctccgtgggggcaagatgccggatrtcatctttgctggaacmgaaagtcgyaaaccgctyaattatgcttctgtagttgtgactctggataatcatgayggatttatcaaggatgcaggtcaagaaatcagrgtrgaacgccatrtctatcgtagtggrgatagygaatacaarattgacggcaagaaagtycgtctkcgtgatattcatgayctcttcttggayacwggwttgggacgagattccttytcyatyatttcccaaggsaaggttgaggagatttttaattcyaagcctgaggaacgmcgagctatttttgaagaagctgcwggagttttaaaatacaagactcgyagaaaagaaacygagagyaaaytgcarcaaactcaggataatctggaccgcttagaggacattatctacgagttggataatcaaatcaagcctcttgagaagcaagctgagaatgcccgtaagtttttagacttggaaggacaacgtaaggytatttatttagaygtkctggttgctcaaatcaaggawaataaggcwgaactagastcgacagaagaagagttgrctcaggttcargaactcttgaykagttattaccaaaagcgtgaaaaattagaagargaaaatcaaactcttaaaaagcaacgccaagatttrcaggctgaaatggccaaagaccaaggcagtttgatggayttgacyagtctgattagtgayttagaragaaaattagccctatcgaaactggartcygagcaagtrgccytsaatcaacaggargcacaagcycgtttggctrctttggaggataagagaarttcactcagcmaagaaaartmtgataaagaaagctctttagctctgttagagggaaatctagtccaaaataatcaaaaactcaatcgtttagaagctgaattgctggctttctcagacgatcctgatcagatgattgagctcttacgtgaacgctttgtagctcttttacaagaagaagcggatgtctcaaaccagttgacccgtattgagaatgagttggaaaatagtcgtcagctttctcaaaaacaagcagatcaactagaaaagctgaaagagcaattrgctayagctaaagagaaggctagtcagcaaaargamgagcttgaaactgccaaggwgcaggttcagaaattattggctgactaycaagctattgccaaggagcaagaggagcagaaaacttcctatcaagctcaacaaagycaactctttgaccgtctggatartctcaaaaacargcaggccagagctcaaagtttggaaaatatcctgagaaatcatagtaacttttatgcaggtgttaagagtgttctccaagaaaaagatcgcctaggtgggattattggtgcagtcagtgagcatctgacctttgatrtkyattatcaaactgccctagarattgccttaggrgcragtagycagcayatyatygtaraagatgaagartcggcaaccaargcyattgayttcctyaaacgraacagagycggtcgtgcaacctttcttcctttgaccactatyaaggcgcgtacgatttctagtcagaaccaagat

SEQ ID NO: 2811 - DNA, 1433 bp, Streptococcus pneumoniae
  misc_feature (1)..(1433): tiling:Spneumo1:WAN024CY3; Cluster includes WAN0243A5 spr1 992||15904033|NP_359583.1|1983883..1985310|-|1428 bp|Hypot hetical protein|S.pneumoniae|R6|NC_003098.1|ORF|121
atgtatttaggagatttgatggagaaagccgagtgtggtcaattttcaatmctttcctttctattacaagagtctcagacgacygtcaaggctgtaatggaagaaacaggattttcmaaagcaaccctaaccaaatatgtcaccctgctcaatgacaaggctttggatagtggcttagagctgrctattcactcagaagatgaaaatctgcgtctgtctatcggtgcagctaccaaggggagagatattcggagcttgtttttgkakagtgctgttaaataccagattttggtttatcttctctaccaccaacagtttttagcccatcagctggctcaagaattrgtgattagcgaggctacgcttggtcgtcacttggctggtttaaatcagattttgtcagaatttgatttatccatccaaaatggmcgytggmgaggtccagagcatcagattcrctatttctatttctgtcttttccgaaaggtctggtcgagtcaggaatgggaaggtcacatgcagaaaccagagagaaaacaggagattgccaatttagaggaaatctgcggtgcaagtttgtctgygggrcagaaattggacttggttctctgggctcacatcagtcaacaacgtcttcgggtcaatgcttgtcagtttcaagtcatagaagagaaaatgcgagggtattttgacaatatyttytaycttcgtttgctgagaaaggttccgtccttttttgctgggcaacatattccactaggagttgaggatggtgagatgatgatattcttctcttttctcctatctcatcgcattcttcctcttcatactatggartatattcttggttttggagggcagttggcagatttactgacgcaattgattcaagaaatgaagaaggaggaactattgggggattatacagaggaccatgtcacctatgaactcagtcagctttgtgctcaagtctatctctataagggctatattttacaggatcgctacaagtaccagttagagaatcgtcatccatatttactgatggaacatgattttaaagagacagcagaggagatttttcatgctctacctrcttttcaacaggggacagatttagataagaagattctctgggaatggctccagttaatcgaatatatggctgaaaacggtggccagcatatgcggattggtctggatttgacatctggttttcttgtcttttcaaggatggcagccattttgaaacggtatttggaatacaatcgttttattaccattgaagcytatgaccctagtmggcattatgatttgctggttaccaataaccckattcataagaaggaacagacmccagtctattatttaaaaaatgacttggatatggargatttggyagsgattcgycagttattattcacttaactaat

SEQ ID NO: 2812 - DNA, 1223 bp, Streptococcus pneumoniae
  misc_feature (1)..(1223): tiling:Spneumo1:WAN024DGZ; Cluster includes WAN0240RU |mur M||AAG34916.1|||1221 bp|MurM|S.pneumoniae||AF281135|ORF|00 0
atgtaycgttatcarmttggsatwcccastatyagartatgatsrktttgtmaaagaacatsmmwtrgytaatstattacaaagcagtgcttgggaaaaagtgaaatctgattggaatcatgagagrcttggtgtctatgaaggggagaacttactggctgtggctagtrttctsataaaatctctgcctttggggtataaaatgttttatattccaagaggtccyatattggattacakggatamagaacttttaaagtttgtcctgcagtctattaagtcttatgctcgcagtaagagagcggtttttgtgactttcgatccaagyatttgtctatctcaacatttggtyaatcaagataaaagagaatatcctgaaaatcttgctattgttgagattttagggcaattaggagtgaagtggtctgggcrgacaaycgagatggatgacaccattcagcctcgtattcaggcgaaaatatataaggaaaattttgaagaagataaactttctaaatcaacgaggcaagctatccgaacagcacgraacaaagggcttgarattcaatatggtggactggaactrttagaytcrttytcrgagttgatgaaaaaaactgagaarcgmaaagagattcatttaagaaacgaagcttattataraaaattattagataacttcaaagaagaytcctatatcacgctaacgartttggatgtttctaagcgtttaagagaattagaagaacarttagmwaaaaacaragtmgttgsaagarrmrtttamtgakkcracymgrwcttcaaaagtwsaggmamakawraargaaaaagarcgtttrrwagaggaaatagatttcttgcagggatatatgaatatggraaaatcaaayattccyttagcggctactttragtttggaatttggtamtacctctgtcaatctatatgctggtatggatgatgattttaaacgttacaatgcaccrattttaacttggtatgaaacggctcgctatgcctttgagcgaggtatggtstggcaaaatttaggtggtgttgaaaactctctcaatggtggactttatcaktttaaggaaaaatttaatccaacgattgaagaatatttgggwgaatttacaatgcccactcatcctctctatcctctgttaagacttgctcttgatttccgtaaaacattaagaaaaaaacatagaaagtaa

SEQ ID NO: 2813 - DNA, 1107 bp, Streptococcus pneumoniae
  misc_feature (1)..(1107): tiling:Spneumo1:WAN024AXQ; Cluster includes WAN023PIN pne3 3_22||||15644..16741|+|1098 bp|Type 16A capsule operon, Gl immer 2.02 orf prediction|S.pneumoniae||WAN01UCI4|ORF|000
atgtayraytatytaatcrtyggwgckggtttgtctggwgcwatyttygcdcacgaagctacaaarygtggwaaaaaagtaaaagtgattgataaacgygatcacatyggwgggaacatmtaytgtgagaatgtagaaggtatcaatgttcataaatatggtgcccatatyttccatacktcwaataaaaaagtytgggactayrtcaatcaattygywgagtttaacaactatatcaactcacctgtcgcaaactataagggaagtctttataaccttcctttcaatatgaataccttctatrctatgtggggcacaaaaactccacaagaagtgaaggataagattgctgagcagacagctggtatgaaggatgttgagccgaaaaatctggaagaacaagctatcaagttgattggtccggatatctatgaaaagttgatcaagggttatacagaaaagcaatggggacgctcagcgayagaacttcctccatttatcataaaacgccttccagttcgtttaacctttgataataactattttaatgaccgttaccaagggattcctattggtggttacaatgtcatcatcgaaaatatgctgaaagatgtagaagttgaacttggagtagacttttttgctcatcgtgaagagttggaagcatctgctaacaaagttgtcttcacaggaatgatcgaccaatattttgactacaagcacggagagttagaataccgtagccttcgttttgagcatgagattttagacgaggaaaattatcaagggaatgctgtagtgaactatacagagcgtgagatcccttatactcgtatyatcgaacacaaacattttgaatatggaatgcagccaaagacagttatcacgcatgaatatccagctgactggaagcgtggggacgagccctactatcctattaacgatgagaaaaataatgctatgtttgctaartaccaagargaarcagcgcagaatgataaagttatcttttgtgggcgtttagcagaytataartattacgatatgcatgtggtgattgaacgggcgcttgaggttgtggagaaagartttrgwwatgacaaaaag

SEQ ID NO: 2814 - DNA, 219 bp, Streptococcus pneumoniae
  misc_feature (1)..(219): tiling:Spneumo1:WAN024G2Y; Cluster includes WAN0243Z7 spr1 088|xseB|15903131|NP_358681.1|1083779..1083991|-|213 bp|Ex odeoxyribonuclease small subunit|S.pneumoniae|R6|NC_003098 .1|ORF|111
atgtcaaaacaaaagaaatttgaggaaaatctagcagaactggaaaccattgtccaaagtttggaaaatggtgaaattgctctggaagatgcgattactgcctttcaaaagggcatggtcttgtcaaaagagctccaagctacgctggacaaggctgaaaagaccttggtcaaggtcatgcaagaagacggaacagaaagtgattttgaaykaactaat

SEQ ID NO: 2815 - DNA, 635 bp, Streptococcus pneumoniae
  misc_feature (1)..(635): tiling:Spneumo1:WAN024ESP; Cluster includes WAN0243P1 spr1 454||15903497|NP_359047.1|1437195..1437824|-|630 bp|Hypoth etical protein|S.pneumoniae|R6|NC_003098.1|ORF|111
atgtcaaaacactataaacttgtattttatagccgtatcttcttgtttctagcggcttttacgggagtttatcttgaaattactargcatggtggttttgggatgcttctctattacacggttctgtccaacctcttggtaactatttttaccctttatcttctaaaggttatgagccgtgtaggtgaaaattggcaaagrccaagtctcttgcgcttaaaaggtggggtcaccatgagtatcatgattacctgtgtgatttaccatttcctcttggcgcccattgcgactaatttctataccctagaaaatttcctttgccactatatcgttcccatctggtttttagcggataccctcttttttgacaaacagggtcaatacaagatttgggatccagcagtgtggaccattttaccctttctgtatatgatgtttgctctttttaatggcttggttctaaaactcaatattccaaatgccaaggataatcctttcccttacttctttttgaatgtgaacaagggttggaatgttgtgtttaagtggtgtctgattatctttgttgcctatatggtagcaggatttattttctactttatcaagcaaatcaagagaaagtcatcctaactaat

SEQ ID NO: 2816 - DNA, 303 bp, Streptococcus pneumoniae
  misc_feature (1)..(303): tiling:Spneumo1:WAN024CQ8; Cluster includes WAN023MF9 3129 72_71a||||37851..38075|-|225 bp|EGAD orf prediction|S.pneu moniae|R6|NC_003098.1|ORF|110
atgtcaaaaccttttccatcaacggtaggcaaggtagacatgagtccaggacggtcgatattcttgatacgacccacgatgaagaatccwgcwgccaacaargcacctgtattcccagccgaaaggacagcgtctgcttcaccatctttgacagccttggctgccaataccatactggcatttttcttattccgaatagctctcgtaggttcatcatccgaatcaatcttctcatccgtatggataatgctgacgcgctctgtcgctgtcagatattgcttgattttagcttcatctccgtar

SEQ ID NO: 2817 - DNA, 1205 bp, Streptococcus pneumoniae
  misc_feature (1)..(1205): tiling:Spneumo1:WAN024GEJ; Cluster includes WAN0244CL spr0 605|divIB|15902649|NP_358199.1|617795..618985|+|1191 bp|Ce ll division protein DivIB|S.pneumoniae|R6|NC_003098.1|ORF| 111
atgtcaaaagataagaaaaatgaggacaaagaaaycctcgaagaattgaaagagttatcagaatggcagaaacgaaaccaagaatatctaaaaaagaaggctgaagaagargyggctctagctgaggagaaggaaaaggaaagacaagctcgratgggagaagaatctgagaagtcagaggayaaacaggaccaggagagtgaaacagaccaggaagattcagaatcagctaaggaagagtctgaagaaaaagtagcatcctcagaggmtgacaaagagaaagaagagaaagaagaaycagagtctaaagagaaggaggaacaggataaaaagcttkctaaaaaggctacaaaggaaaaaccagccaaagcaaagattcctggtatccatatcttgcgagcmttcacgattttatttccaagtctgcttytattgwttgtctctgcctacttgctcagtccttatgcgaccatgaaagatattcgtgttgagggaacggtgcaaactacagctgatgatattcgacaggcttcaggcattcaggattcggattatacgattaaccttctgctagacaaggcaaaatatgaaaagcagattaagtctaactattgggttgaatcagctcaacttgtctatcaatttccaactaagttcactattaaggtcaaggaatatgatattgtggcctactatatttctggtgaaaatcattatcctattctttccagtggtcagcttgagactagttctgtgagyctgaacagtttaccagaaacttatttatcagttctctttaatgatagtgaacaaatcaargtttttgtctcagaacttgctcaaattagcccagaactcaaggcgrctatccaaaaggtggaattagcyccaagcaaggtgacatccgatttaattcgattgacyatgaatgattyggacgaagtcttggttcckctwtctgaaatgagyaagaaactgccwtattayagtaagattaagccwcaattgtcagaaccgagtgtgrtygacatggaagctggaatytacagytacactgtggcggataaattaattatggargytgaggaaaaagccaaacaagaggcyaaggaagctgagaaaaaacaagaagaagaacagaaaaaacaagaggaagagagcaatcgaaaycaaacramycagcgytcatcgcgtcgctarctaat

SEQ ID NO: 2818 - DNA, 1466 bp, Streptococcus pneumoniae
  misc_feature (1)..(1466): tiling:Spneumo1:WAN024D5U; Cluster includes WAN0243D8 spr1 881|gltX|15903922|NP_359472.1|1857547..1859007|-|1461 bp|G lutamyl-tRNA synthetase (glutamate--tRNA ligase)|S.pneumon iae|R6|NC_003098.1|ORF|221
atgtcaaaagatatccgcgtacgttacgcaccaagtccaacaggactactacacatcggaaatgcycgtacagcattgtttaaytacttgtatgcgcgccatcatggtggaacatttctcatccgtatcgaagatactgaccgtaaacgccatgtcgaggatggtgaacgttcacaacttgaaaaccttcgctggttaggcatggattgggatgaaagtccagaatcacatgagaattatcgccagtctgagcgtttrgacttgtatcaaaaatayattgaccaactattagctgaaggaaaagcctataaatcttacgttacagaagaagagttggcagctgaacgygaacgycaagaagtagctggcgaaacaccacgctacatcaatgaataccttggtatgagtgaagaagaaaaagcrgcttayatygcagaacgtgaagcagcwggkatcatmccaacwgttcgtttggctgtcaatgagtcaggtatctacaagtggcatgatatggtcaaaggygatatcgaatttgaaggtggcaatatcggyggtgactggrttatccaaaagaaagacggttacccaacttacaactttgccgttgyyatcgatgaccaygatatgcaaatctctcatgttatccgtggagaygaccatattgctaayacaccaaaacagctyatggtytatgaagcwcttggttkggragctccagagttyggtcacatgaccttgattatmmactctgaractgstaasaagttatctaaacgtgatactaatacacttcaatttatcgaagattaccgaaagaaaggttaccttccagaagcagtctttaactttattgctcttcttggttggaacccaggtggtgrrgatgagattttctctcgtgaagaaytcattaaactttttgatgaaaaccgcctcagcaagtcaccagcagcctttgatcagaaaaaaytagactggatgagcaatgattatatcaagaatgcagaccttgaaaccatctttgaaatggcaaaaccattcttagaggaagcaggccgtttgactgacaaggctgaaaaattagttgagctctataaaccacaaatgaaatcagtagatgagattatcccattgacagatcttttcttctcagatttcccagaattgacagaagcagagcgcgaagtcatgacgggtgaaacagttccaacagttcttgaagcattcaaagcaaaacttgaagcgatgacagatgatraatttgtgacagaaaatatcttcccacaaattaaagcagtycaaaaagaaacaggtattaaagggaaaaatctkttcatgcctattcgtatcgcagtttcaggcgaaatgcatgggccagaattaccagatacaattttcttgcttggacgtgaaaaatcaattcagcatatcgaaaacatkctaaaagaaatctctaaataactaat

SEQ ID NO: 2819 - DNA, 679 bp, Streptococcus pneumoniae
  misc_feature (1)..(679): tiling:Spneumo1:WAN024EZK; Cluster includes WAN024467 spr0 835|tmk|15902879|NP_358429.1|836263..836901|+|639 bp|Thymi dylate kinase|S.pneumoniae|R6|NC_003098.1|ORF|221
atgtcaaaaggatttttagtctctcttgagggaccagagggagcaggcaagaccagtgttttagaggctctgctaccaattttaraggaaaaaggagtagaggtgytgacgacccgtgaacctggcggagtcttgattggggagaagattcgggaagtgattttggatccaagtcatactcagatggatgctaaaacagagctacttctctatattgccagtcgcagacagcatttggtggaaaaagttcttccagcccttgaagctggcaagttggtcatcatggatcgttttatcgatagttctgttgcctatcagggatttggtcgtggcttagatattgaagccattgactggctcaatcagtttgcgacagatggcctcaaacccgatttgacactctattttgacatcgaggtggaagaagggctggctcgtattgctgckaatagtgaccgcgaggttaatcgtttggatttggaagggttggacttgcataaaaaagttcgtcaaggctacctttctcttctggataaagagggaaatcgcattgtcaagattgatgctagtctccctttggagcaagttgtggaaactaccaakgctgtcttgtttgacggaatgggcttggccaaaykaamyaakatcaactaaaggcttggcaaccagctcagtttga

SEQ ID NO: 2820 - DNA, 1284 bp, Streptococcus pneumoniae
  misc_feature (1)..(1284): tiling:Spneumo1:WAN024ETT; Cluster includes WAN0244EV spr0 523|transposase H-truncation|15902567|NP_358117.1|523125.. 523298|+|174 bp|Transposase, uncharacterized, truncation|S .pneumoniae|R6|NC_003098.1|ORF|385
atgtcaaaaytgctagataaratattatcacgcgaaaatatgctggaagcctacaatcaagtaaaatccrataaaggctcagctgggattgatggaatgactatcgawsagatggataattatctcagacaaaactggcgcttgactaaggaactgataaaacagagaaaatataagcctcaaccagttcttaragttgagatwmctaaaccarrcggaggyatccgtcaactaggaattccaacagttatggatagaatgattcaacagrccattgtcyaagtyatkagccccatttgtgaaccccatttctcagatacgagttatgryttcagaccaaataggtcatgtgaaaaagccatcatgaagytcttagartacttaaatgacggctatgagtggatagtggatmtagacywakagaaatttttcgatacrgttcctcaagatagattgatgtccttrgtacataacattatcgaagacggagatacggaatccytgattcgtaagtatcttcattcaggtgttatcattaatggtcarcktyataaaacrctagttggyacrccacagggaggaaatttatctcctctcttatcyaatrtcatgcttaatgaattggacaaggaattagaaaagaggggacttcgatttgtgcgctacgcagatgattgtgtgattacggtcgkaagcgaggcagcckctaagcgtrtgatgtattcagycagtcgttttattgaraarcgrctaggtttgaaagtaaayatgaccaagrctaagattaccagaccaagagagytgaaatayytaggttttgggttctggaaatyatcagatggttggaaaagycgtccmcatcaagatastrwtcggagatttaagyttaaattgaagaaactaacacakaggaaatggagtatakrybtaacawsacgtattgagcaactgaatttgtctrttcgaggatggataarctattkctcrytgggaaatatgaarmgyatagtcrcyagcatagatgagcgcttgcrtactcgcctacgartgattatctggaagcaatggaagaagaaatcgagacgaytatggggattgcttaagttaggrgttcctaaatggatagcagataaggtatctggctggggcgaccaytatcaattastadytmadawgtcggtacttaaacgtgctatatcaaaaccagtcctkgaaaaacgtggactggtttcgtgtttggattattaccttgaaygacatgcgttaaaagttagtykaactaat

SEQ ID NO: 2821 - DNA, 614 bp, Streptococcus pneumoniae
  misc_feature (1)..(614): tiling:Spneumo1:WAN024FDA; Cluster includes WAN0243KB spr1 625||15903667|NP_359217.1|1599747..1600355|+|609 bp|Conser ved hypothetical protein|S.pneumoniae|R6|NC_003098.1|ORF|1 11
atgtcaaacgaaaaaaacacaaacactaacgtagaaaagaaagatgctactgttgtagctcacgaaatcaaaggggaacttacttacgaagataaagttatccaaaaaatcattggtctttcactagaaaacgtttcaggtcttttgggaatcgatggtggtttcttctcaaatcttaaagaaaaaatcgttaacagcgatgacgtaacaagtggtgttaacgtagaagttggtaaaacacaagttgcagttgacttaaacgttattgttgagtaccaaaaaaatgttccagctttatattcagaaatcagagaaatcgtatcttcagaagttgctaaaatgactgacttggaaattgttgaaatcaacgtaaacgttgtcgacatcaaaactaaagaacagcatgaagcagactcagtaagccttcaagatcgcgtatctgacgttgctgaatcaacaggagaattcacttcagaacaattcgaaaaagctaaatctggtcttggatctggtttctcaactgttcaagaaaaagttagcgaaggtgtagaagctgttaaaggtgcagcaaatggtgtagtatctcacgaaaacactcgtgtaaactaactaat

SEQ ID NO: 2822 - DNA, 401 bp, Streptococcus pneumoniae
  misc_feature (1)..(401): tiling:Spneumo1:WAN024DHM; Cluster includes WAN0244FU spr0 488||15902532|NP_358082.1|488925..489320|+|396 bp|Hypothet ical protein|S.pneumoniae|R6|NC_003098.1|ORF|111
atgtcaaagaaactcaatcgtaaaaaacaattacgaaatggcctccgtcgckcaggtgccttttcaagtackgtgactaaggttgtagatgagacaaaaaaagtcgtgaagsgtgcagaacagtcagcaagcgcagctggtaaggctgtttctaaaaaagttgaacaagcagtagaagctaccaaagagcaagctcaaaaagtagctaattctgtagaagattttgcagcaaayttgggtggacttccacttgatcgtgccaaractttctatgatgaaggaatcaagtctgcttcagatttmaamaactggactgaaaaagaactccttgmcttgaaaggaatcggcccagctaccatcaagaaattgaaagaaaatggcatcaagttcaagtaactaat

SEQ ID NO: 2823 - DNA, 1340 bp, Streptococcus pneumoniae
  misc_feature (1)..(1340): tiling:Spneumo1:WAN024FKS; Cluster includes WAN0243RA spr1 373|murC|15903416|NP_358966.1|1354028..1355362|-|1335 bp|U DP-N-acetylmuramate-alanine ligase|S.pneumoniae|R6|NC_0030 98.1|ORF|221
atgtcaaagacatatcattttatcggaattaagggatcagggatgagtgccttggccttgatgttgyaccagatggggcacaaggttcagggatcagatgttgaaaagtactactttacccaacgcggtcttgascaggcaggaattaccattcttccttttgatgaaaaraatctagacggtgatatggaaattatcgctggaaatgcctttcgtccagataacaacgtcgaaattgyctatgcggaccaaaatggtatcagctacaaacgttaccatgagtttctaggtagctttatrygtgactttgttagcatgggagtagcaggagcacatggaaaaacttcaacgacaggtatgttgtctcatgtcttgtctcacattacagataccagyttcttgattggagatgggacaggtcgtggttcggcyaatgccaaatattttgtctttgaatctgacgaatatgagcgtcacttcatgccttaccacccagaatactctattatcaccaacattgactttgaccatccagattatttcacaagtctcgaggatrttttyaatgcctttaacgactatgccaaacaaatyaccaagggtctttttgtctatggtgaagatgctgaattgcgtaagattacgtctgatgcaccaatttattattatggttttgaagytgaaggcaatgactttgtagctagtgatcttcttcgttcaayaactggttcaaccttcaccgttcatttccgtggacaaaacttggggcaattccacattccaacctttggtcgtcacaatatcatgaatgcgacagccgttattggtcttctttacacagcaggatttgatttgaacttggtgcgtgagcacttgaaaacatttkccggtgttaaacgtcgtttcactgagaaaattgtcaatgatacagtgattatygatgactttgcccaycatccaacagaaattattgcgaccttggatgcggctcgtcagaaatacccaagcaaggaaattgtagcagtctttcaaccgcatacctttacaagaaccattgccytgttggacgactttgcccatgctttaaaccaagcagatgctgtttatctagcgcaaatttatggctcggctcgtgaagtagatcatggtgacgttaaggtagaagacctagcmaayaaaatcaacaaaaaacaccaagtgattactgttgaaaatgtttctccactcctagaccatgacaatgctgtttacgtctttatgggagcaggagacatccaaacctatgaatactcatttgagcgtctcttrtctaacttgacaagcaatgttcaatarctaat

SEQ ID NO: 2824 - DNA, 269 bp, Streptococcus pneumoniae
  misc_feature (1)..(269): tiling:Spneumo1:WAN024AWQ; Cluster includes WAN0244ME spr0 252||15902296|NP_357846.1|255567..255830|+|264 bp|Hypothet ical protein|S.pneumoniae|R6|NC_003098.1|ORF|110
atgtcaaagatgagtatragcatccgtctggatagtgaggttaaggagcaggcccaacaggtgtttagtaatctgggaatggatatgacaacagctattaatattttccttcgtcaggcaattcaatatcagggattaccttttgatgttagactagacgaaaatcggaagttgctccaagygttaacggatttagaccaaaatcgtaatatgagccagtcttttgaatcagtctcagatttgatggaggacttacgtgcttaactaat

SEQ ID NO: 2825 - DNA, 1542 bp, Streptococcus pneumoniae
  misc_feature (1)..(1542): tiling:Spneumo1:WAN024COJ; Cluster includes WAN0241Z0 SP17 61||15901592|NP_346196.1|1662438..1663973|-|1536 bp|hypoth etical protein|S.pneumoniae|TIGR4|NC_003028.1|ORF|021
atgtcaaaggaacttaatattttacagataggacttgccaattgggaaaatcactatgacatacctgaaaatatgagttggtatyatttttacccaaaytcatcaaaagcccttcgtgaaataatygaaaaagaggatattaaccgttttcatgcagttttaatagaagatggtcagtattccagagacttattttcctatgtaaaatattttgaaccttatactttrttytataaccagaatctacaaataaatgatagagaggttgtggattttctaaaaaaacgatgtgcacaagcaattgattttttaagtccccaacaactaatcaatgatttaagtaaatctctttttggcggtgggtatggtgataaactctttcctccgacgatacaagtcaatccaaattttacaggagctatttcttatcaaggattggattatgtcagtttggaaggtgagtttgggcaagattttgcccagcttgcctattgggcttataatattatggtgcaaaaaacactccctattgagttgtggcttgaatatgagaaggaaggcaattgtgactttcgtttrgtmatccgtaaaatgtggagtgggtctgttgatgatttctttgaagaagtaatagtatctgaaaaagacttggagcaagcactttttatggatagtcgagacggagactactttctctcgatatctgttgaagcaagaggtcgtggaactatcaaactaggtaatcttcaccaacgatggagtcgaaaacaatttggtaagtttgtacttggtggaaatatcctacatgattccaagcgtgatgaaataaactatttcttccatccaggtgattttaaaccgcctttgactgtctattttgcaggttatcgacctgcagaaggattcgagggttactttatgatgaaaackcttggatgtcccttcattttattttctgatccacgtttagaggggggagctttttatctcggaacggatgagctagagggaaaagtaaaggataygatcactcactatcttgattatttaggctttgatcataaggatttgattttatcaggtctttctatgggaacgtttccggctctctattatggtgcttcttttgaaccccatgccatcatagttggtaagcccttggctaatttaggaacyatagctagtcgtggacgtttggacgcaccgggtgtctctaacttagcttttgattgtttaattcatcatacaggtgggacaagttctcaagatatgacggagttggatcagcgtttttggaaaatttttaaacaagcaaatttttcaaagacaacctttggtttatcctatatgaaagatgaagaaatggatccacaagcctatgaacaattagtgtcttatctgtgtaatacaggtgcgaagattttatctaaaggaactgctggacgacacaatgatgatacagataccaatatttcttggtttttgcacttttatagaatggtcttagagactggttttggaagggagaaaagaykaactaat

SEQ ID NO: 2826 - DNA, 300 bp, Streptococcus pneumoniae
  misc_feature (1)..(300): tiling:Spneumo1:WAN024FGA; Cluster includes WAN023KV8 3149 31_2834||||1511354..1511653|+|300 bp|EGAD orf prediction|S .pneumoniae|R6|NC_003098.1|ORF|110
atgtcaaagttattaaagatccatacagttctcaaaacaactagaagtcctacaaccactttaatatgtggaaagacgataaacttgaacacctgccaacttgaagcaccatctatcttagcagcctcaaattgttcttctggtactgtttgcaaagctgaaagcacattaaccataatcattggtgctccaaaccaaatgttgataaacaccaaacataggaatgcccatgtactatctgtcaaaaatgcaggtgtatgttccattaaacctaattttacgattagattaggtaagtag

SEQ ID NO: 2827 - DNA, 2196 bp, Streptococcus pneumoniae
  misc_feature (1)..(2196): tiling:Spneumo1:WAN024C77-5; Cluster includes WAN0244MF sp r0251|polC|15902295|NP_357845.1|251074..255465|+|4392 bp|D NA polymerase III, alpha subunit|S.pneumoniae|R6|NC_003098 .1|ORF|111
atgtcaaatagttttgaaattttgatgaatcaattggggatgcctgctgaaatgagacaggctcctgctttagcacaggcyratattgagcgagttgtggttcataaaattagtaaggtatgggagtttcatttcgtattttctaatattttaccgattgaaatctttttagaattaaagaarggtttgagsgaagaattttctaagacaggsaataaagctrttttygaaatyaaggytckgtctcaagaattttcaaatcarctcttrcarkcctaytatagrgargytttytctgaaggkccrtgtgctagtcaaggytttaartcyctttatcaraatttgcaagttcgtgckgaggryaatcarctmtttattgaaggmtcwgargcgattgataaggaacaytttaagaaraatcatctkcctaatttagcyaaacaacttgaaaartttggttttccarcttttaactgtcargtcgagaagaatgatgtsctgacccaagagcaggaagaggcctttyatgctgaaaatgagcagattgttcaagctgccaaygaggaagcgctccgtgctatggarcaactggarcagatggcacctcctccagcggaagagaaaccagyctttgattttcargcsaaaaaagctgmagctaaaccmaagctggayaaggcggagattactcctatgatcgaagtgacgacrgaggaaaatcgtctggtmtttgaaggggttgtttttgatgtggagcaaaaagtgacyagaacaggkcgtgttttratcaactttaaaatgacggactayacttcaagtttttckatgcaaaagtgggttaaraacgaggaagaggcycagaagtttgayytmatcaagaaraaytcttggctycgagtycgwgggaatgtggagatgaataacttcacacgcgatttgactatgaaygtrcaggatstgcaggaagttgttcactatgagcggaaggatttgatgccagaaggtgagcgycgggttgagtttcatgctcatactaayatgtcgacyatggatgctytrccagaggtmgaagaratygttgcaacagctgctaagtggggacacaaggcggttgcyatcacrgaccatgggaatgtccagtccttyccacatggctataaggcggctaagaaagcgggaatccagctgatctatggkatrgaagcyaatatcgtggaggaccgtgtccctatcgtctataacgaagtrgagatggacttrtyagaagcracctacgtggtctttgacgtggaaacgacgggrctttcagcyatctataatgacttgattcaggttgcggcytctaagatgtacaaggggaatgttattgcygaatttgatgaatttatcaatcctgggcatcccttgtcagcytttactacwgagttracyggaattacagatgatcatgtmaaaaatgcyaaaccactagaacaagttttgcaagaattccaagaattytgcaaggatackgtcctagtygcccacaatgckacctttgacgttggctttatgaatgcyaattatgagcgkcatgrtctkccaaagattagtcagccagttattgatacrctkgagtttgctagaaayctctatcctgagtataaacgycatggtttggggcctttgaccaagcgttttggtgtggccttrgaacatcaycacatggccaactacgatgcggaagckacwggtcgyctgcttttcatctttatcaaagaggtrgcagaaaaacatggtgtgaccgatytagctagactcaacattgatytratyagtccagattcttayaaaaaagctcgsatcaagcatgcgaccatytatgtcaagaatcargtaggkctaaaaaatatctttaagctggtttccttgtctaataccaagtaytttgaaggagtgycacggattccragaacggttctagatgcycatcgrgarggyttgattttaggttcagcytgytcwgarggtgaagtttttgaygyrgtcgtttcycarggygtggatgcggcggttgaggtggccaagtattatgaytttatcgaggtcatgccmccrgctatctatgcdcccttgattgcyaargagcaggtcaaggatatggaggaactccagaccattatcaagagtttgatagargttggagaycgycttggy

SEQ ID NO: 2828 - DNA, 1982 bp, Streptococcus pneumoniae
  misc_feature (1)..(1982): tiling:Spneumo1:WAN024E2T; Cluster includes WAN0243EB spr1 841|tktA|15903883|NP_359433.1|1815951..1817927|-|1977 bp|T ransketolase|S.pneumoniae|R6|NC_003098.1|ORF|332
atgtcaaatctatctgttaatgcaattcgttttctaggtattgacgccattaataaagccaactcaggtcatccaggtgtggttatgggagcggctccgatggcttacagcctctttacaaaacaacttcatatcaatccagctcaaccaaaytggattaaccgygaccgyttyattctttcagcwggycatggytcaatgctyctwtatgcycttcttcayytttcyggttttgaagatgtyagyatgratgaratyaakagyttccgtcartggggttcaaaaacaccwggtcacccagaatttggycatacrgcagggattgatgctacgacakgtcctctaggdcaaggdatytcaactgcyactggttttgybcargcagaacgtttcttggcagcyrartataaccgygaaggytacaatatctttgaycactatacttacgttatytgtggrgacggagayttgatggaasgtgtytcaagygaggcdgcttcataygcaggyttrcaaaaactdgayargttggttgttctttatgattcaaatgayatcaacttggatggkgasacaaargattcctttrcagaaagtgttcgtgaccgytacaatgcctacggttggcatactgccttggytgaaaatggaacagacttggaagccatccatgctgctatcgaaacagcaaaagcttcaggcaagccatctttrattgaagtgaagacggttattggatayggttctccaaacaaacaaggaactaatgctgtacacggcgcccctcttggagcagatgaaacygcatcaactmrycaagccctcggttgggactacgaaccatttgaaattccagaacaagtatatgctgatttcaaagaacatgttgcagaccgtggcgcatcagcttatcaagcttggactaaattagttgcagattataaagaagytcatccagaactggctgcagaagtagaagccatcatcgacggacgtgatccagtcgaagtgactccagcagacttcccagctttagaaaatggtttttctcaagcaactcgtaattcaagtcaagatgccttgaatgttktggcagctaaattaccaaccttyctaggtggatcagctgaccttgctcactcaaacatgacttatatcaagacrgatggacttcaagacgatrccaatcgcttgaatcgtaacattcagtttggtgttcgtgaatttgcaatgggaacaatcttgaacgggatggcccttcatggtggacttcgtgtatacggtggaactttcttcgtcttctctgactatgtgaaggcagctgtccgcttgtcagccttacaaggacttcctgtgacttatgtctttacccaygattcaatcgcagttggkgaagayggyccractcaygawccrgtygarcayttagcmggtcttcgtgcyatgccaaatctaaatgttttccgtccagcagatgcgcgtgraaykcaagcagcttggtacctwgcagtgacaagtgasaaaacaccaactgcccttgtcttgacacgycaraayttgaytgttgaagakggaacagayttcgayaaggttgcwaaaggtgcytatgttgtmtatgaaaatgcagcmgactttgatacvatcttgattgcgacaggytcagaggtyaatctwgctrtckcagcwgcyaaagaattggctagtcaaggcgaaaaawyccgcgtagtcagcatgccatctacagatgtctttgataaacaagatgcagcttacaaggaagarattcttccaaatgcagtccgccgtcgtgttgcagtcgaaatgggtgcaagtcaaaactggtacaaatatgttggtctcgatggtgccgttcyaggtattgataccttcggagcctctgccccagcaccaaaagtattggcagaatatggctttactgtmgaaaatcttgtaaaarttgttcgaaayttgaaataactaat

SEQ ID NO: 2829 - DNA, 321 bp, Streptococcus pneumoniae
  misc_feature (1)..(321): tiling:Spneumo1:WAN024BH9; Cluster includes WAN023LOP 3140 40_1467||||777206..777526|-|321 bp|EGAD orf prediction|S.p neumoniae|R6|NC_003098.1|ORF|110
atgtcaacagccatcattccaccaaggacgataccaagaaggacagctgaacctcctccaagaccgcctaggaagtcattcatagcagtgttgattgcagccattgggatattcacagctagcataacaaatcctgtcaagattgttccaagaagtggcaatagaaggattgatttagcaccttcgagtgaacgaggaactttaacgtatttcttgatggcaagaaccaaggcacctgcgataaatccaccaacaagggcacctaggaaaccagatgagacacctgcaagagttgaagttgcttcaccacctgcggcataa

SEQ ID NO: 2830 - DNA, 1440 bp, Streptococcus pneumoniae
  misc_feature (1)..(1440): tiling:Spneumo1:WAN024FNK; Cluster includes WAN023PB1 pne4 5_18||||15066..16505|+|1440 bp|Type 22F capsule operon, Gl immer 2.02 orf prediction|S.pneumoniae||WAN01UCHA|ORF|000
atgtcaaccagaaattcacttattaaaaattctctttataatgttgcttatagaatgttaaatatcatatttccattagtatccgcaacatatactgcacggataattttagctagtggagttggggaggtctcgtttgcacaaaatgttgtttcttactttacaacgatagctgctatgggtattccaaattatggtatacgagaaattgctaaaactagaaataaagaagaggctacgaataaagttttttcagagctatttctgattaatggattgtctacattactgtgttctatagtatatttaattctgattttgacattcaatagcatttttgataatacatcaatgtatcttgctgtgggtttaacattagtgtttaacttccttaatatcgattggttctatcaaggaaaagaggactatgcatacatcacgaaacgtagtttcagtataaaacttatttctctttttagtttatttatttttgttagagatactgacgatgcagttaactatgcattgatttctagcttagcaattggcgggaataatatttttaatcttgttaatttaaggaaatataatattagatttagttttaataatattaagattagaagacacttaaaacctatttttgttttgttgggttcagtgattgctattgaaatctatactatgctggataccactatgattggtgctatggtaggaacgactgaggtaggttattatacaaattctatgaagctagttaaattgctgataactgtgattaccgctattggaggagtgcttttaccacgactaagtgattattattctaagggagaatttgaaaaattaaatcacatcgttgataaagtttttagaatcatgttgtttctttttttaccagcccaagttgcattaattctagttgcaccagtaattatgccgattttatttggtgatagttttataccagcagtgttaacacttcaacttacttctttgcttatatgtacattagggtttagtaatttatttgggactcaaatattactaacatttggagatgagcgaaagcttttgattagcacaattttaggagcgcttagtaatatcgctttgaacctaattctgattccagtaatggctcaaaatggagcagcgttggcatctgtgattagtgaaacaattgttactttaacagcatactactatgcgaaaaaacgtgtgacaattaggtttgacttaggattttatttgccaactgttgtttcaacaataatcatgggtggagctatatatgtagtaatgcaattgtatattggggatatagaaaaaatgttattttcaactttgttaggaggtgttgtattccttttaattaacgtttttatgaagaatcctattatatatgaatttacaggtattataaagagaaagaga

SEQ ID NO: 2831 - DNA, 974 bp, Streptococcus pneumoniae
  misc_feature (1)..(974): tiling:Spneumo1:WAN024G4L; Cluster includes WAN024407 spr1 051|acoA|15903095|NP_358645.1|1046292..1047260|-|969 bp|TP P-dependent acetoin dehydrogenase alpha chain|S.pneumoniae |R6|NC_003098.1|ORF|111
atgtcaactttagataaaaatcttttgctagaaatgttccgtaagatggaagaaatccgtcgcatggacttaaaaattgcacaattagtaaagaaagggaaagtgccaggaatgacgcacttttctgttggtgaagaggcagctaaygtgggggctatgttagctctcaatccagatgatctgattacctcaaaccaccgtggacacgggcaagctattgctaaagggattgacctcaacggaatgatggctgaaatccttggtaaatacactggaacctgtaaagggaaaggtggatctatgcatatcgctgaccttgatgctgggaaccttggtgccaatggtatcgtaggtggtggtatggggatcgctgtcggtgcagccctcagtcagcaaatgcaaaataccggtaaaatcgttgtytgcttctttggagatggtgcgaccaatgaaggtgttttccacgaagcagtgaacatggcttctatctggaacctgccagtcattttctattgcattaacaacggttacggtatctctgcggatatcaagaaaatgaccaatatagaacatatccatcaacgtagcgccgcttatggaattcctggaatgttcatcgaagacggtaacaatgtcatcgatgtctatgaaggatttcagaaagctgtrgaccatgttcgcagtggcaatggtccagtcttgattgaaagtgtaacttatcgctggctyggtcactcatcatctgaccctggtaaatatcgtacgcgtgaagaagtggaattgtggaaacaaaaagatccaatcgaaaacctccgcaattaccttattgaaaataacattgcaagtgccgaagaattggaaraaatccaagcgcaagtaaaggaagcagtagaagcttctgttaaatttgcagaggaaagcccattcccaycgcttgaatcagcctttgaagatatttacrcagactaactaat

SEQ ID NO: 2832 - DNA, 702 bp, Streptococcus pneumoniae
  misc_feature (1)..(702): tiling:Spneumo1:WAN024E24; Cluster includes WAN02422V SP16 16||15901453|NP_346057.1|1517588..1518283|-|696 bp|ribulos e-phosphate 3-epimerase family protein|S.pneumoniae|TIGR4| NC_003028.1|ORF|010
atgtcaagaattgaattttcaccatctttgatgaccatggatttggacaaattcaaagagcagattacttttttgaatgataaagtagcatcttatcatatcgatattatggatggccattttgttcccaatattaccttgtctccttggttcattcaagaagttcaaaaaattagtgacacacctttatcagttcatctgatggtcacagacccaaccttttgggtagatcaagttctcgatttacaatgtgagtatatttgtattcatgctgaagttctgaatggtcttgcttttcgtttgattgataaaattcatgatgcaggtctaaaggctggtgttgtccttaatcctgaaacacctgtttctacaatctttccctacattgatttacttgacaaagyaactattatgactgtagatccaggttttgcaggacaacgctttttggagtctaccttgtataaaatccaagaactccrtcagcttagagttcagaatggttatcactacatcattgagatggatggttcttcgagtcgtaagactttcaaacaaattgatgtggcaggaccagatatttatgttataggtcgcagtggattatttggtttggatgacgatattgccaaagcctgggatatctgttctagagattacgaagaaatgaccggaaaaacaatgccaatcaaactaactaat

SEQ ID NO: 2833 - DNA, 243 bp, Streptococcus pneumoniae
  misc_feature (1)..(243): tiling:Spneumo1:WAN024F5V; Cluster includes WAN023KMP 3152 11_3236||||1726060..1726302|+|243 bp|EGAD orf prediction|S .pneumoniae|R6|NC_003098.1|ORF|110
atgtcaagagctaaagaacctgagctcatcacttgcaccttttgctccgcacgttcacccaaacgcatgattgatcctttaccaaagtctttctcaatcaatttaagagcgtcattcaaggccttttcacgttctgccccaaatttttttgaaatttcttctaatttttttggttttttcgccattctattctcctacattctaatgatcctcagacctatctactattatatcaaaagttag

SEQ ID NO: 2834 - DNA, 1163 bp, Streptococcus pneumoniae
  misc_feature (1)..(1163): tiling:Spneumo1:WAN024DM9; Cluster includes WAN0244QV spr0 091||15902135|NP_357685.1|98018..99175|+|1158 bp|Conserved hypothetical protein|S.pneumoniae|R6|NC_003098.1|ORF|111
atgtcaagtaaggtttctggctttcaagataaaaatgggaaagtcttgaaaattatgatagaatggtggaaggaaaaattcaggagagtagtagtgactcaaaatgttgaaagtcttctcgtatccattgtaatcagtgcatacaatgaagaaaaatatctgcctggtctaattgaagacttaaaaaatcaaacctatcctaaagagratattgaaattctatttataaatgctatgtccacagatgggaccacagctatcattcagcaatttataaaggaagatacagagtttaactcaattagattgtataacaatcctaagaaaaatcaagctagtggttttaacctgggagttaaacattctgtaggggaccttattttaaaaattgatgctcattcaaaagttactgagasttttgtaatgaacaatgtggctattattcaacaaggtgaatttgtctgtggggggcctagaccgacgattgtcgaaggaaaaggaaaatgggcagagaccttgcatcttgttgaggaaaatatgtttggmagtagyattgccaattatcgaaatagttcygaggatagatatgtttcttctatttttcatggratgtataaacgagaggttttccagaaggttggtttagtaaatgagcaacttggccgaactgaagataatgatattcattatagaattcgagaayatggttataaaatccgctatagcccaagtattctatcttatcagtatattcgaccaacattcaagaaaatgctgcatcaaaagtattyaaatggtttgtggattggcttgacaagtcatgttcagtttaagtgtttatcattatttcactatgttccttgtttatttgttttgagtcttgtgtttagtctagcattgttaccgatcacattcgtattcataactttactattaggtgcctattttctacttttgtcaytactcactttgctgactttattaaaacataaaaatggatttctaattgtgatgccctttmttttattttccattcactttgcttatggcyttgggacgattgtaggtttaattagaggatttaaatggaagaaggagtacaagrgaacaataatttatttggataaaataagccaaataaaymaaaatatgctayaactaat

SEQ ID NO: 2835 - DNA, 858 bp, Streptococcus pneumoniae
  misc_feature (1)..(858): tiling:Spneumo1:WAN024CV8; Cluster includes WAN0242WK SP04 68||15900384|NP_344988.1|446563..447414|+|852 bp|sortase, putative|S.pneumoniae|TIGR4|NC_003028.1|ORF|010
atgtcaargrctaarctacgarmcttaytrggrtayttgytgatgytggtagcmtkkktgattcctrtttattgttttggrcagatggtgttrcagtctytwggacargtraaaggtcatgmkayatttgtsaaatcyrtgacrrcygamakktaccaagarcaaywgmamcrktckcthrmytacaatcaacgcttggmttcgcaaaatcgyattgtagatccttttttggcggarggrtatgaggtmaattaccaagtgtctgacgaycctgatgcagtctayggytayttgtckattccragtttggaaatcatggagccrgtttatytrggagcrgattaycatcatttagsratgggsttggcycatgtggatggkacrcckctkcctstkgakggwamagggattcgytcagtgattgctgggcaccgtgcagarccaagccatgtctttttccgccatttggatcagctaaaagttggagatgctctttattatgataatggccaggaaattgtagaatatcagatgatggacacagagattattttaccgtcggaatgggaaaaattagaatcggttagctctaaaaatatcatgaccttgataacctgcgatccgattcctacctttaataaacgcttattagtgaattttgaacgagtcgctgtttatcaaaaatcagatccacaaacagctgcagttgcgagggttgcttttacgaaagaaggacaatctgtatcgcgtgttgcaacctctcaatggttgtamckwrkgctagtggtactggcatttctgggaatcctgtttgttttgtggaagctagcacgtttactacgagggaaactaactaat

SEQ ID NO: 2836 - DNA, 951 bp, Streptococcus pneumoniae
  misc_feature (1)..(951): tiling:Spneumo1:WAN024AWM; Cluster includes WAN0240UY |fol P||CAC39132.1|||951 bp|dihydropteroate synthase|S.pneumoni ae||AJ311334|ORF|000
atgtcaastaaagccaatcatgcaaagacagctatttgyggaattatcaatgtaaccccagaytccttttcggatggtggycaattttttgctcttgagcaggcrctccagcaggctcgtaaattgatagcagaaggggctagyatgctmgatatcggcggagaatcgactcggccgggragyagywryakykakrtwgaratagaagaggaaatccarcgtgttgttccagtgattaaagcgattcgcaaggaaagtgatgtyctcatttctatcgatacttggaaaagtcaggtggcagargctgctttggctgctggtgccratctagtcaatgatatcactggtctcatgggtgatgaaaaaatggcccatgtggtwgctraagckrgagckmaagtggtyatcatgtttaacccagttatggctcgacctcagcatcctagttcgcttatcttccctcattttggctttggtcaaacctttacagaaaaagagttagctgactttgaaacattgccaatcgaagacttgatggtggctttctttgaacgagcactagcgagagcggcagaagctggtattgcaccagaaaatatcctgttggatccaggaattggctttggtctgaccaagaaagaaaatcttctccttttacgggacctkgataaactacatcagaagggctatccaatctttctcggagtgtcrcgcaagcgatttgtcatcaatatccttgaagaaagtgggtttgaagtcaatcctgagacagagcttggtttccgaaatcgggacacggcttcggctcatgtaactagtatcgctgcgagacagggtgtagaagtggtgcgcgtgcatgacgtagctagtcacaggatggcagttgaaattgcctctgccattcgtctggctgatgaagcggaaaatttagatttaaaacaatataaataa

SEQ ID NO: 2837 - DNA, 120 bp, Streptococcus pneumoniae
  misc_feature (1)..(120): tiling:Spneumo1:WAN024AXU; Cluster includes WAN023SIU NC_0 03098.1_1862||||1450691..1450810|+|120 bp|Glimmer 2.02 orf prediction|S.pneumoniae|R6|NC_003098.1|ORF|100
atgtcaatagtcttgcttaattattatcaaaatatttctaccaagaaaactaacyatgattctagtgaaaagaaaaatcttctttgtcaacaaatttactttcttgttttaaacatgcta

SEQ ID NO: 2838 - DNA, 720 bp, Streptococcus pneumoniae
  misc_feature (1)..(720): tiling:Spneumo1:WAN024B3E; Cluster includes WAN02411B |cps 6aR||AAL68422.1|||678 bp|putative ribitol transferase|S.pn eumoniae||AF246898|ORF|000
atgtcaatatatagaatctgtaaagatattgaaagaaaaactatgtcgcctgctaaaaaagcaatggctaaaaacgactattttgcattttatgttggaagacctttatcctrtcttttaacagttcctttcgtgaaaacaaatattactcccaatcaaatatcttatttatctataattcctttgattgttggatttataataatgatattwacaactgatttcgttgtattattactggcatggtttmtattttttttatggaacttactagatggagtagatgggaacttagccagatatcgggagcaatactcgaaggatggaagtgtagtagatgcaatggctggctatgtagccatggtgttgacgtatttcggtgcaggaatagtagctgctcatttaaacgactcagatatctatataattttgggtgcattatctgggatttcattgatttttccaaggttagtgatgcataagtatatcaatacagtagctcaagatgagtcwgtgagtagcrttaaagataaatctgatttkaatactrtaaraatactggctctaaacatgacatcaattacaggaattccgcaggttttactgctattaactattttaacaaatcagtgggtactttttactttagtatattttacgattaattttttattaatgatattttctttgtattcattattcaaaaaggagaatgtttag

SEQ ID NO: 2839 - DNA, 1469 bp, Streptococcus pneumoniae
  misc_feature (1)..(1469): tiling:Spneumo1:WAN024GKQ; Cluster includes WAN0244GX spr0 449|hsdM|15902493|NP_358043.1|454903..456366|-|1464 bp|Eco E type I restriction modification enzyme M subunit|S.pneum oniae|R6|NC_003098.1|ORF|221
atgtcaattacatcatttgtaaaaagaattcaagatatcactcgaaacgatgctggtgttaatggtgatgctcaacgtattgagcaaatgtcttggttattattcttaaaaatttatgatagccgtgaaatggtttgggaattagaagaagacgagtatgagtcaattatcccaraggaattaaaatggcgaaattgggctcatgctcaaaatggggaacgggtattgacaggcgatgaattacttgattttgtcaataacaagttattcaaagagttgaaagagcttgaaataacttcaawtatgcctattcgaaaaacgattgttaaatcagcttttgaagatgcgaacaactatatgaaaaatggcgtcttgttacgccaagtcatcaatgttattgatgaagttgatttcaatagccctgaagatcgtcattcgtttaatgatatttacgaaaaaattcttaaagatattcaaaatgctgggaactsaggagaattttatacgccacgtgcagcgactgattttattgccgaagttcttracccaaaacttggagaatcaatggcagaccttgcttgcggaacaggaggcttcttgacttcgactctgaaccgtttaagtagtcaacgtaaaactagtgaagataccaaaaaatataatacagctgtttttggtattgaaaagaaagcatttcctcatcttttagcagttacaaatctgtttcttcacgaaattgatgaccctaaaattgttcatggaaatactttggagaaaaatgttcgtgaatatacggatgatgaaaaatttgacattattatgatgaatccaccttttggagggtcagaattagaaacaataaaaaataactttccagcagaattacggagttctgaaacagctgatttatttatggctgtcattatgtatcgtttraaagaaaatggtcgtgttggagttattttacckgakggttttctatttggtgaaggtgtaaaaactcgcttgaaacaaaaactggtagatgagttcaacttrcatacgattattaggttgcctcatagtgtctttgcaccgtatacaggaatccatacgaacattcttttctttgataaaacaaagaaaacagaagaaacttggttttatcgtttagatatgccagatggttataaaaatttctcgaaaactaagccgatgaagtcagaacacttcaatcctgttcgtgactggtgggaaaatcgtgaagagattytggaaggtaagttctacaaatctaaatcatttacacctagtgaattggctgagttgaattataatttagaccagtgtgrctttccaaaagaggaagaggaaatcttaaatccctttgagttgattcagaattatcaagcggaaagagcaactttaaatcataagattgataatgtattagctgatattttgcagttgttggaggacaaataactaat

SEQ ID NO: 2840 - DNA, 1310 bp, Streptococcus pneumoniae
  misc_feature (1)..(1310): tiling:Spneumo1:WAN024G56; Cluster includes WAN02440M spr1 036|eno|15903080|NP_358630.1|1018322..1019626|+|1305 bp|En olase|S.pneumoniae|R6|NC_003098.1|ORF|331
atgtcaattattactgatgtttacgctcgcgaagtcctagactcacgcggtaacccaacacttgaagtagaagtttacactgaatcaggtgctttcggacgtggtatggttccatcaggagcttctactggtgaacacgaagcagttgaacttcgcgacggtgacaaatctcgttacggtggtcttggtacacaaaaagctgttgacaacgtaaacaacatcattgctgaagctatcattggctacgatgtacgtgatcaacaagctattgaccgtgctatgatygcacttgacggtactcctaacaaaggtaaattgggtgcgaatgcaatcctcggtgtgtctatcgctgtagctcgtgctgctgctgactaccttgaaatcccactttacagctaycttggtggattcaacactaaagyycttccaactccaatgatgaacatcatcaacggtggttctcactctgacgctccaatcgctttccaagagttcatgatcttgccagttggtgcgccaacatttaaagaagcccttcgttacggtgctgaaatcttccacgcycttaagaaaatccttaaatcacgtggtttggaaactgccgtaggtgacgaaggtggattcgctcctcgtttcgaaggaactgaagatggtgttgaaactatccttgctgcgattgaagctgctggatatgtaccaggtaaagacgtatttmtyggatttgactgtgcttcatcagaattctacgataaagaacgtaaagtttacgactacactaaatttgaaggygaaggtgctgctgttcgtacatctgcagaacaaatcgactaccttgaagaattggttaacaaatacccaatcatcactattgaagatggtatggatgaaaacgactgggatggttggaaagctcttactgaacgtcttggtaagaaagtacaacttgttggtgacgacttcttcgtaacaaacactgactaccttgcacgtggtatccaagaaggtgctgctaactcaatccttatcaaagttaaccaaatcggtactcttactgaaacttttgaagctatcgaaatggctaaagaagctggttacactgctgttgtatcacaccgttcaggtgaaactgaagattcaacaatcgctgatatygcagttgcaactaacgcaggacaaatcaagactggttcactttcacgtacagaccgyatcgctaaatacaaccaattgcttcgtatcgaagaccaacttggtgaagtagctgaatatcgtggattgaaatcattctacaaccttaaaaaataactaat

SEQ ID NO: 2841 - DNA, 698 bp, Streptococcus pneumoniae
  misc_feature (1)..(698): tiling:Spneumo1:WAN024DH9; Cluster includes WAN0244AW spr0 666|ftsE|15902710|NP_358260.1|669477..670169|+|693 bp|ABC transporter ATP-binding protein & cell division protein|S. pneumoniae|R6|NC_003098.1|ORF|111
atgtcaattattgaaatgagagatgtcgttaaaaaatacgacaacggaacractgctctacgcggtgtttcggtyagcgttcarccgggggaatttgcttacatcgtaggaccttcaggagcagggaagtcaacttttattcgttctctgtatcgtgaagtaaaaatcgataaaggaagyctatcagttgctggttttaatctggttaagatcaaaaagaaagatgtcccgcttctacgtcgtagtgttggggttgtcttccargattataaaytgttaccaaagaaaactgtctatgaaaatattgcttacgctatggaagtaatcggggaaaatcgccgtaatatcaaaaracgagtgatggaagttttggacttggttggattgaagcataaggttcgttctttcccaaatgaactctcaggtggggagcaacagcggattgcgattgcgcgtgcaattgtaaataatcccaaagtattgatagctgatgagccaacaggaaatctggatccggataattcatgggaaattatgaatctcttggaacggattaacytacaaggracaactattttgatggcgactcataatagccagattgtaaataccttgcgccaccgtgtcattgccattgaaaatggccgtgtcgttcgtgacgaatcaaaaggagagtatggatacgatgattarctaat

SEQ ID NO: 2842 - DNA, 366 bp, Streptococcus pneumoniae
  misc_feature (1)..(366): tiling:Spneumo1:WAN024CZE; Cluster includes WAN0243DG spr1 873||15903914|NP_359464.1|1843471..1843770|-|300 bp|Conser ved hypothetical protein|S.pneumoniae|R6|NC_003098.1|ORF|1 11
atgtcaattattttaacaacgatcgttgctttggagcatttttacattttttatttggaaagtattgccacgcaatcagatgcgactagtcgtgtatttaatatggaaaaggaagaattggctcatccgtcagtaagttcattgttcaaaaatcaaggratttataaggctctgctaggagtctttctcttgtatgtcatttatttctcacakaatttagaaattgtgactatttttgtcttatttgtgattggtgctgcgacttacggctctttaacagcggataaaaaaattattttgaaacaaggtggatcagctattttggccttgattagtattttactctttaaatacactykaactaat

SEQ ID NO: 2843 - DNA, 102 bp, Streptococcus pneumoniae
  misc_feature (1)..(102): tiling:Spneumo1:WAN024CNJ; Cluster includes WAN0246SA 5613 45-72-0||||||102 bp|DNA Streptococcus pneumoniae phage Dp- 1 open reading frame 268|S.pneumoniae||WAN0246SA|ORF|000
atgtcaatttcggtcttgtgcttgacaatggattcaactactgatgcgtcaacctttttcaatcgcgacagcttgtccaattcattgtcaattctagagtaa

SEQ ID NO: 2844 - DNA, 1638 bp, Streptococcus pneumoniae
  misc_feature (1)..(1638): tiling:Spneumo1:WAN024FZL; Cluster includes WAN02417J |met S2||AAO25636.1|||1638 bp|drug-resistant methionyl-tRNA syn thetase|S.pneumoniae||AY198311|ORF|000
atgtcaatttttattggaggagcatggccatatgcaaacggttcgttacatattggtcacgcggcagcgcttttaccgggggatattcttgcaagatactatcgtcagaagggagaggaagttttatatgtttctggaagtgattgtaatggaacccctatttctatcagagctaaaaaagaaaataagtctgtgaaagaaattgctgatttttatcataaggaatttaaaswaactwwtgaaaaattaggttttacatatgacttgtactcgcgaacagattctccactacatcatgagatagtacaagaattatttttgcaattatacgagaagaaatttttgtatacaaaaaaaattaaacaactctattgtacatttgataatcaattcttacctgataggttcgttgaaggaaaatgcccgaattgtggaacccattcaagaggagatcaatgtgataattgctcagcaattttagatcctatagatttagttgataaaagatgttctatttgttccaatgaaccagaagttcgtgagacagaacacttttattatgtttttagtgagtttcaaaatttgttagagacttacttaaatgatgctgaagaaacagtgagatggcgaaaaaatgcaataaatctaactaaaaggtatttacgggaaggtttacctgatcgagctgttactcgtgatctaccaaatgggattccagttcccattgatggttttagagataaaaaaatatatgtctggtttgaagcggtagcaggttactacacagcaagtgttgattgggcgcaaaaacttcaaaataatattactgatttttggaacaatcggacaaagtcatattatgttcatggaaaagataacatcccatttcatactattatttggccggcaatactctcaggtttagaaatagagcctcttccagagtatattatttctagtgaatatttaacgttagaaaacaaaaaaatatcaacaagtaataattgggctatatggcttaacgatatcataaaaaaatatgatgctgattcaatccgatacttcctaacaataaatgctcctgagatgaaagatgcaaatttttcttggagagaatttatttatagtcataactcagaattattaggatcgtacggtaattttatcaataggactctaaagtttattgaaaagtattttgaatctgaaatacccactaaatatctcgaaggagaaattttatataatttgaaagaattatatacaacagtaggtaatttagttgagagcgggcatatgaaacaggcattagaagaaatttttgaatatattagatcggctaataaattctatgatgatatgaaaccgtgggcattgcgagagtccgatattgaaaaatgtaaagaagtcttagctacttgtgtaatcattatacttaatttaggacaaatgttaaatccattcattcctttttctggtaaaaagattgaggatatgtttaaaacaaagctaaatacttggaattatatttcaaaccttcctaacaagctatcagatgtatcaatgttgtttgataggattgatttgaaaaaaattgacgaggaagttttagaattgcaacaaacatccagtagataa

SEQ ID NO: 2845 - DNA, 770 bp, Streptococcus pneumoniae
  misc_feature (1)..(770): tiling:Spneumo1:WAN024FBV; Cluster includes WAN0243IT spr1 679||15903721|NP_359271.1|1651238..1652002|-|765 bp|Hypoth etical protein|S.pneumoniae|R6|NC_003098.1|ORF|111
atgtcacaacaagtgaaaaatgctcacaacctatacatccatgccattcaagacggrcgagttgctgaggctcaagcccagtctgtaggggatacctatatccaacattcgacaggtgttcctgacgggaaagaaggatttgcagccttctttgcagatttctttgagcgtcatccagagcgtcagattaagattgtccgcaccattgaggatggcaatctggtctttgttcatgttcatcaatatctgaatggtggagaagctcaatgggtgacgacggatactttccgtgmggatgagaatggtygtattgttgagcattgggatgtcattgactactatcgaacacctgaaaatgaycaactagatcaaatttttggagattttgaaatcaaggatttggayaagaaagcagaaaataaaaarctggttcgccgtttcttgacagaaattttccaaaatggggagctagagcagtggagtgattatgtggcagacgatttgattcagcataatcatgakattggacaaggaagtgctgcttataaaaactatgtggctgaatatagtgtcacttttgactttgttttccaactcttaggacaaggaaactatgtggttagctatggtcagactcagattgatggcgttgcttatgcccagtacgatatcttccgtttagagaacgggaaaattgtggagcattgggataataaggaagtyatgcctaaggtagaagacttgacyaatcgagggaagttttaactaat

SEQ ID NO: 2846 - DNA, 398 bp, Streptococcus pneumoniae
  misc_feature (1)..(398): tiling:Spneumo1:WAN024DK7; Cluster includes WAN0244LU spr0 272|rpsI|15902316|NP_357866.1|272865..273257|+|393 bp|30S Ribosomal protein S9|S.pneumoniae|R6|NC_003098.1|ORF|111
atgtcacaagcacaatatgcaggtactggacgtcgtaaaaacgctgttgcacgcgttcgccttgttccaggaactggtaaaatcactgttaacaaaaaagatgttgaagagtacatcccacacgctgaccttcgtcttgtcatcaaccaaccattcgcagttacttcaactgtaggttcatacgacgttttcgttaacgttrtaggtggtggatacgctggtcaatcaggagctatccgtcacggtatcgctcgtgcccttcttcaagtagacccagacttccgcgattcattgaaacgcgcaggacttcttacacgtgactcacgtaaagttgaacgtaagaaaccaggtcttaagaaagctcgtaaagcatcacaatttagtaaacgttaactaat

SEQ ID NO: 2847 - DNA, 312 bp, Streptococcus pneumoniae
  misc_feature (1)..(312): tiling:Spneumo1:WAN024DSV; Cluster includes WAN0244OH spr0 177||15902221|NP_357771.1|185057..185362|+|306 bp|Conserve d hypothetical protein|S.pneumoniae|R6|NC_003098.1|ORF|111
atgtcacacgatcataaccacgaccacgaagaacgtgaactaatcacactagtagatgagcaaggaaatgaaaccttgtttgaaatccttttgacaattgatggaaaagaagaatttggtaaaaactatgttcttctagtaccagttaacgcagaagaagacgaagacggacaagttgaaatccaagcttactcattcatygaaaaygaagatggaacagaaggcgaattgcaaccaatcccagaagactcagaagacgaatggaacatgattgaagaagtcttcaacagctttatggaggagykaactaat

SEQ ID NO: 2848 - DNA, 624 bp, Streptococcus pneumoniae
  misc_feature (1)..(624): tiling:Spneumo1:WAN024FFA; Cluster includes WAN0243LZ spr1 564||15903607|NP_359157.1|1544531..1545148|+|618 bp|Hypoth etical protein|S.pneumoniae|R6|NC_003098.1|ORF|221
atgtcacaggataaacaaatgaaagctgyttctccccttytgcagcgagttatcaatatctcatcgattgtcggtggggttgggagtttgattttctgtatttgggcttatcaggctgggattttacaatccaaggaaaccctctctgcctttatccagcaggyaggcatctggggtccacctctctttatctttttacagattttacagactgtcgtccctatcattccaggggccttgacctcggtggctggggtctttatctacgggcacatcatcgggactatctacaactatatcggcatcgtgattggctgtgccattatcttttatctrgtgcgcctatacggagctgcctttgtccartctgtcgtcagcaagcgcacctacgacaagtacatcgrctggctagataagggcaatcgttttgaccgcttctttatttttatgatgatttggcccattagcccagctgactttctctgtatgctggcygccctgaccaagatgagyttcaagcgctacatgacyatcatcattctgaccaaaccctttaccctcgtggtttatacctacggtctgacctatattattgactttttctggcaaatgcttykaactaat

SEQ ID NO: 2849 - DNA, 1355 bp, Streptococcus pneumoniae
  misc_feature (1)..(1355): tiling:Spneumo1:WAN024DZB; Cluster includes WAN0243D7 spr1 882|gpi|15903923|NP_359473.1|1859131..1860480|-|1350 bp|Gl ucose-6-phosphate isomerase|S.pneumoniae|R6|NC_003098.1|OR F|331
atgtcacatattaaatttgattattcaaaagttttagacaaatttgttgcaccacatgaagtggaatacatgcaatcacaagtaacagcagcagatgaattratccgtaaaggaactggtgctggtagcgacttcttgggatggttggaccttcctgaaaaatacgaycgcgaagaatttgaccgcatcttgaaagctgctgagcaaatcaagtcagacagcgatgttttggttgtgatcggtattggtggatcttaccttggtgcaaaagcagcaatcgacttcttgaatcaccattttgctaacttgcaaacaaaagaagaacgcaaagctccacaaatcctttacgcaggaaactcaatctcatctacttaccttgctgacttggtagagtatgttgcagacaaagacttctcagtaaacgtaatttctaaatcaggtacaacaactgaaccagcgattgctttccgtgtctttaaagaactcttggttaagaaatacggtcaagaagaagctaacaaacgtatctatgcaacaactgaccgccaaaagggtgctgttaaggttgaagcagacgctaacggttgggraacatttgttgttccagatgatatcggtggacgcttctcagtattgacagccgttggtttgcttycaatcgcagcatcaggagctgacatmaaagctcttatggaaggtgcgaatgcagctcgcaaagactacacttcagacaaaatctctgaaaacgaagcttaccaatacgcagyygttcgtaacatcctttatcgtaaaggctatgcaactgagatcttggtaaactatgagccatcacttcaatacttctcagaatggtggaaacaattggctggtgaatcagaaggaaaagaccaaaaaggtatctacccaacttcagccaacttctcaactgacttgcactcacttggtcaatttatccaagaaggaactcgtatcatgtttgaaacagttgtccgtgttgacaaacctcgtaaaaacgtgcttattcctactttggaagaagaccttgacggacttggttaccttcaaggaaaagacgttgactttgtaaacaaaaaagcaactgacggtgttcttcttgcccacacagatggtgatgtaccaaacatgtatgtgactcttccagagcaagacgctttcactcttggttacactatmtacttcttcgaattggcaattgccctttcaggttacttgaatgctatcaacccatttgaccaaccaggtgttgaagcttataaacgtaacatgtttgcccttcttggaaaaccaggatttgaagaattgagcaaagaacttaacgcacgtctataactaat

SEQ ID NO: 2850 - DNA, 475 bp, Streptococcus pneumoniae
  misc_feature (1)..(475): tiling:Spneumo1:WAN024C8D; Cluster includes WAN023M8O 3142 99_408||||208865..209167|-|303 bp|EGAD orf prediction|S.pn eumoniae|R6|NC_003098.1|ORF|220
atgtcaccagctgttacttcagcaggaccttcaacatccagttcgatgattttttcgtcttcaacgtacgatttcactgcaattcctttaatgttcagaatgatttgcatcacgtcttcacgaacacctggaactgtgtcaaactcatgtaacacaccatcaatgttgatagatgtcacagctgctcctggtagagaagctagaagtacacgacgaagagagttaccaagagttgtaccgtagccacgttcaagtggttcgattacaaacttgccataatctttattttcatcaatttttgttatatttggtttttcaaactcgatcatttagttactccctcttaaacgaaaagcagtgtaatgcgatgattatacacggcgacgttttggaggacgagcaccattgtgtggcactggagtcacatcacgaattgctgttacttcaagaccagcggcagcaagcgcacgaatag

SEQ ID NO: 2851 - DNA, 51 bp, Streptococcus pneumoniae
  misc_feature (1)..(51): tiling:Spneumo1:WAN024ARE; Cluster includes WAN024EQD-rc R 6.IG_297||||275936..275986|-|51 bp|Between spr0276 (bglA) (+ strand) and spr0277 (+ strand)|S.pneumoniae|R6|NC_00309 8.1|IG-rc|110
atgtcacctcaatatgctaaacaaactgagaataatctcagtttgtttata

SEQ ID NO: 2852 - DNA, 872 bp, Streptococcus pneumoniae
  misc_feature (1)..(872): tiling:Spneumo1:WAN024GHL; Cluster includes WAN0244F3 spr0 515|metF|15902559|NP_358109.1|514259..515125|+|867 bp|5,10 -methylenetetrahydrofolate reductase|S.pneumoniae|R6|NC_00 3098.1|ORF|111
atgtcacgccaaacaccgtcactctcatttgaagtgttccctccaamcccagccgtgggtaatgrtaacattatttcagccttgcaggatatgcaggagttggctccccattttatcagtgtaactgccagcaataataaatttaatatcaaggaaacgacggttcgtttggctgactttatccaaaatgayttggcgattccgaccattgcccacttgccagctatttatctaactaaggacaaggttgctgaaactattgctgacttggacaaagttggggtgcagaaaatcttggctcttcgtggggatattattccagacgtrgaaccacaaaaggatttccgctatgcaaccgacttgattgagyttatcaaggaacrarcccctcactttgatattattggagcttgctatccagaagggcatccagattcgccaaatcagatttcagatattcaaaatcttaagaagaaagtggatgcaggctgttcgagcctcgtaactcagctcttctttgayaatgagcgcttctatgattttcaggacaagtgyatyttggctgggattgatgttcccattcatgcaggaattatgccaattctgaatcgaaatcaggctctccgactcttgaagacttgtgagaatatccatcttccacgcaaatttaaagccatcttagacaagtatgagcatgaccctgartcgctcagagcagcaggacttgcctatgcagtggaccaaatcgtggacttggtaactcaggatrttgccggtgtgcatctctatacgatgaataatgctgatacagcaaaatacatccatcaagcaacccatgccttgtttaatcaccagtctctaggataactaat

SEQ ID NO: 2853 - DNA, 542 bp, Streptococcus pneumoniae
  misc_feature (1)..(542): tiling:Spneumo1:WAN024C8S; Cluster includes WAN0244NQ spr0 204|rplF|15902248|NP_357798.1|203327..203863|+|537 bp|50S Ribosomal protein L6|S.pneumoniae|R6|NC_003098.1|ORF|111
atgtcacgtattggtaataaagttatcgtgttgcctgctggtgttgaactcgctaacaatgacaacgttgtaactgtaaaaggayctaaaggagaacttactcgtgagttctcaaaagatattgaaatccgtgtggaaggtactgaartaactyttcaccgtccaaacgattcaaaagaaatgaaaactatccacggaactactcgtgcccttttgaacaacatggttgttggtgtatcagaaggattcaagaaagaacttgaaatgcgtggggttggttaccgtgcacagcttcaaggatctaaacttgttttggctgttggtaaatctcatccagacgaagttgaagctccagaaggaattacttttgaacttccaaacccaacaacaatcgttgttagcggaatttcaaaagaagtagttggtcaaacagctgcttacgtacgtagccttcgttcaccagaaccatataaaggtaaaggtatccgttacgttggtgaattcgttcgycgtaaagaaggtaaaacaggtaaataactaat

SEQ ID NO: 2854 - DNA, 617 bp, Streptococcus pneumoniae
  misc_feature (1)..(617): tiling:Spneumo1:WAN024DME; Cluster includes WAN0244R8 spr0 078|rpsD|15902122|NP_357672.1|85780..86391|+|612 bp|30S Ri bosomal protein S4|S.pneumoniae|R6|NC_003098.1|ORF|111
atgtcacgttatacaggaccatcttggaaacaagctcgtcgycttggcctttcacttacaggtacaggtaaagaattggcacgtcgtaactacgtaccaggacaacacggaccaaacaaccgttctaaattgtcagaatacggtttgcaattggctgaaaaacaaaaacttcgtttcacttacggtgtaggtgaaaaacaattccgtaacttgttcgtacaagctacaaaaatcaaaggcggaatcctaggtttcaactttatgcttcttttggaacgtcgtttggataacgttgtttaccgtcttggtctcgcgactactcgtcgtcaagctcgtcaattygtaaaccacggtcacatccttgttgacgggaaacgcgttgatatcccatcatrccgcgtaactccaggtcaagtgatctcagttcgtgaaaratcattgaaagttccagcaatccttgaagcagtaswarctamtcttggacgtccagcattcgtatcattcgacgctgaaaarttggaaggttcattgactcgcttgccagaacgcgacgaaatcaacccagaaatcaacgaagcacttgtcgttgaattctacaacaaaatgttgtaactaat

SEQ ID NO: 2855 - DNA, 1974 bp, Streptococcus pneumoniae
  misc_feature (1)..(1974): tiling:Spneumo1:WAN024E2S; Cluster includes WAN023IUN 8557 3_2493||||1409262..1411229|-|1968 bp|EGAD orf prediction|S .pneumoniae|TIGR4|WAN01UC25|ORF|010
atgtcactacaatcagttaacgccattcgttttcttggcgtagatgctattaacaaatctaattctggtcacccgggaatygtcatgggtgctgcgccaatggcttatagcctatttacaaagcaccttagaattacacctgagcagccaaactggattaaccgagatcgctttatcttgtctgcgggtcatggatcaatgctactgtatgctctcttgcatttaacagggtataasgatgtatccatggacgagattaaaaatttccggcaatggggatctaagacacctggtcatcctgaagtgacgcatacgtctggtgtggatgcgacatctggtccgcttggtcaggggatttctactgccgttggtttcgcccaagcagagcgttttttagctgctaagtacaacaaagatggtttycctatttttgaccattatacttatgttatcgctggagacggtgacttcatggaaggagtgtctgcggaggcggcttcttatgcaggtcatcaagctttagataagcttatcgtcctctacgactccaacgayatctgcttggatggtgagaccaaagatactttctctgaaaatgttcgcgyccgttacgatgcttatggttggcatacagttctggtagaagatggaacagatttagcagcaatttctacagcaattgagacggccaarttttctggtaarccgagtttgattgaagtgaaaacggtaattggttacggctcacccaataaaagtggtacaaatgctgttcatggtgcaccactaggagcagaagaaacaggagcaactcgtaagtttttgggatgggattacgatccatttgaagtaccagaggaagtatattctgatttcaagacaaatgtagcggatcgtggtcaggaggcatacgatgcttgggctagtttggtgtctgattacaaggttgcttatcccgaagttgctagtgagattgacgctattgtagctggaaaatcccctgtaaccattactgaaaaagacttccctgtctatgagaatggcttctctcaagcaactcgtaattcgtcccaagatgctattaatacagcagcagttttaccaaccttcttaggtggatcggcagacttagctcactcyaacatgacctacatcaaggcagatggcttacaagataaatataatccattaaaccgcaatattcagtttggggtacgtgaatttgccatgggaacaatcctcaatggaatggctcttcatggtggtttacgagtttatggcggaaccttctttgttttctctgactacgtcaaagctgctattcggctatcagccattcaggagttgcctgtaacttatgtctttacccatgattcaattgccgttggtgaagatggtccaactcatgaaccagttgaacatttggcaggtttacgctcaatgccaaacttgactgttatccgtccagcggatgcccgtgaaactcaagcggcttggcatcatgccttgaccagtaccaccactccaactgtcattgtcttaacccgtcaaaacttggtagttgaagaagggacagactttggtaaggtcgctaaaggagcctacgtcgtgtatgataccccgggatttgatactattatcattgctacaggatctgaggtcaatctagctatcaaagctgctaaggaattggttttacaaggtggtaaagtacgtgtggtatctatgccctcaaccgaactatttgatgctcaagatgctacctacaaggaagacattttaccatctaagactcgtcgtcgtgtggccattgaaatggcagcgacccaaagttggtacaagtatgttggtttggatggcgcggtcatcggtattgacatcttcggtgcgtctgccccagctcagactgtgattgataattatggatttacggtagagaatatcgttgctcaagttaagtccctactarctaat

SEQ ID NO: 2856 - DNA, 204 bp, Streptococcus pneumoniae
  misc_feature (1)..(204): tiling:Spneumo1:WAN024EYO; Cluster includes WAN0243QY spr1 385||15903428|NP_358978.1|1368890..1369084|-|195 bp|Hypoth etical protein|S.pneumoniae|R6|NC_003098.1|ORF|111
atgtcacttgaaaacaaattggaacaagcaacaggcgctgtcaaagaaggttttggtaaagttactggagacagcaagacagaacttgaaggagctgttgaaaaaacagttgctaaggcaaaagacgttgtagaagacgcaaaaggtgctgtagaaggtgccgttgaaggtttgaaaaacgtttttactaaakaactarctaat

SEQ ID NO: 2857 - DNA, 1218 bp, Streptococcus pneumoniae
  misc_feature (1)..(1218): tiling:Spneumo1:WAN024CFG; Cluster includes WAN02413H |int -Tn||CAA43360.1|||1218 bp|integrase of Tn1545|S.pneumoniae ||X61025|ORF|001
atgtcagaaaaaagacgtgacaataaaggtcgaatcttaaagactggagagagccaacgaaaagacggaagatacttatacaaatatatagattcatttggagaaccgcaatttgtttactcgtggaaacttgtggctacagacckagtaccagcaggaaagcgtgattgtatctcacttagagagaaaatcgcagagttacagaaagacattcatgatggtattgatgttgtaggaaagaaaatgacactctgccagctttacgcaaaacagaacgctcaaagaccaaaggttagaaaaaacactgaaactggacgcaaatatcttatggatattttgaagaaagacaagttaggtgtaagaagtattgacagtattaagccatcagacgctaaagaatgggctattagaatgagtgaaaatggttatgcttatcaaaccatcaataactacaaacgttctttaaaggcttcattctatattgctatacaagatgattgtgttcggaagaatccatttgactttcaactgaaagcagttcttgatgatgatactgtccctaaraccgtactaacagaagaacaggaagaaaaactgttagcctttgcaaaagctgataaaacctacagcaaaaattatgatgaaattctgatactcttaaaaacaggtcttcgtatttcagagtttggtggtttgacacttccagatttagattttgagaatcgtcttgtcaatatagaccatcagctattgagagatactgaaattgggtactacattgaaacaccaaagaccaaaagtggcgaacgtcaagttcctatggttgaagaagcctatcaagcatttaagcgagtgttagcgaatcgaaagaatgataagcgtgttgagattgatggatatagtgatttcctctttcttaatagaaagaactatccaaaagtggcaagtgattacaacggcatgatgaaaggtcttgttaagaaatacaataagtataacgaggataaattgccacacatcactccacatagtttgcgacatacattctgtaccaactatgcaaatgcaggaatgaatccaaaggcattacagtacattatgggacatgctmatatagccatgacgctgaactattacgcacatgcaacattcgattctgcaatggcagaaatgaaacgcttgaataaagagaagcaacaggagcgtcttgttgcttag

SEQ ID NO: 2858 - DNA, 929 bp, Streptococcus pneumoniae
  misc_feature (1)..(929): tiling:Spneumo1:WAN024D9R; Cluster includes WAN0243XC spr1 155|pyrB|15903198|NP_358748.1|1159367..1160290|-|924 bp|As partate carbamoyltransferase|S.pneumoniae|R6|NC_003098.1|O RF|111
atgtcagaaaatcaacaagcattgaaccatgtggtgtccatggaagacctcactgtygatcaagtaatgaaattgatcaagcgaggaattgagtttaaaaatggagcccagmttccctatgaagaccatccgattgtttccaatctcttctttgaggattctacacggacacataagtcctttgaagtcgcagagattaaacttggattggaacgacttgactttgatgtgaagactagytcggttaataagggtgagacactttatgayaccattttgactctgtctgctttaggagtggatgtctgtgtgattcgccatccagaggtcgactactatagagaattgattgctagtccaacgattacgacttccatcatcaatggtggagatggttcgggycaacaccctagccagagcttgcttgatttgatgaccatttatgaggaatttggccactttgaggrtcttaaagttgctattgcaggtgacttggaycactcacgcgttgccaaatccaatatgcagattttgaaacgcttgggakctgaactctttttcgctggacctgaggaatggagaagtcaagagtttgcagactatggamagtttgtaaccattgatgaaatcattgatcaggttgatgtcatgatgtttctccgtgtgcaacacgaacgccatgatagtggagctgtattttcaaaagaagactaccatgcccaacatggcttgactcaagaacgttacgatcgtttgaaagaaacagcaatcctcatgcacccagctccaatcaatcgtgatgtagaaatagcagaccacttggttgaagcaccaaaatcacggattgtccaacaaatgaccaatggtgtctttgttcgaatggcaatcttagaatccgtactagcgagtagaaacgccaactaactaat

SEQ ID NO: 2859 - DNA, 764 bp, Streptococcus pneumoniae
  misc_feature (1)..(764): tiling:Spneumo1:WAN024D74; Cluster includes WAN0243PJ spr1 436||15903479|NP_359029.1|1419322..1420080|-|759 bp|Conser ved hypothetical protein|S.pneumoniae|R6|NC_003098.1|ORF|1 11
atgtcagaagcaggtcataagtttttagcaaaattggggaaaaaacgcttacgtccaggtggaaagcgtgccacagattggttaattgcagaaggaggattttcaaaagaaaagagaatactagaggttgcgtgtaataggggaactacagcaattgagttggcacagcgttttggttgcaagataactgctgttgatatggatgctcaagctttagaagtggctaaaaaatctgctggaacggcaggtgttgctcatttaatcagttttgaaagagcaaatgcaatgaaacttccttatcaagatgctagttttgatattgttataaatgaagctatgctgactatgcaagccgatcaagctaagaaaaaatgtgtaatggaatatctaagggtattaaaacctggaggtcttctmttgacrcatgatgtgcttcttaaggaagctaaagagtctatcagacaggaattatcacaagcaattcatgtaaatgtaggtcctttaactcaagatggttgggaacaggtgatgatagaatcaggttattgtgatgtgaaagyattgactggtgaaatgacattaatgaaattatcgggtatgatttatgacgaaggtttgctaggaactttgaaaatttgtgtaaatgcttgtaaaaaggagaatagaaagcagtttttaactatgtataaaatgtttgctaagaataaacagaaattgggytttattgcgatggctagttataaatcgtcaaaacgttarctaat

SEQ ID NO: 2860 - DNA, 186 bp, Streptococcus pneumoniae
  misc_feature (1)..(186): tiling:Spneumo1:WAN024CLM; Cluster includes WAN0241Z5 SP17 56||15901587|NP_346191.1|1656602..1656781|-|180 bp|conserv ed domain protein|S.pneumoniae|TIGR4|NC_003028.1|ORF|021
atgtcagaggaagatttattttacaaagacgttgaaggccgcatggaagagttgaaacaaaaacccatcaagaaggaaaaagaaacccgaggggaaaagattagtaagactttttcacttttactgggtttgatgattctgattggtttgctctttactttgctgggaattttgaggctarctaat

SEQ ID NO: 2861 - DNA, 1196 bp, Streptococcus pneumoniae
  misc_feature (1)..(1196): tiling:Spneumo1:WAN024GCY; Cluster includes WAN0244AR spr0 671|metK|15902715|NP_358265.1|676119..677309|+|1191 bp|S-a denosylmethionine synthetase|S.pneumoniae|R6|NC_003098.1|O RF|221
atgtcagarcgtaaattattcacgtctgaatctgtatctgaggggcatccggataagattgcagaccaaatttcagatgcgattttggatgctattttagcaaaggatccagaggcgcacgttgctgctgaaacagctgtatatactggttctgtccacgtttttggtgaaatttctacaaatgcctatgtggatattaaccgtgtggttcgtgataccattgcagagattggttataccaatacagaatatggattttctgctgagacggtgggagtacacccatctttggtggaacaatctcctgacatcgctcaaggtgttaacgaagccttggaggttcgyggaaatgctgatcaagatccactggacttgattggagcaggtgaccaagggctcatgtttggatttgcagtagatgaaacagaagagctyatgccattgccaattgcactcagtcataaattggttcgtcgtctggcagaacttcgtaagtctggagaaattagctatctccgtccagatgcaaaatcacaagttacagttgagtacgatgaaaatgaccgtccggtacgtgtagatacagtcgttatttctactcagcatgatccagaggccactaatgaacaaatccatcaagatgtgattracaaggtcatcaaagaagttattccatcttcttatcttgatgataagacaaaattctttatcaatccgacaggtcgttttgtaatcggtggtcctcaaggggactcaggtttgactggtcgtaagattattgtagatactyatggtggctactctcgtcatggtggtggtgccttctctggtaaagatgcgactaaggtggatcgttcagcctcttatgcggctcgctatattgccaagaatatcgttgcagcagrccttgctaagaaggcagaagtgcagttggcctatgctatcggtgttgcgcaacctgtttctgttcgtatcgatactttcggtacaggaacagtagctgaaagtcaacttgaaaaagcggctcgtcaaatctttgaccttcgccctgcagggattatccaaatgctggacctyaagcgtccaatttaccgtcaaacatcggcttacggtcacatgggacgtacagatattgatcttccatgggaacgtttggataaggtagatgctttgaaagaagcagtaaaataactaat

SEQ ID NO: 2862 - DNA, 494 bp, Streptococcus pneumoniae
  misc_feature (1)..(494): tiling:Spneumo1:WAN024EWD; Cluster includes WAN0243FX spr1 783|kdtB|15903825|NP_359375.1|1757536..1758024|-|489 bp|li popolysaccharide core biosynthesis protein|S.pneumoniae|R6 |NC_003098.1|ORF|111
atgtcagataagattggcttattcacaggctcatttgatccgatgacaaatgggcatctggatatsattgaacgggcgagcagactytttgataagctytatgtsggtattttttttaatccccacaaacaaggatttctycctmtygaaaatcgtaaacgggggytagaaaaggctktgrracatytggraaatgttraagtcgtgkcttctcatgatraattggtggtcgatgtygcaaaaagaytgggkgctacttkyctagtrcgdggbttgagraatgcgkcggatttgcaatatgaagcyagttttgattactacaatcatcagctgtcttctgatatagagactatttatttacatagycgrcctgaacatctctatatcagttcatcaggygttmgagagcttttgaagtttggtcaggatattgcctgcyatgttcccgagagtattttggaggaaakmrgaaatgaaaaaaaagattarctaat

SEQ ID NO: 2863 - DNA, 597 bp, Streptococcus pneumoniae
  misc_feature (1)..(597): tiling:Spneumo1:WAN024CCV; Cluster includes WAN0240F6 |cps 19aM||AAC78675.1|||597 bp|dTDP-4-keto-6-deoxyglucose-3,5-e pimeraseCps19aM|S.pneumoniae||AF094575|ORF|000
atgtcagataatttttttggaaaracacttgyrgtrcgyaagattgatgctataccaggactgctagagtttgayattcccgttcatggagacaatcgtggttggtttaaggaaaayttccagaaggaaaagatgswrccrcttggytttcctgaaagcttctttgctgcagggaaaytgcaaaayaacgtcagcttttctcgcaaaaatgttcttcgaggaytscatgcwgaaccttgggacaagtatatctctgttgcagacgatgggaaggttttaggatcttgggtwgatytrcgygarggygaracctttggraatryytaycagacagwgattgatgcragyaagggaatctttgttcctcgaggcgtagctaatggcttccaagttytatcagatacagtgtcatatagctatctggtcaatgattactgggckcttgaactcaaacccaagtatgcctttgtgaactacgctgatccaagccttggtattgaatgggaaaatattgcagaagcagaggtttcagaagcagataaaaatcatccactacttaaggatgtaaaacctttgaaaaaagaagatttggaataa

SEQ ID NO: 2864 - DNA, 965 bp, Streptococcus pneumoniae
  misc_feature (1)..(965): tiling:Spneumo1:WAN024G63; Cluster includes WAN02441K spr1 002|prs|15903046|NP_358596.1|985284..986243|-|960 bp|Ribos e-phosphate pyrophosphokinase|S.pneumoniae|R6|NC_003098.1| ORF|221
atgtcagatagaaaaaacatgaaacttttcgcactcaactctaaccaagagattgcacaraaaattgcccaagctgttggtgtcccacttggaaaactatcatcacgtcaattttcagacggagaaatccaagtaaatatcgaagaaagtgtccgtggttatgatgtttacatcatccaatcaacaagtttccctgtcaacaaccacctaatggaattgttaatcatggtcgatgcttgtgtgcgtgcaagtgcccacagtatcaacgttgtccttccatattttggctatgcacgtcaagaccgcattgcttgtcctcgtgagccacttacagcaaaactagttgccaatatgctggttaaggctggagttgatcgtatcctgactcttgatttgcatgccgttcaggttcaaggtttctttgatattccagtggataatcttttcactgttcccctattcgcaaaacattactgcgataaaggattgcttggttcaratgttgttgtcgttagccctaaaaattcaggtgtcaaacgtgcgcgtagcctggctgaatatcttgatgctccwatcgccattatcgactaccctcaagacgatgcaactcgtaacgaaggttatattattggtgatgttgaaggtaagaaagctatcytgattgatgatattttaaatacaggacgtaccttctctgaagcttctaaaatcgttgaacgtgaaggagctacagaaatttatgctgtttctagccacggtctcttcgtcgagggagctgctgagcttcttgacaatactaatattaaagaaattcttgtgactgattcagtagcaacaaaagaaaaaactcctaaaaatgtatgctacatcactgctagtgagttaattggygatgctatcgtccgtattcacgaaagaaaaccagtcagcccactctttgcctacaataaaaagaaataactaat

SEQ ID NO: 2865 - DNA, 671 bp, Streptococcus pneumoniae
  misc_feature (1)..(671): tiling:Spneumo1:WAN024B8O; Cluster includes WAN0244RF spr0 071|trkA|15902115|NP_357665.1|78058..78744|+|687 bp|Trk tr ansporter NAD+ binding protein - K+ transport|S.pneumoniae |R6|NC_003098.1|ORF|111
atgtcagatcgtacgattggaattttgggcttgggaatttttgggagcagtgtcctagctgccctagccaagcaggatatgwatattatcgctattgatgaccacgcagagcgcatcaatcagtttgagccagttttggcgcgtggagtgattggtgacatcacagatgaagaattattgagatcagcagggattgatacctgcgataccgttgtagtcgcgacaggtgaaaatctggagtcgagtgtgcttgcggttatgcactgtaagagtttgggggtaccgactgttattgctaaggtcaaaagtcagaccgctaagaaagtgctagaaaagattggagctgactcggttatctcgccagagtatgaaatggggcagtctctagcacagaccattcttttccataatagtgttgatgtctttcagttggataaaaatgtgtctatcgtggagatgaaaattcctcagtcttgggcaggtcaaagtctgagtaaattagacctccgtggcaaatacaatctgaatattttgggtttccgagagcaggaaaattccccattggatgttgaatttggaccagatgacctcttgaaagcagatacctatattttggcagtcatcaacaaccagtatttggataccctagtagcattgaattcgtaactaat

SEQ ID NO: 2866 - DNA, 272 bp, Streptococcus pneumoniae
  misc_feature (1)..(272): tiling:Spneumo1:WAN024CXW; Cluster includes WAN02439Q spr2 007||15904048|NP_359598.1|2000447..2000713|-|267 bp|Conser ved hypothetical protein|S.pneumoniae|R6|NC_003098.1|ORF|1 12
atgtcagatgcatttacagatgtagccaagatgaaaaaaatcaaagaagaaatcaaggcacatgagggacaagtcgtagaaatgactttggagaatggtcgtaagcgccaaaaaaatagattgggtaagctaattgaagtttatccatcyctatttattgtggagtttggggatgtggaaggagataaacaagttaatgtttacgttgaatcctttacttactcagatattcttacagaaaagaatttgattcattatcttgactaactaat

SEQ ID NO: 2867 - DNA, 1148 bp, Streptococcus pneumoniae
  misc_feature (1)..(1148): tiling:Spneumo1:WAN024DZQ; Cluster includes WAN0243DK spr1 869|tgt|15903910|NP_359460.1|1840531..1841673|-|1143 bp|tR NA-guanine transglycosylase (guanine insertion enzyme)|S.p neumoniae|R6|NC_003098.1|ORF|111
atgtcagattcaccaatcaaatatcgtttgattaagaaagaaaaacacacaggagctcgtctrggagaaatcatcactccccacggtacctttccgacacctatgtttatgccagttgggacacaagccactgtcaaaactcagtcacctgaagaattgaaggagatgggttcgggaattatcctatcaaacacctatcatctctggcttcgccctggagatgaactcattgcacgcgctggtggtctccacaagttcatgaattgggaccagcctatcttgacagatagtggtggttttcaggtttattctttagcagatagccgtaatatcacagaagaaggagtaacctttaaaaatcatctaaatggttctaagatgttcctatccccagaaaaagccatctctattcagaataatctgggttcagacatcatgatgtcctttgatgaatgtcctcagttttatcaaccttatgactacgttaagaaatcgatmgagcgtaccagccgttgggctgagcgtggtttgaaggctcaccgtcgtccacatgaccaaggtttgtttggaattgtgcaaggtgcaggatttgaagaccttcgccgccaatcagctcatgatcttgtcagcatggatttctcaggctactctatcggtggtttggcagtgggagaaacccatgaagagatgaatgcggtcttggactttacaactcaactgctrcctgaaaataaacctcgttatctgatgggtgtgggagcgccagatagcttgatcgatggggtcattcgtggggtggatatgtttgactgtgtcttaccgactcgaattgctcgtaacgggacttgtatgaccagtcaaggacgtttggttgtgaaaaatgcccagtttgctgaggactttacgccactggatcctgagtgtgaytgctayacatgtaataactatacacgcgcttaccttcgtcacctgctcaaggctgatgaaacctttggkatccgcttgactagctaccacaatctttacttcttgcttaacctgatgaagcaagtgcgacaagccatcatggatgacaatctcttggaattccgtgagtattttgtggaaaaatatggctataataagtcaggacgyaatttctaactaat

SEQ ID NO: 2868 - DNA, 416 bp, Streptococcus pneumoniae
  misc_feature (1)..(416): tiling:Spneumo1:WAN024GJU; Cluster includes WAN0244GO spr0 458||15902502|NP_358052.1|466391..466801|-|411 bp|Conserve d hypothetical protein|S.pneumoniae|R6|NC_003098.1|ORF|111
atgtcagattgcattttttgtaaaatcatcgcaggggaaattcctgcttcraaagtatatraaratgagcaggtccttgcctttcttgatatctctcaagtaacactaggacacaccttggtcgtgccaaaagaacactatcgcaatcttttggagatgratgctacgagcgccagccaactctttgcccaagtaccawaagtagctcaaaaagtcatgaaagtcackaaggctgctggtatgaatatcatttccaactgtgaagaagtcgctggtcaaacagtttttcatactcacgttcaccttgtrcctcgctacagtgctgacgatgacctcaagattgattttatcgcccacgaaccagactttgacaaacttgctcaagtcgctgaaaccatcaaaaacgcttaactaat

SEQ ID NO: 2869 - DNA, 923 bp, Streptococcus pneumoniae
  misc_feature (1)..(923): tiling:Spneumo1:WAN024FX9; Cluster includes WAN0243WH spr1 186|npl-truncation|15903229|NP_358779.1|1183359..1184090|- |732 bp|N-acetylneuraminate lyase subunit, truncation|S.pn eumoniae|R6|NC_003098.1|ORF|621
atgtcagatttgaaaaaatacgaaggtgtcattccagccttctacgcatgttatgatgakcaaggagaagtaagyccagarcgtacgcgtgcctwggttcaatacttcattgataaaggtgttcaaggtctttatgtcaatggttcttctggtgaatgtatctaccaaagygttgaagaycgcaagttratyttggaagaagtcatggcggtagcyaaaggtaaattracyawyattgcycatgttgcytgcaayaatactaaagayagtatggaacttgctcgccatgctgaaagcttgggagtagatgctattgcaacgattccaccaatttayttccgcttgccasaatactcagttgccaaatactggaacgatatyagttctgcagctccaaayacagactacgtgatttacaacattcctcaattggcaggggttgctttgactycaagcctttacacagaaatgttgaaaaatcctcgtgttatcggtgtkaagaactcttcwatgccagttcaagatatccaaacctttgtcagccttggyggrgaagaccatatygtctttaayggtccwgatgarcagttyctaggwggmcgcctcatgggkgctarggctggtatcggtggtacttatggtgctatgccagaactcttcttgaaactcaatcagttgattgcggataargayytagaaacagcgcgtgaattgcagtatgctatcaacgcaatcattggtaaactcactkctgywcatggaaatatgtacggtgtcatyaaagaagtyttgaaratcaatgaagrcttgamtattggwtctgttcgttcaccattgacaccagtraytgaagamgatcgtccagttgtagaagmrgctgcwgccttgattcgtgaaaccaaggagcgcttcctctaactaat

SEQ ID NO: 2870 - DNA, 797 bp, Streptococcus pneumoniae
  misc_feature (1)..(797): tiling:Spneumo1:WAN024D7F; Cluster includes WAN0243QA spr1 409||15903452|NP_359002.1|1392942..1393733|-|792 bp|Conser ved hypothetical protein|S.pneumoniae|R6|NC_003098.1|ORF|1 11
atgtcagcatatcaattaccgaccgtatggcaggatgaagctagtaatcaaggagcttttacggggytaaacagaccaacagcaggtgcccgtttcgaacaaaacttgccaaaaggagaacaagcttttcagctttattcactgrgaacaccaaatggtgtgaaggttactatcttattggaagaattactagaagctggttttaaggaagcggcttacgacttgtataagattgctatcatggatggggatcaattcggmtcagactttgtgaagctcaatccaaattccaagattccagccttattggaccagtcaggtactgaaraygtaagagtctttgagtctgctcatattcttctttaccttgctgagaaatttggagcctttttaccaagtaatcctgtggaaarggtagaagttttgaattggctattctggcaagcaggtgcagcaccttttctaggtgggggatttggacatttcttcaattatgctcctgaaaaattggaatatcctattaaccgttttacgatggaagtgaaacgycagttggatytattggataaggaattggctcagaaaccttatattgcaggcaatgactatacgattgcagatattgctatctggtcttggtatggacagttagttcaaggaaatctttaccaaggttctgcaaaattyttggatgcctcaagttatcaaaatctagtaaaatgggcagaaaaaattgccaatcgtccagctgttaagcgtggmttggaagtaacttatamagaaattaaatarctaat

SEQ ID NO: 2871 - DNA, 258 bp, Streptococcus pneumoniae
  misc_feature (1)..(258): tiling:Spneumo1:WAN024C57; Cluster includes WAN023M53 3152 64_600||||309331..309588|+|258 bp|EGAD orf prediction|S.pn eumoniae|R6|NC_003098.1|ORF|110
atgtcagctgattttttgatggcgttgatcaaggcagcggctgtaggrccaaagagttctgagttcttaccagtgaygatttccccatttggcaattcaaaggctagggctggtccaccagtttcttctgctttttggcgcgcaacgacagcaaccttacgrtctgcaggtgtgataccgaggtcgttcatgagcaactcaattttcttgacggcagcttckccaactttttcagctttgaagtcaagaactgtttga

SEQ ID NO: 2872 - DNA, 209 bp, Streptococcus pneumoniae
  misc_feature (1)..(209): tiling:Spneumo1:WAN024D4P; Cluster includes WAN0243KA spr1 626||15903668|NP_359218.1|1600386..1600589|+|204 bp|Hypoth etical protein|S.pneumoniae|R6|NC_003098.1|ORF|121
atgtcagtagaagaaaaattaaatcaagctaaaggttctattaaagaaggtgttgggaaagccatcggtgatgaaaaaatggaaaaagaaggwgcagctgaaaaagttgtttctaaagtaaaagaagtygccgaagaygcyaaagacgctgtagaaggtgctgtagaaggtgttaaaaacatgttgagtggcgacgataaataactaat

SEQ ID NO: 2873 - DNA, 1206 bp, Streptococcus pneumoniae
  misc_feature (1)..(1206): tiling:Spneumo1:WAN024FM4; Cluster includes WAN023P1C pne6 1_18||||12375..13580|+|1206 bp|Type 33B capsule operon, Gl immer 2.02 orf prediction|S.pneumoniae||WAN01UCGA|ORF|000
atgtcagttagaaaactatctttaatagatatactggactatatgtggataatattaattattgtacagtgtcattcaatatatacagtaaaatctgaacctcttaatttaattgtgccatttttagttacaacagcaatgttgttgttactcaatttattacgattcactttgtcaataaaatatatatatatrttaggkctatattttatagcaatggctacattttttttaactaacataggtgctaatgttactcccttaaatattacgaagtattttataatgcttcctttattttttttaataaatagtatttatgtgaataaagaaattttttcagcgttactatcaaaatttgtaaacgtagtagtaattttagcaattttttccttattcttttggatatttggaacacttctgaatgttgtacaccctacctcaacagtaattaatcaatggtctggtggtcaattaataaatagctactataatctatattttgaaactcaacagatgattttttttgggttccgtataatacggaattcaggaatatttgctgaatctcctatttgggggctaatactaagtattgcttatgttattgattttcttattttgaaatttgataaaaatagcaagcgtaatataattattctaactatgttaagtacaatttcaacgacaggtattattattgtcgggttagctatattatataaaataatgactactagtcgttggatgacaaaactcttacttctccctgtcacattgagcttaggactctctttattgctcctattggctgagaaatcagagacagtttcagctaatcttagagttgatgattataatattggttttatagtatggaagrcaagtttgtggataggacacggattgaataatggtatattagcaattcaatcacatatctcaacgtttacaagaaatttaggctatagtaacacattatttgttattttggctcagggaggtttattattattcttgatttatttttctccaatgatactattattgtttaagaaaaatatcaatcttgattttaagtttgcyattatcttattctttatcttagtaacaacaattatttttgaagggacatttttatttctctggattttaacattatcgtatagctacttttcctttgtaacattagataaaactggaacg

SEQ ID NO: 2874 - DNA, 267 bp, Streptococcus pneumoniae
  misc_feature (1)..(267): tiling:Spneumo1:WAN024FCU; Cluster includes WAN023KQO 3138 77_3045||||1621911..1622177|+|267 bp|EGAD orf prediction|S .pneumoniae|R6|NC_003098.1|ORF|110
atgtcagttgatatttttattacactaataattcttcttaagtcatatgaaacrggatgttgtaaacaaattaactcatatccttttttatcaayatttagaactgactcatttatgattaaatcttctttaatcaattctaytcgttcttcatttgataaatattcaaataacttctcatatttatcaagcacagatacccaaatggtctctaaattatttgataattctataatttcattttctaaatataaccttaacatttag

SEQ ID NO: 2875 - DNA, 1143 bp, Streptococcus pneumoniae
  misc_feature (1)..(1143): tiling:Spneumo1:WAN024GE3; Cluster includes WAN0244C1 spr0 625|lctO-truncation|15902669|NP_358219.1|632576..632722|+| 147 bp|lactate oxidase, truncation|S.pneumoniae|R6|NC_0030 98.1|ORF|232
atgtcatacaaaacaagcaatgcagaaggycatgtagayttyatcaatacctatgatttggagccaatggcgcaacaagttattcctaaagcagcatttggctatatcgctagtggggcggragatactttcrctttdmsaghkaatatccgygcctttaaccacaarctcatcgttcctcatacactttgcratgtwgaaaatccaagtacagagattgaatttgcaggtgaaaaacwatcttcdccaatcattatggcrcctgttgcggcycataaattrgcraatgaacagggggaagtggcgactgcgcgtggtgtgcatgagtttggttctctttatacaaccagytcttactctactgttgaccttccagagatttctgaagccctycaagggacmccycattggttycaattttactttagtaaggatgacggtatcaaccgccacatcatggaycgtgtgaaggmtgaaggttataaagcgattgtcttgacggcagatgctactgtaggggggaatcgtgaagtggataagcgtaatggttttgtcttcccagttggcatgccgattgttgaagaatacctgccagaaggtgctggtaaatcaatggactttgtttayaaatcagctaaacaacgcttgtctccacgygatgtagaatttatcgctgaatactcwggwcttcctgtgtatgtcaagggaccacaatgccgtgaggacgttgaacgttcgcttgctgcaggagcttctggtatctgggtaaccaaccacggtggtcgtcaaatcgacggtggaccagctgcctttgactcgcttcaagaagtggcagaagcagttgataracgtgtgccrattgtctttgactctggtgttcgtcgtggtcaacaygtctttaaagccttggcwtcaggagcagacttggtwgctattggwcgccckgtyatytatggcttggctctcggyggtagtgtyggtgtgcgtcaagtctttgaacacttgaatgcggaattgaagacagttatgcarttgtctggarctcagacyattgaagatgtyaaacacttyaagctccgtcacaatccatacaacccaaccttcccagttgaccctcgtgacttaaaattgtatykaactaat

SEQ ID NO: 2876 - DNA, 998 bp, Streptococcus pneumoniae
  misc_feature (1)..(998): tiling:Spneumo1:WAN024D8N; Cluster includes WAN0243TN spr1 288||15903331|NP_358881.1|1282334..1283326|-|993 bp|Hypoth etical protein|S.pneumoniae|R6|NC_003098.1|ORF|111
atgtcatattatgattttgtaaaagattatatgaaagtagatgaatgtaaaaacaatgagaagtattcaagtgcaggtcatacattttgttggaaaaaagagaattcaacttatgcagaaggmctatattggttttatgaaggaggcagcttcattatcgatatacatgatttttatatcaaagaggaagtagttcaaaatagcacttatagtatgtcagactatgtttcaatttattcaagttacattgtcagtgcaaacggagaaaagtttaatccgtatcaaactattaccgcaaactctytatgtacttttgattttgataatataaaagatrattttgtttttttattacacgagaattgttgttatcttgctgtttccatkggttttaaaaaagagctaatagaaaaacatttagcatctattaacattaatccagaatctttttattcaaccttgcttcaaccgaatcaaataatacttacaaaggccttagaaagagtggcaatggaaatattaaattgtaagatggacgctcctgccgctgattttttctttaaagcaaaggcaaatgaatggataagtatagtaattgacacatacttaaatagaaaaaaatataaaattgaaattgatgatgataaagcacttgaagatgtagcaagattcttagatgatcattttgcaacgaatgtaaatcaaggcacgcttgaaaaaatatctaaaatgagtggtactaaattaaaaaatttatttaaggaaaaatattgtcaaagcattacagagtacactcaaagaaaaagaatgaatgtagctgaaactcttcttttaaacactgaactacctataaaagagatagcagaatctgttggatattcatctgccagcaaattttctatctattataaaagatacaagggaaaacttccaagtgaagtccgtaatttagcttgcaaacatcacaattttaaatgcgattattgtgattaactaat

SEQ ID NO: 2877 - DNA, 1277 bp, Streptococcus pneumoniae
  misc_feature (1)..(1277): tiling:Spneumo1:WAN024DXK; Cluster includes WAN0243C7 spr1 918|malX|15903959|NP_359509.1|1900087..1901358|+|1272 bp|A BC transporter substrate-binding protein - maltose/maltode xtrin|S.pneumoniae|R6|NC_003098.1|ORF|112
atgtcatctaaatttatgaagagcrctgcggtgcttggaactgytacacttgctagcttgctyttrgtagcttgcggaagcaaaactgctgataagcctgctgattctggttcatctgaagtcaaagaactcactgtatatgtagacgagggatataagagctatattgaagaggttgctaaagcttatgaaaaagaagctggagtaaaagtcactcttaaaactggtgatgctctaggaggtcttgataaactttctcttgacaaccaatctggtaatgtccctgatgttatgatggctccatacgaccgtgtargtakyctwrrwtctgackrmcaactttcagaagtgaaattgagcgatggtgctaaaacagacgacacaactaaatctcttgtaacagctgctaatggtaaagtttacggtgctcctgccgttatcgagtcacttgttatgtactacaacaaagacttggtgaaagatgctccaaaaacatttgctgacttggaaaaccttgctaaagatagcaaatacgcattcgctggtgaagatggtaaaactactgccttcctagctgactggacaaacttctactatacatatggacttcttgccggtaacggtgcttacgtctttggccaaaacggtaaagacgctaaagacatcggtcttgcaaacgacggttctatcgyaggtatcaactacgctmaatcttggtacgaaaaatggcctaaaggtatgcaagatacagaaggtgctggaaacttaatccaaactcaattccaagaaggtaaaacagctgctatcatcgacggaccttggaaagctcaagcctttaaagatgctaaagtaaactacggagttgcaactatcccaactcttccaaatggaaaagaatatgctgcattcggtggtggtaaagcttgggtcattcctcaagccgttaagaaccttgaagcttctcaaaaatttgtagacttccttgttgcaactgaacaacaaaaagtattatatgataagactaacgaaatcccagctaatactgaggctcgttcatacgctgaaggtaaaaacgatgagttgacaacagctgttatcaaacagttcaagaacactcaaccactgccaaacatctctcaaatgtctgcagtttgggatccagcgaaaaatatgctctttgatgctgtaagtggtcaaaaagatgctaaaacagctgctaacgatgctgtaacattgatcaaagaaacaatcaaacaaaaatttggtgaataactaat

SEQ ID NO: 2878 - DNA, 1493 bp, Streptococcus pneumoniae
  misc_feature (1)..(1493): tiling:Spneumo1:WAN024FZP; Cluster includes WAN0243Y9 spr1 122|zwf|15903165|NP_358715.1|1122712..1124199|+|1488 bp|Gl ucose-6-phosphate 1-dehydrogenase|S.pneumoniae|R6|NC_00309 8.1|ORF|331
  misc_feature (858)..(858): n is a, c, g, or t
atgtcatctaaggttattgttacaattttcggtgcgagtggagacctggctaaacgcaagctctacccttccctttttagactatatmaatccggcaatctttccaagcactttgccgttattggaactgcccgtagaccttggagtaaggaatattttgaatctgtagttgtcgagtccatccttgatttggcagatagtaccgagcaagcccaagaatttgctagccacttctactatcaaagccatgatgtcaatgattcggaacattatattgctttgcgtcaattacaagctgagcttaatgaaaaataccaagctgaacacaataagctcttcttcttgtctatggcacctcagttctttggaaccattgccaaacacctcaaatctgaaaacattgtcgatggcaaaggttttgagcgcttgatcgttgaaaaaccatttggtacagattacgcaactgcaarcaagttgaatgacgaactcctagcaacatttgacgaagaacaaattttccgtatcgaccattatcttggtaaggaaatgatccaaagcatmtttgcagttcgctttgcaaacttgatttttgaaaacgtttggaacaaggattttatcgacaatgttcaaattacctttgcggagcgcttgggtgtagaagaacgtggtggctactatgaccaatccggtgccctccgtgacatggtccaaaaccacactctacaacttctttcgctcctcgccatggacaaaccagcaakcttcacaaaagacgagattcgtgctgaaaagattaaggtctttaaaaacctctatcatccaactgatgaagaactcaaagaacactttatccgtggncaataccgytcwggtaagattgatggcatraartayatctcttaycgtrgcgarccaaatgtraatccagaatcwacaactgaaacctttrcatcwggwgcyttctttgtrracagcgatcgmttycgtrgtgttcctttcttyttccgtacwggtaaacgwctractgaaaaaggaacycatrtcaacatcgthtttaaacaaatgkaytctatmtttggwgarccacttgctccaaayattttgaccatctatatycaaccmacagarggyttctctctyagyctaaatgggaarcaagtaggagaagaattyaacttgrctcctaactcacttgattaycgyacagmygcracygcractggtrcttctccagaaccatacgaraaattgatttatgatgtcytaaataacaactcaayyaactttagccactgggatgaagttkgtgcrtcatggaagttgattgaccgtattgaaragctctgggctgaaaatggtgccccacttcatgactataaagctggaagcatgggacctcaagccagctttgacctacttgaaaaattcggtgccaaatggacttggcaaccagatatcrcctatcgtcaagatggtcgyttmgaataactaat

SEQ ID NO: 2879 - DNA, 317 bp, Streptococcus pneumoniae
  misc_feature (1)..(317): tiling:Spneumo1:WAN024ESL; Cluster includes WAN0243L7 spr1 593||15903635|NP_359185.1|1571297..1571608|-|312 bp|Conser ved hypothetical protein|S.pneumoniae|R6|NC_003098.1|ORF|1 11
atgtcattaacatcaaaacaacgtgccttcctcaacagccaggcacacaccctcaaacctatcatccaaatcgggaaaaatggactcaacgaccaaatcaaaaccagcgtccgtcaagctcttgatgcgcgtgaattaatcaaggttactctcttacaaaacacagatgaaaacatccacgaagtagctgaaattttggaagaagaaatcggtgtggatacagtccaaaaaataggacgyatcttgattttgtttaaacaatctagcaagaaagaaaatcgcaagatttctaagaaagtcaaagaaatctaactaat

SEQ ID NO: 2880 - DNA, 1349 bp, Streptococcus pneumoniae
  misc_feature (1)..(1349): tiling:Spneumo1:WAN024GD3; Cluster includes WAN0244AS spr0 670|rheB|15902714|NP_358264.1|674561..675904|+|1344 bp|ATP -dependent RNA helicase|S.pneumoniae|R6|NC_003098.1|ORF|33 1
atgtcatttacgaaatttcaatttaaaaactatattagagaagccttgaaggagttaaaatttacaactccaacagaggtgcaagayaagttgattcctattgttttggcaggtcgtgacctagtaggagaatcaaaaacaggttcaggtaagactcayactttcttgttaccgattttccagcaattagatgaagctagcgatagtgtrcaagcagtgattactgcaccgagtcgtgagttggctactcaaatttaccaagtagcgcgtcagatttcagctcactcagatgtcgaagttcgtgtggttaattatgtgggtggtacggataaggctcgccarattgagaaattggmaagcaatcagcctcatattgttattggaacaccaggccgtatctacgacttggttaaatctggtgatttagctattcataaagccaagacatttgttgttgatgaagcagatatgaccttggatatgggattcttggaaaytgttgataagattgctggcagtcttccaaaagacttgcaattcatggtcttctcagcgactatcccacaaaaactgcaaccattcttgaaaaaatacttatcaaatcctgttatggagaaaattaagacyaaaacggttatttctgacaccattgataattggttgatttcgaccaagggacatgataagaatgctcaaatttaccarttgactcagttgatgcagccgtatttggcaatgatttttgttaacactaaaacgcgtgctgatgaattgcattcatatctgactgctcaaggcttgaaggttgcaaaaatccatggmgatattgcccctcgtgaacgcaagcgaatcatgaatcaggtgcaaaatctggattttgagtatattgtcgcaacagatttrgcagcrcgtgggattgacattgaaggtgtcagccatgtcatcaatgatgccattccgcaagacttatctttttttgttcaycgtgttggtcgtactggacgaaatggcctaccaggtacagctattaccctttatcagccaagtgatgactcggatatccgtgagttggagaaattgggaatcaagtttagtcctaagatggtcaaagayggggaatttcaagatacctatgaccgtgatcgtcgtgccaaccgtgagaaaaaacaagataaacttgatatcgaaatgattggtttggttaaaaagaaaaagaaaaaagtcaaaccgggttataagaagaaaattcaatgggcggttgatgaaaagcgccgtaaaacyaagcgtgctgaaaatcgcgctcgcggtcgtgcagagcgtaaagctaaacgycaaacattttaactaat

SEQ ID NO: 2881 - DNA, 294 bp, Streptococcus pneumoniae
  misc_feature (1)..(294): tiling:Spneumo1:WAN024F5K; Cluster includes WAN023KWI 3151 88_2781||||1483057..1483350|+|294 bp|EGAD orf prediction|S .pneumoniae|R6|NC_003098.1|ORF|110
atgtccaacgtggatatttccgttagcgtatggagggccatcatgcaaggtgaaatgaggttttccttggttcaattcttgacgacgttgataaagttttgcatmttcccattccttttgccaaactggctctttggtaggaaggcctgcacgcattgggaattcagttttcccaagattaagggtgtctttgagtttcatggtatctcctttataaataataacaaattaaaaaccacgacttccaaaaaggacgaaaatcgtggtaccacctttattcggaaaaagwtttag

SEQ ID NO: 2882 - DNA, 297 bp, Streptococcus pneumoniae
  misc_feature (1)..(297): tiling:Spneumo1:WAN024DZU; Cluster includes WAN023KIJ 3130 72_3427||||1837882..1838178|+|297 bp|EGAD orf prediction|S .pneumoniae|R6|NC_003098.1|ORF|110
atgtccaagagcaaccgtcacaccttcgcccgtaactgtacgaacaaagtcttccaccccatcacgttctggtgcaagggcaattttattaagcaagccatttgccgctttttgccaagaatgaaactcctcaacacccgggtctctcatataagttggattttgtgcccccttaaaagtttctgtgaaatatggaccttcataataaatcccacgaatcttagcacctgttgcttctttataatggtttccaagattttcagtgactgcaagcaattgctcataagtggctgttaa

SEQ ID NO: 2883 - DNA, 941 bp, Streptococcus pneumoniae
  misc_feature (1)..(941): tiling:Spneumo1:WAN024EYM; Cluster includes WAN0243QU spr1 389|ppaC|15903432|NP_358982.1|1370416..1371351|-|936 bp|Ma nganese-dependent inorganic pyrophosphatase|S.pneumoniae|R 6|NC_003098.1|ORF|111
atgtccaagattctagtatttggtcaccaaaatccrgwctcagatgccatcggrtcatctgtagcttttgcctaccttgcaaaagaagcttacggtttggatacggaagctgttgcccttggaactccaaatgaagaaacagcctttgtcttgaactattttggtgtggaagcaccacgtgttatcacttctgccaaagcagagggggcagagcaagttatcttgactgaccacaatgaattccaacaatctgtatcagatatcgctgaagtagaagtttayggtgttgtagaccaccaccgtgtggctaactttgaaactgcaagcccactttacatgcgtttggagccagttggatcagcgtcttcaatcgtttaccgtatgttcaaagaacatggtgtagctgtkcctaaagagattgcaggtttgatgctttcaggtttgatttcagatacccttcttttgaaatcaccaacaacacacccaacagataaaatcattgctcctgaattggctgaattggctggtgtraacttggaagaatatggtttggcaatgttgaaagctggtaccaacttggctagcaaatctgctgaagaattgattgayatcgatgctaagacttttgaactcaacggaaataatgtccgtgttgcccaagtgaacacagttgacatcgctgaagttttggaacgccaagcagaaattgaagctgcaatgcaagctgccaacgaatcaaacggctactctgactttgtcttgatgattacagatatcgtcaactcaaactcagaaatmttggctcttggtgccaatatggacaaggtcgaagcggctttcaayttcaaacttgaaaacaatcatgccttccttgctggtgccgtttcacgtaagaaacaagtggtacctcaattractgaaagytttaatrcgtaactaat

SEQ ID NO: 2884 - DNA, 354 bp, Streptococcus pneumoniae
  misc_feature (1)..(354): tiling:Spneumo1:WAN024EZ3; Cluster includes WAN023LIJ 3146 38_1835||||987582..987935|-|354 bp|EGAD orf prediction|S.p neumoniae|R6|NC_003098.1|ORF|110
atgtccagtatgaagaccgataaagcggaccttgtcaagctgattttcgtacttatgaaaggccgacaagagcataccatccccgccaatggaaatgacaatatccggattggtatcattgagtataaactgatttctcttcaaacgatctcgcaattcatacaaaaccctttgactctgcggttttctattggctatcagatcaattcgtttacctgtattcttcatctgtatcgtcactgtttcctacaccgtcatttaattttctactcaaaggatcaaaaagtgcctgggcttcttggatatcatcacgaatttcacccatttcttcatccaactgatgggcgattctag

SEQ ID NO: 2885 - DNA, 441 bp, Streptococcus pneumoniae
  misc_feature (1)..(441): tiling:Spneumo1:WAN024CPU; Cluster includes WAN023M2G 3149 55_752b||||390332..390613|+|282 bp|EGAD orf prediction|S.p neumoniae|R6|NC_003098.1|ORF|210
atgtccatgttgagggcaagagcagccttgataccggcatcaacaacccctttattgagaactggtagaactcctgggaaagaccagtcaatcacgttagtgttggcattttggtcatttccaaagtgggcagaagtaggtgagaagatttttgaattggtgttgagctctacgtggacttcaagtccratgactgtttcaaagttcattagttgtcacctccaaaaatcacgggttgttgtttgtggtagyctgttgttgcttcaaargcagcagcarcttggtaaatggtttcctcagagtrcttgggaccaatcaattgsagwccgacaggtagaccttgagagaatccagcaggaatcgaaattccaggcagtcctgccaagtttacaggtatggtcaakaggtcggctaagtacatggcaactgggtcatggttga

SEQ ID NO: 2886 - DNA, 1637 bp, Streptococcus pneumoniae
  misc_feature (1)..(1637): tiling:Spneumo1:WAN024GLD; Cluster includes WAN0244H7 spr0 439||15902483|NP_358033.1|439189..440820|-|1632 bp|Conserv ed hypothetical protein|S.pneumoniae|R6|NC_003098.1|ORF|21 1
atgtccattaattggcargaaattttatttcactttttaggtggtctggggctattcttatatagcatcaagaccatgggagacggtttrcaacaagctgctggagatcgccttcgtttttacattgacaaatatactagtaatcctttctttggagttctggttggtattgggatgactgctctaattcagtctagttctggtgtaacagttatyacagtcggcctggtcagtgccggtctcttaaccttacgtcaggctatcgggattgtcatgggtgctaatattgggacaactgtcacatcctttctcatcggttttaaattaggtaactatgccctacctatgctctttatcggtgccgtctgtctyttttttacraaaaatcggacagtcaataatatcggacgcatcctctttggtgtcggtggtatcttttttgccctcaatctcatgagcggcgcaatggctccactcaaggatttacaggtctttaaggactatatgattgagctaagtaaraatcctgttytgggtgtctttgtcggtacyggcttgaccttgctaattcaagcttcttcggctaccattgggattttacaaaacctytacgccggcratctaattgayctacagggagctttgccrgttctatttggtgacaatatcgggacaaccattacagccatcattgcctctttaggggctaatattgcagctaaacgggtagcaggagctcatgttgccttcaacrttatcggaacagtyktctgcgttatttttctagttccttttactgtcctgattcattggtttgaagctacgctaaatctagcaccggaaatgaccatcgcctttgctcacggaacctttaatattaccaacaccattrtccaatttccatttatcggagctctggcttactttgtaaccaagattattcctggagaggacgaggttgtcaaatacgaacccttatatcttgatgaacatttcatcaaacargccccatctatcgctctaggaaatgcyaaraaagagctcttgcacttaggaaactacgctgctaaagcctttgacctttcctataagtacatcattgacttggatgaaaaagttgctgaaaaagggcataaaacygaagaagcaattaacaccatcgatgagcaattaacacgttatctcattgccctttcaagcgaagctctcagccaaaaagaaagtgaagtgctyaccaatatccttgattcctcccgtgatttggaacggattggagaccacacggaggctctactcaatctgactgactatcttcaacggaaaaatgttgaattttctgatgccgccttgaaagaattagaggaagtttaccgccaaactagtgactttatcaaagatgctctggatagtgtggaaaacaatgatattgaaaaagcacgcagtcttgtagaacgtcatgaagcaatcaataagatagaacgtgttctcagaaaaacccacatcaaacgcctcaacaaaggcgaatgttcaacacaagctggrgtcaactttatcgacatcatctcacactacactcgtgtatcagaccacgctatgaaccttgctgaaaaggtttttgcagaacaaatctaactaat

SEQ ID NO: 2887 - DNA, 1751 bp, Streptococcus pneumoniae
  misc_feature (1)..(1751): tiling:Spneumo1:WAN024EWL; Cluster includes WAN0243JF spr1 657|ABC-N/P|15903699|NP_359249.1|1630231..1632015|-|1785 b p|ABC transporter ATP-binding/membrane spanning protein - unknown substrate|S.pneumoniae|R6|NC_003098.1|ORF|211
atgtccattattcaaaaactttggtggtttttcaagttagaaaaacgccgttatctagtcggaattgtggccctgrtcttggtttccgtcctcaatctcattcctcctatggttatggggcgggtyattgatgccatcacatcggggcaattaacccagcaggacctccttcttagcctattttacttgctacttgcagcctttggtatgtactatttgcgctatgtgtggcgtatgtatatccttgggacctcttattgcttgggacagatcatgcggtctcgcttgtttaagcatttcacaaaaatgtcgtcagccttttatcaaacctatcggacgggtgatctgatggcacacgcaaccaatgatatcaatgccttgactcgtttagcaggtggcggtgtcatgtctgcggtggatgcctctatcacggctctggtgactttgttgaccatgctctttagcatctcatggcagatgactcttgttgccattctccccctacctttcatggcctatrcgactagtcgcctagggagaaagactcataaggcctttggcgaatcccaagctgctttttctgaactcaataacaaggtacaggagtccgtatcaggtatcaaagtgaccaagtctttcggttatcaggcagacgagttgaagtcttttcaggcagtcaatgaattaaccttccaaaagaacctgcaaaccatgaaatatgatagtctctttgaccctatggttctcttgtttgttggttcgtcctatgttttaacgcttttggttggctccttgrtggttcaggaagggcagattacagttgggaatctagtcacctttatcagctatttggatatgctggtctggcctcttmtggccatcggyttcctctttaatactactcagcgagggaaggtttcttaccagcggattgaaaatcttttgtctcaggaatctcctgtacaagaccckgagtttcctctggatggtattgaaaatgggcgtttggagtatgccattgacagctttgcttttgaaaatgaggaaacactgacggatattcactttagtttggcaaaagggcaaacactgggcttggttgggcagacaggctctgggaaaacktccttaatcaagctcctcttgcgtgaatacgatgtggataagggygccatttatctaaacggtcacgatattcgggactatcgtctgacagaccttcgcagtctcatgggctatgttcctcaggaccagtttctttttgcgacttcaatcctagacaatatccgctttggcaatcctaacttgcccctttcagcggtcgaggaagctactaagctagcccgrgtttaccaagatattgtagacatgcctcaaggatttgatacgctgattggtgaaaaaggagtcagtctttctggtggtcaaaagcaacggttggctatgagtcgggctatgattttagaccctgatatcttgattttggatgattccttatccgccgtagatgccaagacagagtatgcgattatcgacaacctcaaggagaygcgaaaggacaagacaaccattatcactgcccatcgcctsagtgcwgttgtccatgcagatttkattttagtyctrcaaaatggtcaaattatcgaacgaggcasgcacgaagacttgctagctttggatggctggtatgcccaaacctaccagtctcagcagytggaaatgaarggagaagaagatgcagaataactaat

SEQ ID NO: 2888 - DNA, 258 bp, Streptococcus pneumoniae
  misc_feature (1)..(258): tiling:Spneumo1:WAN024FSU; Cluster includes WAN023L6O 3141 28_2328a||||1249744..1250001|-|258 bp|EGAD orf prediction| S.pneumoniae|R6|NC_003098.1|ORF|110
atgtcccagrggatagtgaaatckrggaatggtgtagaaaaayttaatttttcctgttttgaagtggccttccagctcctccaagtcaatcccatcaatgcctcgttcaatcgtttgatagtccagcccctgtgcaatcaagaggcgattcatccgatggtaggttggctgttccaccaagatttccttggcttgtctaggaaaggatatttgagagaggataaacaaggcttgttgggttccagaagtcagtactag

SEQ ID NO: 2889 - DNA, 504 bp, Streptococcus pneumoniae
  misc_feature (1)..(504): tiling:Spneumo1:WAN024C6Z; Cluster includes WAN023M6V 3143 80_494||||253897..254400|-|504 bp|EGAD orf prediction|S.pn eumoniae|R6|NC_003098.1|ORF|110
atgtcccagtacatcgagtttgaggacgttctcatcgatatcgtggaagttaaagtgagtggtctgccattcagccgtgacatcatctgctggatactggacaggcgtaaaatcgtagacatccatgtagttcggaataacaacgattccccccgggtgttggcctgttgtccgcttgacacccgccgctccttgagcgaggcgttctacttctgcatcacgataaaacttgccataatctcgctcgtaaccyttgacaaatccataggcagtcttggcagctaccgtaccaacygttcccgcacggaaggcatattcttcaccaaagatatcacgcacatccaagtgggcgctaggctgatcttctcccgagaagttcaagtcaatatcaggaaccttatccccatcaaaaccaaggaaggtctcaaacggaatatcctgtccgtttttactgagtttgtgaccacagtttggacagtccttatggggcatatcaaatcctga

SEQ ID NO: 2890 - DNA, 1245 bp, Streptococcus pneumoniae
  misc_feature (1)..(1245): tiling:Spneumo1:WAN024CF4; Cluster includes WAN023RW2 cont ig_1609_42||||28703..29947|+|1245 bp|Glimmer 2.02 orf pred iction|S.pneumoniae|670|WAN01UDCD|ORF|000
atgtcccataatgattctatcctaaatattcttggaattaaagataaaaatattaaaattatttctgttgaagaagctgaacacaacaacgattctgttaaagagtatataacgctaataacagctactctttcttatccgattaatcgttgtcgtaactgtggctttcccacagttaataaggatggctttcgcaaaactcatgtacgactggcaagtttaaatgggagaagatatgaactagagcttcgtaaacaacgctataaatgtaaatcatgccatactacttttggtgctattactaatttaaccaaagaaaatcaaaccttatccagtgatctcaaaaatcaaatcatgcttttagctcgtaaaggcttatctggtcagcttattgctgaaatgtgtcactgctctcctagcagtgttcgtcgaacaatcttagagcgcatggaaccacactatcgtgtggctaagttgcctaagcatctatgttttgacgagtttcgttcaattaagtctgtgatgtcctttatctgttgtgacgctgaaacccaccaaattgtcacaaagttacaggatcgtctatcacctaccattgttgattattttgaaagtcgttattcaaaagycrawcgygaatgcgttcaatcagttgtaattgatttaaatgctcaatatcaaagttttatctatcgccttttccctaatgccaatatcattattgatcgcttccaccttgtacaattagctggtcgcgctttggacaattgtcgtatctctatcctaaagcaacttgataaacagagccaagaatataaaattatgaagtcacattggaagctattccataaaaaagctgaagatcttcaccctgaagaagtagtttttcttcgcggcgttaaacaatatatgactcgccaaaatgctgttgatctcattactagtaaattttccaagttcgctgaagtataccaaacttaccaagatatcacgaaagccctaaacgagcgcaatagtgaattactagagtcaaccatcttagactaccaaaaaaccaatacagaaatggatactgctattcaaacccttcgtcaaaacagaaaatatgtyttaaatagcgctaaatttgaatactctaatggtcctttagaaggcatcaatcgcaaaatcaaaaccctaaaacgaacttgttatggttttgccaatcaaaaatttttctttttaagaatcgattgtattttttcg

SEQ ID NO: 2891 - DNA, 473 bp, Streptococcus pneumoniae
  misc_feature (1)..(473): tiling:Spneumo1:WAN024D9Z; Cluster includes WAN0243YG spr1 115||15903158|NP_358708.1|1114899..1115366|-|468 bp|Conser ved hypothetical protein|S.pneumoniae|R6|NC_003098.1|ORF|1 11
atgtcccgttcccaattaacrattttaacmaatatytgtctgattgaagacctcgaaactcagcgcgtggtgatgcagtatcgcgcccctgaaaacaatcgctggtctggttatgcctttcctggaggtcatgtagaaaatgatgaggcttttgcggagtctgtcattcgtgaaatctacgaagaaacagggttgactatccaaaatcctcaacttgtcggcattaaaaattggccactagatacaggtgggcgctatattgtcatytgttataaggcgactgagttctctggtacccttcartcttcagaagagggagaagtttcttgggtgcaaaaagaccagattccaaacttaaatctggcctatgatatgctaccattgatggaaatgatggaagctcccgacaagtcagagtttttctaycctcgccgtacagaagacgattgggaaaagaaaatcttctarctaat

SEQ ID NO: 2892 - DNA, 270 bp, Streptococcus pneumoniae
  misc_feature (1)..(270): tiling:Spneumo1:WAN024CA2; Cluster includes WAN023M9N 3143 96_337a||||179320..179589|-|270 bp|EGAD orf prediction|S.p neumoniae|R6|NC_003098.1|ORF|110
atgtccgttgatacagtaaggcgtccccacacgtgcgtagaggagacgcagatagtcattgatttcagtcgtygttcccaccgtcgagcgaggatttttactagtcgttttctggtcgatggaaatagctgggctgagaccatcaatggcatctacatctggtttttccatatttcccaagaactgacgagcgtaggcggacaaactctctacatagcgacgttgtccctccgcatagagagtatcaaaagccagactggacttccctga

SEQ ID NO: 2893 - DNA, 371 bp, Streptococcus pneumoniae
  misc_feature (1)..(371): tiling:Spneumo1:WAN024D5M; Cluster includes WAN0243M5 spr1 558||15903601|NP_359151.1|1538871..1539236|+|366 bp|Conser ved hypothetical protein|S.pneumoniae|R6|NC_003098.1|ORF|1 11
atgtcctggacatttgacaacaaaaaacccatctatttacagattatggaraaaatcaagcttcagattgtttcccatacactggaacccaatcaacaacttccaaccgtgagggagctagctagcgaggctggtgtcaatcccaataccatccaaagagccttatcagaccttgaacgagaaggatttgtctacagcaagcgaacaactggacgatttgtgactaaggataaggagctaatcgcycagtcacgcaaacaattatcagaagaagaattggaacacttcgtttcctccatgacccattttggctatgaaaaagaagaactaccaggcgtagtcagtgattatattaaaggagtttaactaat

SEQ ID NO: 2894 - DNA, 182 bp, Streptococcus pneumoniae
  misc_feature (1)..(182): tiling:Spneumo1:WAN024C6D; Cluster includes WAN0244LJ spr0 283||15902327|NP_357877.1|281424..281600|+|177 bp|Hypothet ical protein|S.pneumoniae|R6|NC_003098.1|ORF|121
atgtccttagatatagataaagaaaagatgacaatcatgggaatagcttttgaaaaccgatccgtttttaagagtgtttggtwtgstttaagtacaaatatgattgaaggatggcgacctacggttagtgatgttgaaaaattacgagatgaagctcttgctctggggatgrcttaactaat

SEQ ID NO: 2895 - DNA, 303 bp, Streptococcus pneumoniae
  misc_feature (1)..(303): tiling:Spneumo1:WAN024FD9; Cluster includes WAN023KRH 3139 51_3001a||||1599830..1600132|-|303 bp|EGAD orf prediction| S.pneumoniae|R6|NC_003098.1|ORF|110
atgtcgacaacgtttacgttgatttcaacaatttccaagtcagtcattttagcaacttctgaagatacgatttctctgatttctgaatataaagctggaacatttttttggtactcaacaataacgtttaagtcaactgcaacttgtgttttaccaacttctacgttaacaccacttgttacgtcatcgctgttaacgattttttctttaagatttgagaagaaaccaccatcgattcccaaaagacctgaaacgttttctagtgaaagaccaatgattttttggataactttatcttcgtaa

SEQ ID NO: 2896 - DNA, 171 bp, Streptococcus pneumoniae
  misc_feature (1)..(171): tiling:Spneumo1:WAN024AZV; Cluster includes WAN0243OA spr1 481||15903524|NP_359074.1|1459304..1459474|+|171 bp|Hypoth etical protein|S.pneumoniae|R6|NC_003098.1|ORF|101
atgtcgagaaaatcaactaatttctcaagtcccctaccaaccctgaaagttttattttcagggttttatttctatcatttkattttactttcatttggtggkagartatttgaaaaaaagaaaggtagtttaacctatgaaaaaatcactaaaaatttttgctacatctaa

SEQ ID NO: 2897 - DNA, 785 bp, Streptococcus pneumoniae
  misc_feature (1)..(785): tiling:Spneumo1:WAN024DJQ; Cluster includes WAN0244L8 spr0 294|PTS-EII|15902338|NP_357888.1|295053..295832|+|780 bp|P hosphotransferase system sugar-specific EII component|S.pn eumoniae|R6|NC_003098.1|ORF|112
atgtcgattaatgtatttcaagcgattttaattggaytatggacagctttctgttttagtggaatgctrttaggaatttacaccaatagatgyattgttctgtcatttggtgtcggaattattctaggtgatctgcctactgctcttgyaatgggagctattggtgaattggcttatatgggattcggtgttggtgctgraggtactgttccaccaaacccaatcggacctggtatctttggtaccttgatggctatcactagtgctggtaaagtcagtccagaagcggctcttgccctctctactccgattgctgtggcgattcaattcttacaaactttcgcctacactgtacgtgctggtgcgcctgaaacrgckatgaagcacttgaaaaaccataatttgaagaaattyaagttyactctaaatgcaacaatttgsttgtttgcctttattggatttaccttgggttgcttgggtgccctttcaatggataccttgttgaaactcgtagactacattccaccggtattrcttacaggtttgacagttgctggtaaaatgctcccagctatcggttttgcgatgatcttgtcagtgatggctaagaaagagttgattccctttgtcttgttgggatatgtttgtgcagcttatctaaacatcccaacaattggtattgcaattgtaggtactatctttgctttgattgaattttataacaagccaaaaacagcggatcatgtggtagaggaggaagcacacgatgactggatctaactaat

SEQ ID NO: 2898 - DNA, 228 bp, Streptococcus pneumoniae
  misc_feature (1)..(228): tiling:Spneumo1:WAN024G59; Cluster includes WAN023LHR 3140 09_1882||||1016534..1016761|-|228 bp|EGAD orf prediction|S .pneumoniae|R6|NC_003098.1|ORF|110
atgtcggatagcatctacagtaccttctcccccatcaccaacagggcagaggagacattctacatctgctatcgattgttggaagcctctttttattgcttcagctacctgttgagctgtcaagctttccttaaacgaatccggtgcaattacaatcttcatattttccctcattctaaacagtcaatcaaaggragaacttctaaaaaatccctcttgtcaacatga

SEQ ID NO: 2899 - DNA, 345 bp, Streptococcus pneumoniae
  misc_feature (1)..(345): tiling:Spneumo1:WAN024FFI; Cluster includes WAN0243MB spr1 552||15903595|NP_359145.1|1533733..1534077|-|345 bp|Hypoth etical protein|S.pneumoniae|R6|NC_003098.1|ORF|111
atgtcggtgatggaacatttgtttaaattcttacttttagcaccgtacttttattttgataactggattgaaaaggccaacagaaatagtaagttttttccaattttttattatttttactggwtttacatccccttctattctctttttagccttgcttggacagttgtttcagttctgtttttcaataccgtcttgagaaatgtgacagatatcaagttatggggcatttggtttctttttattctgctagctattggtatgaattggttaacttattcctgtttcaaagaaatgtttcgcttgagacaggaactagggaagtctaagggtggaaggcattga

SEQ ID NO: 2900 - DNA, 330 bp, Streptococcus pneumoniae
  misc_feature (1)..(330): tiling:Spneumo1:WAN024D6G; Cluster includes WAN023L05 3138 37_2615||||1395498..1395827|+|330 bp|EGAD orf prediction|S .pneumoniae|R6|NC_003098.1|ORF|110
atgtcgtttggccaaaacttgagtaccaagagaaagaacgatggtaacgatagcaggaagtccttctggaatggctgcaacrgcaagggcaacagaagtcaacaactcaccaagtggatttttcccttgaatgaagacacccactacaaaagtaacaagggcaatgaccaagatagcataggtcaagaccttagaaaggttgttcaarttttgtttgagtggtgtatcagtctcatccgcatcttgaagcataccagcaatatgaccaacttcagtrtacatacctgtattgacaacaacacccatcccacgaccataggttacgtttga

SEQ ID NO: 2901 - DNA, 828 bp, Streptococcus pneumoniae
  misc_feature (1)..(828): tiling:Spneumo1:WAN024FYT; Cluster includes WAN023OGW pne9 0_11||||7916..8743|+|828 bp|Type 47F2 capsule operon, Glim mer 2.02 orf prediction|S.pneumoniae||WAN01UCEO|ORF|000
atgtcrgatataaaaatyattcaagataaratyytrwytatcttraaagaatttattaatatttgtgaagaaaataatttgacttactatgctctagggggaacattgcttggagcagtacgtcacaaaggatttatcccttgggatgatgatattgatattggcatgccaagagaagattacgaaaagtttaagaaagtagctcccaattttctaccaaataattataaatttttaagtgaagataccgctaattataaaaaagctttctctgtaattcgggatgattcaacgaaaatcataatgaattatagtaaagaggaattggtagagagtttgtggatagatatttttccacttgatggaatgcctgctgccccctttaagagaaaaatgcatgagtatagatacttatatagacggatgatggttcaactttctcagtttaatagtttagtaaatcagaagaaagagaatcgtccactatctgaaaaaatgattattggatttgcgaacgctgttaatattgaaaagattatttcttttaactgggcacagaaaaaatatttacaaacgctaaaaaaatattcgtttaaggaagcttttgcaggaaactatacaggagcatataaactaagagaaatcgtaccttcagattattttggagagccagtatcattagagtttgaagggactgatttgagttgtcctcgtaagtataaagaatatttgatagcaatttatggagagaattatatgcagttacctccagaagataagcgaaaccaacatcactataagataatatctcttggtgataatgaagaa

SEQ ID NO: 2902 - DNA, 375 bp, Streptococcus pneumoniae
  misc_feature (1)..(375): tiling:Spneumo1:WAN024DMR; Cluster includes WAN0244T6 spr0 008||15902052|NP_357602.1|8582..8950|+|369 bp|Hypothetical protein|S.pneumoniae|R6|NC_003098.1|ORF|111
atgtctaaaaatattgtacaattgaataattcttttattcaaaatgaataccaacgtcgtcgctacctgatgaaagaacgacaaaaacggaatcgttttatgggaggggtattgattttgattatgctattatttatcttgccaacttttaatttagcgcagagttatcagcaattactccaaagacgtcagcaattagcagacttgcaaactcagtatcaaactttgagtgatgaaaaggataaggaracagcatttgctaccaagttgaaagatgaagattatgctgctaaatatacacgagcgaagtactattattctaagtcgagggaaaaagtttatacgattcctgacttgcttcaaaggykaactaat

SEQ ID NO: 2903 - DNA, 1242 bp, Streptococcus pneumoniae
  misc_feature (1)..(1242): tiling:Spneumo1:WAN024FNP; Cluster includes WAN023PB6 pne4 5_13||||9524..10765|+|1242 bp|Type 22F capsule operon, Gli mmer 2.02 orf prediction|S.pneumoniae||WAN01UCHA|ORF|000
atgtctaaaatgaaaattgcagtagttgggactggttatgttggtttatccatttctgtgttacttgcacaacaccatcatgtagtagcagtagatattgtaaaagagaaagtagaattaattaataataaaatttcacctattcaggatgattttattgaaagatatctttcagaaagtaatttagatttagttgcaacaatagacgctgaaacagcttataaagatgcctcttttatcgtagtagcgacgccaacaaattatgactcagaaagaaatttttttgatacatcagcagttgaatcggttattcaacaggttcagaatgtgaattctacagcaactatagtaataaaatcaacagtccccgtgggttttactgattcaattcgtaaaaaattaggaatttcaaatcttctattcagccctgaatttttgcgcgaatcaagagcactttatgataacttatatccaagtcggatcatagttggaacagatttaaatgatcaaaaattaattgaaaaggcccaagttttctctaatcttttagtgcaaggtgctatcaaaaaagatatccctattttaattatgggatttactgaagctgaagcagttaaattatttgctaatacctacttagcattgcgggtatcatattttaatgaattagatacttatgcagagaccaaaggactagatactcaaaaaataattgagggtgttagtttagatccccgtatcggaacccattataataatccgagctttgggtacggtggatattgcttaccaaaggacactaagcaacttttagctaattatgagaatatcccagaagaacttattggggctatagtacgtagcaatgcaacacgtaaggattttattgctaaacaagttcttaaaatggtgaattataataatccagaagacgatatttctgtcagacagatggataaagaagttgttattgggatataccgattaactatgaaaagtaacagtgataactttcgtcagagttcaatacagggagttatgaaacgtattaaggatagaggagctaaagtaattatttttgagcctactctaaaagataatggtacgttctttgggaacgctgttataaatgatttagaagagttcaaagcaaagtgcgatgcgattattgcaaatcgttatgatgaaatgttgaacgacgttaaggataaagtatatacacgagatatcttcagaagagat

SEQ ID NO: 2904 - DNA, 1829 bp, Streptococcus pneumoniae
  misc_feature (1)..(1829): tiling:Spneumo1:WAN024GK4; Cluster includes WAN0244GR spr0 455|dnaK|15902499|NP_358049.1|462058..463881|+|1824 bp|Cla ss I heat-shock protein (molecular chaperone)|S.pneumoniae |R6|NC_003098.1|ORF|111
atgtctaaaattatcggtattgacttaggtacaacaaactcagcagttgcagttcttgaaggaactgaaagcaaaatcatcgcaaacccagaaggraaycgcacaactccatctgtagtctcattcaaaaacggagaaatyatcgttggygatgctgcaaaacgtcaagcagtyacaaacccagatacagttatctctatcaaatctaagatgggaacttctgaaaaagtttctgcaaatggaaaagaatacactccacaagaaatctcagctatgatccttcaatacttgaaaggctacgctgaagactaccttggtgagaaagtaaccaaagctgttatcacagttccrgcttacttcamcgacgctcaacgtcaagcmacamaasacgctggtaaaattgctggtcttgaagtaraacgtattgttaacgaaccaactgcagcagctcttgcttatggtttggacaagactgacaaagaagaaaaaatmytggtatttgaccttggtggtggtacattcgacgtctctatccttgaattgggtgacggtgtcttcgacgtattgtcaactgcaggggacaacaaacttggtggtgacgactttgaccaaaaaatcattgaccacttggtagcagaattcaagaaagaaaacggtatcgacttgtctactgacaagatggcaatgcaacgtttgaaagatgcggctgaaaaagcgaagaaagacctttctggtgtaacttcaacacaaatcagcttgccatttatcactgcaggtgaggctggacctcttcacttggaaatgactttractcgtgcgaaatttgaygatttgactcgtgaccttgttgaacgtacaaaagttccagttcgtcaagccctttcrgatgcaggtttgagcttgtcagaaatcgacgaagttatccttgttggtggttcaactcgtatccctgccgttgttgaagctgttaaagctgaaactggtaaagaaccaaacaaatcagtaaaccctgatgaagtagttgctatgggtgcggctatccaaggtggtgtgattactggtgatgtcaaggaygttgtycttcttgatgtaacgccattgtcacttggtatcgaaacaatgggtggagtatttacaaaacttatcgatcgcaacactacaatcccaacatctaaatcacaagtcttctcaacagcagcagacaaccaaccagccgttgatatccaygttcttcaaggtgaacgcccaatggcagcagataacaagactcttggacgyttccaattgactgatatcccagctgcacctcgtggaattcctcaaatcgaagtaacatttgacatcgacaagaacggtatcgtgtctgttaaggccaaagaccttggaactcaaaaagaacaaactattgtcatccaatcgaactcaggtttgactgacgaagaaatcgaccgcatgatgaaagatgcagaagcaaacsctgaabcygataagaaacgtaaagaagaagtagaccttcgtaatgaagtrgaccaagcaatctttgcgactgaaaagacaatcaaggaaactgaaggtaaaggcttcgacscagaacgtgacgctgcccaagctgcccttgatgaccttaagaaagctcaagaagacaacaacttggacgacatgaaarcraaacttgaagcattgaacgaaaaagctcaaggacttgctgttaaactctacgaacaagccgcagcagcgcaacaagctcaagaaggagcagaaggcgcacaagcaacaggraacgcaggcgatgacgtcgtagacggagagtttacggaaaagtaactaat

SEQ ID NO: 2905 - DNA, 2658 bp, Streptococcus pneumoniae
  misc_feature (1)..(2658): tiling:Spneumo1:WAN024F5S; Cluster includes WAN0244FQ spr0 492|valS|15902536|NP_358086.1|491701..494352|+|2652 bp|Val yl-tRNA synthetase|S.pneumoniae|R6|NC_003098.1|ORF|331
atgtctaaagaactttcayctaaatacaatccagccgakgttgaggctggtcgttaccaaaaatggcttgatgckgatgttttcaagccttcaggcgatcaaaaggctaagccttattcaatcgtkattccaccaccaaacgtwacwggkaaacttcaccttggtcacgcttgggatacractttgcargatatyatcatccgtcaaaaacgcatgcarggytttgataccctttggcttccwggkatggaccacgcwggkattgcsactcaggctaaggtwraggagcgcttrcgtggtgagggyattwcscgytatgacctwggtcgtgagtctttcttgacgaargtctgggaatggaaagacgaatatgccactacyatcaaggaacaatggggcaagatggggctytctgtagactaytctcgtgagcgtttcactcttgaygaaggtttgtcaaaagctgttcgtaaggtctttgtgracctttacaagaaaggctggatctaycgtggtgagtttatcatcaactgggacccagcagctcgcacagccctttctgatattgaggtgattcacaaggatgtrgaaggtgccttctaccacatgaattacatgctggaagatggttcacgcgyccttgaagttgctacaactcgtcctgagacyatgtttggggacgttgcgrttgcgrtyaayccagaagacccgcgctacaaggacttgattggtaaaaaygtcatccttccaatcgctaataaactcatcccaatcgttggagatgagcacgcagatcctgagyttggtactggtgtcgtgaaaatcacacctgcccacgrtccaaatgacttcttggttggccaacgtcataacttgccacaagtcaacrtcatgaacgacgacggaacyatgaaygagcttgyctttgaattttcaggcatggaycgttttgaagctcgtaaggcagtcgttgctaagttggaagaaatcggtgccctygtcaaaatcgaaaaacgtgtccaywswgtyggtcactcagarcgkacaggtgtygtrgttgarccwcgcttgtctactcaatggttcgtcaagatggaccaattggctaagaacgccattgcyaaccaagacacagaggacaaggtcgaattctacccacctcgtttcaacgataccttccttcaatggatggaaaatgtccacgactgggttatctctcgtcagctytggtggggtcaccaaatccctgcytggtacaatgctgatggtgaaatgtatgtcggcgaagaagctccagaaggtgacggatggactcaggacgaagacgtcttggatacttggttcagttctgccctctggccattttcaaccatgggctggcctgaagtcgactcagaagactttaaacgttatttcccaacttcaaccttggtaacaggttacgacatcatcttcttctgggtgtctcgtatgatcttccagtcmttggaattyacwggycgtcarccattccaaaacgtscttatccacggtctyatycgtgacgagcaaggacgcaagatgtctaartctctyggwaayggsattgacccaatggatgtyatygakaaatayggtrchgatrsycttcgwtggttcytktcaaacggytchgcdccwggwcaagacgtkcgtttctcttaygagaaaatggatgcttcatggaactttattaacaaratttggaacatttctcgctatatcytcatgaacaatgraggtttgacgctggatgtggcgcatgacaatgtcacaaaagttgcaacaggtgaggctggtaatgtgacggaccgctggattctccacaatctcaacgaaaccattgcaaaagttactgaaaactttgataagttygagtttggtgtggctggtcatatcctttacaacttcatytgggaagaatttgccaactggtatgttgagttgaccaaggaagtyctwtayagcgayaaygaagamgakaargtmatyacwcgwtctgttctmctmtayackytggayaaratccttcgtctccttcacycaatmatgccrttcgtgacagargaaatctttggwcarwwckcwgaaggytctatcgtgacagcwgcatacccaactgtyaaycyagcctttgargaccttgckgcycacactggtgtggaaagtctcaaaracttratycgtgcygttcgkaatgcgcgtgcggaagtaaatgtagcaccaagcaarcctatcacmatccttgttaagacwagcgatagygacttggaagccttctttaacagcaatgtcaactayatcaarcgctttacaaatccagaacayttggaaatcgcatcaaccatccctgcacctgaactggctatgtcaagygtyatyacaggagcmgaaatctwcytgccactggymgayctyytsaatgtygaagaagaaytrgchcgtctsgamaargaactygcyaaatggcaraaagaactsgayatggtyggyaaraaactcwsyaacgaacgcttcgtmgccaacgcyaaaccagaagtygtccaaaaagaahrmgacaaacaagcygactaccaagcyaartatgaygygaccgtmgcacgtattgatgagatgaagaagttggtgaaaykaactaat

SEQ ID NO: 2906 - DNA, 1088 bp, Streptococcus pneumoniae
  misc_feature (1)..(1088): tiling:Spneumo1:WAN024FI9; Cluster includes WAN0243PA spr1 445|pepQ|15903488|NP_359038.1|1430643..1431725|+|1083 bp|D ipeptidase|S.pneumoniae|R6|NC_003098.1|ORF|211
atgtctaaattacaacaaatcctaacatatcttgaatcagaaaaactagacgtcgctgtcgtatctgaccccgtcacaatcaattacctcactggtttttacagtgatccccatgaacgccaaatgttcctctttgtcctagcrgatcaggaacctctcctctttgtcccagctcttgaagtagaacgtgcaagtagcaccgtttccttcccagtagtgggctatgtcgattctgaaaatccatggcaaaaaatcaaacatgctcttccacaacttgacttcaaacgtgtcgctgttgagtttgacaatctcatcttgaccaaataccatggtttgaaaacagtttttgagactgctgagtttgacaacctcactcctcgtatccaacgcatgcgcctcatcaaatcagctgatgaagtgcaaaaaatgatgrttgcaggtctttatgctgacaaggctgttcatgttggttttgacaatatttctcttgataagactgagacagatatcatcgcacaaatcgactttgccatgaaacgtgaaggttatgaaatgagctttgataccatggtcttgactggtgataatgctgcgaatccacacggcattccagcagctaataaggttgaaaatgatgctcttctcctctttgacctgggtgttctggtcaatggctatgcgtcagatatgactcgtacagtcgctgtcggcaaaccagaccaattcaagaaagatatttacaacttgactcttgaagcccaacaagctgctcttgactttatcaagccaggtgtgactgctcatgaagtggaccgcgctgcccgtgaggtcatcgaaaaagctggttatggtgagtacttcaaycaccgtctcgggcatggtatcggtatggatgtccatgaattcccatctatcatggaaggaaacgacatggtcatcgaagaaggcatgtgcttctctgytgaaccaggtatctatatccctggtaaagtcggtgttcgtattgaagactgcggtgttgttaccaaggatggcttcracctctttacaagcaccagcaaagatttgctttattttgattaactaat

SEQ ID NO: 2907 - DNA, 2473 bp, Streptococcus pneumoniae
  misc_feature (1)..(2473): tiling:Spneumo1:WAN024GO6; Cluster includes WAN0240WH |par C||AAK63177.1|||2472 bp|topoisomerase IV subunit A|S.pneum oniae||AY035995|ORF|000
atgtctaacattcaaaacatgtccctsgaggacatyatgggagagcgctttggtcgctactcmaartacattattcaagaccgrgctttgccagatattcgtgatggmttgaagccggttcarcgtcgtattctttattckatgaataaggatggyaatacctttgacaagagctaycgtaagtcggcyragtctgtmggkaatatcatggggaatttycacccacacggtgaywrttctatctatgatgccatggtccgtatgtctcagraytggaaraaycgtgagattytrgtcgaaatgcacggtaataacggttcwatggacggagatccrcctgcggcyatgcgttatactgaggcrcgtttgtctgarattgcrggytaycttcttcaggatatcgagaaaaagacmgttccytttgcttggaactttgacgatacsgagaaagarccaacrgtcttgccagcagcctttccmaacctcttggtcaatggytckactggkatttcggctggttatgccacagatattccwccscataatttrgctgaggtyatygatgckrcggtttayatgattgaccatccaacggcmaaagttgacaaactcatggagttcttgcctggrccagacttcccwacrggagssatyatycaaggwcgtgaygaaatyaaraaggcctatgaaacyggwaaagggcgcgtggtcgttcgttcyaaractgagattgaaaagctaaaaggtggtaaggaacaaatcgttrtcactgarattccttatgaaatcaataargccaatctagtcaagaaaattgatgatgtccgtgtcaataacaaggtggcaggtattgctgaggttcgwgaygagtctgaccgtgayggtcttcgtatcgctatcgaactyaagaaagacgctaataccgagctcgtactcaactatctcttcaaatayacygayctacaaatcaactacaactttaacatggtggckattgacaatttcacacctcgtcaggtygggattgttccaatyytrtctagctayatcgcccaycgtcgtgaagtsattttggcscgttcccgctttgacaaggaaaaggctgagaarcgtctccatatcgtmgaaggtttrattcgmgtgatttcgattttggaygaagtyattgcscttatycgygcttctgagaataaggcrgacgcyaaggaaaacctcaaagttagctatgattttacrgaagarcaggctgaggctatcgtwacyttgcaactktaccgtttgaccaatacsgaygtggttgtcttgcaggaagaagaagcwgagcttcgtgagaagattgctatgctkgckgctattatyggygatgaamggacyatgtacaatctcatgaagaaagarcttcgtgaggtcaagaagaaatttgcracwccwcgtttgagttckttagaagayactgcgaaagcaattgagattgatacagctagtctkatcgctgargaagatacctaygtcagcgtgaccaaggcaggttacatcaagcgtaccagtccacgttcctttgckgcttccasctatrgawgaaattggcaagcgtgatgatgaccgtttratytttgktcaatctgccaagacaayccarcacctcttgatgttcacaagtcttggaaatgtcatctacmsrccaatccatgarttggcagatattcgttggaaggayatcggagagcatctgagccaaaccatcacaaactttgaaacgaatgaagaaatmctttatgtggaagtactggatcagtttgaygatgcgacaacytaytttgcagcsactcgyctyggtcaaatyaarcgkgtagarcgwaaagaatttwctccatggcggacctayarrtckaagtctgtyaagtaygctaarctcaaagacgakacagaycarattgtagcagtggctccgattaaactagatgatgttstcttgrttagycaaaayggttatgcmctkcgtttcaatatygaagaggttccggttgtyggtgcyaaggcagcaggtgtcaaggctatgaayytgaaagaagatgatgtcctccaatckgsctttatctgtaatacytcgtccttytacctcttgacccagcgtggaagtttgaaacgygtttccrttgaggaaattccagcraccagycgtgccaaacgaggwytacaagtcttgcgtgarttgaaaaacaaaccrcatcgwgtcttcttggctggwgcagttkcagagcaagratttgtaggtgatctcttcagtacagargtagaagagaacgaccaaactctgcttgttcaatccaacaaaggaacaatctatgaaawccgattgcaagacttgaayctgtcagaacgaacyagcaacggwagcttcatatcmgataccatttcagatgaagaagtttttgaygcytatcttcaggaagtagttactgaagataaataa

SEQ ID NO: 2908 - DNA, 309 bp, Streptococcus pneumoniae
  misc_feature (1)..(309): tiling:Spneumo1:WAN024G9M; Cluster includes WAN02446W spr0 810||15902854|NP_358404.1|812345..812647|+|303 bp|Hypothet ical protein|S.pneumoniae|R6|NC_003098.1|ORF|110
atgtctaacctagcagaaagaggaaatatcatgaacagtaarttttataaaatgagacgmaatcgcatgatttcaggagttytrgcaggtctgtcagacaagtggaaytttgatgttaccctwgtwcgtttyytgtttgcyatttttacagtygcaaactttggacttggvgtgattatctatatcatcctagcttctatcatgcywachaaggaagaaatcgaagcagaaatgtacggaacaggcccacgyaaacgcaaagaagcycaagcmattgacgayaatgaaggctggttttggykaactaat

SEQ ID NO: 2909 - DNA, 923 bp, Streptococcus pneumoniae
  misc_feature (1)..(923): tiling:Spneumo1:WAN024F5P; Cluster includes WAN0243SI spr1 329|glyQ|15903372|NP_358922.1|1316630..1317547|-|918 bp|Gl ycyl-tRNA synthetase alpha chain|S.pneumoniae|R6|NC_003098 .1|ORF|111
atgtctaagaaattracwttycargaaatyatyytkactttgcaacaattttggaatgaccaagrttgtatgcttatgcaggcttatgataatgaaaaaggtgcgggracaatgagtccttacactttccttcgtgctatcggacctgagccatggaatgcagcttatgtagagccatcacgtcgtcctgctgacggtcgttatggggaaaaccctaaccgtctctaccaacaccaccaattccaggtggtcatgaagccttctccatcaaatatccaagaactttaccttgagtctttggaaaaattgggaatcaatcctttggagcacgatattcgttttgttgaggacaactgggaaaacccatcaactggttcagctggtcttggttgggaagtttggcttgacggaatggaaatcactcagttcacttatttccaacaagtcggtggattggcaactrgccctgtgactgcggaagttacctatggtttggagcgcttggcttcttacattcaagaagtagactctrtctatgatatcgagtgggctgatggtgtaaaatacggagaaatctttatccagcctgagtatgagcactcaaaatattcatttgaaatttcggaccaagaaatgttgcttgaaaaytttgataagtttgaaaaagaagctggtcgtgcattagaagaaggcttggtacaccctgcctatgactatgttctcaaatgttcacatacctttaatctgcttgacgcgcgtggtgccgtatctgtaacagagcgtgcaggctatatcgctcgtatccgtaacttggcccgtgtygtagccaaaacctttgtygcagaacgcaaacgcctaggytacccacttttggatgaagaaacamgagytaaactyytagcagaagacgcagaatarctaat

SEQ ID NO: 2910 - DNA, 1014 bp, Streptococcus pneumoniae
  misc_feature (1)..(1014): tiling:Spneumo1:WAN024FQG; Cluster includes WAN023OT4 pne7 3_13||||10644..11657|+|1014 bp|Type 34(2) capsule operon, Glimmer 2.02 orf prediction|S.pneumoniae||WAN01UCF4|ORF|00 0
atgtctaataaaatactgacgattactgtgccaacctataatattgaaaactatattggtaaatgcatagaatcatttaaagctgtaaatcctrcytattacagtgattttgaagtgttaatcattaatgacggaagtactgataattctgtacaagttgttaaggatttaatggaaggtagcactttagatttaagaattatcacaaaagaaaatgggggccatggctcaactattaatcgcgggattaaagaagctartggaaaatattttaaggtcattgatggggatgattggatcaatgttcmagaatttgaaagcttattggataagttaagagagattaacactgatttagtgatttctgactatacagagcagcatgtatataataatagcactatttttaaagaattctcttcttatctaattccaaatcaagagacaagaggtattcctagcaagtggacacctatgcatgccctggtctataaaacaagtatcttgaaggataatgctattacgattagtgaaaatacattttatgtcgaccaagagtatacaatgctcccyctycaatttgtagaaaattatatttattttaagttggatatttatcagtacttmttgggaagagctgatcagagtatgaatattgatataatgagaaagagagcagatcatcatgagagagtaacgaaacgaatcttagacttatataaagagagttatacacaaaagccagaawtagaaaaggttgtcagtgactctttgcagtatctggttaataagcaaaatattttgtatgttatgaatgaggaacttgayaaggtatatgaactgttttcatattctgaraaaagtggattcaaatttaaatttgaaacaaaaacaaagacttcaaatttactttatgtcaattataaaacgaagtatctttttaaccttgttattaaaaatctagttaaaagaaaagcaaacagtctagaaaaagaatttcaagagaagggattt

SEQ ID NO: 2911 - DNA, 879 bp, Streptococcus pneumoniae
  misc_feature (1)..(879): tiling:Spneumo1:WAN024EUT; Cluster includes WAN023I75-5 86 914_3491||||1989407..1991755|-|2349 bp|EGAD orf prediction |S.pneumoniae|TIGR4|WAN01UC25|ORF|010
atgtctaattcatttgtcaagttgttagtctctcaattatttgcaaatttagcagatattttctttagagtaacaatcattgctaacatatacattatttcaaaatcagtaattgccacatcactagttcctatcttaataggaatatcctcttttgttgcgagtcttttagttccgttggttactaaaaggttagcgctaaatagggttttatctttatctcaatttggaaagactatattattggcgatactggtaggaatgtttaccgtaatgcaatccgtagcgcctttggtgacctatctatttgttgttgcaatttccatactagatggttttgcagcacccgtttcctatgctattgtgccacgctatgcgaccgatttgggtaaggctaattcagccttatcaatgactggtgaagctgttcaattgataggttggggattaggtggactcttgtttgcaacaattggtctgttacctaccacgtgtatcaatttagtcttgtatatcatttctagctttctgatgttatttcttcctaacgctgaagtggaggtgttagagtcagaaactaatcttgaaattttgctcaaaggttggaagttagttgctagaaatcctagattaagactttttgtatcagcaaatttattggaaattttttcaaatacgatttgggtttcttccattatacttgtttttgtaacggagttattaaataaaacggaaagttactggggatattctaatacagcatactctattggtattataattagtggcttaattgcttttaggctatctgaaaagttccttgctgctaaatgggaaccccaattattcaccccaaatctaaaaaccatccagaatcct

SEQ ID NO: 2912 - DNA, 1185 bp, Streptococcus pneumoniae
  misc_feature (1)..(1185): tiling:Spneumo1:WAN024B4F; Cluster includes WAN0243AE spr1 983||15904024|NP_359574.1|1974482..1975660|-|1179 bp|Conse rved hypothetical protein|S.pneumoniae|R6|NC_003098.1|ORF| 211
atgtctaattcatttgtcaagttgttagtctctcaattatttgcaaatttagcagatattttctttagagtaacaatcattgctaacatatacattatttcaaaatcagtaattgccacatcactagttcctatcttaataggaatatcctcttttgttgcgagtcttttagttccgttggttactaaaaggttagcgctaaatagggttttatctttatctcaatttggaaagactatattattggcgatactggtaggaatgtttaccgtaatgcaatccgtagcgcctttggtgacytatctatttgttgttgcaatttccatactagatggttttgcagcacccgtttcctatgctattgtgccacgctatgcgaccgatttgggtaaggctaattcagccttatcaatgactggtgaagctgttcaattgataggttggggattaggtggactcttrtttgcaacaattggtctgttacctaccacgtktatcawtttagtcttgtatatcatttctagctttctgatgttatttcttcctaacgctgaagtggaggtgttagagtcagaaactaatcttgaaattttrctcaaaggttggaagttagttgctagaaatcctagattaagactttttgtatcagcaaatttattggaaattttttcaaatacgatttgggtttcttccattatacttgtttttgtaacggagttattaaataaaacggaaagttactggggatattctaatacagcatactctattggtattataattagtggcttaattgcttttaggctatctgaaaagttccttgmtgmtwwrkrrswaaktattctttttcctcttgtagctatggmaatagtgacactgactattctatattttccaaacgcacagatgtttttattattttcagctttagttggtatgttatygcaactaaaagaagttcctgaaagtgtatttcttcaggaaacagtagaggaaaatcatttagttaatgtctattccgttcttgaagtgatttctacattagcattttcagtatttgttttgctaatgagctatattactgagagttttggtattagcatcagtttttggctatcagccatttgtctgatgatagaagctattttaatttatatcagacgagattattttaaaykaactaat

SEQ ID NO: 2913 - DNA, 1484 bp, Streptococcus pneumoniae
  misc_feature (1)..(1484): tiling:Spneumo1:WAN024DTX; Cluster includes WAN024390 spr2 033|imdH|15904074|NP_359624.1|2023548..2025026|-|1479 bp|I nosine-5'-monophosphate dehydrogenase|S.pneumoniae|R6|NC_0 03098.1|ORF|111
atgtctaattgggacactaaatttttgaaaaaaggttttacctttgatgatgtattgcttattccagctgaaagtcatgtgttgcctaacgatgcagatttaacaactaaattggcagataatttgactttaaatatcccaattattaccgctgccatggacacagttacagagagtcaaatggccattgctattgctcgtgcaggyggtctcggagttatccataaaaacatgtcaattgctcaacaagcagacgargttcgtaaggtaaaacgttctgaaaatggagttattattgatccgttcttcttgacgcctgaacatacaattgctgaagcagatgagcttatgggtcgttaccgcatcagtggtgttccagttgttgaaacacttgaaaatcgtaaattggttggtattttgacaaaccgagmtcttcgttttatttcagattataatcaaccaatttcaaaccatatgactagtgaaaatcttgttactgctcctgtgggtacggatcttgcaacggctgagagtattcttcaagagcatcgtattgaaaaacttccgttggtcgatgaagaaggcagtctttctggtttgatcactatcaaagatattgaaaaagttattgagtttccaaatgcggctaaagatgartttggtcgtcttctagttgcaggtgcagtaggtgttacttcagatacatttgaacgtgcagaggctctttttgaggcaggagcggatgcgattgttattgatactgcacatggtcattctgcaggtgtcttgcgtaaaattgccgagattcgtgctcatttcccagatcggactttgattgctggaaatattgctactgctgaaggtgcacgtgccctttatgaagcgggtgtagacgttgttaaggttggtattggaccaggttctatctgtactactcgtgtgattgctggtgttggtgttccgcaagtaacagctatctacgatgctgcagctgttgcgcgcgaatatggtaaaacgattattgctgacggtgggatcaagtattctggagatattgtaaaagcacttgctgcaggtggaaatgctgttatgcttggatctatgtttgctggaactgatgaagctccaggcgaaactgaaatcttccaaggacgtaaattcaagacttaccgtggtatgggatcaattgctgctatgaagaaaggttcaagcgaccgttatttccaaggttctgtcaatgaagcaaacaagctygttccagaaggaattgaaggtcgtgttgcttataaaggagcggcagctgatattgttttccaaatgattggtggtattcgctctggtatgggttactgtggtgcagctaaccttaaagaactacacgataatgctcaatttattgaaatgtctggtgctggtttgaaagaaagccatcctcatgatgtgcaaattactaatgaggcaccaaattattctatgtaactaat

SEQ ID NO: 2914 - DNA, 932 bp, Streptococcus pneumoniae
  misc_feature (1)..(932): tiling:Spneumo1:WAN024EWE; Cluster includes WAN0243I3 spr1 705|amiD|15903747|NP_359297.1|1674505..1675431|-|927 bp|AB C transporter membrane-spanning permease - oligopeptide tr ansport|S.pneumoniae|R6|NC_003098.1|ORF|211
atgtctacaatcgataaagaaaaatttcagtttgtaaaacgtgacgattttgcctctgaaactattgatgcgccagcatattcttactggaaatcagtgtttaaacaatttatgaagaaaaaatcaactgtagtcatgttgggaatcttggtagccatcattttgataagtttcatctacccaatgttttctaagtttgatttcaatgatgtcagcaaggtaaacgactttagtgttcgttatatcaagccaaatgcggagcattggttcggtactgacagtaacggtaaatcgctctttgacggtgtctggttcggagctcgtaactccatcctcatttctgtgattgcgacagtgattaacttggttatcggtgtttttgtcggtggtatttggggtatttcaaaatcagttgaccgtgtcatgatggaagtttacaacgtcatctcaaacatcccacctcttttgattgttattgtcttgacttactcaatcggagctggattctggaatctgatttttgccatgagcgtaacaacatggattggtattgccttcatgatccgtgtgcaaatcttgcgctatcgtgacttggaatacaacttggcgtcacgtactttgggaacaccaaccttgaagattgttgccaaaaatatcatgcctcaattggtatctgttattgtgacaaccatgactcaaatgcttccaagctttatctcatacgaagccttcttgtctttcttcggtcttggattaccgattacagtgccaagtttgggtcgtttgatttcggattattcacaaaacgtaacaaccaatgcttacttgttctggattccattgacaacccttgtcttggtatccttgtcccttttcgtagttggtcaaaacttagcggatgctagtgatccacgtacacatagatarctaat

SEQ ID NO: 2915 - DNA, 1496 bp, Streptococcus pneumoniae
  misc_feature (1)..(1496): tiling:Spneumo1:WAN024GE6; Cluster includes WAN0244C0 spr0 626|lysS|15902670|NP_358220.1|632850..634340|+|1491 bp|Lys yl-tRNA synthetase (lysine--tRNA ligase) (LYSRS)|S.pneumon iae|R6|NC_003098.1|ORF|211
atgtctacagaacatatggaagaactaaatgaccagcagatygttcgccgtgaaaaaatggctgcgctccgcgaacaaggaatcgatcctttcggaaaacgttttgaacgtactgcaaattcacaagaattaaaagataaatatrccaacctcgataaagaacaattacacgataaaaacgaaacagctactatcgcaggacgcttgrtaaccaaacgtggtaaaggwaaagtkggktttgcccaccttcaagaccgcgaaggccagattcagatctaygttcgtaaggatgctgtcggtgaagaaaactacgaaatcttcaaaaaagcagaccttggtgacttccttggtgtcgaaggtgaagtgatgcgtacggatatgggagaactctctatcaaggcaacccacatcacacacttgtctaaggctcttcgtcctcttcctgagaaattccatggtttgacagaygttgaaacaatttaccgtaaacgttaccttgacttgatttctaaycgtgaaagctttgaacgytttgtcactcgttcaaaaatcatctctgaaatccgtcgttaccttgaccaaaaaggattccttgaagtggaaacacctgttcttcayaaygaagccggtggwgctgctgcccgtccatttatcacccaccacaatgcccaaaacattgacatggtgcttcgtatcgcgactgagcttcacttaaaacgccttatcgtgggtggtatggaacgtgtctatgaaattggscgtatcttccgtaacgaaggaatggaygctactcataaccctgagttyacttctatcgaagtttaccaagcytatgcagacttccaagayatcatggacttgackgaaggcattatccaacaygctgctaaatcagtyaarggygatggcccagtcaactaycaaggtactgaaatcaagattaacgaaccatttaagcgtgttcatatggtggatgctatcagagaaattactggtgtcgatttctggcaagacatgactttrgaagaagctaaagctatcgctgctgagaagaaagttccagttgagaaacactacactgaggttggtcacatcatcaatgccttctttgaagagtttgttgaagaaactttaatccaaccaacctttgtctatggacatccagtagctgtatctccactcgctaagaaaaatcctgaagaccaacgctttactgaccgtttcgagctctttatcatgactaaggagtacggtaatgcctttactgarytsaacgacccaatcgaccaacttagccgttttgaagcccaagctaaagccaaagaacttggtgatgatgaagcgacaggaatcgactatgactacattgaagcycttgaatacggtatgccaccaacaggtggtttgggaatcggtatcgaccgtctctgcatgctcctcactgatacaacaactatccgtgatgtattgctcttcccaacaatgaaataactaat

SEQ ID NO: 2916 - DNA, 1613 bp, Streptococcus pneumoniae
  misc_feature (1)..(1613): tiling:Spneumo1:WAN024GLJ; Cluster includes WAN0244H8 spr0 438|pyrG|15902482|NP_358032.1|437023..438630|+|1608 bp|CTP synthetase|S.pneumoniae|R6|NC_003098.1|ORF|111
atgtctacgaaatatatttttgtaactggtggtgtggtatcgtcyattgggaaagggattgtggcagcgagtctaggccgtctcttgaaaaatcgtggtctcaaagtaaccattcaaaagtttgacccttatatcaatattgatccgggaaccatgagtccttaccascacggggaagtttttgtgacagatgacggagctgagacagatttggacttgggtcactatgaacgtttyatcgatatyaatctcaacaaatattccaacgtgacaactgggaaaatttayagtgaagttcttcgtaaagaacgccgtggagaataccttggggcaactgttcaagtcattcctcatatcacagatgctttgaaagaaaaaatcaagcgtgccgctctaacgaccgactctgatgtcattatcacagaggttggtggaacagtaggagatatcgagtccttgccattcctagaggctcttcgtcagatgaaggcagatgtgggtgcggataatgtcatgtatatccatacaaccttgcttccttacctcaaggctgctggtgaaatgaaaaccaaaccaacccaacactctgtcaaagaattgcgtggcttgggaatccaaccaaatatgttggttattcgtacagaagagccagctggtcaaggaattaaaaataaactggcccagttctgtgatgtggcaccagaagccgttatcgaatcgttggatgttgaacacctttaccaaattccactgaacttgcaggcacaagggatggaccaaattgtttgtgatcatttgaaattagacgcaccagcagcggmtatgacagaatggtcagccatggtggayaaggtcatgaacctcaagaaacaagttaagatttcccttgttggtaagtatgtggagttgcaagatgcctatatctcagtggtcgaagccttgaaacactctggctatgtcaatgatryagaagttaaaatcaattgggtcaatgccaatgatgtgacagcagagaatgtagcagaactcttgtctgatgcrgacgggatcatcgtaccaggtggttttggtcaacgtggwacagaagggaaaatccaagccatccgctatgcgcgtgaaaatgatgttccaatgttgggagtctgcttgggaatgcagttgacatgtatcgagtttgctcgtcacgttttaggtcttgaaggtgccaattctgcagagcttgcaccagaaacaaaataccctatcattgatatcatgcgtgatcagattgatattgaggatatgggtggaacccttcgtttgggactttatccgtctaagttgaaacgtggctctaaggctgctgctgcttatcacaatcaagaagtggtgcaacgccgtcaccgtcaccgttatgagtttaataatgccttccgtgagcagtttgaggcagcaggttttgtcttttcaggagtttctccagacaatcgtttggtagaaatcgtggaaattcctgaaaataaattctttgtagcttgtcagtatcaccctgaactgtcaagccgtccaaaccgaccagaagaactctacactgcctttgttactgcagcrgttgagaacagcaattarctaat

SEQ ID NO: 2917 - DNA, 476 bp, Streptococcus pneumoniae
  misc_feature (1)..(476): tiling:Spneumo1:WAN024DVQ; Cluster includes WAN0243AS spr1 969|PTS-EII|15904010|NP_359560.1|1960527..1960997|-|471 bp |Phosphotransferase system sugar-specific EII component|S. pneumoniae|R6|NC_003098.1|ORF|111
atgtctatagagtttgttcgtattgatgaccgtctggtacatggtcaagttgtcactacgtggctaaaaaagtatgatattgagcaagttatcattgttaatgatcgcatctcagaagataaaayacgacaatctattttaaagatttctgcaccggtaggtttaaaaattgttttctttagtgtaaaacggtttgtggaagttttaaactctgtgccaataaaaaagagaacaatgctgatatatacaaatccaaaagatgtgtatgattctattgaaggaaatttaaaattggagtacctcaatgtaggacagatgagtaaaacggaggaaaatgaaaaggtaacgggaggtgtagctctaggtgaagaagacaaatattattttaagaaaatagttgataagggaacgagagttgaaattcaaatggttcctaatgataaagttacaatgttggaaaaatttttataactaat

SEQ ID NO: 2918 - DNA, 959 bp, Streptococcus pneumoniae
  misc_feature (1)..(959): tiling:Spneumo1:WAN024CRV; Cluster includes WAN0243L1 spr1 599||15903641|NP_359191.1|1576403..1577356|+|954 bp|Conser ved hypothetical protein|S.pneumoniae|R6|NC_003098.1|ORF|1 11
atgtctattagccaacgtacgamcaagctcatcttagctacctgtcttgcctgcctgyttgcttattttctcaatctttcrtcagcagtttcggctgkaaytatcgctctcttgagcctatctgatacgcgtaramgtactttaaaactggctcgcaatcgtcttttttctatgcttctagctctggctatcggygttctagcttttcacttgagcggatttcatatctggagtctcggcctctatctggccttctacgttcctttagcctacaagatgggctgggaaattggcatcacaccaagcackgttttggttagccatctcttggttcaagagtcaacctctccagacctyctagtcaaygaattccttctctttgctatyggtacaggatttgcyttrctkgtyaatctctayatgccttcacgagaaragraaatccagcactaccacacgctggtggaagaaaagttaaaagatatcctccagcgcttcaaatactatttatccagaggagacggacgcaaccgagcacagctggtagcagaattagacacgcttttgaaagaagccctcagactggtctatttggatcactctgaccacctctttcaccagacmgactaccatatccactactttgagatgagacarcgacaaagtcgtatcctgagaaacatggcccaacagattaacacttgtcaccttgccgccagtgaaagcctgatcttagcgcaactcttttcaaaaattgcaggtcaactgagccagaccaatcctgcttctgatttgctagatgaaattgaacgttatctggaagtcttccggaaccgcagtctgcccaaracaagagaagartttgaaacccgcgccacycttcttcaactcctacgtgaagccaaaaccttcatccaagtaaaagttgatttttaccaaaaatatagacagtaactaat

SEQ ID NO: 2919 - DNA, 962 bp, Streptococcus pneumoniae
  misc_feature (1)..(962): tiling:Spneumo1:WAN024DEN; Cluster includes WAN02448K spr0 750|ABC-MSP|15902794|NP_358344.1|746679..747635|+|957 bp|A BC transporter membrane-spanning permease - ribose/galacto se transport|S.pneumoniae|R6|NC_003098.1|ORF|111
atgtctattataaccttgctccccctcttggtgtcttctatgctgatttactcagcacctctcatctttacaagtatcggtggtgttttctctgaacgtggtggtgtggtaaacgttggccttgaaggaattatggttatgggtgccttttctggagttgtctttaaccttgaatttgcagaacaatttggagcagcaactccatggctatccttgcttgtagcaggattggttggtagtgttttctctatcatccacgcagcagcgacggttcatttccgtgcagaccatgttgtcagcggtacggtattgaacttgatggcgcctgccttggctgttttcttagttaaagttctttataacaaaggacaaaccgacaacctaagtcaaacttttggacgctttgatttcccagtcttggcaaatatcccagtgattggtgatatcttcttcaagtcaactagtctacttggttatctggcgattgccttctcattccttgcttggtttattctctttaagactcaatttggtcttcgtctycgctctgtcggtgaacatcctcaagcagcggataccttgggaatcaacgtctacaagatgagatatttagggrttattatttcaggttttctaggtggaattggcggagcgatttatgcgcaatcaatctcagttaacttctcagtgacaactattgttggacctggatttatcgcccttgctgcgatgatctttgggaaatggaatccaatcggtgctatgctttctagtctcttctttggactttcacaaagtttggctgttatcggttctcaattgccgttyctacaaggagtgccagcggtttatcttcaaattgcaccttatgttttgacaattcttgtcttagcagccttctttggaaaagcagtcgcaccaaaagcagatggtatcaactacatcaaatcaaaataactaat

SEQ ID NO: 2920 - DNA, 809 bp, Streptococcus pneumoniae
  misc_feature (1)..(809): tiling:Spneumo1:WAN024C6S; Cluster includes WAN0244M6 spr0 260|manM|15902304|NP_357854.1|261354..262157|-|804 bp|Phos photransferase system, mannose-specific EIIC|S.pneumoniae| R6|NC_003098.1|ORF|221
atgtctattatttctatggttttagtagtcgttgtagccttctttgcaggtcttgaaggcatcctcgaccagttccaatttcaccaaccacttgtagcctgtacccttattgggcttgtaacaggtcacttggaagcagggattatcctcggtggatcgcttcaaatgattgcccttggttggtcaaatatcggtgctgctatcgctcctgatgctgcacttgcttctgtcgctgctgccattatcatggttcttggtggtgactttaccaagactggtatcggtgttgcccaagcggttgctatccctcttgcygtagctggwctwttcttracwatgattgttcgtacaatttcagttggwttggttcayactgcwgatgctgccgctaaaaaaggtgacttcggcgctgtggagcgtgckcatttcatygcgctactyttccaaggacttcgtatcgcgcttcctgcagctcttctccttatggtaccaactgaaactgtacaaagtatccttagtgccatgccagactggctcaaagatggtatggctatcggtggtggtatggtcgttgccgttggttacgccatggttatcaacatgatggcaactcgtgaagtatggccattcttcgctcttggtttcgttctcgctgctgtgtcagatattactctaatcggattcggtgctatcggygttgctatcgctcttatctaccttcacctttctaaaactggtggaaatggtggcggaggagccgcaacttctaacgacccaatcggcgatatcctagaagactaytaactaat

SEQ ID NO: 2921 - DNA, 431 bp, Streptococcus pneumoniae
  misc_feature (1)..(431): tiling:Spneumo1:WAN024DAE; Cluster includes WAN0243ZJ spr1 076|lacA|15903119|NP_358669.1|1074234..1074659|-|426 bp|Ga lactose-6-phosphate isomerase LacA subunit|S.pneumoniae|R6 |NC_003098.1|ORF|112
atgtctattgttatcggtgcagatgctgcaggtttgagattgaaagaagttgtgaaagacttcttagaaaaagaaaacttccaccttgtggatgttacagctgaaggtcaagactttgttgatgtgactctcgctgttgctgcagaagtaaacaaagaagaacaaaaccttggtatcgtgattgatgcttatggagctggtycatttatrgttgcaactaagatcaaaggaatggttgctgcagaagtwtctgaygaacgttcagcttatatgactcgtggccacaacaactcacgtatgatcactatgggwgcacaacttgttggtgatgaattggctaaaaayatcgctaaaggatttgttaayggtaaatacgayggtggwcgtcaycaaatccgggtygacatgttgaacaaaatgggctaactaat

SEQ ID NO: 2922 - DNA, 927 bp, Streptococcus pneumoniae
  misc_feature (1)..(927): tiling:Spneumo1:WAN024CXK; Cluster includes WAN02439I spr2 015|cycK|15904056|NP_359606.1|2008230..2009150|+|921 bp|Cy steine synthase, O-acetylserine sulfhydrylase|S.pneumoniae |R6|NC_003098.1|ORF|111
atgtctatttataacaacattactgaattaatcggtcaaacaccrattgttaaacttaacaacatcgtgccagaaggtgctgcagacgtctatataaagcttgaagcatttaatcctggttcatctgtaaaagaccgtattgcccttagcatgattgaaaaagctgaacaagatggtattctgaaacytggttctactattgttgaagcaacaagtggaaacacyggtattggactttcatgggtaggtgctgctaaagggtataaagtcgtcatcgttatgcctgaaactatgagtgtagaacgacgtaaaattatccaagcttatggtgctgaactcgtcctaactcctggtagcgagggaatgaaaggtgctattgctaaggctcaagaaatcgctgctgaacgtgatggtttccttcctcttcaatttgacaatccagctaatccagaagtacacgaaagaacaacaggagctgagatactagctgctttcggtaaagatggattagatgcctttgttgctggagtaggtacyggtggaacgatttctggtgtttctcatgcactcaaatcagaaaattctaacattcaagtttwtgcagtrgaagcwgatgaatctgctattctatytggtgaaaaaccyggtcctcacaaaattcaaggtatctcagctggatttattcctgatacacttgatactaaagcctatgatggtatcgttcgtgtaacatcagatraygctcttgcactcggacgtgaaattggtggaaaagaaggcttccttgtagggatttcctcagctgcagctatctacggagccatygaggttgccaaaaaattaggtacaggtaaaaaagtccttgcyctagcaccagataacggtgaacgttatctctytacagcactytatgaattkbwarytaat

SEQ ID NO: 2923 - DNA, 749 bp, Streptococcus pneumoniae
  misc_feature (1)..(749): tiling:Spneumo1:WAN024B7U; Cluster includes WAN0243YX spr1 098|srtA|15903141|NP_358691.1|1094720..1095463|-|744 bp|So rtase|S.pneumoniae|R6|NC_003098.1|ORF|111
atgtctcaaaaaaataataaaaagaaaaacaagcgaaaaaatctgctgacaaatatcctagcaggatttctgatattactgtcactggctttgatttttaatactcaaattcgaaatattttcatagtctggaataccaataagtatcaagttagccaggtatcaaaagaaaaattagaagaaaatcaggatacagaaggcaattttgactttgattctgtcaaagctatctcttcggaagctgttctaacttctcaatgggatgctcaaaaattaccagttattgggggaattgcaattcctgaattggaaatgaatttgccgatttttaaaggacttgataatgttaatctcttctacggagctggtacaatgaaacgcgagcaagtaatgggagaaggaaattatagtctagctagtcaccatatcttkggtgttgataatgctaataaaatgttattttctcctttagataatgctaaaaatggcatgaagattwatctaaccgataaaaataaagtttatacttatgaaatacgtgaagtcaaacgtgtgacaccrgatcgtgttgatgaagttgatgatagagatggggtcaatgaaatcacattagtaacctgtgaagaccttgctgctacagaacgtattattgtcaaaggtgatttgaaagaaacaaaagattattcacaaacatctratgaaatcctaacagctttcaatcaaccatataaacaattttattaactaat

SEQ ID NO: 2924 - DNA, 726 bp, Streptococcus pneumoniae
  misc_feature (1)..(726): tiling:Spneumo1:WAN024C4C; Cluster includes WAN023Q1E cont ig_1216_12||||14539..15264|+|726 bp|Glimmer 2.02 orf predi ction|S.pneumoniae|670|WAN01UEKW|ORF|000
atgtctcaagatgaaaaattaattcgtgaacagatttgtgatgtttgtcataagatgtggcaacttggttgggttgctgctaacgatgggaatgtatctgttcgattagatgaggataccattcttgcaacacctactggtatcagcaaaagttttattacwccagaaaagctggtgaagttaaatctyaaaggagagattttagaagcagaaggtgattacygkccytctagtgaaattaaaatgcacattcgktgytacgaagaacgtgaggatgtycgttcagttgttcacgcgcatccaccgattgcaacaggatttgctcttgcacacattcctttagatacttattcactaattgagagcgcgattgtggtwggggcaattcctatwacsccatttggagtwccgtctacaatggaagtgccagaagcaattacaccttatctgcccgatcatgatgtcatgctattagaaaatcatggagctctgactgtcggaagcgatgtcattacagcatactaccgtatggaaactttagaattagtcgcaaagacaacmttccacggaagaatgttactttctacaaagggcattgaggagcaagaaattgctcgtccgactttagaacgtctattctcaatgcgagaaaattataaggttacaggtcgtcacccaggctaccgtaaatataatggmgatggtagtatraaagaaacaraaaaa

SEQ ID NO: 2925 - DNA, 654 bp, Streptococcus pneumoniae
  misc_feature (1)..(654): tiling:Spneumo1:WAN024GOI; Cluster includes WAN0243FJ spr1 797|rpe|15903839|NP_359389.1|1768737..1769393|-|657 bp|Pen tose-5-phosphate-3-epimerase|S.pneumoniae|R6|NC_003098.1|O RF|121
atgtctcaatacaagattgctccgtcaattctggcagcagattatgccaactttgaacgtgaaatcaaacgtctagaagcaactggggcagaatatgcccatatcgatatcatggacagtcattttgtaccgcaaatcagttttggtgcaggtgtggtcgagagccttcgtcctcatagtaagatggttttcgattgccacttgatggtgtcaaaccctgagcatcatctggaagattttgcgcgtgcaggtgcagacatcatcagtatccatgtagaagcaacrcctcatattcatggcgccctccaaaaaattcgttyactcggagttaagccttcagtcgttatcaatcctggcacaycagttgaagccatcaagcacgtccttcatctagttgaccaagttttagtcatgacggttaatccaggttttggtgggcaagcctttctgccagaaaccatggataaggtycgtgagttggttgctcttcgtgaggaaaaaggtttgaactttgaaatcgaagtggatggtgggattgatgaccaaactattgcycaagcyaaagaagcyggtgcgacygtttttgtagcaggttcctatgtctttaagggagawgtcaatgagcgagtacaaactctcagaaaacaactggac

SEQ ID NO: 2926 - DNA, 614 bp, Streptococcus pneumoniae
  misc_feature (1)..(614): tiling:Spneumo1:WAN024D3A; Cluster includes WAN0243H3 spr1 741||15903783|NP_359333.1|1715755..1716363|-|609 bp|Hypoth etical protein|S.pneumoniae|R6|NC_003098.1|ORF|111
atgtctcaatccagytacctgtcgcccttgctctggttaaaaaaagaagccgataaggaaaagatgagcgcgacccagtgccagatatttttcttttactatcaaatgtttgagctcttatttgctagagaaagcgacatgaaagacttatgtctgggaacgaaaggtttttatttctcgcagttagagaaaaatttgctttctggagtttcccgatttctaaaaaacttggaggggaaagtaactctcaaggctaaccaagaagtatcagctcgcaaagccctttttctagccttracaactagccaatcagattggcaggagttagctcctgtttttgatttttatcagactatcgggaggcttgaaaatccttctctcttgagttctcaggacagacaacatctgatgtggatttaccagtcagctttggagaaggattatattgtcaaggttattrgcgacaagcattttgtattgaagagacaagatgctactaaattgacagcgcgccaaactcaaactttggaaattctgagtcaatcagaagacttggtcaatcctgtctatgttacattaggagaaaagggggtgctcttgcttgattaactaat

SEQ ID NO: 2927 - DNA, 652 bp, Streptococcus pneumoniae
  misc_feature (1)..(652): tiling:Spneumo1:WAN024CAK-5; Cluster includes WAN0244OY sp r0160|hexB|15902204|NP_357754.1|168072..170021|+|1950 bp|D NA mismatch repair protein|S.pneumoniae|R6|NC_003098.1|ORF |111
atgtctcatattattgaattgccagagatgctggcaaaccaaatcgcrgctggrgaggtcattgaacgtcctgccagtgtgkkyaaagagttggtagaaaatgccattgacgcgggctctagtcagattatyattgagattgaggaagctggtctcaagaarrtycaaatcacrgataacggtcayggaattgcccacgatgaggtrgagytggcyytgcgtcgycatgcgacyagtaagataaaaaatcargcagayctctttcgrattcggacgcttggytttcgtggtgaagcyytgccttctatygcdtcygtyagygtyttracyytkttracrgcrrtkgakggygcdagtcayggracyaagytmgtygcrcgyggrggwgaagttgargaagtcrtcccagcgacbagtyctgtgggaaccaaggtttgtgtggaggaycthtttttcaacacscctgcycgtctcaagtatatgaagagccagcaagcggagttgtctcatatcattgatattgtcaaccgtctgggcttggcccatcctgagatttctttyagcttgattagtgatggyaaggaaatgacgcggacagcwgggactggtcaaytgcgccaagcwatygcagggatttacggtttggtcagtg

SEQ ID NO: 2928 - DNA, 114 bp, Streptococcus pneumoniae
  misc_feature (1)..(114): tiling:Spneumo1:WAN024CMO; Cluster includes WAN024329 SP02 44||15900179|NP_344783.1|214811..214918|-|108 bp|hypotheti cal protein|S.pneumoniae|TIGR4|NC_003028.1|ORF|020
atgtctcattcctttaaaaaatctctccaaaaagaaattctccatagaagctctatcgcagcctttgtgacctcacgcgcattctccgatacagtatcaccgattctarctaat

SEQ ID NO: 2929 - DNA, 2703 bp, Streptococcus pneumoniae
  misc_feature (1)..(2703): tiling:Spneumo1:WAN024G6S; Cluster includes WAN02442C spr0 974|ppc|15903018|NP_358568.1|957625..960321|+|2697 bp|Phos phoenolpyruvate carboxylase|S.pneumoniae|R6|NC_003098.1|OR F|331
atgtctcttcaaaaattagaaaattmtagtaataaaagtgttgtgmaagaagaagtcttgattctaacagaattactggaagatattactaaaaatatgcttgccccagagacctttgaaaaaataatacagttgaaagaattatcaacgcaggaagattatcaaggtctaaaccgtctagtgactagcttatcaaatgatgaaatggtctatatttcacgctatttctctatcttrcctcttttgatyaatatttcagaggatgtggatttagcttatgaaatcaatcatcaaaataatattgatcaggactatttaggtaaattatctacaacgattaaattggtagcagaaaaggaaaatgccgttgagatcctaraacacttgaatgttgtycckgttttgacagcccatccaacacaagtgcaacgcaaaagtatgttggatttaacaaatcatattcatagtcttttgcgtaaataccgtgatgttaagttggggttratcaataaagataaatggyacaatgatttgcgtcgttacatcgaaattatcatgcagacagacatgattcgtgagaaaaaattaaaagtgactaacgaaatcacgaatgctatggaatattayaacagctcctttttgaaagctgtmcctcatttgacgacggagtataagcgcttagcgcaagcrcatggtctgaatttaaaacaggctaaaccaatcaccatgggtatgtggataggtggtgaccgtgatggaaatccatttgttacagcaragaccttgaagcagtctgcactcactcartgtgaagtcatcatgaactactatgataaaaagatttaccaactttatcgtgaattttctctttcaactagcattgtcaacgtcagcaagcaagtcagagaaatggctcgtcaatccaaggataactckatttaccgcgaaaaagagctttaccgtcgtgccttgtttgatattcaatcaaaaattcaggcaactaaaacctatctgattgaggatgaagaagttgggactcgttatgaaaccgccaatgatttctacaaggatttgattgccattcgagattctctactagaaaataagggygagtccttgatttcaggtgattttgtggaattattgcaggcagtagagatatttggtttttacytagcrtcaattgatatgcgacaagactctagcgtctatgaagcctgtgtggcagaactcttgaaatcagcaggaattcattctcgttatagcgagttgagcgaagaagaaaagtgtgaccttctcttgaaagaattagaagaagatccccgaattctttctgcgactcacgcagaaaaatcagaattattagcaaaagaaytagctatttttaagacggctcgtgttttgaaagataagttgggagatgatgtcatccgtcagaccatcatttcacatgcaaccagyctttctgatatgctagaattagctattctgttaaaagaagtaggactggtggatacggaaagggcgcgtgttcagattgttcccctttttgaaacaattgaagacttggatcattcagargaaacaatgagaaaatatctttctcttagccttgccaaaaaatggattgactcacgaaataactaccaagaaatcatgcttggctactctgacagtaataaagatggcggttacttgtcatcatgttggaccctctacaaggctcaacaacaattgactgctattggagatgaatttggcgttaaggttaccttcttccatggtcgtggtggtactgtcggtcgtggtggtgggccaacctatgaagccattacatctcaaccgctcaagtctatcaaggatcgtatccgcttgacggagcagggtgaagtaattgggaataaatacggtaacaaagacgccgcttactataaccttgaaatgctagtatcggcagctattaaccgtatgattactcagaagaagagcgataccaataccccaaatcgttatgaarccattatggatcaagtagtggaccgtagttacgayrtctaccgtgatttggyctttggtaatgagcatttctatgattatttcttcgagtcaagtccaatcaaggctatttcaagttttaatattggttctcgtccagccgctcgtaagactattactgaaatcggtggwttgcgtgcyatcccttgggtattctcatggtcacagagtcgtgttatgttccctggatggtacggggttggttcaagcttcaaggaatttatcaataaaaatccagagaatattgctatcttacgagatatgtaccaaaattggcctttcttccaatcgcttctttcaaatgttgatatggttttgtcaaaatcaaatatgaatattgcttttgaatatgctaaactttgtgaagacgagcaagttaaggccatctatgagactattttaaatgaatggcaagttactaagaacgttatcttggctattgaaggacatgacgaactcttagctgacaatccatatctaaaagctagtctggattaccgtatgccttactttaatattctcaactatattcagttrgagttgattaaacgccaacgtcgtggagaattgtccagtgatcaagaacgattgattcatatcaccatcaacggaattgcgacaggattgcgtaattcaggtykaactaat

SEQ ID NO: 2930 - DNA, 932 bp, Streptococcus pneumoniae
  misc_feature (1)..(932): tiling:Spneumo1:WAN024EWJ; Cluster includes WAN0243I5 spr1 703|amiF|15903745|NP_359295.1|1672492..1673463|-|972 bp|AB C transporter ATP-binding protein - oligopeptide transport |S.pneumoniae|R6|NC_003098.1|ORF|221
atgtctgaaaaattagtagaaatcaaagatttagaaatttccttcggtgaaggaagtaagaagtttgtcgcggttaaaaatgctaacttctttatcaacaagggagaaactttctcgcttgtaggtgagtccggtagtgggaaaacaactattggtcgtgctatcatcggtctaaatgatacaagtaatggagatatcatttttgatggtcaaaagattaatggtaagaaatcgcgtgaacaagctgcggaattgattcgtcgaatccagatgattttccaagaccctgccgcaagtttgaatgaacgtgcgactgttgattatattatttctgaaggtctttacaatcaccgtttatttaaggatgaagaagaacgtaaagagaaagttcaaartattatccgtgaagtaggtcttcttgctgagcacttgactcgttaccctcatgaattctcaggcggtcaacgtcaacgtatcggtattgcccgtgccttggtcatgcaaccagactttgttattgcagatgagccaatttcagccttggacgtttctgtacgtgcccaagtcttgaacttgctcaaaaaattccaaaaagagctcggcytgacctatctcttcatcgcccatgacttgtcggttgttcgctttatttcagatcgtatcgcagttatttacaagggtgttattgtagaggttgcagaaacagaagaattgttyaacaatccaattcacccatatactcaagccttgctttcagcggtaccaatcccagatccaatyttggaacgtaagaaggtcttgaaggtttacgabssaagtcaacacgactatgagactgataagccrtctatggtagaaatccgtccaggtcactatgtttgggcgaaccaarcygaattrgcacgttatcaaaaaggactaaactarctaat

SEQ ID NO: 2931 - DNA, 764 bp, Streptococcus pneumoniae
  misc_feature (1)..(764): tiling:Spneumo1:WAN024DFV; Cluster includes WAN0244C4 spr0 622|glnQ|15902666|NP_358216.1|630285..631043|-|759 bp|ABC transporter ATP-binding protein - glutamine transport|S.pn eumoniae|R6|NC_003098.1|ORF|111
atgtctgaaactatcttagaaatcaaggaactaaaaaaatccttcggagacaatcccatcctccaaggactttctctagaaatcaaaaaaggggaagttgttgtcatcctagggscatctggttgtgggaaaagtaccctccttcgttgcctcaacggcttagaaagtattcaaggtggagayattyttctggatggtcagtctatcgttgaaaataaaaaarattttcacctagttcgccaaaagattggcatggtctttcaaagttatgaactctttccccatctggatgtcttacaaaacctcatcctaggccctatcaaarctcaaggawgggacaagaaagaagtaacggaagaagctttgcaattactarakcgtgtcggtttgctggataaacaacatagctttgcccgtcaattatctggtggacagaagcaacgtgttgcaattgtccgtgccctcctaatgcatccagaaatcatcctttttgacgaggtgactgcttcgctggatccagaaatggtgcgtgaggtgctggaacttatcaatgatttgrcccaagaaggccgtaccatgattttagtaacccacgaaatgcagtttgcccaagccattrctgaccrgattatcttcctcgaccaagggaaaatcgctgaagaaggaacagctcaagccttctttaccaatccgcaaaccaaacgagcccaggaatttttaaacgtctttgactttagccaattyggctcatatctataactaat

SEQ ID NO: 2932 - DNA, 563 bp, Streptococcus pneumoniae
  misc_feature (1)..(563): tiling:Spneumo1:WAN024GDM; Cluster includes WAN0244B9 spr0 653||15902697|NP_358247.1|659501..660058|+|558 bp|Conserve d hypothetical protein|S.pneumoniae|R6|NC_003098.1|ORF|111
atgtctgaacgtagaatctctgaaaagtctcttgaaaatctcagaaaatcaaaccaagaatccaatttattaaccagagaagccattgaaacagccctcttgcaactcttggaaaaaaaggarctgaccaagattagtatttctgaattggtcaaacgtgcrggtgtttcgcgtgcggccttttatcgcaattatgactccaaagaggaaattttagagagcgtctttaaacgaactgtccacaatattatggaacagctgcatcattacgatttaaagacagacctttatttggtttgggttcaccttttccgggagrccagaaaggaagctagagtrattcaattggccttggattaccatctggaaaaaatctttgtccaagccatgcaggaatttctagaaaaataccatgggaaatcaaaaggtgtcagctcttatcttcattccttctggagctcagccatcgtctctgtccttctaaaatggatcaaggatggcatgaaggtaccagctgaaaagattgcagatttaggtttaccattttttaaaaaatarctaat

SEQ ID NO: 2933 - DNA, 800 bp, Streptococcus pneumoniae
  misc_feature (1)..(800): tiling:Spneumo1:WAN024ETI; Cluster includes WAN0243FP spr1 791|pflC|15903833|NP_359383.1|1762592..1763386|-|795 bp|Py ruvate-formate lyase activating enzyme|S.pneumoniae|R6|NC_ 003098.1|ORF|221
atgtctgaagaaacaattgattatggacaagtgacaggratggtgcattcgacagaaagctttgggtcagtagatgggccyggtattcgctttattgtctttttgcagggctgtcacatgcgttgccagtattgccacaacccagacacttgggctatggagtccaataagtcacgtgaacggacggtagatgatgtcttgacagaggccttgcgctaccgtggtttctggggaaataagggtgggattacagtcagtggaggagaagctctcttgcagattgatttcctgattgcyctcttcaccaaggctaaggaacaaggaatccactgtaccttggayacytgtgctcttcctttccgtaataaaccrcgttaccttgagaagtttgacaaactcatggctgtcactgacttggttcttttggatatcaaggaaatcaacgaagaacagcacaagattgtcactagmcaaacyaataaaaatatcttggcttgtgcccagtatctatcagatattggaaaacctgtctggattcgccacgtgctagttccaggattgacagacagagatgatgacttgattgaacttggtaagttcgtcaagaccctcaaaaatgttgataagtttgaaattctaccttatcacaccatgggtgagttcaagtggcgtgaacttggaattccatattccctcgaaggagtcaaaccaccaacagcagatcgcgtcaagaacgctaaamaactcatggataccgaaagttatcaagattatatgaaacgtgtacatggatarctaat

SEQ ID NO: 2934 - DNA, 414 bp, Streptococcus pneumoniae
  misc_feature (1)..(414): tiling:Spneumo1:WAN024DBY; Cluster includes WAN02443D spr0 937||15902981|NP_358531.1|922743..923156|-|414 bp|Hypothet ical protein|S.pneumoniae|R6|NC_003098.1|ORF|110
atgtctgataacaaaactagtaaaattccaaccaatccagctaatattgggcttcttttcttgccaatatttaaggctatgggaccagctaaaaaagatatacaagctattggtcctgtaattgaagtagaaaaagcagttaaagatacagcgcaaaaaattaaaacaagccttgaaagctcgggatttgctccaagtccgattgctatttcttcaccaagttcaataatttctagtcttttattaaaaaataaaactaatatagtagcaataatacttactattagaacaagaggtatgtcatctaactttgtaaaagataaagagccactgagccatctcataacttcttgtaattcatatcttgctactttcaacaataaaaatgaggtgcctgctcttgtgacagcttga

SEQ ID NO: 2935 - DNA, 617 bp, Streptococcus pneumoniae
  misc_feature (1)..(617): tiling:Spneumo1:WAN024FOV; Cluster includes WAN0243T1 spr1 310|fms|15903353|NP_358903.1|1300763..1301374|+|612 bp|Pep tide deformylase, N-formylmethionylaminoacyl-tRNA deformyl ase|S.pneumoniae|R6|NC_003098.1|ORF|221
atgtctgcaatagaacgtattacaaaagctgctcacttaattgatatgaacgatattatccgygarggraatcctactctacgcrcgrttgctgagraagtcactttccccctatctgaccaggaaatcatcctaggcgaaaagatgatgcaattccttaaacattcccaagatcctgtcatggctgaaaaaatgggactccgcggtggtgttggactggctgctccccagttagatatctcaaaacgcattatcgctgttttggtacctaatattgttgaagaaggcgaaactccacaggaagcctacgatttggaagccattatgtacaatccaaaaatcgtctctcactctgttcaagatgctgctcttggcgaaggagaasgttgcctgtctgttgaccgtaacgtgcctggctatgttgttcgccatgcccgcgttactgttgactactttgacaaagatggagaaaaacaccgtatcaaactcaaaggctacaactccattgttgttcagcatgaaattgaccacattaacggtatcatgttttacgatcgcatcaatgaaaaagacccatttgcagttaaagatggtttactgattcttgaataactaat

SEQ ID NO: 2936 - DNA, 231 bp, Streptococcus pneumoniae
  misc_feature (1)..(231): tiling:Spneumo1:WAN024FXR; Cluster includes WAN023LAA 3148 87_2185||||1175324..1175554|+|231 bp|EGAD orf prediction|S .pneumoniae|R6|NC_003098.1|ORF|110
atgtctgcttccaagaagtctgaagcgtcaacagttgtacattcatcaacatcaacatccaagcccaagtcacgtaatttgtctgctacaatatctgcaatttcttcggtattaccggtcatactggcaaatacaatttttgctaatgccatatcgtcctcctcaatttatctttctccattatatcacatctttttcattttaaaaataaaaattcttgtgctacaatga

SEQ ID NO: 2937 - DNA, 956 bp, Streptococcus pneumoniae
  misc_feature (1)..(956): tiling:Spneumo1:WAN024FT7; Cluster includes WAN0243US spr1 247|murB|15903290|NP_358840.1|1246627..1247577|-|951 bp|UD P-N-acetylenolpyruvoylglucosamine reductase|S.pneumoniae|R 6|NC_003098.1|ORF|111
atgtctgtaagagaaaaaatgcttgaaatcttagaaggaattgatatccgttttmaggaaccctygcatagctatagttatacaaaagtaggtggagaggctgattatttggtctttccacgaaatcgttttgagttggckcgcsttgtgaaatttgccaaccaagaaaatatcccttggatggttcttggcaatgcaagcaatatcatcgttcgtgatggtgggattcgtggatttgtcatcttgtgtgacaagctcaataacgtttctgttgatggctataccattgaagcagaagctggggctaacttgattgaaacaactcgcattgccctccgtcatagtttaactggctttgagtttgcttgtggtattccaggaagcgttggcggtgctgtctttatgaatgcgggtgcctatggtggcgagattgctcacatcttgcagtcttgtaaggtcttgaccaaggatggagaaatcgaaaccctgtctgctaaagacttggcttttggttaccgycattcagctattcaggagtctggtgcagttgtcttgtcagttaaatttgccctagctccaggaacccatcaggttatcaagcaggaaatggaccgcttgacgcacctacgtgaactcaagcaacctttggaatacccatcttgtggytcgktytttaagcgtccagtcgggcattttgcagktcagttaatttcagaagstggcttgaaaggctatcgtatcggtggcgtagaagtgtcagaaaagcatgcaggatttatgatcaatgtcgcagatggaacggccaaagactacgaggacttgatccaatcggttatcgaaaaagtcaaggaacactcaggtattacgcttgaaagagaagtccggatcttgggtgaaagcmwrtcggtagcgaagatgtatgcaggtggttttactccctgcaagaggtarctaat

SEQ ID NO: 2938 - DNA, 1289 bp, Streptococcus pneumoniae
  misc_feature (1)..(1289): tiling:Spneumo1:WAN024C3O; Cluster includes WAN0244JC spr0 362|ropA|15902406|NP_357956.1|359944..361227|+|1284 bp|Tri gger factor|S.pneumoniae|R6|NC_003098.1|ORF|221
atgtctgtatcatttgaaaacaaagaaacaaaccgtggtgtcttgactttcactatctctcaagaccaaatcaaaccagaattggaccgtgtcttcaagtcagtgaagaaatctcttaatgttccaggtttccgtaaaggtcaccttccacgycctatcttcgaymaaaaatttggtgaagaakcwctttaycaagaygywatgaacgcwcttttgccaaacgcttatgaagcagctgtaaaagaagctggtcttgaagtggttgcccaaccaaaaattgacgtaacttcaatggaaaaaggtcaagactgggttatcrctgctgaagtcgttacaaaacctgaagtaaaattgggtgactacaaaaaccttgaagtatcagttgatgtagaaaaagaagtaactgacgctgatgtygaagagcgtatcgaacgcgaacgcaacaacctggctgaattggttatcaaggaagctgctgctgaaaacggcgacactgttgtgatcgacttcgttggttctatcgacggtgttgaatttgacggyggaaaaggtgaaaacttctcacttggacttggttcaggtcaattcatccctggtttcgaagaccaattggtaggtcactcagctggcgaaaccgttgatgttatcgtaacattcccagaagactaccaagcagaagaccttgcaggtaaagaagctaaattcgtgacaactatccacgaagtaaaagctaaagaagttccrgctcttgacgatgaacttgcaaaagacattgatgaagaagttgaaacacttgctgacttgaaagaaaaatacmgcaaagaattggctrctgctaaagaagaarcttacaaagatgcagttgaaggtgcagcaattgatacagctgtagaaaaygctgaaatcgtagaacttccagaagaaatgatccaygaagaagttcaccgttcagtaaatgaattccttgggaayttgcaacgtcaagggatcaaccctgacatgtacttccaaatcactggaactactcaagaagaccttcacaaccaataccaagcagaagctgagtcacgtactaagactaaccttgttatcgaagcagttgccaaagctgaaggatttgatgcttcagaagaagaaatmcaaaaagaagttgagcaattggcagcagactacaacatggaagttgcwcaagtwcaaarcttgctttcagctgacatgttgaaacatgatatcacwatcaaaaaagctgttgaattgatyacaagcacagcaacagtaaaataactaat

SEQ ID NO: 2939 - DNA, 716 bp, Streptococcus pneumoniae
  misc_feature (1)..(716): tiling:Spneumo1:WAN024DFH; Cluster includes WAN0244AZ spr0 663|livF|15902707|NP_358257.1|666476..667186|+|711 bp|ABC transporter ATP-binding protein - branched chain amino aci d transport|S.pneumoniae|R6|NC_003098.1|ORF|111
atgtctrtgttaaaagttgaaaatctttctgtgcattacggtatgatccaagcagtycgtgatgtaagctttgaagttaatraaggagaagttgtttcccttatcggtgccaayggtgcaggtaagacaactattcttcgcaccttgtcaggtttggttcgaccaagttcaggaaagattgaatttttaggtcaagaaatccaaaaaatrccagctcagaaaatygtggcargtggtctttcacaagttccagaaggacgccacgtctttcctggcttgactgttatggaaaatcttgaaatgggagctttcttaaagaaaaatcgtgaagaaaatcaagctaacttgaagaaggttttctcacgctttcctcgtcttgaagaacgkaagaaccaagatgcagcyactctttcaggrggggaacaacaaatgcttgccatgggacgcgcyctyatgtcaacaccaaaacttcttcttttagatgaaccatcaatgggacttgccccratcttyatccaagaratttttgatatcattcaagatattcagaagcarggaacaacsgtcctcttgattgaacaaaatgccaataaagcacttgcaatctctgaccgaggatatgtaytggaaacaggraraatcgtcctatcaggrwcaggaaaagaactcgcytcatcagaagaagtcagaaaagcatatctaggtggctaactaat

SEQ ID NO: 2940 - DNA, 1724 bp, Streptococcus pneumoniae
  misc_feature (1)..(1724): tiling:Spneumo1:WAN024FLY; Cluster includes WAN0243RW spr1 351|pgm|15903394|NP_358944.1|1333648..1335366|+|1719 bp|Ph osphoglucomutase|S.pneumoniae|R6|NC_003098.1|ORF|331
atgtcttaccaagaaaattaccagaaatgggttgattttgtggagcttcstgactaccttcgtcaagatttggaaaatatggacgaaaaaactaaggaagatgccttctatacaaatcttgaatttggtactgcaggtatgcgtggcttggttggtgctggtacaaaccgtatcaacatctacgttgttcgccaagctactgaaggattggctcgtttgattgagtcaaaaggtggaaacgagaaagaacgcggtgtagcaattgcctacgatagccgtcacttctcacctgagtttgcctttgaatctgcggcagttcttgctaaacacggcatcaaatcttacgtatttgaaagccttcgtccgactccagaactatcatttgcagttcgtcatctcaactgtttcgcaggtatcatggtcacagccagccacaaccctgctccatttaacggttacaaggtttacggtgaagacggtggacaaatgcctccacacgatgcggacgctttgactacttatatccgtgcaatcgaaaacccatttgcagttgaagttgctgatgtggaaactgaaaaagcttctggcttgattgaagttatcggcgaagctgttgacrtarmataccttaaagaggttaaggacrtaaacatcaacccagccttgattgaagaatttggtaaagacatgaagattgtctacacaccacttcatggtactggtgaaatgttggctcgtcgtgctcttgcccaagcaggatttgactctgttcaagttgttgaagcgcaagcaactgctgacccagacttytcaactgtaacatctccaaacccagaaagccaagcagcctttgcccttgctgaagaacttggtcgtcaagttggtgcagatgttcttgtcgcaactgacccagacgctgaccgtgttggtgttgaagttcttcaaaaagatggtagctacctcaacctttcaggtaaccaaatcggtgctatcatggctaaatacatcttggaagctcacaaaaacgctggaactcttcctgaaaatgccgctctctgcaaatctatcgtttcaactgacttggtaacgaagattgctgaaagckacggcgcaactatgttcaacgtcttgacaggtttcaaatttatcgctgaaaaaatccaagaattcgaagaaaaacacaaccacacttacatgatgggatttgaagaaagcttcggttacttgattaaaccatttgtacgtgataaagatgccatccaagccgttcttgtmgttgctgaacttgctgcctactaccgttctcgtggttkgacacttgctgacggtatcgaagaaatctataaagaatatggctactacgcagaaaaaacaatctctgttactctttcaggtgtcgatggtgctgaacaaatcaaagcgattatggctaaattccgcaacaatgctccaamagaatggaacgmaacagctatcactgtcgtagaagacttcaaggcacaaactgctactgttgctgacggtactgttacaaacttgacaactcctccaagtgatgtgttgaaatacacacttgctgacrgttcatggattgccgttcgcccttcaggtacagaaccaaaaatcaagttctacattgcagttgtaggggaaaccaacgaagaatcacaagctaagattrctaacatcgaagcagaaatcaatgcatttgtaaaataactaat

SEQ ID NO: 2941 - DNA, 2673 bp, Streptococcus pneumoniae
  misc_feature (1)..(2673): tiling:Spneumo1:WAN024FG7; Cluster includes WAN0243MR spr1 536|nanA|15903579|NP_359129.1|1514944..1518051|-|3108 bp|S ialidase A precursor (neuraminidase A)|S.pneumoniae|R6|NC_ 003098.1|ORF|221
atgtcttatttcagaaatcgggatatagatatagagaggawcagtatgaatcggagtgttcaagaacgtaagtgtcgttatagcattaggaaactatcggtaggagcggtttctatgattgtaggagcagtggtatttggaacgtctcctgttttagctcaagaaggggcaagtgagcaacctctggcaaatgaaactcaactttcgggggagagctcaaccctaactgatacagaaaagagccagccttcttcagagactgaactttctggcaataagcaagaacaagaaaggaaagataagcaagaagaaaaaattccaagagattactatgcacgagatttggaaaatgtcgaaacagtgatagaaaaagaagatgttgaaaccaatgcttcaaatgrtcagagagttgatttatcaagtgaactagataaactaaagaaacttgaaaacgcaacagttcacatggagtttaagccagatgccaaggcyccagcattctataatctcttttctgtgtcaagtgctactaaaaaagatgagtacttcactatggcagtttacaataatactgctactctagaggggcgtggttcggatgggaaacagttttacrrtaattacaacgatgcacccttaaaagttaaaccaggtcagtggaattctgtgactttcacagttgaaaaaccgacascagaaytrccwaawggycgagtkcgcctctacgtaaacggggtattatctcgaacaagtctgaratctggcaatttcattaaagatatgccagatgtaacgcatgtrcaaatcggagcaaccaagcgtgccaacaatacggtttgggggtcaaatctacagattcggaatctcactgtgtataatcgtgctttaacaccagaagaggtacaaaaacgtagtcaactttttaaacgctcagatttagaaaaaaaactacctgaaggagcggytttaacagagaaaacggacatattcgaaagcgggcgtaacggtaamccaaataaagatggaatcaagagttatcgtattccagcacttctcaagacagataaaggaactttgatcgcaggtgcagatgaacgccgtctccattcgagtgactggggtgatatcggtatggtcatcagacgtagtgaagataatggtaaaacttggggtgaccgagtaaccattaccaacttacgtgacaatccaaaagcttytgacccatcgatcggttcaccagtgaatatcgatatggtgttggttcaagatcctgaaaccaaacgaatcttttctatctatgacatgttcccagaagggaagggaatctttggaatgtcttcacaaaaagaagaagcctacaaaraaatcgatggaaaaayctatcaaatcctctaycgtgarggagaaaaggragcttataccattcgagaaaatggtactgtctatacaccagatggtaaggcgacagactatcgcgttgttgtagatcctgttaaaccagcctatagcgacaagggkgatctatacaagggtraccaattactaggmaatatytacttcacaacaaacaaaacttctccatttagaattgccaaggatagctatctatggatgtcctacagtgatgacgacgggaagacatggtcagckcctcaagatattactccgatggtcaaagccgattggatgaaattcttgggtgtaggtcctggaacaggaattgtacttcggaatgggcctcacaagggacggattttgataccggtttatacgactaataatgtatctcacttaratggctcgcaatcttctcgtrtcatctattcagatgatcatggaaaaacttggcatgctggagaagcggtcaacgataaccgtcaggtagacggtcaaaagatccactcttctacgatgaacaataracgtgcgcaaaatacagaatcaacggtggtacaactaaacaatggagatgttaaactctttatgcgtggtttgactggagatcttcaggttgctacaagtaaagacggaggagtgacttgggagaaggatatcaaacgttatccacaggttaaagatgtctatgttcaaatgtctgctatccatacgatgcayrawggaaaagaatacatyatcctcagyaatgcaggtggaccgaawcgtgaaaatgggatggtccacttggcacgtgtcgaagaaaatggtgagttgacttggctcaaacacaatccaattcaaaaaggagagtttgcctataattcgctccaagaattaggaaatggggagtatggcatcttgtatgaacatactgaaaaaggacaaaatgcctataccctatcatttagaaaatttaattgggamtttttgagcaaaratctgatttctcctaccgaagcgaambwgaagckaaytagagagatgggcaaaggagwkatkggcwwaggagttattggcttggagttygactcagaagtattggtcaacaaggctccaacccttcaattggcaaatggtaaaacagcgacyttcmtracccagtatgatasmaaraccytsytrtttrcagtrgatwmrgargatatsggwcarraarttaywggtwtrgcwraaggwagcatygaaagtatgcataatytwccwgtmwmtstrgcrggygccagagttcctggcgga

SEQ ID NO: 2942 - DNA, 501 bp, Streptococcus pneumoniae
  misc_feature (1)..(501): tiling:Spneumo1:WAN024FBM; Cluster includes WAN023KP3 3129 19_3112a||||1659234..1659734|-|501 bp|EGAD orf prediction| S.pneumoniae|R6|NC_003098.1|ORF|110
atgtcttcaatcatgagttttgttgattcaagtccgcctccgcttagataccagaggtctggtgttagttggataatcttaccatttttagcagcaggtgtttcagcgataagggcattttctaggacaccgtcgttgctagagttgtccccaccgatggcaagggtacggttgatgacaaagaggatgtcagggttgatttctttgacactttcaaagctgacttcttgtccgtggcgtgagtcttcaaattttgtatcagttggtttgaatttcaaggtttggtacaagaaagagaaacgagatttggcaccaaaggctgccatttttccttcattaaggaggatcgcaagggcttttttgtcagagctttcatttttagtagcgacttcttggatgctcttgtctagcttggycaattcttccttggctttytgtgtacyagtttcgccgaaggcacttgctaaggattcgatattagccttggtagaagtccagtag

SEQ ID NO: 2943 - DNA, 1235 bp, Streptococcus pneumoniae
  misc_feature (1)..(1235): tiling:Spneumo1:WAN024DW9; Cluster includes WAN0243B6 spr1 955|arcA-truncation|15903996|NP_359546.1|1941478..1942221| +|744 bp|Arginine deiminase, truncation|S.pneumoniae|R6|NC _003098.1|ORF|321
atgtcttcwcatccaattcaggtcttctcagaaattgggaaactgaaaaaagttatgttgcaccgtccaggcaaggagttagaaaacttgttgccggactatcttgaaaggcttctttttgatgatattcctttcttggaagatgctcaaaaagaacatgatgcatttgcccaagctcttcgcgatgaaggaattgaggttctctayctagaacaactcgctgctgaatcattgacctctccagaaatccgcgatcaatttatcgaggaatacttagacgaagccaacatccgtgatcgtcaaacyaaggttgctattcgtgaattrcttcacggcatcaaggacaaccaagaattggttgaaaaaacaatggctgggattcaaaaagttgaattgccagaaattcctgacgaagctaaagatctaactgacttagttgaatcagaktatccatttgcaattgacccgatgccaaacctctatttcactcgcgacccatttgcaacaattggaaacgccgtatcgcttaaccacatgtttgcagacactcgtaaccgtgaaacactctacggtaagtatatcttcaaataccacccartctatggcggaaaagtggatttggtctacaaccgtgaagaagatacgcgtatcgaaggtggagacgagytagttctttctaaagacgtccttgcagtaggtatctctcaacgtacagacgcagcttctatcgaaaaacttttkgwcaacatcttcaagaaaaatgttggcttcaagaaagttttggcctttgaatttgctaacaaccgtaaattcatgcacttggatactgtcttcactatggtagactatgacaagttcactattcacccagaaatcgaaggcgaccttcacgtttactcagttacttacgaaaacgaaaaacttaaaatygttgaagagaaaggtgacttagctgaacttcttgctcaaaaccttggtgtagaaaaagttcatttgattcgttgcggtggtggcaatatcgtagcagctgcgcgtgaacaatggaacgacggttctaacactttgaccatcgcacctggtgtggtagttgtttatgaccgcaataccgtgaccaataagattttggaagaatacgggcttcgcttgattaagattcgcggaagtgaattggttcggggccgtggtggacctcgttgtatgtctatgccatttgaacgtgaagaagtgtaactaat

SEQ ID NO: 2944 - DNA, 246 bp, Streptococcus pneumoniae
  misc_feature (1)..(246): tiling:Spneumo1:WAN024G9T; Cluster includes WAN023LNQ 3145 13_1510||||803296..803541|-|246 bp|EGAD orf prediction|S.p neumoniae|R6|NC_003098.1|ORF|110
atgtcttggattaaagtttctttaactaytgctttacagatattgattactttctcatttaatgtgttcatcgtctttccctccgatttgtttttttgttatttccttaarcttgatttaattatagtaggcgtttcgtgctctgtcaacaaattttttacgaaaacacaacaaaggttttcattttcgtggatttcgtgtkatgctttacttacaaaratagaaagcgwtttcrttcatggataa

SEQ ID NO: 2945 - DNA, 1283 bp, Streptococcus pneumoniae
  misc_feature (1)..(1283): tiling:Spneumo1:WAN024CZC; Cluster includes WAN0243DA spr1 879||15903920|NP_359470.1|1849358..1850635|-|1278 bp|Hypot hetical protein|S.pneumoniae|R6|NC_003098.1|ORF|111
atgtcttgttctatcgatttattaaaacatcggtatttgaaaaatattaaagaaaatcctgaattgtttgtcggaattgagttggagtatcctgttgcaagtttagaaggggatgctacagatgttgaagttatraaggatctatttcattatttagtttctactttggatctcaccgtagcaaaggtagatgattttggcaatctgatccagttagtagatccgataagtcaggatgctattttatttgaagtttcctatacaacgattgagtttgcatttggtaaggctgaaacgattcaagaggtcgaaaatcgtttcaataattatatgaatgtaattcagagaaagttagctgaatcaaatcatgctattgttggytgtggtatccatcccaactgggataaaaatgagaattgtccagtggcttatccacgctatcagatgttgatggattatttgaatttgagtagaaatattattaaatcagatttacatcatttccctgaatatggtacttttatctgtgggagccaggttcagctggatatttcaaaaaccaactacttrcgggtgattaatgcttttactcaaattgaagcggctaaggcttatttatttgcaaactctgarttttcgggtgcggattgggatacgaaaatttcaagggatattttctgggaagaatctatgcatggtatctatccagagaatgttggggtcaatgctagactccttaatgatgaarctgatttttttgactatctaaatcattctgcgatttttactgcggaacgtgatgggcagacctattatttttatcctattcaggctggggactatttggctacrycygaaatccaagcatttgctctgaatggggatgaggttattatttmcccccaagagaaggattttgaaactcatcgtagttaccagtaccaagayttaacgactcgaggaacagttgagtttcgtagtgtgtgtacacagccacttgataggacttttgcttctgcagcttttcacttgggattattggttaatttagacaagttagaagcttacttagaaacagcacctttctttaaagtatttggttatgattacaagtytttaaggagacaattttctaagaaaaatcttacagatgaggaagaaactaygattattgaattttccaaagacttactcctactagctgaggagggactagtggtgagaaataaggaagaaatgacctatttacagcctttgagagaagaattgagcctataactaat

SEQ ID NO: 2946 - DNA, 545 bp, Streptococcus pneumoniae
  misc_feature (1)..(545): tiling:Spneumo1:WAN024D66; Cluster includes WAN0243NJ spr1 508||15903551|NP_359101.1|1485447..1485986|-|540 bp|Conser ved hypothetical protein|S.pneumoniae|R6|NC_003098.1|ORF|1 11
atgtctttaaaagatagattcgatagatttatagattattttacggaggatgaggattcaagtctcccttatgaaaaaagagatgagcctgtgtttactycagtaaattcttcacaggaaccggctctcccaatgaatcaaccttcacagtcggctggyacaaaagagaacaatatcaccagacttcatgcaagacaacaggaattggcaaatcagagtcagcgtgcaacggataaggtcattatagatgttcgttatcctagaaaatatgaggatgcaacagaaattgttgatttattggcaggaaacgaaagtatcttgattgaytttcagtatatgacagaggtgcaggctcgtcgttgtttggactatttggatggagcttgtcatgttttagctggaaatttgaaaaaggtagcttctaccatgtatttgttgacaccagtkaaygttattgtaaatgttgaagatatccgtttaccagatgaagatcaacagggtgagttcggttttgatatgaagcgaaatagagtacgataactaat

SEQ ID NO: 2947 - DNA, 689 bp, Streptococcus pneumoniae
  misc_feature (1)..(689): tiling:Spneumo1:WAN024GOH; Cluster includes WAN0243FK spr1 796||15903838|NP_359388.1|1768112..1768795|-|684 bp|Conser ved hypothetical protein|S.pneumoniae|R6|NC_003098.1|ORF|1 11
atgtctttaagggagaagtcaatgagcgagtacaaactctcagaaaacaactggactagggttgcmgtttttgcaggcggaaaccgcggtcattatcggacagattttgatgcttttgttggggtggatcgaggctcgctctgggtcttggaagaagacttacctcttgctctagcagtcggagattttgattctgtgacggaagaagagcgacaggtgattcaaaaasgtgcccagyattttgtccaagcmcgaccagaaaaggatgatacagatctggaattggctctcttaaccatctttgaacaaaatcctcaggctsaggtcactattttcggtgccttgggtggccgtattgaccatatgttggccaatgtctttctrcctagcaatcctaagttggcaccctatatgcrtcaaatagaaattgaggatgggcaaaayttgattrcytattgtycagaaggraycagtcagctagaacctcgttcagactacgactatctagcctttatgccagttcgggatagccagctgactattcttggagcyaagtatgagttgacagaggaraattttttctttaaaaaagtgtacgcttctaacgaatatatagatagggaagtgtcggtracttgcccagatggttatgtggtcgtactgcatagcaaggacaggaggtarctaat

SEQ ID NO: 2948 - DNA, 303 bp, Streptococcus pneumoniae
  misc_feature (1)..(303): tiling:Spneumo1:WAN024B5U; Cluster includes WAN023M5H 3128 76_576||||298639..298941|-|303 bp|EGAD orf prediction|S.pn eumoniae|R6|NC_003098.1|ORF|110
atgtcttttatggtcagtttcttctccaatctaaaacacctcctactaatacttattataacatattcactattcaaaatgcctatttctagcactgcaagcgaatcattctctcatttattttatcatatactaracattttccacgcatttttgttccgtcaacgaggcacaatttttcacctacacsaatatcctcgcttaataacagaatcagcttgtctgtttcrtcatttttcacttcaaaagccagagcattttccacttcacgatcatctgtctggtagacagaatgacggatga

SEQ ID NO: 2949 - DNA, 974 bp, Streptococcus pneumoniae
  misc_feature (1)..(974): tiling:Spneumo1:WAN024B5H; Cluster includes WAN0244SM spr0 028|prsA|15902072|NP_357622.1|28583..29602|+|1020 bp|Phosp horibosylpyrophosphate synthase|S.pneumoniae|R6|NC_003098. 1|ORF|111
atgtctttttctgatttaaagctgtttgccctttcttctaataaagaattggcagaacgtgtggcgcaggagattgggatagagttggggaaatcaagtgttcgccaattttcagatggagagattcaggtcaacattgaagaatcaatccgtgggaaacacgtctttatcytacaatcaactagttcgcctgtaaatgacaatctgcttgaaattttgattatggtagatgctttgaagcgtgcgagtgcagartctgtcaatgttgtcatgccttactatgggtatgcacgtcaggatagaaaggcgagagcgcgtgagccaatcacttcaaaacttgtcgcaaatatgcttgaagtagctggagtggatcgtttattgaccatcgacttgcatgctgcgcaaattcaaggattctttgatattcctgtggatcatttgatgggtgctcctctrattgcagattattttgagcgkcgtggtatggttggttctgactatgtggttgtcagcccrgaccatggaggggtgactcgtgctcgtaagttggcagaatttttgaaaacatctatcgctattattgataaacgtcgtagcgttgataagatgaatactagtgaagttatgaayatcatcggtaaggttgaaggcaagacttgtatcttgattgatgatatgattgataccgctggaacgatttgtcatgcggcagatgctcttgcggaagctggtgctgttgaagtctatgcaagctgtacgcacccagttctttctggtcctgctacggacaatatccaaaaatcagctattaagaaattggttgttttggataccatctatctgccagaagagcgtttgattgataagattgagcagatttcaatcgctcatctcctaggggatgctatcgtacgtattcatgaaaaacgaccactttctccacttttcgatattgagaaaaaaatttaactaat

SEQ ID NO: 2950 - DNA, 522 bp, Streptococcus pneumoniae
  misc_feature (1)..(522): tiling:Spneumo1:WAN024DLN; Cluster includes WAN023M79 3131 24_477||||243899..244420|+|522 bp|EGAD orf prediction|S.pn eumoniae|R6|NC_003098.1|ORF|110
atgtgcaaaggcagttcccaaattaaattcgcgagctttttcatccgcattgacaaagactgcgtagatatcgccgtttggagcagtgatttggtagccaatcactacatcctctttttccacaccattttggcctgggacagtgatgaggtggacacggtctttgatatcttgragactcttaagtcggaaggcatctgtagattgacgaagggcaatcaaacctttcatatagtcacggctcttgacattttcaggataagctttaccatctgtagccttagtccagtcaaacttgttgactgcrtcrctagaatcgtaagartcatggatgaagtaaggatagtcaaatgggttgccgtccttatcacgcaacaagtgagatttgtttggaaccttatcctctgctactggagtcttgtaggctgggtcacggaattgtttagtacgtccatattcctgaccggagtggataaatggagttccttgagctgtcaagaccatgagatttccaagtcgtaa

SEQ ID NO: 2951 - DNA, 1262 bp, Streptococcus pneumoniae
  misc_feature (1)..(1262): tiling:Spneumo1:WAN024CVT; Cluster includes WAN0242YU SP03 79||15900302|NP_344906.1|358102..359334|-|1233 bp|conserve d hypothetical protein|S.pneumoniae|TIGR4|NC_003028.1|ORF| 021
atgtgcagacataaggagaaaagtatgaaattattttggacaaacaacatatatagacagttgctgctaaacagctgtttttcatcattcggcgacagtattttctacctcgccattatcaattatgtggctcagtacaatttcgctccgctagcgattttactgatttccatttcagagatggttcccctactatcgcaactctttctcgggattctaggagattttcaagaaaatagagtcaaacacgcactctggattgccaaaatcaaaatcctgctctacgctattttgacagtatttctcgtcttgtcgcccttttcattagtttcagtcattatgattgtcatcatcaacctcatctctgacaccttgagctacctgtctgcctacatgatgaacgccctctacatcagtgtaattaaggacgacctgcatgatgccatggggttcaggcagtctctgatgagggttgtccryattgtcgccaatctggctggcgcattccttatcaatgttatragtattcaaactatttcccttatcaacactctgacttttgtcattgcctttttgggyctgtatgttattmgacataccttgtatgaggttgaaaaaagrattgaaatgtcacatacagcactgagttttaagaaatattttcaacatcttaaacagtcgctggctgtgctcctgaggttaaaagataccgtcatactactgtttctgacgaccagtatgattgccatcttggatgtgtcccctcggctgattgccctccgcttcatccaacagacactagcacaactgagcattgggcaactcctcgccmtgctctccatcatcatktcttgtggagctatccttggcaatatgaccagcagtaatctatttaaaaatatccgtttcacgcacctcttggttttctgtgagatttccctattgrctctaataactagtatcctttgtcaagcctatatcgtaattttcatgaccagtttcatcagttctacgattatcggcattctcagccctcgcctacaagcagctgtctttgcccatatccccagtgacaagatkgggacggtgggctctgctctgagcacagtrgacattctcgccccgtccctgctctccctattagccctrtccatagcatcgggcgtttcggtgcagttagcattgatatttttgtatcttattttratygctcttatcttttgtcaatggttagtcaagttcaacactcataactaactaat

SEQ ID NO: 2952 - DNA, 291 bp, Streptococcus pneumoniae
  misc_feature (1)..(291): tiling:Spneumo1:WAN024DUO; Cluster includes WAN023KCG 3135 70_3678||||1986234..1986506|-|273 bp|EGAD orf prediction|S .pneumoniae|R6|NC_003098.1|ORF|110
atgtgcagggttttttcgttgttgtattggattcccttgtcagagaccatttccattacaacgagtccagctccgagctcytttgcgatrgtacgaaaggctgagttggtcacgccagccataggcgctaaaacggtacgattgggaatctcaatattgccaatcataaaaggtgtattaagatttgtcacgaatgagttcctccaggtccttttcatcaaagttgtaagtagtttggcagaattgacaagtgatttctgccccgtggtcttcctctttcatttcctgtaa

SEQ ID NO: 2953 - DNA, 291 bp, Streptococcus pneumoniae
  misc_feature (1)..(291): tiling:Spneumo1:WAN024D7P; Cluster includes WAN023KBR 3140 77_3721||||2011224..2011514|+|291 bp|EGAD orf prediction|S .pneumoniae|R6|NC_003098.1|ORF|110
atgtgcattgacaattgtttagcaagtgcttcgtctccaccttcaacaactgaaataacaccgatacgtccaccgttatgttggtatgctccaaagtgttgtgcgtctgttttttcaatcaatgcaaagcgacggaatgagattttctctccgatagttgctgttgcagatacgtatgcagcttcaagagtttcacctgaaggcattatcaaagcaagagcttcttcrttrttagcaggttttccttcagcaatgactttagctgtagtatttaccaattcaacgaattga

SEQ ID NO: 2954 - DNA, 339 bp, Streptococcus pneumoniae
  misc_feature (1)..(339): tiling:Spneumo1:WAN024C74; Cluster includes WAN023M6Y 3143 83_491||||251887..252225|-|339 bp|EGAD orf prediction|S.pn eumoniae|R6|NC_003098.1|ORF|110
atgtggaaaggactggacattcccatggtcygtgatagcaaccgccttgtgtccccacttagcagctgttgcaacaatctcttcgacctctggcaaagcatccatagtcgacatgttagtatgagcatgaaactcaacccgacgctcaccttctggcatcaaatccttccgctcatagtgaacaacttcctgcagatcctgtacgttcatagtcaaatcgcgtgtgaagttattcatctccacattccctcgaactcggagccaagaattcttcttgatgaggtcaaacttctgggcctcttcctcgtttttaacccacttttgcatagaaaaacttga

SEQ ID NO: 2955 - DNA, 114 bp, Streptococcus pneumoniae
  misc_feature (1)..(114): tiling:Spneumo1:WAN024DPF; Cluster includes WAN0242HP SP10 49||15900919|NP_345523.1|987744..987857|+|114 bp|hypotheti cal protein|S.pneumoniae|TIGR4|NC_003028.1|ORF|110
atgtggagtgttgctacaacgaaaaaggygataatccttgatttcaarctattttataagcattttgtctttgtagataaaggcaattttgacaataaaaatcctaaaaggtga

SEQ ID NO: 2956 - DNA, 1125 bp, Streptococcus pneumoniae
  misc_feature (1)..(1125): tiling:Spneumo1:WAN024FJM; Cluster includes WAN023OBD spn0 19g01_60||||39002..39085|+|84 bp|Glimmer 2.02 orf predicti on|S.pneumoniae|23F-1|WAN01UCLR|ORF|002
atgtggatggaagaactttccaacggaaaatacaaattttttgagcgatacaaagacccttatactgagaaattaaaaaaagtttcagtaaccatggagaagaaaactccccaggcaagaaatcaagctgctatcttgttacaagagaagataaataaaaaactcagcacaaaacaagtagaaagcattacatttgaagaaatctataaccttttctataaatcatgggcgcaaacagtaaaggaatcaacaaaacataattgtaaatcagttgataagaagatgaaggaagtcataccatccgataccatacttgctaatcttgacaggcgttttcttcaagaggctattgaaaaaattattgaaagcaacggatatattacagctaaaaaagtacggcataggctcagaggtatctttaattacgctgttcaatactcttacattgaaaacaacgaggtcgattatactacgattcctcaaaaaccaaagactttagaagaactggaaaaaaagcgtaacaactttctcaccatgcaagaaataaaagcacttgtcgatgtccttaatcgtcgagaatatcaccaaaagtacgctgatatggttcttgtgctgacattaactggtatgagatatggtgagttaactgccttacaactgaagaatatagacttcgaaaacaacaaaattgagatcacaggtaattttgattcagtaaacaaaatcaagacgctaccaaagactacaaattcaatacggacaatcaaagtatcagagagtgtcatagaagctattcaaagacaaatagtacgacttagcgaacgtttccagccattgtcaagcgatgattatattttctgttttgaaaaatggaatcaacctacaacaatagcttgcttcatacagatattaaaaaaatatggaaaacaggccaaaatagaaaaaaatttatctagccatatttttaggcattctcatatttcgtttttagcagagtctggcctcccaataaaatcaataatggatcgagttgggcactcaaatgcaaaaatgactttggaaatctattctcatactactgaagatatggaggataaactggtcaataaattagatactattttt

SEQ ID NO: 2957 - DNA, 896 bp, Streptococcus pneumoniae
  misc_feature (1)..(896): tiling:Spneumo1:WAN024FAR; Cluster includes WAN0243HX spr1 711|msmF|15903753|NP_359303.1|1683638..1684528|-|891 bp|AB C transporter membrane-spanning permease - multiple sugars |S.pneumoniae|R6|NC_003098.1|ORF|211
atgtggattaggagtagagagactatgaaaaaagtattacaaaaatattgggcatgggcttttgtggtcatccccctcttgttacaagcaattttcttctatgtgccgatgtttcaaggagccttttacagttttaccaactggacaggattgacttayaactacaaatttgtyrgcttaaacaactttaagctcctcttcatggatccaaaattcatgaatgcgattggctttaccgcaatcattrcgattgccatggtggttggtgagattgcactcgggatcttcattgcgcgtgtcttgaaytctaaaatcaaaggccaaaccttcttccgtkcttggttcttcttcccagctgttttatctggtttgacagtggctttgatcttcaagcaagtcttcaactacggtcttccagcgattggraatgcccttcatattgaatttytccaaaccagtcttttagggactaagtggggagcaatctttgcggctgyctttgtccttctttggcaaggggtggctatgcccatcatcatcttcctagctggtttgcaatctattccaactgagattacagaggcagcaaggattgatggtgcgactagcaagcaagttttctggaacattgaattgccttacttgctaccaagtgtctctatrgtctttatcctagccctaaaaggtgggctgactgcctttgaccaagtctttgccatgaccggtggtggtccaaacaatgccacaacctcacttgggctcttggtttataactatgcctttaaaaacaaccaattcggttatgccaatgccattgccgtaatcttgttcytcttaattgtagtgatttcgatcatccaattgagagtatctaagaaatttgaaatttaactaat

SEQ ID NO: 2958 - DNA, 333 bp, Streptococcus pneumoniae
  misc_feature (1)..(333): tiling:Spneumo1:WAN024FDX; Cluster includes WAN023KRV 3149 41_2978||||1582835..1583167|+|333 bp|EGAD orf prediction|S .pneumoniae|R6|NC_003098.1|ORF|110
atgtggcaatttacccaaacggtccaagacttcctcatctgctgccaccaaggcatcgtcaaagaaggtcaaggctacgctggcatctgtttcaaattccatcccagcttgggcaatattggcaaattcgtcattgctatagtccgtcgtctgaggcataaaaccatagttgccaatatggctcatctgaatgtagatctgttccaattccgcaaaggccttctcgaaatcctcaaaagtgtgaagattgcccttgtaatcacggctaaactggttgatgtcttcgcgagctttctcgattgcacgcaagaaatcctcacggtcttggtatag

SEQ ID NO: 2959 - DNA, 240 bp, Streptococcus pneumoniae
  misc_feature (1)..(240): tiling:Spneumo1:WAN024C9Z; Cluster includes WAN023M9J 3143 94_340||||180262..180501|-|240 bp|EGAD orf prediction|S.pn eumoniae|R6|NC_003098.1|ORF|110
atgtggcccttgctggccgcccacacggacagacaaggcctggtcattgagacgatagccttgacaggttccgcaggtcagctcattcatgtagagacgcatctgagtgcgagtgtaatcgctattggtttcatggtaacgacgtttgatattattgataactccctcaaacggaatgtcgatatcgcgcacgccaccaaattcattctcatagtggaaatggaattccttaccatctga

SEQ ID NO: 2960 - DNA, 1104 bp, Streptococcus pneumoniae
  misc_feature (1)..(1104): tiling:Spneumo1:WAN024CXD; Cluster includes WAN024391 spr2 032|recF|15904073|NP_359623.1|2022400..2023497|+|1098 bp|R ecombination protein RecF|S.pneumoniae|R6|NC_003098.1|ORF| 111
atgtggctacaacatctatctctcaagacttttcgtaattacaaagaaacgaaaatagactttaatcctaaattgaatgtctttttgggacgtaatgcacaaggaaaaacaaacatgttagaggctatctattttttagccttaacgcgtagtcatcgaactcgaacagataaaaatctcattcattttgatgaggaacaacttcatctttcaggtctcgttcagaaaaaaactggatccattcccctagaaatcgaactaacacaaaaaggycgtgtaacaaaagttaatcacttaaaacaggcacgcctttcagattatgtaggacacatgaatgttgtcttatttgctcctgaagatttacaactaattaaaggagcaccttcgattcgacgaaaattcattgatatggaacttgggcaaattaagccaatctayttatctgacttaaccaattataaccacatcctaaagcaaagaaacacttacctaaaatcagmtcaaaaaatagatgaaacatycctttctgtgttagatgatcagctagttgattatggatgtcgtgtaatgaatcaccgcttagatttcataaaaaaactagaatcatttgggcgtaagaaacattttgaactctctaatcagatcgaagagttgtcaatatcctatcaatcttctgtcaatataactgacaaacaaaacttatccgaatctttcaaaattgctttagaaaaaagtagatccagagatttatttaaaaagaatactggtgtcggtcctcatcgagatgacatttctttttatataaatgggatggatgctagtttcggaagccaaggtcaacatcgtagtctcgtcctctcgataaaattagcagaaatcgaattaatggaaagcattaccacagaatctcckatattactgcttgacgatgtgatgagtgaacttgacaacactagacagttaaaattattagaaacgatttctcaatcaatccaaacctttatcacaacaacaagcttagaccatcttcaaaatctgccagaaaatctaagtatcttcactattcaggatggtaaagctkctgtaaatggaaatykaactaat

SEQ ID NO: 2961 - DNA, 282 bp, Streptococcus pneumoniae
  misc_feature (1)..(282): tiling:Spneumo1:WAN024DBM; Cluster includes WAN024430 spr0 950||15902994|NP_358544.1|934157..934438|+|282 bp|Hypothet ical protein|S.pneumoniae|R6|NC_003098.1|ORF|111
atgtggttgattattttatggaatgctaagccggatacacctttatttaattttaaagacgaagtrattaagtataaaacatatgagccttttgaaagcagtataaaaagagtaaatactactataaagaatggtagtaaagggaaaactctgactgagatgattaatggctacagagcggataacgatattagagatgaaatttgtaactttaatattctgaaaaataaaattcgtgatatgaaaraccaacaaggaaatacaatggaatcttacttttag

SEQ ID NO: 2962 - DNA, 635 bp, Streptococcus pneumoniae
  misc_feature (1)..(635): tiling:Spneumo1:WAN024EWS; Cluster includes WAN0243K3 spr1 633|trpF|15903675|NP_359225.1|1606512..1607141|-|630 bp|Ph osphoribosylanthranilate isomerase.|S.pneumoniae|R6|NC_003 098.1|ORF|121
atgtggyccagagaatcaaggagttgcagattgacaaaggttaaaatttgtggactatcgaccaaagaagcggtggaaacagccgtttcagcaggagccgactatatcggttttgtctttgcacctagtaaaagacaggtgactttagaagaggcagctgagttggcaaagcttattcctgcagatgtgaaaaaggttggagtatttgtttcaccaagtcgggtagaactgctggaagcgattgacaaagttggcttggacttggttcaagttcacggtcaggtrgcagmtgatttatttgagaatttgccttgtgccagtattcaggctgtgcaggtagatggaaatgggcatgtcccyaattctcaggcagattatctactctttgatgcccctgtggcaggaagtggycagycctttgattggggtcaactggatacgactggactagcacagcccttctttatcgcaggtggccttaatgaagataatgtagtaaaagcaattcaacaytttactccctatgcagtagatgtatcragcggagtggagacagatggacaaaaaratcatgaaaagattagaagatttatagagagggtaaagmatggcatatcargaaccaaataactaat

SEQ ID NO: 2963 - DNA, 267 bp, Streptococcus pneumoniae
  misc_feature (1)..(267): tiling:Spneumo1:WAN024GJ3; Cluster includes WAN023LTW 3147 02_1159||||610407..610673|-|267 bp|EGAD orf prediction|S.p neumoniae|R6|NC_003098.1|ORF|110
atgtgtaggattggaagagcttctactgcatctgtcggagtgatggtttcaccgacaaagatgtcttccatacctgaaacggcaatcaagtcacccgctttggcttcttggatttcacgacgttccaaaccaaagaaaccgaagagttttgtaacacggaagtttttagttgtaccgtcaagtttagaaagggtaacttggtccccaaccttaactgtaccacggaagacacgaccgataccgatacgtccaacgaagtcattgtag

SEQ ID NO: 2964 - DNA, 1263 bp, Streptococcus pneumoniae
  misc_feature (1)..(1263): tiling:Spneumo1:WAN024CPJ; Cluster includes WAN0244OG spr0 178|folC|15902222|NP_357772.1|185813..187069|+|1257 bp|Dih ydrofolate:folylpolyglutamate synthetase|S.pneumoniae|R6|N C_003098.1|ORF|111
atgtgtatgtttgaagtaraagaatgsytycatagtcggattggtttgaattttcgatcaggtttggsysgaatrcagcaagcggtggatttgttaggaaatsctgagcagtcttaccctattatccacgtaacagggactaatgggaaaggatctaccattgcttttatgagggaattatttatggggcatggcaaaaaagttgcgacctttacctcccctcatatcgtmtcyatcaatgaccgaatytgcattaatgggcarcctatagcagacgcagactttatccgtttgrctgatcaggtcaaggagatggagaaaacgcttctgcaaactcctgmccagttgtccttttttgaattgctgaccttrgttgcttttctttattttagggrgcargaggtggatttggttttattagaagtgggaattggtggcttacttgacacgaccaatgtggtaactggagagyttgctgtcatcacctccattgggcttgaccatcaagaaaccttgggtgatagtctagaagcaattgcagagcagaaagctggtattttcaaggctggtaaraaggcagtgattgcgaaattgcctccagaagctagrcttgyctgtcagaaaaaagcygaatctttagctgttracctttatcaggcaggtcaagatttttyartgctgaatggtgatttttcaagctctttactaaatctttcacagctgaacataggcttagaaggagyctatcagcaggagaatgcrgccttggcgttgcaaacttttcttctttttatgrgagaargaaaggaagctrttgatgaacaggctgtaagaaaggccttggaacagacccattgggctggtcgcttggagcgtattcgcccacagatttayttggatggtgctcataacctccctgccttgactcgcttggytgagtttatcaaagaaaaagagcaggaaggytatcgwcctcaaatcctytttggakccttgaaacgkaaggattatcaagggatgttrggttayctgactramwawttrcctcargtggaactcaarrtgaccggctttgactatcargggkctttggacgarasrgatgtracaggttacsatrtarttycytcttaccgagaatttatcagcrrtttygaagaaagrgcagaygctcargayttgctgttcgttacagggtctctctattttatctcagaagtacggggctacctgctggaccgtgagcagataaatykaactaat

SEQ ID NO: 2965 - DNA, 1046 bp, Streptococcus pneumoniae
  misc_feature (1)..(1046): tiling:Spneumo1:WAN024D44; Cluster includes WAN0243F3 spr1 813|ccpA|15903855|NP_359405.1|1783327..1784367|-|1041 bp|C atabolite control protein A|S.pneumoniae|R6|NC_003098.1|OR F|121
atgtgtgagatagaaaggacaggaaaaggaatgaatgcagatgatacagtaaccatttatgatgtcgctcgtgaagcaggtgtttccatggcgacggtcagccgtgtggtcaatggcaataaaaatgtaaaagagaatacccgtaaaaaagtgctagaggtaattgatcgyttggattatcgtccaaatgcagttgcgcgtggtcttgcaagtaaaaagacaaccacygtcggtgtcgtgattccaaatattaccaatggttatttttcgagtttggctaaggggattgatgatattgcagaaatgtacaagtacaatattgtcctagctaatagcgatgaagataacgagaaagaagtttctgttgtcaataccctcttttcaaagcaggtagatggcattatctatatgggktatcacttgacagataaaattcgctcagaattttcgcgttcacgtactccgattgttctcgcaggaactgtcgatgttgagcaccagttgccaagtgtcaatattgactataagcaagcaacaattgatgcagtgagttaccttgctaaagaaaatgagcgtattgctttcgttagcggtccgctagtggatgacatcaatggtaaggttcgtttagttggctacaaggaaaccttgaaaaaagcaggaatcrcttatagtgagggtttggtatttgaatctaaatatagctatgatgatggttacgccttagcagagcgtttgatttcatcaaatgcaactgcagcagttgtgacaggtgatgagttggcagcaggagtcttgaacggtttggctgataarggtgtttctgtgccagaagattwtsraattattactagtgatgattcacaaatctcacgctttacccgtccaaacttgacaacgattgcccaacctctttatgaccttggtgcyattagtatgcgtatgttgaccaagattatgcataaggaagagttggaagaacgtgaagttctcttacctcatggtttgacagaacgtagctcaacacgaaaacgtaaatarctaat

SEQ ID NO: 2966 - DNA, 294 bp, Streptococcus pneumoniae
  misc_feature (1)..(294): tiling:Spneumo1:WAN024CVV; Cluster includes WAN023LKW 3145 01_1681||||891577..891870|-|294 bp|EGAD orf prediction|S.p neumoniae|R6|NC_003098.1|ORF|110
atgtgtgagggtcatagagcgttttttcatcaactccatcccctgcttccacatcctctagtccagggacacgttccaaggtcattccctcagaagcctctaagaccttcactttggatttttttagatttggatccagacttcctgcccaagattcgagtgtatgagaatggtaaacaaagacatctgcatcatagatggctgcgatatcatttgccgaaggttcaaaggagtgaataccactacttgactgaatcatccgaacatcattcaagtcaccagatacttccttaa

SEQ ID NO: 2967 - DNA, 1814 bp, Streptococcus pneumoniae
  misc_feature (1)..(1814): tiling:Spneumo1:WAN024F4T; Cluster includes WAN0244ML spr0 245|glmS|15902289|NP_357839.1|240298..242106|+|1809 bp|L-g lutamine-D-fructose-6-phosphateamidotransferase|S.pneumoni ae|R6|NC_003098.1|ORF|211
atgtgtggaattgttggtgttgttggaaacacaaatgcaactgatattttgattcaagggcttgaaaagcttgaataccgtggctatgattctgcgggaatttttgtcctagatggtgctgataaccatttggtgaaggckgttggtcgtatygcagaattgtctgccaagacagctggtgttgagggaacaactggtatcggacatactcgttgggcwactcayggraaaccaackgargacaatgctcacccacaccgctctgagacrgaacgttttgtcttggtkcayaatggggtgattgaraactaycttgaaatyaargaagaataccttgcwggkcaccacttcaargggcaracagatackgaaatmgccgtwcatttgattggaaaatttgcggaagaagamggkctctcagttcttgaagccttyaaaaaagcycttcayatyatccgtggttcwtatgcctttgccttgrttgactcwsaaratccwgawgtcatctaygtagckaaraayaaatcwccacttttgattggtcttggrgaargctayaayatggtctgctcagaygcyatggctatgattcgtgaaacyaaccaatacatggaaatycatgaccaagagttggtaatcgtcaaggctgatagygtggaagttcaagactatgatggwaaymgtcgtgarcgtrctagctayactgckgaacttgacttgtcagatatcggtaagggaacttayccttactacatgctyaaggaaattgaygagcaaccaactgttatgcgkaaactcatycaagcctacacrgatgakgctggtcaagtwgtsrtwgmyccwgmtatcattaaggctgttcaagacgcagaccgcatctacatccttgcagctggaacatcttaccatgcaggatttgcttctaagaaaatgttggaagaattgacagatacaccagttgaacttggmatctcatctgagtggggctacggtatgccacttctcagcaagaaaccactcttcatctttatcagccaatctggtgaaacagcggatagtcgtcaagttttggtcaaggctaatgaaatgggaattccaagcttaacagtgacaaaygttccaggttcaaccctctcacgtgaagccaactataccatgctccttcacgcaggwcctgaaattgcygtggcatcaactaaagcctatacagcgcaaatcgcagcccttgccttccttgcaaaagcagtcggagaagcaaatggtaatgctaaagcgcaagyctttgayctggttcatgaattgtcaatcgtagctcagtctatygaatcaactctttcagagaaagaaaccattgaagycaaggttcgtgaacttcttgaaacaactcgtaacgccttttacatcggacgtggtcaagattactacgtagccatggaagcaagtctcaaactcaaagagatttcttatatccagtgtgaaggytttgckgcaggagaactcaagcacggaaccattgccttgattgaagaaggaacrcctgtyttggctctcttgtcagatccagtycttgccaaycayactcgtggaaatatccaagaggtsgcagcccgtggtgcyaargtcctcactatcgcagaagaraatgtwgcyaaagataccgacgatatcgtccttacgacygtacayccwtacctctcaccaatttcaatggtcgtaccracgcaattrgtygcttactttgcaaccctccaccgtggcctcgatgtggayaaaccacgtaaccttgcyaartcagtaacggtagaataactaat

SEQ ID NO: 2968 - DNA, 258 bp, Streptococcus pneumoniae
  misc_feature (1)..(258): tiling:Spneumo1:WAN024GEF; Cluster includes WAN023LTK 3147 00_1173||||618858..619115|-|258 bp|EGAD orf prediction|S.p neumoniae|R6|NC_003098.1|ORF|110
atgtgttaccttcttcatcaaaaattattttgtaatcgattacattgcagatgtaacataaagaaaaacaratgtcaaatattaaacgtaaaaacatggtcactaaagaactataagagaaaaggtaaacctagcgacgcgatgaacgctgrktygtttgrtttcgattgctctcttcctcttgttttttctgttcttcttcttgttttttctcagcttccttggcctcttgtttggctttttcctcagcytccataa

SEQ ID NO: 2969 - DNA, 933 bp, Streptococcus pneumoniae
  misc_feature (1)..(933): tiling:Spneumo1:WAN024CFP; Cluster includes WAN023RWW cont ig_1609_7||||3264..4196|+|933 bp|Glimmer 2.02 orf predicti on|S.pneumoniae|670|WAN01UDCD|ORF|001
atgtgttataacatggaaaagtatactgagaaaaaacaaagaaatcaagtatttcagaaatttattaaacgtcatattggagagaatcaaatggatttagttgaagattgcaatacatttctgtcttttgtagctgataaaactttagaaaaacagaaattatataaagctaattcttgtaaaaatcgattttgtcctgtctgtgcttggagaaaagctagaaaagatgcattgggtttatctttgatgatgcaatatattaagcagcaagagaaaaaggagtttatctttttaactttgactacacctaatgtaatgagtgatgaattagaaaatgaaataaaacgttataataattcttttagaaaacttataaagagaaaaaaagtaggtagtgttataaagggatatgttcgtaagttagagattacatataataaaaaaagagatgattataatcctcattttcatgtgttaattgcagtaaataaatcgtatttcacagataaaagatattatattagccaacaagaatggttagatttatggcgtgatgtaacgggcatttcagaaataacacaagttcaagttcaaaaaataagacaaaataataataaagaattatatgaaatggctaagtattctggtaaagatagtgattatttaataaatcaaaaagtctttgatgcattttataaatcacttaaaggtaaacaggtattagtttattcaggattatttaaagaggctaaaaagaaattaaaaaatggggatttagattacttaaaagaaattgatccaaccgaatatatctatcaaattttttatatttggaaacaaaaagagtatttagctagtgaactttatgacttaacagaacaagaaaaaagagaaattaatcacaaaatgatagacgaaatcgaggaagaacaa

SEQ ID NO: 2970 - DNA, 252 bp, Streptococcus pneumoniae
  misc_feature (1)..(252): tiling:Spneumo1:WAN024CV3; Cluster includes WAN023M61 3142 88_542||||276428..276679|-|252 bp|EGAD orf prediction|S.pn eumoniae|R6|NC_003098.1|ORF|110
atgtgttcatcaaatattctcaagaatcaaattagccattttttcaattcccattggaataggaatatakgcttgaggaggtatttgtacaactggttttcctgctttagaaccagcctcttcaaattgcttaaagtacatttttgtttgaggrctgacaagatacaaatcaaaagctgctgctgcgatagctttccctccttcagtagcactaatagcatcaactacaatatctttcccttttccttttag

SEQ ID NO: 2971 - DNA, 375 bp, Streptococcus pneumoniae
  misc_feature (1)..(375): tiling:Spneumo1:WAN024GLW; Cluster includes WAN023M1M 3145 47_797a||||418941..419315|-|375 bp|EGAD orf prediction|S.p neumoniae|R6|NC_003098.1|ORF|110
atgtgttggagtgtttgtcctgcagccacagcttcttggttttctgtagtaaattgtaaccaaactggrtctacaaaagcatttaaaacttgtcccccattaactccacagaaccaaaagaatgagtttacaataacacatagaatcatacctggaagcgttcctgcaattaacttaagcggtgttccaacaattgcacctaggagtccgttgagacctcctgcaactcctgccgcttcaagaccttttaagaccaragcccacaaaacaaaagtagtaaarccagrtaaaagagctgaaaatgatttacttacyacatctgggacaccacttggcatttttatcgtaattccgcgctggataaacatacgataa

SEQ ID NO: 2972 - DNA, 225 bp, Streptococcus pneumoniae
  misc_feature (1)..(225): tiling:Spneumo1:WAN024FEU; Cluster includes WAN023KT3 3138 66_2920||||1554792..1555016|+|225 bp|EGAD orf prediction|S .pneumoniae|R6|NC_003098.1|ORF|110
atgtgtttttatataatgatasagtctgagaatcactgttccgctagccattccaatagagattaccaragccaacatgacaaccaaggtcgcacttgccagtgctttattatagtcccctgtcacaaaaaaggcagttgktcggtaggagagataacctggaaccagcggtgccaaaatggccaagataaagaccacagcaggtgtcttataaagaatacttaa

SEQ ID NO: 2973 - DNA, 255 bp, Streptococcus pneumoniae
  misc_feature (1)..(255): tiling:Spneumo1:WAN024GAT; Cluster includes WAN023LPB 3146 68_1431||||756372..756626|-|255 bp|EGAD orf prediction|S.p neumoniae|R6|NC_003098.1|ORF|110
atgtgtttttctagttctttttggtatttgctattggattccaatttttctttttgccattttttaaaaacctcgttatattcttttgttgtaacaatatctttttgcaatttcattcctttaaagatatatggwtcccccttaataccaacttgtgagtatggttttgagaatggtactacgttacttacaaytggagaaccaccagatgaagctgttggcatcaataatgaactatctgtcgaccaagcttga

SEQ ID NO: 2974 - DNA, 228 bp, Streptococcus pneumoniae
  misc_feature (1)..(228): tiling:Spneumo1:WAN024FXK; Cluster includes WAN023L9V 3146 10_2199||||1179720..1179947|-|228 bp|EGAD orf prediction|S .pneumoniae|R6|NC_003098.1|ORF|110
atgtgtttttgcaattcagtcatgaagctttggcagaagcgcatcacttcagcatctgttttacctttaggatcgaagtctgatccacctttacctccaccgataggaagtccagtcaagacrtttttaaagatttgttcaaatccgaggaatttcaaratcccttggtttacagttgggtggaaacgaagtccrcctttrtatggtccaacagctgagttgaattga

SEQ ID NO: 2975 - DNA, 212 bp, Streptococcus pneumoniae
  misc_feature (1)..(212): tiling:Spneumo1:WAN024CZ2; Cluster includes WAN0243CB spr1 914||15903955|NP_359505.1|1893836..1894042|-|207 bp|Hypoth etical protein|S.pneumoniae|R6|NC_003098.1|ORF|120
atgttaaaaaaatatttttcaaaatataaatggacggatttattttggattttatttgttattttgacctgcctctatattggtaaccatgatttgtttactctcaatcatcaagaattctcttttcgtggtagcgtttggggtctggtactggccttatatcacttaytrttcattgataagtttgtwatwtcgaatcgaaaataactaat

SEQ ID NO: 2976 - DNA, 383 bp, Streptococcus pneumoniae
  misc_feature (1)..(383): tiling:Spneumo1:WAN024DCB; Cluster includes WAN02443Z spr0 915|mscL|15902959|NP_358509.1|903242..903619|-|378 bp|Larg e conductance mechano-sensitive ion channel|S.pneumoniae|R 6|NC_003098.1|ORF|111
atgttaaaaaatctaaaatcgttcttgcttcgaggaaatgttattgaccttgctgtcggtgttgtmattgcctctgcttttggtgctatcgttacttcacttgtaaacgacattatcactcctcttattttaaatcccgctttgaaagctgctaaagtygaacgtatcgctcaactttcttggcatggagtcggctatggtaacttyttaagtgctattatcaattttatctttgtgggtaccgccctcttctttattatcaagggcattgaaaaagcacagaarctgactggcataaagraagaaaaaactgmcgaaaaaaaaccaaccgaattggaagtccttcaagaaataaaagctctccttgagaaaaaataactaat

SEQ ID NO: 2977 - DNA, 300 bp, Streptococcus pneumoniae
  misc_feature (1)..(300): tiling:Spneumo1:WAN024DAW; Cluster includes WAN024418 spr1 014|rpmA|15903058|NP_358608.1|994500..994769|+|270 bp|50S Ribosomal protein L27|S.pneumoniae|R6|NC_003098.1|ORF|111
atgttaaaaatgactcttaacaacttgcaacttttcgcccacaaaaaaggtggaggttctacatcaaacggacgtgattcacaagcaaaacgtcttggagctaaagcagctgacggacaaactgtaacaggtggatcaatcctttaccgtcaacgtggtacacacatctatccaggtgtaaacgttggtcgtggtggagaygatactttgttcgctaaagttgaaggcgtagtacgctttgaacgtaaaggacgcgataaaaaacaagtktctgtttacccaatcgcwaaamtaactaat

SEQ ID NO: 2978 - DNA, 290 bp, Streptococcus pneumoniae
  misc_feature (1)..(290): tiling:Spneumo1:WAN024CYM; Cluster includes WAN0243BM spr1 939||15903980|NP_359530.1|1921085..1921369|-|285 bp|Hypoth etical protein|S.pneumoniae|R6|NC_003098.1|ORF|111
atgttaaaaattggtacagcttgtggttcaggattaggttcaagttttatggtacagatgaatattgaatctgtattgagtgatttgaatgtttcggatgtagaagttgaacattatgatttaggtggagcagatccaaatgcagctgatatttggattgttggtcgtgatctagctgattcagctagtcatcttggagatgttcgtatcttaaatagtattattgatatggatgaactacgagaattaattactaaactttgtgaagaaaaaggacttatatarctaat

SEQ ID NO: 2979 - DNA, 450 bp, Streptococcus pneumoniae
  misc_feature (1)..(450): tiling:Spneumo1:WAN024DVI; Cluster includes WAN0243AQ spr1 971|fucU|15904012|NP_359562.1|1961412..1961852|-|441 bp|Fu cose pathway protein, function unknown|S.pneumoniae|R6|NC_ 003098.1|ORF|111
atgttaaaacatataccgaaaaatatttctccagatttattgaagactttaatggaaatgggacatggagatgaaatagtattagctgacgcgaattatccttctgcctcatgtgcaaataagctaattcgttgtgatggygtaaatattccagaattattagattccattctgtatttaatgccattagatagttacgtcgatagttcaattcagtttatgaacgttgtttcgggtgatgatattcctaagatatggggtacctatagacagatgattgaaggtcatggtacagatcttaaaacgattacttatcttagaagagaagacttttatgaacgtagtaagaaagcttatgctattgttgctacaggagaaacttcactttatgctaatattatccttaagaaaggagtagttgttgaaagagaaaatgttyaactarctaat

SEQ ID NO: 2980 - DNA, 611 bp, Streptococcus pneumoniae
  misc_feature (1)..(611): tiling:Spneumo1:WAN024FNT; Cluster includes WAN0243SM spr1 325||15903368|NP_358918.1|1312051..1312656|+|606 bp|Conser ved hypothetical protein|S.pneumoniae|R6|NC_003098.1|ORF|2 21
atgttaaaacttattgctattgttggaacaaattcaaaacgttctacaaaccgtcaattgcttcaatacatgcaaaaacactttrctgacaaagctgaaattgarcttgttgaaatcaagrccattcctgtcttcaacaaaccagctgacaagcaagtacctgctgaaatattggaaattgctgctaaaatcgaagagrcagatggcgttattatcggtactcctgagtatgatcactctattccagctgttttgatgagcgctcttgcttggttgtcttatggtatttacccacttttgaacaaaccaatcatgattacaggtgcttcttacggtacgcttggttcatctcgtgcccaattgcaacttcgtcaaatcttgaatgctcctgaaatcaaggcaaatgttcttccagatgaattcttgctctcacactctcttcaagcatttaacccaagtggcgacttggttgaccttgatgttatcaagaaattggatgccatctttgatgacttccgtatcttygtraaratyacwgaraaattrcgyaatgcrcaagaattrcttcgcaaagatgcwgaagamtttgactgggaaaatttgtaactaat

SEQ ID NO: 2981 - DNA, 503 bp, Streptococcus pneumoniae
  misc_feature (1)..(503): tiling:Spneumo1:WAN024ETJ; Cluster includes WAN024482 spr0 768||15902812|NP_358362.1|762595..763092|+|498 bp|Conserve d hypothetical protein|S.pneumoniae|R6|NC_003098.1|ORF|111
atgttaaaatcagaaaaacaatcacgttatcaaatgttaaatgaagaattgtccttcctattggaaggcgaaaccaatgttttggctaatctttccaacgccagtgctctcataaaatcacgttttcctaataccgtatttgcaggcttttatttgttcgatggaaaggaattggttttaggycccttccaaggaggtgtttcctgcatccgtattgcactaggcaagggtgtttgtggtgaggcagctcactttcaggaaactgttattgttggagatgtgacgacctatctcaactatatttcttgtgatagtctagctaaaagtgaaattgtggtgccgatgatgaagaatggtcagttacttggagttctggatctggattcttcagagattgaggattacgatgctatggatcgagattatttggaacaatttgtcgctattttgcttgaaaagacarcatgggactttacgatgtttgaggaaaaatcttaactaat

SEQ ID NO: 2982 - DNA, 1637 bp, Streptococcus pneumoniae
  misc_feature (1)..(1637): tiling:Spneumo1:WAN024G7O; Cluster includes WAN02443I spr0 932||15902976|NP_358526.1|917259..918890|+|1632 bp|Conserv ed hypothetical protein|S.pneumoniae|R6|NC_003098.1|ORF|12 1
atgttaaagaaaaatgatattgtagaagttgaaattgttgatttgacccatgaaggggcaggagttgccaaggtagatggtttggtcttttttgtagagaatgctttaccgagtgaaaaaattctcatgcgtgtcctcaaggtcaataaaaagattggctttggaaaagttgaaaaataccttgtccagtcaccacaccgtaatcaagatctagatttggcttacctgcgttcaggaatcgcggatttaggacacctttcttatccagaacagctcaagtttaaaaccaagcaagtcaaggacagtctctacaagattgctggaattgcagatgtagaagttgctgaaacgcttgrtatggaacatccagtcaagtatcgcaataaggcgcaggtgcccgttcgtcgagtgaatggtgtcttggaaacaggatttttccgtaagaattcgcayaacctcatgccccttgaagatttctttatccaggatcctgtcattgaccaagtcgtagtagctcttcgagacctgctccgtcgttttgatttaaaaccttatgacgaaaaggaacartctggattgattcggaatcttgtggtgcgtcgtggtcactattcaggacaaatcatggtcgttttggtgacaactcgtccaaaagtttttcgtgttgaccaattgattgaacaagttatcaagcagttcccagagattgtgtctgtcatgcaaaatatcaacgaccagaataccaatgcgatttttggtaaggagtggcgcactctttatggtcaagactatattacggaccagatgttgggaaatgacttccaaatcgctggccyagccttttaccaagtcaatactgaaatggcggagaaactctatcaaacagccattgactttgcagagttaaaaaaagatgaygtgrttattgatgcytattctggtattggaaccattggtttatcagtcgccaagcatgtcaaagaagtctacggtgttgaactgattccagaagcrgtwgagaatagymaraaraatgctymkytgaacaakattwcwaaygcccactatgtctgtgacacrgctgaaaatgcyatgaagaawtggctyaargawggkattcaaccaaccgttatcttggttgatcctccacgcaagggcttgacagaaagctttatcaaagcaagcgcccaaacaggagccgatcgcatcgcytatatctcytgcaatgtcgcaaccatggcgcgtgatattaaactataccaagagttgggatatgaattgaagaaagtccagccggtggatctatttcctcaaacgcatcacgtcgagacggtagcacttttgtccaaactcgatgtcgataagcayataagtgttgaaattgagctggatgagatggatttgacaagtgcggagagcaaagcaacatatgctcaaatcaaagaatatgtttggaataaatttgaattaaaagtttcgacattatatattgcacagataaaaaagaaatgtggaatagaattacgagaacattacaacaagtctaaaaaggataaacaaattattccacagtgtacacctgaaaaagaagaagccatcatggatgctttgagacacttcaaaatgatttaactaat

SEQ ID NO: 2983 - DNA, 1040 bp, Streptococcus pneumoniae
  misc_feature (1)..(1040): tiling:Spneumo1:WAN024G6Q; Cluster includes WAN02442B spr0 975|ABC-SBP|15903019|NP_358569.1|960704..961738|+|1035 bp| ABC transporter substrate-binding protein - unknown substr ate|S.pneumoniae|R6|NC_003098.1|ORF|111
atgttaaaggaaataaaaaggagaaacagaatgaaaaataaacgtttaattggaattattgctgcattagcagtcttagtagcaggaagcttgatttattcttcaatgaataaatcagaagytcagaataataaggatgagaagaaaataacyaagattggtgtgcttcaatttgtgagccatccatcccttgatttgatttataaagggatccaagatggacttgcagaagaaggatataaagatgatcaagttaaaattgattttatgaactcagaaggtgaccaaagtaaggttgcgacaatgagtaaacaattggttgcaaatggraatgaccttgtggttggtatcgcaacaccagcagcccaagggttggctagtgcaacaaaagacctaccrgttatcatggccgctattacagacccaattggtgctaacttggttaaagatttgaaaaaaccaggtggcaacrttacaggggtatctgaccacaatccagctcaacaacaarttgaactcatcaaggctctgacaccgaatgtgaaaacaatcggagctctttactcaagtagcgaagacaattcaaaaacacaggtcgaagaatttaaggcttatgctgaaaaagcaggtctgacagtggaaacatttgcagttccttcaacaaatgaaattgcctcaactgtcactgttatgactagcaaggtagatgctatttgggttccaattgataacaccattgcatcaggatttccaacggttgtctctagcaatcaaagttctaaraaaccaatttatcccagtgcgacagctatggtagaagtaggtggtttggcatcagttgtaattgaccaacatgaccttggtgtggcaacaggtaaaatgattgtgcaagtcttgaaaggtgcaaamccagccgataccccagtcaatgtcttttcaaytggtaagtcagtcatcaataaaaaaatagcacaagaactaggtattactattcctgagtctgttctcaaagaagcaggacaagtcatcgaataactaat

SEQ ID NO: 2984 - DNA, 639 bp, Streptococcus pneumoniae
  misc_feature (1)..(639): tiling:Spneumo1:WAN024D8A; Cluster includes WAN023RWY cont ig_1609_5||||1674..2312|-|639 bp|Glimmer 2.02 orf predicti on|S.pneumoniae|670|WAN01UDCD|ORF|001
atgttaaataaagtcaaaactaaagccttaattagtgttggarcagtrgcygcaactagctttattctcatgrtgggatatactrytggtcaacaytckactgctaaacaaagtcgyaaagaratygaattggctgcarctaaacttgtagaggacaaacaagmwgaagataaagcmagyattttgtyatcrgatactgtaaaagaatttttgacrcagtactatacgaaagaaaarctmggrgaaaataatacacgtattcaaccttatatgactgaatcrgcttattctcaagaattgtcaagtcaaaatgatgccatgaaccaagtgtataaggattatattttrgattatcatttygaaaaagctgatatctttgtcaatcagactacgaatcaagcyattgcyatggtstcttataatgtaacctatgtatcygatttaaagaatgccaaccaatcaaagacbaatcagacagaaacmagaacrgttaagttrtcytattckaaactaccwggtaagttattggtcaaycaagtrcaggtttggaaatctgggttagatgatttrgataaggymactccyaaaactttrgaagaatcmtcatcwrtwccatcactgccaaatactacracaaaa

SEQ ID NO: 2985 - DNA, 232 bp, Streptococcus pneumoniae
  misc_feature (1)..(232): tiling:Spneumo1:WAN0249GG; Cluster includes WAN024E4M-rc R 6.IG_2142||||1917704..1917935|-|232 bp|Between spr1935 (il vD) (- strand) and spr1936 (tktC) (- strand)|S.pneumoniae| R6|NC_003098.1|IG-rc|110
atgttaaatacacttatttgaaagaatttctgtaaaaattacagtacgttatttaaagaaagcggattaaaaagcatattctggtcatcagaaagtgcactaatccgctttgttgtttttaattttaaatatttcacatgygtatagaattttctgaaaattcaagaattttattctgttcwtyrysykwaaattgtgctataatagtaaaaactgaaatgggagggataag

SEQ ID NO: 2986 - DNA, 498 bp, Streptococcus pneumoniae
  misc_feature (1)..(498): tiling:Spneumo1:WAN024FPO; Cluster includes WAN023PP6 pne2 0_16||||12340..12837|+|498 bp|Type 11A capsule operon, Gli mmer 2.02 orf prediction|S.pneumoniae||WAN01UCJ5|ORF|000
atgttaaatagattgataagaaattttaataaagtatattatagttatcgtataaaaagaaaggcagcgcaatgcggtgggagagtgtatacgggaggcaaaacgtttgttactgcaaatacgtaccttgatgaaaatgtttcatttaatggtatgtcaatgtatggtgaagggaaaataagcattggtaaaaattttcattcaggattgaattgccaaattatcacttcctttcataattatgacttgggcgataaaattccttatgatgagagttatatacataaagacgtcttaattgaagataacgtctgggtaggaaataatgtgataattttaggtggtgcgattattgaggaaggtgcaatcattcaagcaggaagtacagttattggaagaattccagcaggtgcaattgcaggtggacatccagcaaaaccattcagatttagaaacatggaacattataatcaacttaaacggcaaaaaaagtttcat

SEQ ID NO: 2987 - DNA, 377 bp, Streptococcus pneumoniae
  misc_feature (1)..(377): tiling:Spneumo1:WAN024DFQ; Cluster includes WAN0244BM spr0 640||15902684|NP_358234.1|646614..646985|+|372 bp|Conserve d hypothetical protein|S.pneumoniae|R6|NC_003098.1|ORF|111
atgttaaatagtattgtaaccattatttgtattgcccttatcgcrtttatcttgttttggtttttcaaaaagcctgaaaaatctgracaaaaagcccagcaaaaaaacggataccaagagattcgagtggaagtcatgggaggctatactcctgagttgattgtcctmaagaaatcagtgccagcmcgcattgtctttgaccgcaaggatccttcaccatgtctggatcaaattgtttttccagattttggtgtacatgcgaacctgccaatgggggaagagtatgtagtggaaatcacgcctgaacaggctggagagtttrgctttgcttgtggtatgaacatgatgcacggcaagatgattgtagagtarctaat

SEQ ID NO: 2988 - DNA, 992 bp, Streptococcus pneumoniae
  misc_feature (1)..(992): tiling:Spneumo1:WAN024CTL; Cluster includes WAN0243Y3 spr1 128|guaC|15903171|NP_358721.1|1131681..1132667|-|987 bp|GM P reductase|S.pneumoniae|R6|NC_003098.1|ORF|221
atgttaaatgaatttccaatttttgattacgaagatattcaattgattccaaataaatgtgtcattaaaagccgtgcagaagcggatacaagtgtcactttaggaaatcacacctttaaactacctgttgtgccagcgaatatgcagacgattttggatgaaaatgtagcagagcaactggctaaaggtggttacttctacattatgcaccgttttgatgaggcaggacgcattccttttattaaacgmatgcacratcaagggctcattgcttcyatmtctgtcggtgttaaggaytatgagtatgatttygttagmcagctcaagrctgatrctcctgagtatatcactattgatattgctcatggtcatgcggatagcgtgatttctatgattcaacacatcaagaaagaattgccagatacctttgtcattgctggaaatgtgggaacaccagaagctgtgcgtgaattggaaaatgctggtgcrgatgctactaaggtcggaatyggtcctggtaaggtttgtatcaccaaggttaagactggttttggtacaggtggttggcagttggctgctytacgctggtgtgccaaggctgcgcgtaaaccgattatcgctgatggaggaattcgtactcacggtgatattgcyaagtctatccgcttcggtgctagcatgatcatgattggttccctctttgcaggacayattgaaagtccagggraaacgattgaagtcgatggtgracagttcaragratattatggttcagcctcacaatatcaraaaggtgcttacaaaaatgtggraggcaaacgtatcttgcttcctgctaaaggtcatctgcaagacactttaactgagatggaacaagaccttcaaagtgctatttcttatgcaggtggacgtcaggttgctgaccttaaacacgttgattatgtgatcgtgaaaaactccatctggaatggggatgcttcccactaactaat

SEQ ID NO: 2989 - DNA, 239 bp, Streptococcus pneumoniae
  misc_feature (1)..(239): tiling:Spneumo1:WAN024DLI; Cluster includes WAN0244PH spr0 141||15902185|NP_357735.1|150653..150886|+|234 bp|Hypothet ical protein|S.pneumoniae|R6|NC_003098.1|ORF|110
atgttaaatttacaatttgcagaaacaatggaattgacagaagctgagttgcaagatgttagaggaggcaacctcgtaaattctatgggaggtggtggaagaagtggtatatctggttggggcgtcccaggaatttaccctggttggggcaatcaagggatgagtcctaatcgtggagcttttgattggactatagatttagcagatggattgtttggccgccgtagaagatarctaat

SEQ ID NO: 2990 - DNA, 351 bp, Streptococcus pneumoniae
  misc_feature (1)..(351): tiling:Spneumo1:WAN024EWV; Cluster includes WAN023KM2 3138 99_3269||||1748925..1749275|+|351 bp|EGAD orf prediction|S .pneumoniae|R6|NC_003098.1|ORF|110
atgttaacacctgattgcaactcatctccatttacacgtgtaaagatcttaacatcacgaacgacaccatcggcaccgtgtggtacacgaagagaagtatcacgcacttcacgagacttgtctccaaagatagcgtgcaagagacgttcttcagctgaaagatctttctcacccttaggtgttactttacctacaagaatatcaccttctttaacctcagcaccaatacggataatccccatttcgtcaaggtctttgagggcatcttcaccaacgtttggaatttcgcgagtgatttcttcaggcccaagctttgtatcgcgcgtttctgattcgtattcttcaaggtga

SEQ ID NO: 2991 - DNA, 1322 bp, Streptococcus pneumoniae
  misc_feature (1)..(1322): tiling:Spneumo1:WAN024FIH; Cluster includes WAN0243PD spr1 442|merA|15903485|NP_359035.1|1426977..1428293|+|1317 bp|O xidoreductase (Mercury (II) reductase)|S.pneumoniae|R6|NC_ 003098.1|ORF|211
atgttaacatacgatttaattgttattggatttggtaaagctggtaaaacactagcwggtaaattggcttcagctggcaaaaaagttgccctcgttgaacgyagcaargctatgtacggtggaacttgtatcaacatyggttgtatcccaactaaaacyttgctrgttgctgctgaraargacttgtcttttgaagaagtsattgctacyaaaaacacgatcactggtcgcctcaacggtaaaaactatrcgactgttgctggtacwggcgtmgatatctttgatgckgaagctcacttcctttcaaataaagtcatcgaaatccaagctggtgatgaaaarmaagaaytgactgctgaaacwatcgtcatcaacactggtgctgtttcaaacgtcttgccaatycctggacttgctacaagcaaaaacrtctttgactcaacaggtatccaaagcttggayaaattrcctgaaaaacttggartccttggtggcggaaatatcggtcttgaatttrcyggcctttacaayaaactwggaagcaaggtyacagtcctagatrccttggatacattcctacctcgtgcagaaccttccatcgcagctcttgctaaacaatacmtggaagaagayggyattgaattgcttcaaaatatccatactactgaaatyaaaaacgayggtgaccaagtgcttgtcgtaactgaagacgaaacttaccgtttcgacgcccttctctacgcaactggacgcaaaccaaatgtagaaccacttcaacttgaaaatacagatattgaactaactgaacgtggygctattaaagtagayaaacactgtcaaacaaacgttcctggtgtctttgcagttggagatgtcaacggtggycttcaatttacttacatttcacttgatgacttccgtgttgtttacagctaccttgctggagatggcarctayacacttgargaccgtctcaatgtgccaaatactatgttcatcacacctgcactttcacaagttggtttgactgaaagccaagcagctgatttgaaacttccatacgcwgtkaargaaatcccygttrcagcmatgcctcgtggtcacgtaaatggagaccttcgcggwgcyttcaaagctgttgtyaatactgaaacaaaagaaattcttggwgcaagcatcttctcagaaggttctcaagaaatcatcaacatcatyactgttgctatggacaacaagattccttacacttacttcacaaaacaaatcttcactcacccaaccttggctgagaacttgaatgacttgtttgcgatttaactaat

SEQ ID NO: 2992 - DNA, 117 bp, Streptococcus pneumoniae
  misc_feature (1)..(117): tiling:Spneumo1:WAN024FIF; Cluster includes WAN023S9W NC_0 03028.1_1974||||1492846..1492962|-|117 bp|Glimmer 2.02 orf prediction|S.pneumoniae|TIGR4|NC_003028.1|ORF|011
atgttaacatttatcttcctcctattcgaatttcattctagcacaagaaaaaaacttttgcacaattctgctacggaaaagacagaaaaagataaaaacgctttccagacaaaaaac

SEQ ID NO: 2993 - DNA, 647 bp, Streptococcus pneumoniae
  misc_feature (1)..(647): tiling:Spneumo1:WAN024FCV; Cluster includes WAN0243JN spr1 649||15903691|NP_359241.1|1621532..1622173|-|642 bp|Conser ved hypothetical protein|S.pneumoniae|R6|NC_003098.1|ORF|1 11
atgttaaggttatatttagaaaatgaaattatagaattatcaaataatttagagaccatttgggtatctgtgcttgataaatatgagaagttatttgaatatttatcaaatgaagaacgartagaattgattaaagaagatttaatcataaatgagtcagttctaaatrttgataaaaaaggatatgagttaatttgtttacaacatccygtttcatatgacttaagaagaattattagtgtaataaaaatatcaactgacattgaacgtattggrgatagaattgttgaaattttaaaaaatctacagattmttcaaaataatgaaattttgaagaaaattatttcaraaataaaaatacttcatgaagttatcggactgcatatgaatagggctatatcttgttatagagaggaacaatctggatgtttagatatggttgttatacaaaaacagaatgagatagaagagcttagtayaaatatkgaaaagaaaataatgaattacatatttgaagatgatgggaaygtttctgaagtaattrgtgctttagatattattcatcaccttgataaaattgctcatactacgcaakcaatttataaatggataatgtatagaaaatatgggaacataaattarctaat

SEQ ID NO: 2994 - DNA, 126 bp, Streptococcus pneumoniae
  misc_feature (1)..(126): tiling:Spneumo1:WAN024DG7; Cluster includes WAN0244CH spr0 609|ABC-NBD-truncation|15902653|NP_358203.1|622097..622222 |+|126 bp|ABC transporter ATP-binding protein - unknown su bstrate, truncation|S.pneumoniae|R6|NC_003098.1|ORF|110
atgttaagtaaaaatgtagaatataaaggaggtgcaatgagtatgattgaagttagccatttatcaaaaagttttggtgataaaatagctttaaataatataagcttcactgttaaagaaggttag

SEQ ID NO: 2995 - DNA, 948 bp, Streptococcus pneumoniae
  misc_feature (1)..(948): tiling:Spneumo1:WAN024AWK; Cluster includes WAN0240V2 |fol P||CAC39136.1|||948 bp|dihydropteroate synthase|S.pneumoni ae||AJ311338|ORF|000
atgttaagtaaagccaatcgtgcaaagacagctatttgcggaattatcaatgtaaccccagactccttttcggacggtggtcaattttttgctcttgagcaggcactccagcaggctcgtaaattgatagcagaaggggctagcatgctagatatcggtggagaatcaactcggccgggaagtagctattatgttgagatagargaggagatccagcgtgttgttccagtgattaaagcgattcgcaaggaaagtgatgtcctcatttctattgatacttggaaaagtcaggttgcagaggctgctttggctgctggtgccaatctagtcaatgatatcactggtctcatgggtgatgaaaaaatggcccatgtgatagctaaagatggagcgaaagtggtcattatgtttaatcctgttatggctcgacctcagcatcctagctcgctcatattccctcattttggatttaatcaagcttttacagaggaagagttagctgactttgaaacattgccaatcgaagagttgatggagactttctttgaaagagcactagcgagagcaaatsaagctggwattgcammagaaaatatcctgttggatccaggaatcggctttgggctgacyaagaaagaaaatttgcttcttttacgagacctggataaactacatcagaagggctatccaatctttcttggagtgtcgcgcaagaggtttgtcatcaatatccttgaagaaaatggttttgaagtcaatcctgagacagaacttggtttccrcaatcgggacacagcttcggctcatgtaaccagtatcgctgcgagacagggtgtggaagtggtgcgcgtgcatgacgtagctagtcacaggatggcagttgaaattgcctccgccattcgtctggctgatgaagcggaaaatctagatttaaaacaatataaataa

SEQ ID NO: 2996 - DNA, 1257 bp, Streptococcus pneumoniae
  misc_feature (1)..(1257): tiling:Spneumo1:WAN024GMQ; Cluster includes WAN0244I4 spr0 406|ilvA|15902450|NP_358000.1|401601..402851|+|1251 bp|Thr eonine desaminase|S.pneumoniae|R6|NC_003098.1|ORF|111
atgttaagttcaaaagatataatcaaggctcacaaggtcttgaacggtgtggttgtgaatactccactggattacgatcattatttatcggagaagtatggtgctaagatttatttgaaaaaagaaaatgcccagcgtgttcgctcctttaaaattcgtggtgcctattatgccatttcccagctcagcaaggaagaacgtgaacgtggggtagtytgcgcttctgcgggaaatcatgcgcagggagtagcctatacttgtaatgaaatgaaaattcctgctactatctttatgccyattactacgccacaacaaaagattggtcaggttcgcttttttggtggggattttgtaactattaaactagttggagatacctttgatgcctcagccaaagcagctcaagaatttacagtctctgaaaatcgkacctttattgatccttttgatgatgctcatgttcaagcaggtcaaggaacagttgcttatgagattttagaagaagctcgaaaagaatcgattgattttgatgctgtcttggttcctgttggtsgtrrcrrtctcattgccggggtttctacctatatcaaggaaacaagtccagagattgaggttatcggagtagaggcgaatggagcgcgttccatgaaagctgcctttgaggctggaggtccagtmaaactcaaggaaattgataaatttgckgatgggattgctgtgcaaaaggtaggtcagttgacctatgaagcaactcgtcaacatattmaaactttggtaggtgtcgatgagggattgatttctgaaaccttgattgacctttactctaagcaagggatagtcgcagaacctgctggagcrgctagtatcgcctctttagaggttttagctgaatatattaaggggaaaaccatttgttgtatcatttctggaggaaataatgatatcaaccgtatgccagaaatggaagagcgtgccttgatttatgatggtatcaaacattaytttgtggtcaatttcccacarcgtccaggagctttgcgtgagtttgtaaatgatatcctggggccaaatgatgatatcacacgttttgagtatatcaaacgagctagcaagggaacaggcccagtattrattgggatcgctttrgcagataagcatgattatgcaggtttgatycgtagaatggaaggttttgatccagcttatattaacttaaatggtaatgaaacgctttataatatgcttgtcykaactaat

SEQ ID NO: 2997 - DNA, 840 bp, Streptococcus pneumoniae
  misc_feature (1)..(840): tiling:Spneumo1:WAN024G8T; Cluster includes WAN02445P spr0 853|ald-truncation|15902897|NP_358447.1|848313..848576|-|2 64 bp|Alanine dehydrogenase, truncation|S.pneumoniae|R6|NC _003098.1|ORF|212
atgttaatcggaatcccaaaagaaattaaaaataacgaaaacygtgtcgccctcacacctgcaggtgttcatagcttagttagtcgtggtcatcgtgtccttatcgaaacaaatgctggtctcggttctggctttactgatgctgactatcaaaagcaaggagctgagattgtcgctactgctggtgaagcttgggcagcagagttggttgtgaaagtaaaagaayctttaarttctgaatacggttacttkcgcgacgatcttcttctcttcacctacttgcacatggccgctgctccagaattagcagatgctatgttarcagcaaaaacaacaggaattgcctatgaaactgttcgtgacaatcaaggacaactaccgctcctcgttcctatgagtgaggttgcagrtcgtatggctgttyaaatcggagctcacttccttactaagcaagctggtggctctggtgttctacytggtggtgtaccaggtgttccaaaaggaaaagtaactatcatcggtggtggtgtcgtcggtacacatgctgcccgcatcgcccttggtcttggtgctcaagtgactattttagatattagtkccaagcgtctctcagttctagaagaagtctttggaagtcaaattcaaactcttatrtctaattcattcaacattgaagcaagtgtgagagatgctgatgtggtgattggagccattctcatccctggtgcaaaagcaccggaattggtgacagatgagatggtcaaacaaatgcgtccaggctctgtatcgttgacsttgctgttgaccaaggtggcsttatcgaaacagctgaccgtgtga

SEQ ID NO: 2998 - DNA, 1226 bp, Streptococcus pneumoniae
  misc_feature (1)..(1226): tiling:Spneumo1:WAN024COD; Cluster includes WAN0241YS SP17 70||15901600|NP_346204.1|1674556..1675770|-|1215 bp|glycos yl transferase, family 8|S.pneumoniae|TIGR4|NC_003028.1|OR F|021
atgttaatgaatacaaaatctatagtttttaatgcagataatgattatgtagataaattagaaactgcaattaaatctatttgttgttataataattgtttaaaattttatgtatttaatgatgatattgcgtcagagtggtttttgatgatgaataagcgattgaagactatacaatctgaaatcgttaatgtaaagattgtagatcatgttcttaaaaagtttcatttaccgttaaagaatttaagttatgccactttctttcgttattttatacctaattttgtcaaagaaagtcgtgctttatacctagattctgacatcattgttacaggaagtttagactatttatttgatatagaactagatggttatgccttggcagcagtagaagattcttttggtgatgttccttctaccaattttaactccggaatgttattagttaatgtagatacttggagagatgaagatgcttgttcgaaactgttagaactgaccaatcaatatcatgaaacagcatatggagatcaaggaattttaaatatgttattccatgatagatggaaaagattagaccgaaattttaattttatggtggggatggatagcgtcgcacacatagaaggaaatcataaatggtatgagatttctgagttgaaaaatggagatttacctagtgttatacattatactggggtaaaaccttgggaaataatttccaataatcgctttagagaagtttggtggttttataatctgttagaatggtctgatattttattgagaaaagacattattagtcgtagtttcgaagaacttgtatacagtcctaaagctcatacagcaatttttacagctagttgtgagatggagcatgtagaatatttgatagaaaatttaccagaggtacatttttctatactagcacatacatattttgcgtctagtgtcgttgctttattaagatatagcaatgttacgatttatccttgtttttctccatttgattatcgaaaaattttggataatttagatttttatytagatattaatcattataaagargtggataatattgtatccgttgttcaacaactatctaaaccaatttttacctttgaaaatactagtcatgatataggcaatcaaactaatatattttcttcaaccgaaccaaacaaaatggtagaggctattagacaatttataggagaataactaat

SEQ ID NO: 2999 - DNA, 2246 bp, Streptococcus pneumoniae
  misc_feature (1)..(2246): tiling:Spneumo1:WAN024DCZ; Cluster includes WAN02445L spr0 857|celB|15902901|NP_358451.1|850600..852840|+|2241 bp|Com petence protein|S.pneumoniae|R6|NC_003098.1|ORF|111
atgttacagtggattaagaatttctctattcccctaatttacctgagttttctrttactttggctttaytacgctattttctcagcatcytatcttgctttgttgggmtttgtttttctgctagtctgtctctttwtccaatttccktggaaatctgctrgyaaagttctartratttgyggaatctttggattttggtttgtttttcaaaattggcaacagagtcaagcgagtcaaaatctggcggattctgttgaaagggtacggattytrcctgayactrttaaggtyaatggtgatagtctrtcctttcgyggcaagkctrayggwcgyrytttycaagtctattataaactccagtccgaggaggagaaagaagcctttcaagctttaacygacctgcatgagataggactagaagggaagctttcggagccagaagggcagagaaattttggtggctttaattaccaagcctatctgaagactcagggaatttaccagacwctcaatatyaaaavaatccagtcactycaaaagrttggcagttgggatataggwgaaaamytgtccagtttacgtcgaaaggctgtggtttggattaagaygcacttyccagaccctatgsgcaattacatgacaggactcttgctrggayatctgracaccgaytttgaggagatgaatgagctttattccagtytaggaattatycacctytttgccytrtcwggyatgcaggtaggktttttcatgaatggatttaagaaacttctcttgcgattgggcttgacccaagaaaagttgaaatggctgacttatcccttttccctwatctatgcgggactaaytggattttcagcatcggttattcgcagtctcttgcaaaagctactggctcaacatggggttaagggcttggataattttgccttgacggtgcttgtcctctttattgtcatgccaaactttttcttkacagcaggaggagtcttgtcctgcgcttatgcttttatcctgaccatgaccakyaaagaagggraggggctcaaggctgttrctagtgaaagtctagtcatctccttgggcatattgcccattctatccttctattttgcggaatttcaaccttggtctatccttttgacctttgtcttttcctttctwtttgacttgrycttcttaccgctcytgtctatyttatttgtcctttcctttctctatccagtcattcagctgaactttatctttgaatggttrgagggcattattcgcttggtstcrcaggtgrcaagkagrccdctdgtctttggwcaacccaayrmatggyttttaatcytattgttaatttcyttggctttggtctatgatttgagraaaaacattaaarrrytaacrgtattgwgyttattgattacaggkctctttytcytkaccaagyatccactggaaaatgaaatcaccatgctggatgtggggcaaggagaaagtattttcctacgggatgtaactrrkaaaaccattctcatagatgtaggtggtaaggcagaatcttataagaaaatcraaaaatggcaagaaaagatgacgaccagcaatgcmcagmgaascttgatwccctatctyaaaagtcgaggagtagctaagattgaccagctrattttgacwaayacggacaaggarmatgtyggagatttgtyagagrtgaccaaggctttccatgtaggggagattytagtatcaaaagrcagtytgaarcagaagsaatttgtggyagaactacagrcgactmaaacaaaggtgcgtagtatgayagtaggggagaacttgcccatttttggaagtcagttagaagttctatcyccaaggaaaatgggagatggaggacacgatgayaccctagttctgtatgggaaattcttggataagcaatttctcttcacgggaaatttggaggagaaaggagagaaggacttgctgaagcactatccagacttgaaagtaaatgttttgaaagctagccaacatggcaataaaaaatcatcaagyccagcctttctagaaaaactcaaaccagagcttactcttatctcagttggaaagagcaatcgaatgaaactccccyatcaggaaacattgacacgactggaaggtatcaatagcaaagtttaycgaactgaccagcaaggagctatacgktttaargggttggatagttggaaaatcgaaagtgttcgatarctaat

SEQ ID NO: 3000 - DNA, 664 bp, Streptococcus pneumoniae
  misc_feature (1)..(664): tiling:Spneumo1:WAN024CS4; Cluster includes WAN0243UN spr1 252|phoU|15903295|NP_358845.1|1251587..1252240|-|654 bp|Ph osphate transport system regulatory protein|S.pneumoniae|R 6|NC_003098.1|ORF|331
atgttacgatctcaatttgaagaagatttagagaaattacataaccagttctacgctatgggacaagaagtgctctcacaaatcaatcgtacggtacgtgcttttgtcacgcatgaccgtgacctggcaaaagaggtcatmgaagatgatgcagaagtaaatgaatacgaagtgaaactggaaaagaaatcatttgaaatgatcgcactccaacaaccagtctctcaagatttgcgtacagtcttgactgtccttaagrctgtatcagatgtggagcgtatgggggatcacgctgtagccattgcccaggcaaccatccgtatgaagggggaagarcgcatyccagctgtagaggaagaaattaaaaaaatgggacgtgaagttaaaagcgttgtkgaagcagcacttgatctttatcttaatggttctgttgacgacgcataccgggtggcctccatggatgagcaaattaaccactattttgaaactatccgtgaccttgcgactgaagagattaagaaaaatccagaagccattgttacgggtcgtgattatttccaagttatttcctacttggagcgtatcggtgactatgctaaaaatatctgtgaatgggttgtctactttgaaacaggtaagattgtcgaactaywaamtartttaa

SEQ ID NO: 3001 - DNA, 816 bp, Streptococcus pneumoniae
  misc_feature (1)..(816): tiling:Spneumo1:WAN024CIS; Cluster includes WAN0242AB SP13 31||15901185|NP_345789.1|1255322..1256131|-|810 bp|phospho sugar-binding transcriptional regulator, putative|S.pneumo niae|TIGR4|NC_003028.1|ORF|010
atgttactgcaaaaagaactaattccaatgatagaagctaacttaccaaatatggcatatgctgaaaaagacattgctaaattcttcttaaaacagcaacctctgaatrattattcatstaargcattgtgcgaataccttaatgtatccaaagcaacattgactcgatttgcgaaaaaatgtggttttaaaggttttagacaattcattttcaaataccaagagatgattcatgagaaagaaaagttggcattatatacagaggcaacagaaaaagttttatccgactatgaggaaatgttgagaaaaacttacacggttcttgatgaagttcaacttgagcgtattgctgagatgatagaaactgctgagcgtgtatatctctacggtaaaggaagttctgttcttgctttacaagaaatgaagatgagatttatgcgtctcggagtgattggtgaagtattatcagacgaggatatgattttgtggagtagcttactacttaatgaaaattgccttgtcattggagcatccatttcaggtcaaactgatattgtactagaaggtctacaaaaagctgcagataaaggcgctaaaacagttttaatgactacaagaaaatttgacgaagaagattgtttctttgatgaactattgttattagcttcgaccgatcatctctcgtatggcaatcgcatatcacctcagtttccaatacttttaattacagactgcttattctctaattatctggaaagtccagagagacaatattattacaatcaaactattatccataaggaggaactaactaat

SEQ ID NO: 3002 - DNA, 1673 bp, Streptococcus pneumoniae
  misc_feature (1)..(1673): tiling:Spneumo1:WAN024G37; Cluster includes WAN0243ZB spr1 084|recN|15903127|NP_358677.1|1080001..1081668|-|1668 bp|D NA repair and genetic recombination|S.pneumoniae|R6|NC_003 098.1|ORF|221
atgttacttgaaatttcgataaaaaactttgccattattgaggctatttccctcaattttgaaaaggggatgactgtcctgactggtgaaacgggtgcagggaagtcgattatcattgatgccatgaatatgatgttgggagctcgtgcgacgacagatgttattcgtcatggtgcaccaaaggcagagattgargggcttttctcagttgagaatagtcgtcttttacaggaaatttttgatgagcaaggtttagarttaggtgatgaaattatcatccgtcgggaaatcttgcaaaatggtcgtagtatcagccgtgtaaatggtcagatggttaatctgtctgttttgcgarctattgggcaacatcttgtagatattcatggtcagcatgaccatgaggagttaatgcgtccccaactgcatatccagatgttggatgaatttggtgatgccgctttttgggacttgaaagaaacctatcaaacgagttttgatgcctatcggaaaatgcgcaagcaggttctggaagtcaagaaaaaccaacaggaacacaaggcacgtatcgaaatgttrgaatttcaaatggcagagattgaggcagcaaacttgcaggctggagaagacttggmtctcaatcaagagcgagataaactcctcaaccacaaaaatattgcggatacactgaccaatgcctacagtatgttggacaatgaagatttttcaagtctggccaatgttcgttcagcyatgaatgacatggaaagtgtcgaagagtatgaycctgaataccgtgaaatttcaagctmtctgtctgagacctactatgttttagaagacattagcaaacgtttggaagctatcattgaggaccttgattttgatggcaatcgcctsatgcaggttgagaatcgtttggacctccttcatactattactcgtaagtatggtgggactgttgatgatgttttgctttattttgccaagattacggaagaatacaatctcttgacaggcaataatctttcgtctgaggacatggaagcagagcttaagaagttggaagtcaatcttgtcaatttggcaggtcaacttgctwctgctcgtcataatttggctcagcaactcgaagctgagattaaacaagaactgcaagatctttatatggaaaaagcccagtttcaggttcgttttagtaagggaaaattcagtcgtgagggaaatraaatggttgagttttatatttcaaccaaccctggagaagactttaaacccttggttaaggttgcttctggaggggaattatctcgtctcatgttagccattaagtctgccttttcacgtaaagaaggcaagactagcattgtctttgatgargtggatacgggagtttcaggtcgtgttgctcaagctattgctcagaaaattcataaaattggtcagyatggtcaggttttggctatctcccatttgccacaagtaattgcgattgcagattatcaattctttattgagaagattagtaatgaccattcaacggtttcgactgttcgtctcttgacrgtcgaagagcgagtggaggaagttgccaagatgttggcaggtgatgatgtgacagaagcagccctgacgcaagcmagagaattgttgagaaacagggagaaataactaat

SEQ ID NO: 3003 - DNA, 548 bp, Streptococcus pneumoniae
  misc_feature (1)..(548): tiling:Spneumo1:WAN024EV6; Cluster includes WAN0244T3 spr0 011|hgt|15902055|NP_357605.1|11616..12158|+|543 bp|Hypoxan thine guanine phosphoribosyltransferase|S.pneumoniae|R6|NC _003098.1|ORF|111
atgttagaaaacgatattaaaaaagtcctcgtttcacacgatgaaattacagaagcagctaaaaaactaggtgctcaattaactaaagaytatgcaggaaaaaatccaatcttagttgggattttaaaaggatctattccttttatggctgaattggtcaaacatattgatacacatattgaaatggacttcatgatggtttctagctaccatggtggaacagcaagtagtggtgttatcaatattaaacaagatgtgactcaagatatcaaaggaagacatgttctatttgtagaagatatcattgatacaggtcaaactttgaagaatttgcgagatatgtttaaagmaagagaagcagcttctgttaaaattgcaaccttgttggataaaccagaaggacgtgttgtagaaattgaggcagactatacytgctttactatcccaaatgagtttgtagtaggttatggtttagactacaaagaaaattatcgtaatcttccttatattggagtattgaaagaggaagtgtattcaaattarctaat

SEQ ID NO: 3004 - DNA, 518 bp, Streptococcus pneumoniae
  misc_feature (1)..(518): tiling:Spneumo1:WAN024D7U; Cluster includes WAN0243QV spr1 388||15903431|NP_358981.1|1369817..1370329|-|513 bp|Hypoth etical protein|S.pneumoniae|R6|NC_003098.1|ORF|111
atgttagaaaatggcgatttgatttttgtgagagatgggtcagacatgggacaggccatccagacttccacaggtaactatagccatgttgccatttatttggatgggatgatttatcatgctagtggacaggctggtgttgtctgtcaagaaccggcagacttctttgagtccaatcatttrtacgacctctatgtttayccagaaatggatatccagtcggtgaaggaaagagcttgcaracatcttggagcaccctacaatgcttctttctatccagatgcasctggtttytactgctcccagtatatagcagaaatyytacctatttttgaaactattcctatgaaatttgragwtggggarcaggagattagtgatttytsgagggagtattacatagaactaggkctgcctgttcctctgaaccaagctggkaccaatcctagtcagttggcagcatcgcctctgttacaatgtaaagaaaggaatcttcatgattcagatttttaactaat

SEQ ID NO: 3005 - DNA, 738 bp, Streptococcus pneumoniae
  misc_feature (1)..(738): tiling:Spneumo1:WAN024GJS; Cluster includes WAN0244GN spr0 459|ABC-NBD|15902503|NP_358053.1|466869..467600|+|732 bp|A BC transporter ATP-binding protein - unknown substrate|S.p neumoniae|R6|NC_003098.1|ORF|111
atgttagaaattaaaaacctgacaggtggctatgttcatgtycctgttttgaaagatgtgtcctttacygttgaaagtgggcagytggtyggtttgattggtctcaatggtgctggkaaatcracgacsatyaatgagattatcggtctgttgrcaccttatagtggytccatcaatatyaatggcytgacyctgcaagragatgcrackagctaccgcaagcarattggctacattcctgagacgcctagtctgtatgaggaattgacyctcagagagcatatcgaaacggttgctatggcttacggtattgagcaaaaastgrctttcgaacgagtagagcccttgttaaaratgttccgtytggamcagaaattagactggttccctgttcatttttcaaaagggatgaagcagaaggtcatgattatctgtgcttttgtggtggatccaagtcttttcatcgtggatgagcctttccttggtcttgatccgctggctatttctgatttgattcagcttttggaagtggagaagcaaaagggcaagtctattctcatgagtacccacgtgctggattcggcggaraaratgtgtgatgcctttgtcattcttcacaagggagaggtgcgtkccaaaggcaatctcctgcaactacgtgaagcctttgatatgcctgaggctagtttgaatgatatttacttggctctgaccaaagaggaggatctaykaactaat

SEQ ID NO: 3006 - DNA, 389 bp, Streptococcus pneumoniae
  misc_feature (1)..(389): tiling:Spneumo1:WAN024FRY; Cluster includes WAN0243U7 spr1 268||15903311|NP_358861.1|1263789..1264172|-|384 bp|Conser ved hypothetical protein|S.pneumoniae|R6|NC_003098.1|ORF|1 11
atgttagaagttgcatatattcttgttgccctagctktgattgtctttttggtctatctgatcattactgtacaaaagcttggtcgtgtcatcgatgaaacagaaaagacgattaaaaccttgacttcagatgtggatgtgaccttgcatcacaccaatgagttgttggctaaggtcaatgtcttggcagatgatatcaatgtcaaggtggctacgattgatccactcttcagtgctgttgcagatttatctctatctgtttcagacctcaatgaccatgcgcgtgtcttgagcaagaaagcttcatcagctggttcaaaaacactcaagactggtgcaagtctgtcagctcttcgtcttgcaagtaaatttttcaaaaaataactaat

SEQ ID NO: 3007 - DNA, 515 bp, Streptococcus pneumoniae
  misc_feature (1)..(515): tiling:Spneumo1:WAN024DMI; Cluster includes WAN0244S0 spr0 050|vanZ|15902094|NP_357644.1|53441..53950|+|510 bp|Teicop lanin resistance protein|S.pneumoniae|R6|NC_003098.1|ORF|1 11
atgttagaatctaaaaaaacaactcgatatgtattttatgtctatctgatgttattaacttggggaatcttatttaagtttgaaacaaatcctgaatttatagcatttttcttagctccaaggtatatcaattggattccatttwcagaaccactaatagtcgatggaaaaattgtttttgctgaaatgttatttaatctgatttyctttattccattaggtgtttgtttccctttgataaaaactaatttatctagtttaagaatagtcgggacaggtttcttgattagtttattgtttgagtgcttacagtatattttagcaataggtataacagatataacggatttgactttaaatacgctaggtgtctgtgtaggcttactgatttatcaaatttttataagagtgttcaaatcacagactagaaaatggatcaatatcttaggtatgcttagccttggttttgcttatcttgttttactgttactgcatttamttrgtgtttaactaat

SEQ ID NO: 3008 - DNA, 635 bp, Streptococcus pneumoniae
  misc_feature (1)..(635): tiling:Spneumo1:WAN024EST; Cluster includes WAN0243RT spr1 354|glnQ|15903397|NP_358947.1|1336952..1337581|-|630 bp|AB C transporter ATP-binding protein - glutamine transport|S. pneumoniae|R6|NC_003098.1|ORF|111
atgttagaattacgaaatatcaataaagtctttggagacaaacaaatcctgtctratttcagtctaagtattcctgaaaagcaaatcctggctatcgttggaccttctggtggaggtaagacaactcttttacgtatgcttgcaggtcttgaaaccattgattcagggcaaatcttttataatggacaacctttagagctrgatgaattgcagaagcgcaayctactgggatttgtmttccaagattttcaactrttycctcatytatcagttctggamaatttgacyttatcgcctgtgaagaccatgggaatgaagcaggaagaggctgagaagaaggcgagtggactcttggaacagttaggactaggaggacacgcagaggcctatcctttctcactatctggtgggcaaaagcagcgggtggctttggcgcgtgctatgatgattgacccagaaatcattggctacgatgaaccaacttctgccctggatccagaattacgtttggaagtggagaagctaatcttgcaaaatagggaacttgggatgacccagattgtggttacccatgatttgcagtttgctgaaaatatcgcagatgtattattgaaagtagaacytaaatarctaat

SEQ ID NO: 3009 - DNA, 1328 bp, Streptococcus pneumoniae
  misc_feature (1)..(1328): tiling:Spneumo1:WAN024GNS; Cluster includes WAN0244J5 spr0 369|dagA|15902413|NP_357963.1|369089..370411|+|1323 bp|D-a lanine glycine permease|S.pneumoniae|R6|NC_003098.1|ORF|22 0
atgttagaattgcttaaatcaatcgatgmttttrcttggggaccgcccctcttgattttattggtcggaacagggrtttacctaacyatkcggctaggactcttgcaggttttgcgtctrcccaaggcctttcagcttatttttatccaggataagggacatggtgatgtatccagttttgcagctctgtgtacagccttggcatcaactgttggaacaggaaatatcataggagttgcgacggckatcaaggttggtggaccaggagctctattttggatgtggatggcggctttctttggaatggctaccaagtatgcggaaggactcttggccatcaaataccgcaccaaggacgaccatggtgcagtagcgggaggtcccatgcaytatatccttctagggatgggagaaaagtggcgaccacttgctgttttgtttgcagtagcaggagtattggttgctctcttgggaatcggaaccttcacccaagtcaactcgattrcagaatctatccaaaatacaacgacgatttcgccagccatcacagctctcgtcttgtctgtctttgtagcgattgcagtctttggtggactcaagtctatttctaaggtttcaactactgttgttccttttatggccmtcatttatatcttaggaactcttacagttattttctttaatatcggaaaaatccctggcacaatcgctttagtctttacctcagcttttagtccccttgctgcggtaggtggatttgctggtgctagcgttcggatggctattcaaaatggtgtggcgcgtggtgtgttctcaaacgaatctggtctgggttctgctccwattgcagctgcagctgccaagacaaatgaaccagtagagcaaggtttgatttccatgacaggaacctttattgataccctcatcatttgtactctaactggtttgaccatcttggtaactggagtttggagyggtgacttgaatggggttgccttgactcagtcagctttctcaacarwcttttcacactttgggcctgcyctcttgaccatcttccttgtactttttgcctttacaacgattctaggttggaactattacggagaacgctgttttgagttcctctttggggttcgctttatctggctctaccgtgtggtttttgtgstcatgktcttgttaggaggatttatcgagttggatatggtctggattatcgcagatatcgttaacgccttgatggctstgccaaacttgattgccctcytggtcwtgtcgccagtcgttattgctgaaactaaaaagtattttgacaaataactaat

SEQ ID NO: 3010 - DNA, 362 bp, Streptococcus pneumoniae
  misc_feature (1)..(362): tiling:Spneumo1:WAN024D8H; Cluster includes WAN0243SV spr1 316||15903359|NP_358909.1|1305166..1305522|-|357 bp|Conser ved hypothetical protein|S.pneumoniae|R6|NC_003098.1|ORF|1 11
atgttagaatttatcgaataycccaaatgttcaacttgtaaaaaagcaaaacaagaattaaatcaattaggtgtggactataaagccgtccatatcgtggaagaaacacctagccaagaagtcattttgaattggctagaaacctcaggatttgaattgaagcaatttttcaacaccagtggtatcaaataccgtgaattagggctaaaagataaggtaggaagtttgtcaaaccaagaagcggctgagttgctagcaagtgacggtatgttgttaaaacggcccattttagtagaaaatggaacygttaagcaaatcggttatcgaaaatcttatgargaactgggactgaaatarctaat

SEQ ID NO: 3011 - DNA, 246 bp, Streptococcus pneumoniae
  misc_feature (1)..(246): tiling:Spneumo1:WAN024AU8; Cluster includes WAN0243JB spr1 661||15903703|NP_359253.1|1634203..1634442|+|240 bp|Hypoth etical protein|S.pneumoniae|R6|NC_003098.1|ORF|111
atgttagaggagggaacaaaggatcaactagctgaactgacctacccctttggtcgtggagtcaatctctcctttggcataaaggatgttccaaaactctatcaaaaagtgatgraggcaaactatcctatttatcgtcycttgaccaaragaaagtttcgtgtcagtgatcmctatatctatcctcatraatttgcagttttggatccaratggctattttttaagatttagcgagctarctaat

SEQ ID NO: 3012 - DNA, 111 bp, Streptococcus pneumoniae
  misc_feature (1)..(111): tiling:Spneumo1:WAN024AU7; Cluster includes WAN023S8E NC_0 03028.1_2316||||1754164..1754265|+|102 bp|Glimmer 2.02 orf prediction|S.pneumoniae|TIGR4|NC_003028.1|ORF|010
atgttagaggagggaacaaaggatcaactagctgaactgacctayccctttggtcgtggagtcaatctctcctttggcataaaggatgtttcaaaactctatctaactaat

SEQ ID NO: 3013 - DNA, 249 bp, Streptococcus pneumoniae
  misc_feature (1)..(249): tiling:Spneumo1:WAN024GK8; Cluster includes WAN023L3U 3151 58_2458||||1310659..1310907|+|249 bp|EGAD orf prediction|S .pneumoniae|R6|NC_003098.1|ORF|110
atgttagagttttggtcaaatacaacaatttcgttctcatttccaaaattatccaacatggtattgatacatgctgtaccagcgtggttagcaccgactacaacgattttactcataaaaatttcctgccttcattctaaatttaccttactagtataccatttaccgttagcgtttacaaggggggtactattatttcagcattttttatcaaaaataattccccatttatcctgttttcaagcctga

SEQ ID NO: 3014 - DNA, 1136 bp, Streptococcus pneumoniae
  misc_feature (1)..(1136): tiling:Spneumo1:WAN024DXW; Cluster includes WAN0243CJ spr1 906|hipO|15903947|NP_359497.1|1882934..1884064|-|1131 bp|i milar to several hippurate hydrolases and amino acid amido hydrolases; can be...|S.pneumoniae|R6|NC_003098.1|ORF|111
atgttagatttgattcagactagacgagmtttacaccagattccagagattggcttggaggagttcaagactcaggcttatttgctggatgtgattgagaaattgactacgggcaaggattttgttcaaattcgtacttggcggacagggattttggtctacctgcagggaagtcagccggagcgaaccattggttggcggacagatattgatggyctgcctatcgtcgaacaaacaggtctacyttttgcttctcaacaccaaggtcgcatgcatgcctgtgkycatgattttcatatgaccattgccttaggctgtcttgagcgcgcycttgaggagcaacccaagaataatctgctctttctatttcagyctgctgaagaaaatgaagctggtggtatgctcatgtatgaggacgrtgcttttggagattggttgccaraycaattytatggyctccatgtycgtccagatttgaaagtcggccagattgcgactaatactcatacactctttgcaggaacttgcgaggtgaagatccgtttcaaaggcaaaggtggccacgcagcttttcctcatgaagccaatgacgccttggtggyggctagttactttgtgacccaagtgcagtcagttgttagccgcaatgtcaacccaatcgagggagcagtggtgaccttcggcgtttttcaagctggaaccaccaacaatgtcatcacagacacagcttttttacatggaactattcgtgccttgacacaggacatgagtctcttggtgcaaaagagggtaaaaacagttgcagaaggggttgcagctgcctttgatatggaagtcgaagtggaactcaaacaaggtggatacctacctgttgagaacaatccagccttggcgcgtgaactgatggacttctttgacgaraaagacggaatcgagttgattgatatcgaacctgctatgacaggcgaggactttggttatctcctttcaaaggttgatggcgtgatgttttggctaggtatcgatagtccctacgctcttcatcaccctcaaatgagtcctaaggaagaagtcttagctattggggtggctgcggtgtctagtttcctgaaaaagaaggcagcagaatarctaat

SEQ ID NO: 3015 - DNA, 803 bp, Streptococcus pneumoniae
  misc_feature (1)..(803): tiling:Spneumo1:WAN024D6V; Cluster includes WAN0243OT spr1 462||15903505|NP_359055.1|1443167..1443964|-|798 bp|Conser ved hypothetical protein|S.pneumoniae|R6|NC_003098.1|ORF|1 11
atgttagcaagtgaagtgatccaagcttatgaagccttttgccctcaggaattttctatggagggagacagcygtggtctgcaaattggcactttagacaagggtatccaaagggtcatggttgccctcgatattcgtgaagagacrgtggcwgargcyattgaaaagggtgtrgacttgattatcgtcaagcacgcgcctatctttcgtcctatcaaggacttgcttgccagccgtccgcaaaatcagatttacatcgacctgattaagcatgayatcgcagtttatgtcagccataccaatattgatatcgttgaaaatgggctcaatgactggttttgtcagatgctaggaatcgaggagacgacttatctgcaggaaacaggtccagaacgtggaattggacgtattgggaatattcagcctcagacattttgggaattggcccaacaggtcaagcaagtctttgacctagatagccttcgaatggtgcattatcaagagratgatttgcagaagcctatttcaagagtagcaatttgtggtggaagygggcagtctttctataaggatgctttggcaaagggggcagatgtctatatcactggtgayatctactaccatactgctcaggatatgctrtctgatggsttgytwgcattggayccaggtcactatatcgaagtgmtttttgtrgaaaaaatcgcarcactycttastcaatggaargarrawaarggstggkmwmtwgakatyttrcctagtcargcatcraccaatcctttccrtcatatctarctaat

SEQ ID NO: 3016 - DNA, 236 bp, Streptococcus pneumoniae
  misc_feature (1)..(236): tiling:Spneumo1:WAN024DKB; Cluster includes WAN0244MB spr0 255||15902299|NP_357849.1|257547..257777|+|231 bp|Conserve d hypothetical protein|S.pneumoniae|R6|NC_003098.1|ORF|110
atgttaggaagtatgttcgttggtctcctagtgggatttttagcaggtgctatgaccaatcgtggagagcgaatgggatgttttggaaaaatgtttctcggttggatcggagcctttctaggtcacttgctctttggaacttgggggccagttttatcaggaacagctattatcccagckrttttaggwgccatgattgtyttagctattttttggagacgaggaagttaactaat

SEQ ID NO: 3017 - DNA, 419 bp, Streptococcus pneumoniae
  misc_feature (1)..(419): tiling:Spneumo1:WAN024C95; Cluster includes WAN0244NY spr0 196|rplP|15902240|NP_357790.1|199908..200321|+|414 bp|50S Ribosomal protein L16|S.pneumoniae|R6|NC_003098.1|ORF|111
atgttagtacctaaacgtgttaaacaccgtcgtgagttccgtggaaaaatgcgcggtgaagcaaaaggtggaaaagaagtagcattcggtgaatacggtcttcaagctacaactagccactggatcactaaccgccaaatcgaagctgctcgtakcgccatgactcgttacatgaaacgtggtggtaaagtttggattaaaatcttcccacacaaatcatacactgctaaagctatcggtgtgcgtatgggatctggtaaaggggcacctgaaggttgggtagcaccagttaaacgtggtaaagtgatgttcgaaatcgctggtgtatctgaagagattgcacgtgaagcgcttcgacttgctagccacaaattgccagttaaatgtaaattcgtaaaacgtgaagcagaataactaat

SEQ ID NO: 3018 - DNA, 458 bp, Streptococcus pneumoniae
  misc_feature (1)..(458): tiling:Spneumo1:WAN024D4Z; Cluster includes WAN0243KO spr1 612||15903654|NP_359204.1|1587345..1587797|-|453 bp|Conser ved hypothetical protein|S.pneumoniae|R6|NC_003098.1|ORF|1 11
atgttagttacgtatccagctttattttattatgacgacacagacggaacagaagcgacttattttgtccatttcccagattttgaatactcagctacacaaggagaggggatttctgaggctttggctatggggtcggagtggctagggataactgttgcagatttgatagagagtgatggagagttacctcagccatcagatatyaatagcttgtctttaattgataatgatccttttaaagatgatgaagatttcgtgtcaacctatgaccttgataaatcttttatttctatggtatctgttgatgtatcagaatacctaggaagtcaggaacccattaaaaagactttgacyataccaaaatgggcagataagttgggacgagaaatgggrcttaacttttctcagactttgacagacgctattgcagataagaaagttcaagcctaactaat

SEQ ID NO: 3019 - DNA, 2264 bp, Streptococcus pneumoniae
  misc_feature (1)..(2264): tiling:Spneumo1:WAN024DXN; Cluster includes WAN0243C9 spr1 916|malP|15903957|NP_359507.1|1895736..1897994|-|2259 bp|M altodextrin phosphorylase|S.pneumoniae|R6|NC_003098.1|ORF| 221
atgttatcactacaagaatttgtacaaaatcgttacaataaaaccattgcagaatgtagcaatgaagagctttaccttgctcttcttaactacagcaagcttgcaagcagccaaaaaccagtcaacactggtaagaaaaaagtttactacatctcagctgagttcttgattggtaaactcttgtcaaacaacttgattaaccttggtctttacgacgatgttaaaaaagaacttgcagctgcaggtaaagacttgatcgaagttgaagaagttgaattggaaccatctcttggtaatggtggtttgggacgtttggctgcctgctttatcgactcaattgctactcttggtttgaatggtgacggtgttggtcttaactaccactttggtcttttccaacaagttcttaaaaacaaccaacaagaaacaattccaaatgcatggttgacagagcaaaactggttggttcgctcaagccgtagctaccaagtaccatttgcagactttactttgacatcaactctttacgatattgatgttactggttatgaaacagcgactaaaaaccgcttgcgtttgtttgacttggattcagttgattcttctattattaaagatggtatcaactttgacaagacagatatcgctcgcaacttractctcttcctttacccagatgatagtgaccgtcaaggtgaattgctccgtatcttccaacaatacttcatggtttcaaacggtgcgcaattgatcatcgacgaagcaatcgaaaaaggaagcaacttgcatgaccttgctgactacgcagttgtccaaatcaacgatactcacccatcaatggtgattcctgaattgattcgtcttttractkcacgtggtatcgakcttgacgaagcaatctcaattgttcgtagcatgactgcctacactaaccacacaatccttgctgargcgcttgaaaaatggcctcttgaattcttgcaagaagtggttcctcacttggtaccaatcatcgaagaattggaccgtcgtgtgaaggcagagtacaaagatccagctgttcaaatcatcgatgagagcggacgtgttcacatggctcacatggatatccactacggatacagtgttaacggggttgcagcactycatactgaaatcttgaaaaattctgagttgaaagccttctacgacctttacccagaaaagttcaacaacaaaacaaacggtatcactttccgtcgttggcttatgcatgctaacccaagattgtctcactacttrgatgagattcttggagatggttggcaccatgaagcagatgagcttgaaaaactkttgtcttatgaagacaaagcagytgtcaaagaaaaattggaaagcatcaaggctcacaacaaacgtaaattggctcgtcacttgaaagaacaccaaggtgtggaaatcaatycaaattctatctttgatatccaaatcaaacgtcttcaygagtacaaacgccaacaaatgaacgctttgtacgtgatccacaaataccttgacatcaaagctggtaacatccctgctcgtccaatcacaatcttctttggtggtaaagcagctccagcctacacaatcgctcaagayatyatycayttratcctttgcatgtcagaagttattgctaacgatccagcagtagctccacacttgcaagtagttatggttgaaaactacaacgttactgcagcaagyttccttatcccagcatgtgatatctcagaacaaatytcacttgcttctaaagaagcttcaggtactggtaacatgaaattcatgttgaacggagctttgacacttggtactatggacggwgctaacgtggaaatcgctgagttggttggwgamgaaaacatctacatcttyggtgaagattcagaaactgttatcgacctttacgcaaaagcagcwtayaaatcaagcgaattctacgctcgtgaagctatcaaaccattggttgacttcatygttagygatgcagttcttgcagctggaaacaaagagcgcttggaacgtytttacaatgaattgatcaacaaagactggttcatgactcttcttgayttggaagactacatcaaagtcaaagagcaaatgcttgctgactacgaagaccgtgacgcatggttggataaagtcatcgttaacatttctaaagcaggattcttctcatctgaccgtacaatcgctcagtataaygaagacatctggcacttgaactaactaat

SEQ ID NO: 3020 - DNA, 1385 bp, Streptococcus pneumoniae
  misc_feature (1)..(1385): tiling:Spneumo1:WAN024B8N; Cluster includes WAN0244RG spr0 070|trkH|15902114|NP_357664.1|76686..78065|+|1380 bp|Trk t ransporter membrane-spanning protein - K+ transport|S.pneu moniae|R6|NC_003098.1|ORF|111
atgttattcaaattatctaaggaaaaaatagagctaggcttatctcgtttatcgccagcccgtcgtatttttttgagttttgccttggtcattttactaggctctcttcttttgagcttgccctttgtccaagttgaaagctcacgagcgacttattttgatcatcttttcactgctgtctctgcagtctgtgtgacrggtctctcaacccttccagtagctcacacctataatatctggggycaaataatctgtttgctcttgattcagatcggtggtctagggctcatgacytttattggggttttctatatccagagcaagcaaaagcttagtcttcgtagccgtgcaactattcaggatagttttagttatggagaaactcgatctttgagaaagtttgtctattctatttttctcacgacctttttggttgagagcttgggagctattttgcttagttttcgccttattcctcaacttggctggggacgtggtctttttagttccatttttctagcgatctcagccttctgtaatgccggttttgataatttagggagcaccagtttatttgcttttcagaccgatttactggtcaatctggtgattgcaggcttgattattacaggcggccttggttttatggtctggtttgatttggctggtcatgtaggaagaaagaaaaaaggacgtctgcactttcatacgaagcttgtaytattattgactataggtttgttgttatttggaacrgcaactactctctttcttgagtggaacaatgctggaacgattggcaatctccctgttgccgataaggttttagttagcttttttcaaacagtgacgatgcgaacagctggcttttctacgatagattatactcaggctcatcctgtgactcttttgatttatatcttacagatgtttctaggtggggcacctggaggaacagctgggggactcaagattacgacattttttgtcctcttggtctttgcacgaagtgagcttctaggcttgcctcatgccaatgttgcgagacgaacgatcgcgccgcgaacggttcaaaaatcctttagtgtctttattatctttttgatgagcttcttgataggattgattctgctagggataacagccaaaggcaatcctccctttatccacctcrtatttgaaaccatttcagctcttagtacagttggtgtaacggcaaatctgactcctgaccttgggaaattggctctcagtgttatcatgccacttatgtttatgggacgaattggtcccttgaccttgtttgttagcttggcagattaccatccagaaaagaaagatatgattcactatatgaaagcagatattagtattggttaactaat

SEQ ID NO: 3021 - DNA, 131 bp, Streptococcus pneumoniae
  misc_feature (1)..(131): tiling:Spneumo1:WAN024B7W; Cluster includes WAN0244JD spr0 361||15902405|NP_357955.1|359527..359640|+|114 bp|Conserve d hypothetical protein|S.pneumoniae|R6|NC_003098.1|ORF|211
atgttatttttatggacdgtgggaaaattgttgaaaaaaataatgcccatcaattctttagtsgtccaagagaagaacgaaccaagcaattttggaacgaattctttcgaatgcgatctatactarctaat

SEQ ID NO: 3022 - DNA, 1059 bp, Streptococcus pneumoniae
  misc_feature (1)..(1059): tiling:Spneumo1:WAN024C7W; Cluster includes WAN023QQI cont ig_1343_6||||6600..7658|-|1059 bp|Glimmer 2.02 orf predict ion|S.pneumoniae|670|WAN01UE6I|ORF|000
atgttcaaaaactttaaaaagattgcattcacttcttcactaattttacttgctgcttgctcaaacaatgcttcaaatacaaatcagtctactgatgaaggaagtgttgataaatctcaagaaattgtaatctatacaaattcggcttctaatggacgtgcagattggttacaaacyaaagcatcagagcaaggatacaatcttcgtttggtagatatttcaggtggagaactagctgaccgtttgattgcagaaaagaataatgctgtggctgatatggtaattggattaaataaattagaatttaaccgtattaaagctgaaaaacttcttgtaaaatactcaccaaaatgggctgatgaagtagatagctctttgggagattctgaagggtattatyyaccaattgtaaatcaaccattarttttgattggtaataaagatgctaaaatgccatccgactggacagattttactgattcatcttataaaggtaaatatggtatttcaaaattaagtacaggtacatctaagaacatctttgcaagtattgtttcgagatataaagatgaaaaaggtgagttaggaatatctgatgaaggttggaaagttgcaaaagcttaccttaaaaatgcacacgtttatgcagaaggtgaagactatatctcttcaattatggataataataatgakctaaaatatagtatgatgtggggatctggtgttctacaaaatcaaaaagaacgtgaatataaattccaagtaatgtcaccaaaagttggtgttccttatgtaactgaacaagttgggattttaaatacaagtaagaagcaagcattattaaaagaatttgtagattggtttggctcttcagaacttcaaaaagaatggtctgataaatttggttcaattccagctaataaaaaagctctagagcaagcaaaagatgaactcaaacagtttgctaatagtgttaaaccacaagaacttgactgggartttatcggraaaaacatcgattcttggattgaaaaagcacagcttgaatttgttgaacar

SEQ ID NO: 3023 - DNA, 264 bp, Streptococcus pneumoniae
  misc_feature (1)..(264): tiling:Spneumo1:WAN024DOW; Cluster includes WAN0242E4 SP11 83||15901048|NP_345652.1|1120864..1121028|-|165 bp|hypothe tical protein|S.pneumoniae|TIGR4|NC_003028.1|ORF|221
atgttcaaagattttatccaatctatttatgaaaaagtttatattataaatttcgaaaaatgctctcaaataccgtgtttgacgagtgaagaattgaaaartcttggaaaatggtatgtctcgactggtaaagaatggatttgtcattcagatgatgakctggaagaatttaaaaatctatttttaaattttatcaatcctgaagaatgggatactatctcctttgattcagattttatgccgtttcaacaatcgctaactaat

SEQ ID NO: 3024 - DNA, 87 bp, Streptococcus pneumoniae
  misc_feature (1)..(87): tiling:Spneumo1:WAN024CAO; Cluster includes WAN023SCO NC_0 03028.1_1238||||927020..927106|+|87 bp|Glimmer 2.02 orf pr ediction|S.pneumoniae|TIGR4|NC_003028.1|ORF|010
atgttcaactgtctgaaagcgaatgattttcagaaaaatttaagaaaaaatagtaaaatagatagagtaacacttatctcaaaggag

SEQ ID NO: 3025 - DNA, 246 bp, Streptococcus pneumoniae
  misc_feature (1)..(246): tiling:Spneumo1:WAN024DU2; Cluster includes WAN023KBD 3131 00_3740||||2020399..2020644|+|246 bp|EGAD orf prediction|S .pneumoniae|R6|NC_003098.1|ORF|110
atgttcaagaaaatgagcaattcctccaggatattgttttacatmtccgtcaacttctgtgacaaacgtatctaccgaaccaaactgtacagtgacactcccgtaaacctctttaaattcctttttaggcaaaagagcaactgtcaatccgttggccaaacgagttcgataaaccwtttcttttacagctggatagtatttttcttcaaaaacaacctttgtcattctattccttccataaagtaa

SEQ ID NO: 3026 - DNA, 339 bp, Streptococcus pneumoniae
  misc_feature (1)..(339): tiling:Spneumo1:WAN024G5P; Cluster includes WAN023LI6 3144 90_1866a||||1007317..1007655|-|339 bp|EGAD orf prediction| S.pneumoniae|R6|NC_003098.1|ORF|110
atgttcaatcgcagaatgcacaaagacatgatggtaaatttcatcatagctagagtaagaaaaggcaccagtttttgtcttcaatcggatgacttgacggataaactcaatactgtcttgacgctcattaatcaagttccagttcacttggttcacactgtcaggagcattatagctattcatcgcacgctctctatcatcatgggtcaactcaccattttcaccagtcgcaaccagtttggtacgaccaaattcttgaccgatttccataaaggccatcccctgcatgagcagattcatggctgtggcagtttcgaccttgcgcatgatttgctctga

SEQ ID NO: 3027 - DNA, 713 bp, Streptococcus pneumoniae
  misc_feature (1)..(713): tiling:Spneumo1:WAN024EU9; Cluster includes WAN0243FT spr1 787||15903829|NP_359379.1|1759722..1760429|-|708 bp|Conser ved hypothetical protein|S.pneumoniae|R6|NC_003098.1|ORF|4 10
atgttcacagaaaaggagaaawggatgaatcacactattatacatgaccgtgcaggtctcaatcaattttacgctaaggtttatgcctttgttggtctgggaatcggactatctgctttggtatcaggccttatgttgacggtctttcagtctcagttggtttacttgttgatgcaggggcgtctctggttgaccattgctacttttgcggagttggctttggttttcgttgccagtagyatggcttcaagaaatagtccagctgctcttccagtatttttactttactccgttttaaacggctttacccttagttttgtggtggctttctatactccgggtacagttttatctgcctttgtatcgagcgcccttctcttctttgtcatggcggcagttggtatctttaccaagaaagacttgagtgggattggtcgagcaatgatggcagctctcattggtttactgattgctatggtagtcaatattttcttggctagtggcttctttgattatatgattagcgtagccatggttttggttttttcagggttgattgcttgggataaccaaaagattcgcctcgcctatgaacaatcacaaggtcgtgtagcgacaggctgggtggtgtcaatggctctcagcatctatcttgattttatcaatcttttcctaagtattctacgtatctttggtcgcaatgactaactaat

SEQ ID NO: 3028 - DNA, 641 bp, Streptococcus pneumoniae
  misc_feature (1)..(641): tiling:Spneumo1:WAN024DL8; Cluster includes WAN0244OV spr0 163|ribC|15902207|NP_357757.1|172039..172674|-|636 bp|Ribo flavin synthase alpha-chain|S.pneumoniae|R6|NC_003098.1|OR F|111
atgttcacaggaataattgaagaaatcggaaaagttgaaagaatacagaaagactctcgtaattgtaaactatcaattaaagcctcaaaaatattaacggatatccatttaggygatagtatagcagtaaatggtatctgtcttacagttactcatttcaaycatcaatcctttacagttgatgtaatgaatgaaacatggagtcgaacagctcttactctattaaaacatggaagtgaggtgaatctagaaagagccttatctgtcaacggtcgacttgggggtcacgtcgttacaggacacattgatggtacaggaaaaatctcgtcaataaaaaaagatgataatgctgtatggyatcaaatcaacacacaaaaagaaattttagatttaatagttgaaaaaggatctattacaattgacggcattagtctgactgtcgctaaagtctccaaagtaaacttttcagtatctgttatccctcataccttgraacaaaccattcttaaragtaaacaagtcgggartacagtaaatcttgaaaatgatatcttaggtaaatatgtgcaaaaactgatggataactctccaaaatcagaaatatckaaggaactattatatcaaaatggattttarctaat

SEQ ID NO: 3029 - DNA, 396 bp, Streptococcus pneumoniae
  misc_feature (1)..(396): tiling:Spneumo1:WAN024GGP; Cluster includes WAN023LWU 3142 49_1026||||535472..535867|-|396 bp|EGAD orf prediction|S.p neumoniae|R6|NC_003098.1|ORF|110
atgttcaggatggacaatagcataagcatctggcagggtttcaggcatggaatgatggtctgtcacaatgacatctactcccatagactgagccaatgcaatagcctcatgaccagcaaccccattgtccaccgtcacaatcaaggaaatyccttcttgctcgataaagtatttataaacactagcattagggccatagccatcggtaaaacgatttggcaggtaaactcggcactcagcaccaagttgttccaaactttccttcacaatagaagccgaagtcatgccatccgcatcatagtctccataaacragaatattttccccttcttcaatagcctgacgaatccgctccactgccttgtccatatcatggagcagataagcatcatgtaa

SEQ ID NO: 3030 - DNA, 1340 bp, Streptococcus pneumoniae
  misc_feature (1)..(1340): tiling:Spneumo1:WAN024GCE; Cluster includes WAN02449Q spr0 708|ciaH|15902752|NP_358302.1|707956..709290|+|1335 bp|Sen sor protein CiaH histide kinase|S.pneumoniae|R6|NC_003098. 1|ORF|111
atgttcagtaaacttaaaaaaacatggtatgcggatgactttagttattttatccgcaacttcggtgtcttcaccctgattttttctacaatgactctgattattttacaagtcatgcattcgagtctttatacttcggtggacgataagcttcatggactgagtgaaaatcctcaagcagttattcagctggctataaatagggcaacagaagagattaaagatttagaaaatgctagggcggacgctagtaaagtagaaataaaacctaatgtcagttccaatacggaagtyattctctttgataargactttactcaacttctttctggaaatcgatttttgggcttggataagattaagttagaaaagaaagaactaggacatatctaccagattcaggtttttaatagctatgggcaggaagaaatctatcgtgtgattttgatggagaccaatattagttcggtttcaaccaatatcaagtatgctgctgtcttgattaataccagtcagttggarcaggctagtcaaaagcatgagcaattgattgtggtcgtgatggctagtttctggattttgtctttacttgccagtctctatctagctagggtcagtgttaggcccctgcttgagagtatgcagaagcaacagtcttttgtggaaaatgccagtcatgagttacgaactccactcgcagttttgcaaaatcgcttagagaccctttttcgtaagccagaagctaccattatggatgtgagcgaaagcattgcatcgagtttggaagaagtccgaaatatgcgttttttaacgacaagcttgctgaacttagctcggagagatgatgggattaagccggagcttgcagaagttccaactagcttttttaatacaactttcacaaactaygagatgattgcttcggaaaataatcgtgtcttccgttttgaaaatcgtatccatcgaacaattgtcacagatcagcttcttctgaaacaactgatgaccattcttttcgataatgccgtcaagtatactgaggaggatggtgaaattgattttcttatctcggcgaccgatcgcaatctttatttacttgtttctgataatggaatcggtatttcgacagaagataaaaagaaaatttttgaccgtttttatcgagtagacaargctagaacccggcaaaaaggtggttttggtttaggattatccctagccaagcaaattgtagatgctctaaaaggaactgttactgtcaaagataataaacccaagggaacaatctttgaagtgaagattgccattcagacaccatctaaaaagaaaaaataactaat

SEQ ID NO: 3031 - DNA, 315 bp, Streptococcus pneumoniae
  misc_feature (1)..(315): tiling:Spneumo1:WAN024B5T; Cluster includes WAN023M5G 3142 86_578||||299144..299377|-|234 bp|EGAD orf prediction|S.pn eumoniae|R6|NC_003098.1|ORF|110
atgttcataacctttttcgatacaggactgggtcatgtcataaacggcatcatagttattggttttaacccagctagtccggtgttcatagagctgactatcaaaaaagaccattttcttctttttctcatcgatgatacgagaatattttcggaaattagaggtcggctgaataataaagccgtctactcccaagagaagcatgctttcaatataccggtcctcactctcttggctgtaattactatttcctatcattacctggtagccattctggctggcgatatcctcaattcccttaacaatttggtttga

SEQ ID NO: 3032 - DNA, 265 bp, Streptococcus pneumoniae
  misc_feature (1)..(265): tiling:Spneumo1:WAN024F4O; Cluster includes WAN023M5J 3142 87_574||||297758..298009|-|252 bp|EGAD orf prediction|S.pn eumoniae|R6|NC_003098.1|ORF|220
atgttcatccttaatgcagacatgtccagagtcttcaaagatcatggacttaggctgccaagctctcytttcaaattcctgcagtcgcttgaccttttctcgccccaggaacaagakgctaagcaaatcaactttaacatccagaccgttaagaaggtcttcctkgttcaaaaccacagcagacaggctcaamatttctgtcgtttctgtagaatcgctatcaccaaaagccaaagtccgtccatctaagcctgtcatcatttga

SEQ ID NO: 3033 - DNA, 258 bp, Streptococcus pneumoniae
  misc_feature (1)..(258): tiling:Spneumo1:WAN024BDF; Cluster includes WAN023KCC 3140 76_3686||||1992312..1992569|+|258 bp|EGAD orf prediction|S .pneumoniae|R6|NC_003098.1|ORF|110
atgttcatctctctccctttctactaccagaactccatacatctatttcctgtatgctatttgaaaatttcctaccagcctatcatctatgataatggaatggatttcatttatccgctactttttgtcaacaacaacgtcaatacaagaaaatcattcatcttgcagcttatactcttcgaaaatctcttcaaaccacgtcagctctatctacaayctmaaaacagtgttttgagcaacctgcggctarctkcctag

SEQ ID NO: 3034 - DNA, 198 bp, Streptococcus pneumoniae
  misc_feature (1)..(198): tiling:Spneumo1:WAN024DDF; Cluster includes WAN02446F spr0 827||15902871|NP_358421.1|828545..828742|-|198 bp|Hypothet ical protein|S.pneumoniae|R6|NC_003098.1|ORF|121
atgttcatcttctacccccaacttctttatcttttcattataccatattttagaagttttccaaaaaggaaaaaagaacatcctattcttcttaactatcttcactatctgcctttctcamgycaaycttattttcaaaatcaattcaaaaaaataastggmtacacaccactwcartatcgraaagaaaaacgttga

SEQ ID NO: 3035 - DNA, 842 bp, Streptococcus pneumoniae
  misc_feature (1)..(842): tiling:Spneumo1:WAN024DVA; Cluster includes WAN0243AL spr1 976|adcB|15904017|NP_359567.1|1967613..1968449|-|837 bp|AB C transporter membrane-spanning permease - Zinc (Zn2+) tra nsport|S.pneumoniae|R6|NC_003098.1|ORF|310
atgttcatgagaatggccaggaggtgggccatgcttagtttattatcttacgactttatacarcgcgcctttttggcggttattgctatgagtcttttctcaccggtattgggaaccttcctcatcttgcgtcgtcagagtttgatgagtgatacccttagccacgtctcactttcaggtgtagcctttggtctggttttggggatttctccaactgtttctactattgccattgtcttgattgcggcggtctttctggagtatctccgtacggtttacaagagctttatggaaatcgrgacagctatcctcatgtcaacaggtctggctgtttctctgattgtcatgagcaagrgtaaaagctcgagttcaatgagtttggaccaatatctctttggttcgatcgtgactatcagtgaagaacaggtcatttccctctttgtcattgcggcggttgttttgattttgacctttctctttcttcgtcctatgtatatcttaacttttgacgaagatacggcctttgtggatggcttgccagttcgtaccatgtccattctttttaacatggtgacaggggtggctattgcccttatgattcctgcagcaggagctcttctggtatcgaccattatggtcttgccagctagtattgccctgcgtctggggaaaaactttaaatcggttatgctgcttgccagtgcgattggctttttgggaatggtagcaggactttacatttcctactatgcagaaacacctgcaagtgcaagtattaccattatttttgtaactgtctttatactaatcagtttagtaagacgttttatcaaatarctaat

SEQ ID NO: 3036 - DNA, 108 bp, Streptococcus pneumoniae
  misc_feature (1)..(108): tiling:Spneumo1:WAN024CON; Cluster includes WAN0246SZ 5613 45-47-9||||||108 bp|DNA Streptococcus pneumoniae phage Dp- 1 open reading frame 243|S.pneumoniae||WAN0246SZ|ORF|000
atgttccaaaattccttttcagccactggtttccatagaaccctccatcgtttcgacctaatacattcgagacgaattcagttagtcctgaagtgtagccgcaagtga

SEQ ID NO: 3037 - DNA, 279 bp, Streptococcus pneumoniae
  misc_feature (1)..(279): tiling:Spneumo1:WAN024F9U; Cluster includes WAN023KND 3138 92_3195||||1706226..1706504|+|279 bp|EGAD orf prediction|S .pneumoniae|R6|NC_003098.1|ORF|110
atgttccaagctactgtttccccattttctttgagraaaacacgggctaccttgcctttrcgytccacatycagtttggcatctccgctatttttcacgatgaccataaggacatcaccgacatgttctttrttataygtaaaaatcattgtttcctttttctcctatttcartcctgctaaaaartcrttratttgytscttrcttttacggtcgcgattgacaaaacgaccgatttccttgtccttttctagaacaacaaggctaggaattccgtaa

SEQ ID NO: 3038 - DNA, 87 bp, Streptococcus pneumoniae
  misc_feature (1)..(87): tiling:Spneumo1:WAN024DPP; Cluster includes WAN023SKZ NC_0 03098.1_1078||||845675..845761|-|87 bp|Glimmer 2.02 orf pr ediction|S.pneumoniae|R6|NC_003098.1|ORF|100
atgttccttcaaataaagaacctctctaatccttttatttctttttattatagcagagggatggagaaattactagcccaaacccaa

SEQ ID NO: 3039 - DNA, 315 bp, Streptococcus pneumoniae
  misc_feature (1)..(315): tiling:Spneumo1:WAN024C67; Cluster includes WAN023M5Y 3131 96_553||||286177..286491|-|315 bp|EGAD orf prediction|S.pn eumoniae|R6|NC_003098.1|ORF|110
atgttcgggatctggtacaaatttttcaatcacatctgtatattttttaatttcctcatcagagaagtattctttcatcagagacaaggtattgttgatggcacgaggtgtaccgatttcataatcccaccagttcccaacaatgctcttttcactattgtagacatgtttatgcatccattccatggaatccctgactgttcgaacgacagtttcatcttgataataacgagaagaaggattggtcacttgcttggccatctcctccaatttccgataagtggcagtcagatttgcagacgttttataatttga

SEQ ID NO: 3040 - DNA, 111 bp, Streptococcus pneumoniae
  misc_feature (1)..(111): tiling:Spneumo1:WAN024COU; Cluster includes WAN0246T6 5613 45-40-2||||||111 bp|DNA Streptococcus pneumoniae phage Dp- 1 open reading frame 236|S.pneumoniae||WAN0246T6|ORF|000
atgttcgtcgcttttagatttagcaatatatcgaggcttcatgtggcgtgtagtaaaccacgaaacatcaatgagatattcacttccattgttgatagaagcaaacgttaa

SEQ ID NO: 3041 - DNA, 290 bp, Streptococcus pneumoniae
  misc_feature (1)..(290): tiling:Spneumo1:WAN024F3V; Cluster includes WAN023M2T 3134 08_733||||383883..384122|-|240 bp|EGAD orf prediction|S.pn eumoniae|R6|NC_003098.1|ORF|220
atgttctacctgaacacgagtattcatctccatgaaatagaaattkctacttgcttcatcaagaagaaattcaatggttcctgcattctcatagccaacaaactctgccgctcgaacagcagcagcacctatttcatgacgcagcgtttttccgattgcaatcgagggactttcttccaaaaccttttggttattcctttgaagagaacaatcccgttcacccaagtgaatcacatgtccatgctcatcacctaggatttgaacctcaatgtgccgagctggatagataa

SEQ ID NO: 3042 - DNA, 240 bp, Streptococcus pneumoniae
  misc_feature (1)..(240): tiling:Spneumo1:WAN024C9U; Cluster includes WAN023M9D 3153 66_358||||191187..191426|-|240 bp|EGAD orf prediction|S.pn eumoniae|R6|NC_003098.1|ORF|110
atgttctacgatattttgaatttcgtaaatcttaattccctgtggaaagcgactatgaatttctgtaataattcgctcagtcagatcattgaggcrtttttcaaccaggggtgtcacatccataaccttgtcagccgccktgtggagagccttgtcaatcttgtccacatcaaatacaacacgtctcccatctcgtttctcgacgaagagagttggcaaaattgtaattttttcttctag

SEQ ID NO: 3043 - DNA, 198 bp, Streptococcus pneumoniae
  misc_feature (1)..(198): tiling:Spneumo1:WAN024D8P; Cluster includes WAN0243TP spr1 286|spnIR-truncation|15903329|NP_358879.1|1280441..1280632 |+|192 bp|Type II restriction endonuclease, uncharacterize d, truncation|S.pneumoniae|R6|NC_003098.1|ORF|111
atgttctactatccaaatagaactcaagctataaaaattcagcaaactttagaaacattgtataacggtattggagggaaatattattatggagattctgcctgggaacatttaagagcagtgaccggtattgatttacttagtattctaacagatattgcaaataaaaaaacaggggtaaaatcaaaaykaactaat

SEQ ID NO: 3044 - DNA, 366 bp, Streptococcus pneumoniae
  misc_feature (1)..(366): tiling:Spneumo1:WAN024FOP; Cluster includes WAN023L46 3138 28_2440||||1302192..1302557|+|366 bp|EGAD orf prediction|S .pneumoniae|R6|NC_003098.1|ORF|110
atgttctgtratraayttrtaggcttcttgaccagcgatagctccatctccaacygctgttgttacttggcgaaggtctttcaagcgaacatctccaactgcaaagataccgtcgactgcagtyttcatgtggytatctgtcacaatccakcctgcctgatcttggatattcaattctttaacaaaatcgctaagagggtccaaaccaacatagataaagacaccaccgaaggcttgytctgtcacttgacctgttttcacattttcaaawacgacwgattctactctgttttcacccttgatttccttcactacagaatcccagataaagctgattttttcattcgcaaaggcgcgatcttgtaa

SEQ ID NO: 3045 - DNA, 327 bp, Streptococcus pneumoniae
  misc_feature (1)..(327): tiling:Spneumo1:WAN024CRR; Cluster includes WAN023KJX 3145 68_3371||||1808313..1808639|-|327 bp|EGAD orf prediction|S .pneumoniae|R6|NC_003098.1|ORF|110
atgttcttcataaaattcaatacgatacacgtcatcgataactccattttcatcgataaaccgtgcttcgttttcaacacccattccgttttcactgataaaccatgggatattaccatattcttccttcacaatcatagcaatatcataaatggctttcggaaaaatttcccaaccacgatatggattcatgcgacgctccrgccattcatactctttgaagtattggtctggcatccagggcgtctgatattcctcaggatttgcttgtgcttgaacacgttttggatggtagtagtttactccaagaaaatcaaccgtatttga

SEQ ID NO: 3046 - DNA, 306 bp, Streptococcus pneumoniae
  misc_feature (1)..(306): tiling:Spneumo1:WAN024E2Z; Cluster includes WAN023KJP 3132 80_3380||||1811835..1812140|+|306 bp|EGAD orf prediction|S .pneumoniae|R6|NC_003098.1|ORF|110
atgttctttccattctttttcgtcaattccttggtctctaaaattcatttggatcccaatacgttcaccgagttcgtagacagcttttgcgtaagattcaaccccttcttctggagtagaagctggaagtccaagcatgcgtgcgatatcttggtatttttcatctgcacggtagtagttgtacttaggccatgttgctgtcttagctggacgtgtaccgttgtaacggataacgtatggaagcaagatagcatttgtacgaccgtggattgtgtggaattgcgcaccaatcttatgggccattga

SEQ ID NO: 3047 - DNA, 402 bp, Streptococcus pneumoniae
  misc_feature (1)..(402): tiling:Spneumo1:WAN024G4T; Cluster includes WAN023LGT 3146 32_1915a||||1036560..1036961|-|402 bp|EGAD orf prediction| S.pneumoniae|R6|NC_003098.1|ORF|110
atgttctttgaaataattgataccaaaaatggtaacctcatccataggaagcaactgrtcyttgatagctccagtcaatgccaacttaagtgcaacagtttcatcctcaaacttaggccagagaatccccggtgtatccaagatttccagrtctttattggttttaagccattgttgaccttttgtgacccctggcttgtttccaacaacagcaatctttttaccagccaaacggttcatcagagtkgatttaccagcgtttggaatcccgataatcatggtacgcaaggtttcaatctgaatcccacgttctttctggcgagcaatcttatcagccatgagcttcttggccgcatctgttacaacttttacagtcacttgctctttggagttgatagctag

SEQ ID NO: 3048 - DNA, 936 bp, Streptococcus pneumoniae
  misc_feature (1)..(936): tiling:Spneumo1:WAN024D2O; Cluster includes WAN0243GB spr1 769||15903811|NP_359361.1|1736592..1737521|+|930 bp|Hypoth etical protein|S.pneumoniae|R6|NC_003098.1|ORF|111
atgttgaaaatattaaataactctgtcatatatttatgtttgattccgttattgttcctattattgataatttttccaaatgattcattaatctattattttcgattgattttaatttcgttaatatcaattacattacatgaactaggtcattttttagtgggaagatgtttatcttataaactagagatgcttgctactccctttttcttctatttcagaaaaaaaatatatttcaaatttccagtgttattagcattcggttattgtcaaatgagtaatagaaacattactaatgaaaaaaatagtgataggaatttggtgttctacttctttgggggaggtggagctaacctaattgtcgcaatattagcacttttgggatttgtgccgtacgcatcagaattttttattttgaatataattctttttctagttacggtatgtttaccaattgatggaacagatggcaatgctattagagagatagttttgtattcaaaagattcaaaaacatatcagagattctttgcgaacagtctctataataatccttatataacaatcgacgattttgcaaaattaacctctaaagaaaaatcttttttttcaaaatttgaaaaatgtttgataaacctttactttgaagtgaaaggtgaagggtcagcatttacaattgctaatcatgaagtttttgattcaaatattcaggaaaatattatccatgagtactataaattactacataaatcttctgattggattattccacagaacttatctttagaagaagttgtttttaccttgtcaaactatatttactcgaaaaataataaatatttagaaaagattaagtatctaaagaaattagtagattttagacaagaagaaattatcgactttattttgaacaaggaggaagtattgykaactaat

SEQ ID NO: 3049 - DNA, 1092 bp, Streptococcus pneumoniae
  misc_feature (1)..(1092): tiling:Spneumo1:WAN024ERF; Cluster includes WAN02422U SP16 17||15901454|NP_346058.1|1518294..1519379|-|1086 bp|PTS sy stem, IIC component|S.pneumoniae|TIGR4|NC_003028.1|ORF|010
atgttgaaacacttaaacttaaaaggtcacttattgacagccatttcctatatgattccaattgtttgtggtgcaggattcttagttgccattggtttagcaatggggggtggtgttcctgacgctcttgtagcaggaaaattcactatctgggatgctttagcaactatgggtggtaaagcccttggtctcttgccagttgttattgctacaggtttgtcttactcgattgctggtaarccagggattgcaccaggttttgttgttggtctaattgccaattctgttggttcagggtttatcggtggtatcttgggaggttatatagctggtttcttggttcaagcgattrttaaaaaggtcaaagtaccaaactggattaaaggtttaatgccaaccttgattattccttttgtagcctctttggtaagtagtttgattatgatttatattattggagcgcctatcgcagcctttaccaactggttgacgarcttattacaaagcttgggaagtgcttcaaatggtttgatgggggcagttattggarttctcagtgctgttgactttggtggcccacttaataaaacagtctatgcgtttgtgttgactttacaggctgaaggtgtgaaagaaccattgactgctttrcaattggtgaatactgctacaccagttggatttggattggcctattttatcgcgaaattactcaaaaaaaatatctatactcaagaggaaatcgaaacattgaaatcggctgttcctatggggattgtcaatattgttgaaggtgtaattccgattgttatgaataacttggttccaggtctcattgcaacaggtatcggtggtgctgttggtggtgctgtttctttgacaatgggtgctgattctgcygtgccatttggtggagtgcttatgttaccaaccatgactcgtccagtagctggtatttgtgcyttgttagctaacattgtagtcacaggacttgtctacgcgattttgaaaaaaccaataaaacatgcagaaccagttatgactgttgaagaagagattgatttgtcagatattgaaattttgctaactaat

SEQ ID NO: 3050 - DNA, 290 bp, Streptococcus pneumoniae
  misc_feature (1)..(290): tiling:Spneumo1:WAN024F5D; Cluster includes WAN0243HL spr1 723|groES|15903765|NP_359315.1|1704041..1704325|-|285 bp|C ochaperonin GroES|S.pneumoniae|R6|NC_003098.1|ORF|110
atgttgaaaccatyaggggaccgtktgstcttaaaartagaagamaaagaacaaacygttggrggctttgtyctygcaggytcagcccaagaaaaaaccaaaacagcycaagttgtggctactggacaaggtgttcgtaccttgaacggtgacttggttgctccaagtgttaaaactggagaycgtgtcttagttgaagcccacgcaggtcttgatgtcaaagatggcgatgaaaagtayatyatcgtaggcgamgctaacatyttggcaatcattgargaatarctaat

SEQ ID NO: 3051 - DNA, 737 bp, Streptococcus pneumoniae
  misc_feature (1)..(737): tiling:Spneumo1:WAN024D43; Cluster includes WAN0243K6 spr1 630||15903672|NP_359222.1|1603509..1604240|-|732 bp|Hypoth etical protein|S.pneumoniae|R6|NC_003098.1|ORF|111
atgttgaatcaggatctctttgattcgcttgaggcacaaaaaattgtagatactttgatgaaagggcaaaaagattatgtagatgaacgtctagaaaaaagagagacaatgatagtgtcgaatggttatgcatggacgcgacctaatcatattgatactgcatttgcatcagcagatttgtttgagtataaattacaattagcaggacagacttggggatatttagaatttgaaacaaatacagaaaaatatgggaaagtattgttaattataaagggtaagaagcgacttacraaccaatttcctttggtacaaaaaaataagagtggctacttatttgaataygctcagrtgratacactttatcttaatcaacattcttcctacaaaaatgatgaarrtagtcattcctttccaattcagatggagttagtttctgatgaaatgattcaagaaattgaacaagctactaaaaattcgaatatcgaaaaatttatgattttaacttatgaggcggactcagaaaacaatattatatctgtagatgttgttatgcctgatgcacgaactggtcagttacacttgattcaagatttgtctgagtatattcaatcaagttcgtaccatttcgaagaagctaaatatcaagatattcctaatttttcagaattatcggaaacagaagattttgaaattattccaagaatagaaaaacaagaaggtcaaaagtarctaat

SEQ ID NO: 3052 - DNA, 291 bp, Streptococcus pneumoniae
  misc_feature (1)..(291): tiling:Spneumo1:WAN024D6I; Cluster includes WAN023L04 3151 72_2616||||1395841..1396131|+|291 bp|EGAD orf prediction|S .pneumoniae|R6|NC_003098.1|ORF|110
atgttgacacggtcaccaatrccagcatctgtcgcaagmtcgactgacaagtctttttcgactggtacagattcacctgtcaaggctgcttcttcaattttaagagagttggcttctatcaaacgtaggtccgctggtaccacgtcacctgcttcaagggcaacgatatcgcctggtaccaattctttagagtcaatctctgccatgtgtccatcacgaagaacgcgggcaactggactagacatggatttgagggcttcaatagcttcttcagcttttccttcttggtaa

SEQ ID NO: 3053 - DNA, 267 bp, Streptococcus pneumoniae
  misc_feature (1)..(267): tiling:Spneumo1:WAN024GMP; Cluster includes WAN023M1X 3145 48_776a||||402096..402362|-|267 bp|EGAD orf prediction|S.p neumoniae|R6|NC_003098.1|ORF|110
atgttgacgagttgcttcataggtcaactgacctaccttttgcacagcaatcccatcagcaaatttatcaatttccttgagttttactggacctccagcctcaaaggcagctttcatggaacgcgctccattcgcctctactccgataacctcaatctctggacttgtttccttgatataggtagaaaccccggcaatgagaccgccaccaccaacaggaaccaagacagcatcaaaatcaatcgattcttttcgagcttcttctaa

SEQ ID NO: 3054 - DNA, 225 bp, Streptococcus pneumoniae
  misc_feature (1)..(225): tiling:Spneumo1:WAN024DWP; Cluster includes WAN023KEF 3130 83_3597||||1932826..1933050|+|225 bp|EGAD orf prediction|S .pneumoniae|R6|NC_003098.1|ORF|110
atgttgactttctggcacacgtacattttcactacacatattgtagtaacgaagcacatagccttcttcattttcagctaccttaaaggctgttggacaaacttgcggtatgctgagaacagaatggctcaagaggctaccagtcgcaaccacgcttccttcctgtctagcaagctgaaggctggtaaacggtgtctgcaaggctttggcacgacgataggctga

SEQ ID NO: 3055 - DNA, 291 bp, Streptococcus pneumoniae
  misc_feature (1)..(291): tiling:Spneumo1:WAN024GBQ; Cluster includes WAN023LQ8 3140 44_1380a||||731294..731584|-|291 bp|EGAD orf prediction|S. pneumoniae|R6|NC_003098.1|ORF|110
atgttgagtcccatgatttcccagtgtccagtcatagtatccttaccaagagatacttcctctaattttgttgcatatccagttggattgctttcagctgctacagtcttaagaggagtttcacgaggaatatttccaagacctattttagccatgtttgggacattcaaaccaactgtttttgaaatgtgtcccagtgtgtcagaagctccatctggaacccctgcattgacaaagttattagcatctggtgctgcaccgattcctacagaatccagtaccaccaaatga

SEQ ID NO: 3056 - DNA, 249 bp, Streptococcus pneumoniae
  misc_feature (1)..(249): tiling:Spneumo1:WAN024C8O; Cluster includes WAN023M8T 3143 00_396||||204476..204724|-|249 bp|EGAD orf prediction|S.pn eumoniae|R6|NC_003098.1|ORF|110
atgttgattggagtgttagaaccaagtgatttagatgtaatatctgccacacctgccaattccacaacggcacgaactgcaccaccagcggcaactccagaaccttctacagcaggtttcaacaatactttagctccaccgaattctgaaagaacttcgtgtgggattgttgttccaaccataggaacttcgatcaagtttttcttagcatcatctactgctttacggattgcttctggaacttcttga

SEQ ID NO: 3057 - DNA, 99 bp, Streptococcus pneumoniae
  misc_feature (1)..(99): tiling:Spneumo1:WAN024CMN; Cluster includes WAN02431K SP02 70||15900204|NP_344808.1|247025..247117|+|93 bp|hypothetic al protein|S.pneumoniae|TIGR4|NC_003028.1|ORF|020
atgttgcaaaagtacacacagatgatatctgtcaccaagtgtatcatcaccaaaaataaaaaaacacaggagaatgtagatgcctacaatctaactaat

SEQ ID NO: 3058 - DNA, 324 bp, Streptococcus pneumoniae
  misc_feature (1)..(324): tiling:Spneumo1:WAN024C8G; Cluster includes WAN023M8P 3132 22_404||||207966..208289|-|324 bp|EGAD orf prediction|S.pn eumoniae|R6|NC_003098.1|ORF|110
atgttgcaagtccgataccataaacataagtcaatgagattactacgcgtttgtcatttggaatatcaactccagcaatacgagccatgttttctcctttctatcttatccttgacgttgtttgtgttttggatttgctgggcaaattaccataacacgaccattacgacgaataactttacagtattcgcaaattggtttgaccgatggtcttactttcatttcttatccctccaagtttttcgattatttaaagcggtaagtgatacgtccacgtgtcaagtcatatggactcatttcgacagtaacacgatctcccgctaa

SEQ ID NO: 3059 - DNA, 288 bp, Streptococcus pneumoniae
  misc_feature (1)..(288): tiling:Spneumo1:WAN024E2L; Cluster includes WAN023KJF 3148 05_3394||||1819133..1819420|+|288 bp|EGAD orf prediction|S .pneumoniae|R6|NC_003098.1|ORF|110
atgttgcctcctttggatataattgttatctttgagattagtataccacccttcaaaacactaaaaaagaccaagaaaaacacaggtttgtgttcatcattggactgtccttcaaatatcttccaaaaaagcttgaactactatttcttgatttataagtgtttgaacctcttcttggaacttactagccaacttgctgtctacaatataagacgaaataagactagaaagattttcactgaaacttttgctctyattacgaaatatattgtgtttaagatagtctag

SEQ ID NO: 3060 - DNA, 84 bp, Streptococcus pneumoniae
  misc_feature (1)..(84): tiling:Spneumo1:WAN024CII; Cluster includes WAN023TYP AX57 1765.1_244||||208893..208976|-|84 bp|Glimmer 2.02 orf pred iction|S.pneumoniae||AX571765.1|ORF|000
atgttgcgtcaggaccacttgatgaaaaaaagtttaaaaaaacttaaaaatcttcaaaaaagtgttgacaagcgaaagcagttg

SEQ ID NO: 3061 - DNA, 348 bp, Streptococcus pneumoniae
  misc_feature (1)..(348): tiling:Spneumo1:WAN024B2O; Cluster includes WAN023IUP 8557 0_2490||||1407616..1407957|-|342 bp|EGAD orf prediction|S. pneumoniae|TIGR4|WAN01UC25|ORF|010
atgttggaacaggcattcaaagagaagcactatgagaatacgattctccatagtgaccaaggctggcaataccaacacgattcttatcatcggttcctagagagtaagggaattcaagcatccatgtcacgcaagggcaacagcccagacaacggcatgatggaatctttctttggcattttgaaatcggagatgttttatggttatgagaagaactttagatctttagaaaaccttgaacaagctattgtggactacattgattattacaacaacaagagaattaaggtaaagctaaaaggacttagccctgtgcaatacagaactaaatccttcggactaactaat

SEQ ID NO: 3062 - DNA, 386 bp, Streptococcus pneumoniae
  misc_feature (1)..(386): tiling:Spneumo1:WAN024CZJ; Cluster includes WAN0243DW spr1 856||15903898|NP_359448.1|1831058..1831438|-|381 bp|Hypoth etical protein|S.pneumoniae|R6|NC_003098.1|ORF|111
atgttggagcaagctcgtttgaaagyggagcagcaagcaatcaagaatatccagtttttggagcaagatttaccgaaaaatcccttggagaaagagtttgattgccttgctgttagtcgggttcttcatcatatgcctgatttggatgcggmtctctcactgtttcatcaacatttgaaggaagatgggaaactcatcattgctgattttaccargacagaagctaatcatcatggatttgatttagctgaactggaaaacaagctaattgagcatggtttttcatctgtgcatagtcagattctctatagygctraagacctgtttcaaggraatcactcagaattctttttaayagtakcccaaaaatcactcgcctarctaat

SEQ ID NO: 3063 - DNA, 350 bp, Streptococcus pneumoniae
  misc_feature (1)..(350): tiling:Spneumo1:WAN024G3J; Cluster includes WAN0243ZI spr1 077|lacX-truncation|15903120|NP_358670.1|1074817..1075161| -|345 bp|Function unknown, truncation|S.pneumoniae|R6|NC_0 03098.1|ORF|111
atgttggatttccaagatagaagtccatggctagagggacaaaaagaaatagatcttagttatgmtcttttcagcamagatgcagtgactttggatgaattgcaatctcgaacaattgcccttcgttctcttaaacatgatargggattgaaagtgcattttgcagaatttccaaacctcatcatctggtcaactttgaacaagggacctttcattacctttgaaccatggtctggcttgtcaacatyccttgaagaaggagatcatttagaagataagaagaatgtttgtctcttagaagccaatcaggttgaagaattagggtttgagatagaagttttataactaat

SEQ ID NO: 3064 - DNA, 231 bp, Streptococcus pneumoniae
  misc_feature (1)..(231): tiling:Spneumo1:WAN024ETO; Cluster includes WAN023KLK 3145 80_3289a||||1761837..1762067|-|231 bp|EGAD orf prediction| S.pneumoniae|R6|NC_003098.1|ORF|110
atgttgggcagcaaagtagatagcagagaagaaaggcatttgaaggaggatagggaaacatcctacaccgccaaacatgctgataccgtgctctttttgagcagcaaagagagcttgttgggcttcgagtttttcttcttgagtagtcgcttctttgagacgcgtttggtgtggctcaaggacgtgcttgagggcgttcatcttttcagagtgaagcgttgccttccatga

SEQ ID NO: 3065 - DNA, 84 bp, Streptococcus pneumoniae
  misc_feature (1)..(84): tiling:Spneumo1:WAN024CEZ; Cluster includes WAN02417P |LP- 1||BAC77344.1|||84 bp|leader peptide|S.pneumoniae||AB11145 5|ORF|000
atgttggtattccaaatgcgtaatgtagataaaacatctactgttttgaaacagactaaaaacagtgattacgcagataaataa

SEQ ID NO: 3066 - DNA, 549 bp, Streptococcus pneumoniae
  misc_feature (1)..(549): tiling:Spneumo1:WAN024FHM; Cluster includes WAN0243O9 spr1 482||15903525|NP_359075.1|1459595..1460017|+|423 bp|Hypoth etical protein|S.pneumoniae|R6|NC_003098.1|ORF|221
atgttgtccactcgtttcacggggaaattaagcaaatggggaaattactttrgtattgttaataccattttgtccggtgctattgattatatccttggaaataaggcgrccatcattacctatcccgtcaccttmctcatttatacctttgctataaagaartggraagcttcgcaagaaggcagacccaaccaaatragccaaaaacaggtaaaattggcggycatcatcatttccatcatcgccttcctctttgcctttgtraccaactatatcggatatgrgggcaagatgaatctccttgcctacgtaacaactattgcctttgcactrtccctcattgccaatgctttgaatgcattrvmahkrrsrrmtcagtggggcttttggttgatttacaatttcgttcagctgacaaaagctggtattcaaggaaacttcgccaatatcggtaaatacatcttttatatcctcaatgcaatcggagctttatttgtctggaatgatgaagaagttagatammtarwaggaaactcaaataaagaatac

SEQ ID NO: 3067 - DNA, 360 bp, Streptococcus pneumoniae
  misc_feature (1)..(360): tiling:Spneumo1:WAN024GF8; Cluster includes WAN023LUJ 3147 04_1127||||597969..598328|-|360 bp|EGAD orf prediction|S.p neumoniae|R6|NC_003098.1|ORF|110
atgttgttcttcaaacagcaagttcttctggctgatttttccagtagtaatcagctggaaacgagcttgtttacgatagagaacagctgccttttgatgaacctckcggtattcagattsccakgtgctatcccawgtaatmcctccgccaactccataratggcttsmccttkrtgmagttgaatrgtwcgratrgcmacattaaaaatccgtcgtccatttggawgcaagagaccaatcgttccacagtagactccacgcggttgwggctccaagtccttgataatctccatwgtcgcaattttcggwgcwcccgttatrgawccacaaggaaagagwgagcgaaaaattgtaactaa

SEQ ID NO: 3068 - DNA, 237 bp, Streptococcus pneumoniae
  misc_feature (1)..(237): tiling:Spneumo1:WAN024GAP; Cluster includes WAN023LP2 3145 16_1449||||765280..765516|-|237 bp|EGAD orf prediction|S.p neumoniae|R6|NC_003098.1|ORF|110
atgttragcaattccattttttcatctagcttagtaataaactcacgaactgaaatcttctcatcatcttctttacccgcattcatagcggcacgaagaaactcagcattggtaattccagggatttctgatgggtattgcatagcaaggaaaagtcccatacgcgcacgctcatccacttccaactcaaggatgtttacgccatcaaacaaaacttcacctttagttacttcatag

SEQ ID NO: 3069 - DNA, 102 bp, Streptococcus pneumoniae
  misc_feature (1)..(102): tiling:Spneumo1:WAN024D55; Cluster includes WAN023QL4 cont ig_1313_23||||12160..12246|-|87 bp|Glimmer 2.02 orf predic tion|S.pneumoniae|670|WAN01UEA3|ORF|001
atgtttaaaactcctttgtttaatgctaactttattttactccttataaaagagaatgtcaagaaaaatgattgcgcacgcaacttttttttaaaatcatct

SEQ ID NO: 3070 - DNA, 620 bp, Streptococcus pneumoniae
  misc_feature (1)..(620): tiling:Spneumo1:WAN024G7T; Cluster includes WAN02443K spr0 930||15902974|NP_358524.1|915523..916137|+|615 bp|Conserve d hypothetical protein|S.pneumoniae|R6|NC_003098.1|ORF|111
atgtttaaacgaattcgaagagtgcttgtactagcagtcttcctttttgctggctataaagcttaccgcgttcatcaagatgtcaaacaagtcatgacctatcaacccatggtgcgagaaatvttgagtgaamaagacaccccagcaaacgaagagcttgtgcttgctatgatttatactgaaacaaaaggaaaagaaggcgatgttatgcagtctagtgagtctgcaagtggttccaccaacaccatcaatgataatgcctctagcattcggcaaggcattcaaactctgacaggcaatctctatctggcgcagaagaagggkgtagatatctggacagctgttymagcctataattttggacmtgcctatatcgatttwatcgcccaaaatggcaaggaaaataccytggctctagccaaacagtactctcgtgagactgttgcccccttgcttggtaatasgactggaaagacttatagttatattcaycccatttccatttttcacggtgcygaactctatgtaaatggaggaaaytattattattctagacaggtrcractyaacctttacatcatcaaatgtttcactctcttttcaacatctggctarctaat

SEQ ID NO: 3071 - DNA, 333 bp, Streptococcus pneumoniae
  misc_feature (1)..(333): tiling:Spneumo1:WAN024CWQ; Cluster includes WAN023LR4 3146 89_1333a||||705399..705731|-|333 bp|EGAD orf prediction|S. pneumoniae|R6|NC_003098.1|ORF|110
atgtttaacttcgacgtggacagactgaacgccatcagtagcgtcacgttcaagagcaagaggtactccacctgtttggaaatcttcaaagatattccagcttggttcgatggtatccacacagacgtattccatcatattagcgaaactttcattgagccaaaggtcatcccaccatttcatagtcacgaggttcccaaaccattggtgagccaattcatgggccacaacaagggcaacttgttgacggctagcaaatgtagagttctcatcgacaaccaagtaaacttcacggtaggtcacaagaccccagttttccatagcaccagctga

SEQ ID NO: 3072 - DNA, 1157 bp, Streptococcus pneumoniae
  misc_feature (1)..(1157): tiling:Spneumo1:WAN024D4O; Cluster includes WAN0243K7 spr1 629||15903671|NP_359221.1|1602343..1603494|-|1152 bp|Conse rved hypothetical protein|S.pneumoniae|R6|NC_003098.1|ORF| 111
atgtttaatggtcgggtattgaaagaattacgrctgttaaatggtttaagtagagcagaattagctcagagaattaatttaacggaacaagccatttggcagtttgagtccaacgaaacgaaacctaaattatcaaccaaaatgcatttggccaaccaatttcatgttgatttaacttattttgaacaggaagaagagagcattcgatttgattyttctgtaattgcctttagaaatgcagacctagcaacacggaaaacaatagatattcaaactatgtatttacataaggtagatagtttgattgattattttgaaagttttgtaattatacctaatattayaattcatgacytaagtaatgtagtgagtgaatcttatcataagggagaatccattgaggaattggctctttatgccagggaaaaattaggtatttcaaaagataatcatgatttgctttataaattagaacgttcaggcatctatatcgtggaacgattaattaatgrccaagctgatgcttatagcgcatggtcaaaattgggaagaccttatattgtgttrggaacgaataaatcatctgtacgtmgaaattttgacttagctcatgagctaggacatattcttttacataaatataaagatatgaatraagatggcgatcgtttggagcaagaagcaaattattttgcatcatgttttttattgccaaaagaagagtttttagtcaaatttgaagagagggttggcaagcgtgtcagcaatcctgatagttatattttattgaagtcggatttgaatgtttcgatacaggctttagagtatcgagcttttaagttaggattattgactccaaagcaacattcttacttttatcgtcaaattgcgcaaaaaggttacaaaatgattgaaccyttggatgatcaaatttttgttaaaaaaccaagcaaagtaaagagtattctggacgtcgttttgagtaatcatctagtcagtctagcgactataatgtctaaacaaagtattcgtttacagtttataagcgaaatattttcagtcgaaatgaaattttttgatcagtatcaagaagatagaagaacagatcgatttgataacatcatccctttgtacaaaagaaataatttataactaat

SEQ ID NO: 3073 - DNA, 273 bp, Streptococcus pneumoniae
  misc_feature (1)..(273): tiling:Spneumo1:WAN024BHJ; Cluster includes WAN023RWQ cont ig_1609_13||||8968..9237|-|270 bp|Glimmer 2.02 orf predict ion|S.pneumoniae|670|WAN01UDCD|ORF|000
atgtttacaacattttttaagaaaaatcacgacaatagtgatgtatttaaaaagctgattcatagactatctgatatgtctgtccaagatcttgaaaaaatagaccgactgytagatatcattttcactccaratcaagaatcasaacaastaaaaacagaakcaayttatagrgaagaaactttggacgacacattaaaggaagctaagaatcaacttcataaggaacaattggaraagaatttagagagatttaggaaaracgsaaggaag

SEQ ID NO: 3074 - DNA, 678 bp, Streptococcus pneumoniae
  misc_feature (1)..(678): tiling:Spneumo1:WAN024FLO; Cluster includes WAN023OVY pne6 9_17||||12892..13569|+|678 bp|Type 31(1) capsule operon, G limmer 2.02 orf prediction|S.pneumoniae||WAN01UCDA|ORF|000
atgtttaccatatatagagcyatgaaaaaaataattataatyattttgtckcttcccaagattttttatataaatttwaaatgycttccgttgaatcaggcrgttaaacytcctatatatgttcattttaatactcgattaatgattargggagacataaaaatcattgatactcatttatcacgttttactatyattttgggraaagatggctctaatcatatctctcctcatgagagtagattatttatttatgatgggggscaattaattctagggagaaatattctattatctagtggatttaatttgtgtatagagcaaggaggtacggttaaattaggagataatgtctcttttaacagaaattcttcgatcttttgtaaaaaacaaattaatattggtaaaaatagtttrtttggttggaactgtartttacgtgataayaatggacataggatctattatcaggrsaactgtattaagagtgargragttattgtaataggagagaattgctggataacagcagactcartcattcttaaaaatagtgttcttcctttttctactgtagttgctacaggtagtttagtaaayaaagagtttaatcagagtaacattttgatagctggaaggcctgctagaattattagagabgatataaaatgggaaaga

SEQ ID NO: 3075 - DNA, 1179 bp, Streptococcus pneumoniae
  misc_feature (1)..(1179): tiling:Spneumo1:WAN024FN3; Cluster includes WAN023P70 pne5 3_25||||14293..15471|+|1179 bp|Type 25F capsule operon, Gl immer 2.02 orf prediction|S.pneumoniae||WAN01UCCQ|ORF|000
atgtttatgaaaattttaataaccactcatacttatcttcctaataaagatggtgttcaatttgttaatcaatatttagcagaaggattggttaaaarrggwcatcaagtaacrgtgctgacctattgttatccatcacgtacaagggtacctagagaagtgataaatggtgttagagtcattcgttggaatgctcgaacaagctgtactttccataaaggagaaaaattagcttatcaaaayttcatcttaaaytcccaatcrgattatgatgttttagtgaatgttggracacagactgctttaacagattggttatttccgatattttctcagmtaacaattccraaagtcttatatattcattcgatatgggatttcaactggytgcattggcatagacaatcattcaagcgatttgttgctaaarcttgggcaaatgtacgmtggaaatattattattggamamagrctkytatctttaarcaatatmatgaagtrattcagctrcacccaaaagattatagtgtggctttytttaaagaaaaatatgryatagaaagtcagattttagraaatgcygctgatgcttcyttttttcaaaataraaaygctrtcaaaaagcaatcttacattgtaaatgtttctaattttaatgatckaaaaaatcaraagaaagcggttgagtattttttgaaaagcaatcttycaartgartggaagytcgttttagttggttcagaaaagaatsaktatttacaaagystacaarmttttgaaaaagaactccgaaaccaattaggtatcacttcwggtaaagaaatagartatcgcatcggaytgtcaagagaagaagtygtaaaaactgtaaaagaagcytctttttgtttamtgacragtataygggaagcttttccaatttcmttaattgaagtratggcwgcaggaattccwtttatctcttctgatgtaggaattgtcaactatttgtctggaggaatcactgcttgtagtgatcaagaatttataagagctattgaagagtttgcyasttrtccmgarrtyagaaatcaatatggcaaaaagggrcaaatggaagcraaagaacattatcaagtrgatgataaagtraaagagyttgaarctttgttacaaaagktcgtaaaggaagaaraagak

SEQ ID NO: 3076 - DNA, 213 bp, Streptococcus pneumoniae
  misc_feature (1)..(213): tiling:Spneumo1:WAN024DQA; Cluster includes WAN023V1Y AX57 1761.1_391||||326247..326459|-|213 bp|Glimmer 2.02 orf pre diction|S.pneumoniae||AX571761.1|ORF|000
atgtttatgttggtaattaatggctgcggttttgtctttctcaaagacagtcttggtaaggtcaatatgattaatagctacgattgcgacggtgtagtaaatgatatcagccagttctctggcaagttcctcgttcgaatcctatcccttcttttcgaccagagcgcctattcaaaacctcgactacttctccgacttcctccactaacttca

SEQ ID NO: 3077 - DNA, 267 bp, Streptococcus pneumoniae
  misc_feature (1)..(267): tiling:Spneumo1:WAN024B5Q; Cluster includes WAN023LT8 3143 28_1204a||||637525..637791|-|267 bp|EGAD orf prediction|S. pneumoniae|R6|NC_003098.1|ORF|110
atgtttattaataaaccaccagcatactttaacaaatcctctaaatctgctggaaactcactcatggctggtgaggcgcccagtgctactaatccatttgctgtgaaattttttactacatcattggttatacaaatgaccaatggtgctttttcttttaataattttaaacttgtcatattgaaatccttccttttcactttatacgatctactratttcgatttatctytakctttcgttaagaaatttttttcatttacgttga

SEQ ID NO: 3078 - DNA, 986 bp, Streptococcus pneumoniae
  misc_feature (1)..(986): tiling:Spneumo1:WAN024F4K; Cluster includes WAN0244KX spr0 305|mraY|15902349|NP_357899.1|304515..305495|+|981 bp|ndec aprenyl-phosphate-UDP-MurNAc-pentapeptide phospho-MurNAc-p entapeptide transf...|S.pneumoniae|R6|NC_003098.1|ORF|111
atgtttatttcyatcagtgctggarttgtgacatttttamtaactttagtagraattccggcctttatccaattttatagaaaggcgcaaattacaggccagcagatgcatgaggatgtcaaacagcaycaggcaaaagctgggackccwacwatgggrggwytkgttttcytvattrctkcwgttktrgtkrstttcyttytygcyctwtttwswarhcaaytsasyaataatgtkggwatgattttrttyatcttggtcttgtatggyttrrtcggatttttrgaygacttyctyaaggtcttycgwaaratcaatgaggggctwaatccyaagcaaaaattagctcttcagcttctaggtggagttatcttctatcttttctatgagcgyggwggygatatsctktcygtctttrgttaycmagtkcattwgggatttttctatattdtyttcgctcttttctggctagtcggtttttcaaaygcagtmaacttgacagacggtrttgacggtytagctagtatttccgttgtgattagyttgtytgcctatggagttattgcctatgtgcaaggtcagatggatattcttctrgtgattctdgccatgattggtggtttgctcrgtttcttcrtctttaaccataagcctgcyaarrtctttatgggwgatgtgggaagtttggcyytmggtggratgctggcmgckatytctatggctctccaccargaatggactctcttgattatcggaattgtgtatgtttttgaaacaacttckgtyatgatgcaagtcagttatttcaaactgacaggtggtaaacgtattttccgtatgacgcctgtmcatcaccattttgagcttgggggattgtctggtaaaggaaatccttggagcgagtggaaggttgacttcttcttttggggagtkggdcttctagcaagtctcctgaccctmgcaattttrtatttratgtaactaat

SEQ ID NO: 3079 - DNA, 635 bp, Streptococcus pneumoniae
  misc_feature (1)..(635): tiling:Spneumo1:WAN024DFU; Cluster includes WAN0244BW spr0 630|thiE|15902674|NP_358224.1|638397..639026|+|630 bp|Thia min-phosphate pyrophosphorylase|S.pneumoniae|R6|NC_003098. 1|ORF|111
atgtttcataaagaattactaaaactatattttatttgtggaacgactacttgccaaggaaaaaatctatatacagtcgttgaggaagccttaaraggtggtataaccttatttcaatttcgagaaaaaggtgagrgtgctttagaaggcttagaaaaacttgagctagctatccaaattaaagaactttgtaaaaaatacaatgtkccrtttatcgttaatgaygatatmgatttrgcaatggaaattgacgcygatggcgtacatgtaggtcaagatgatattggtgttgatgaaattagaaaattgatgccagataaaataattggtctttctataaraaacgargaagaatttcaacaatcaaaagttgaatatgtagattatgtwggtgttggkcctgtatttgrtacccagtcaaargatgatgctggtggtrctataggttatgaaggtsttraattgatgagaaaactattgccacaaatgccyttagttgcaattggtgggatacagacgaaacatattaaagacattatraagaccaatrtkgayggcgtttcaatcatttcggcaatatcgtatgcaaaaaatatagaaaaaactgttcgggaaatgagtgaacaatarctaat

SEQ ID NO: 3080 - DNA, 87 bp, Streptococcus pneumoniae
  misc_feature (1)..(87): tiling:Spneumo1:WAN024GIB; Cluster includes WAN023YDH AL44 9930.1_183||||153002..153088|+|87 bp|Glimmer 2.02 orf pred iction|S.pneumoniae||AL449930.1|ORF|000
atgtttcatctagaaatcttcagaagtaaagatagtctactcctgcttgaaaaagaaaaaccagaaatagtacgtagggtagcgatc

SEQ ID NO: 3081 - DNA, 1373 bp, Streptococcus pneumoniae
  misc_feature (1)..(1373): tiling:Spneumo1:WAN024F3W; Cluster includes WAN0244IP spr0 385|accC|15902429|NP_357979.1|383279..384646|+|1368 bp|Bio tin carboxylase (a subunit of acetyl-CoA carboxylase (ACC) |S.pneumoniae|R6|NC_003098.1|ORF|221
atgtttcgaaaaattttaattgccaatcgtggtgaaattgcggttcgtattatccgtgcggcacgtgaattggggattgcgacggtakcggtttattcaactgctgataaggaagctcttcatacgctkttggcagatgaagcagtttgtattggtcctggcaaggcaacagagtcttatctcaatattaatgcagttctatcagctgcagtcttgactgaggcagaagctattcaccctggttttggatttctcagtgaaaattccaaatttgcgaccatgtgtgaagaartaggtatcaagtttatcggtccatctggtcatgttatggatatgatgggggataaratcaatgcgcgtgctcagatgattaaagcaggtgtgcctgttataccaggttcagatggagaagtgcataactctgaagaagctttrattgttgctgaaaaaattggctatcctgttatgctcaaggcttcagcaggtggaggtggtaaagggattcgtaaggttgaaaaaccagatgacctcgtttctgcctttgaaactgcctctagtgaggccaaggccaattatggcaatggtgccatgtacatagaacgggttatctatccagctcggcacattgaggttcaaatcctaggtgatgagcatggacatgtgattcacttgggtgarcgggattgttctcttcaaaggaataaccaaaaggttttgraagaaagtccctcgattgcaatcggaaaaacgctgcgtcatgaaataggtgctgctgctgttcgagcggcagagtttgttggctatgagaatgcaggaaccattgaatttcttcttgatgaagcaagtagmaatttctatttcatggagatgaatactcgtgttcaggtagaacatccagtaacagagtttgtttcaggtgttgatatcgttaaggaacagatttgcattgcggcaggtcagcctttgtctgttaagcaagaagatattgtcctacgcggtcatgccatcgagtgtcgtatcaatgcagaaaacccagcctttaactttgctccaagtccaggtaagattactaatctctatctgccaagtggtggagttggcttgcgcgtggattcagcagtttatccaggttataccattccgccttattatgatagtatgattgccaaaatcatagtacacggcgaaaatcgttttgacgccttgatgaaaatgcaacgtgccctctatgaattagarattgaaggagtgcagaccaatgcagatttccagcttgayctcatttcagatcgcaatgtcattgctggggattatgatacttscttcttgatggaaaccttcttacctaaatatcaagaaaaagaataactaat

SEQ ID NO: 3082 - DNA, 1994 bp, Streptococcus pneumoniae
  misc_feature (1)..(1994): tiling:Spneumo1:WAN024EZX; Cluster includes WAN02446T spr0 813|ABC-MSD|15902857|NP_358407.1|814380..816368|+|1989 bp| ABC transporter membrane-spanning permease - unknown subst rate|S.pneumoniae|R6|NC_003098.1|ORF|111
atgtttcgattaaccaataagttagcggtatcgaacttgattaaaaaccgcaaactctactatccytttgcrctggctgttctcttggcagtcacyvtcacctatctcttttactcyctaaccttcaatcchaagattgckgaaatycgtggaggaacmaccattcargcwacacttggatttggtatgtttgtygtyacccttgcgtcagccattatcgtyctctatgccaatagttttgtcatgaaraamcgttccaaggaactrggwatwtatggcatgttrggcttggagaagcgycatctwatcagtatgacctttaaggagttagtggtatttgggattctaactgttggagcgggtatcggtattggagccttgtttgacaagttrattttcgctttcctgctcaaactaatgaaaytgaaggttgagctggttgctaccttccaraygaawgttgtcattrcagtrcttgttgtcttyggwttgattttcctaggcctcatgttcctgaatgcycttcgaatcgcccgtatgaatgccctccagctctckcgtgagaaagcwagyggagagaaaaraggtcgyttcctwcctctccaaacsattcttggttccataagtttaggrattggctattatcttgcccttacggtaammgatcctcttacagccytaacaacyttcttcmtagctgttttrctggttatctttggkacttatcthttgttyaatgcagggattacmgtyttccthcaaatcttaaagaaaaayaagaaatactattaccaaccwaataayctcatatctgtttcyaacttgattttccgtatgaagaaaaatgcrgttggactagcmacyatcgctatyttgtcaacaatggttttggtaaccatgtcagcagcgacaagcattttcaattcckcagaawsctttaaaaaagttctaaatcctcatgattttggggtttcaggrcaaaatgttgaaaaagaagayttggacaaactcttgagccagtttgcaagtgacaawggttatarkrtyaaagaraaagaagtryttcgttacastwactttgstrttgcraaycaagaaggaamyaagttaacywtttttgaaaaaggacaaaaycgtgtccaaccmamaacagttttcatggtatttgaccaaaaagattatgaaaatatgactggtcaaaaactgtctctatcaggaaatgaggtcggwctctttgcmaaraatgasggastkaaagracagaaarctctaaytctraatgatcatcaattttctgtmaaagaagaatttamtaaagatttyattgtsaaccatgtyccaaatmagtttaatatyttgactrctgattacaattaccttgttgtwcctgatttacaagcctttttgraycaattcccagattcggmtatctataatcagttttacggtggtatgaatgtaratgycagygaagmagaacaactcaaggtcgctgaggagtatgaaaamtacytcaatmartttaatgctcaattaracacwgaaggtarctatgtktatggtagcamtctagcagatgctagtkctcagatgagtgccctctttggtggtgtcttctttatcggtattttcytatccattatctttatggtcggaacygttctggtcatctactayaaacaaatttctgaaggmtayraaraccgtgarcgctttattatcttgcagaaagtcggtttrgaycaaaagcaaatcaagcaaaccatcmacaaacaggttttaactgtwttcttccttcctttgctctttgccttcmtacatctmgcctttgcctaccatatgcttagyctgattttaaaagtgattggtgtactggatacgactatgatgttgattgtgaccttgtctatctgcgctatcttcctcatcgcctatgtgctgattttcatgattacttcaagaagttatcgyaagattgtscaaatgtaactaat

SEQ ID NO: 3083 - DNA, 1115 bp, Streptococcus pneumoniae
  misc_feature (1)..(1115): tiling:Spneumo1:WAN024ETG; Cluster includes WAN02447T spr0 777||15902821|NP_358371.1|771852..772961|+|1110 bp|Conserv ed hypothetical protein|S.pneumoniae|R6|NC_003098.1|ORF|11 1
atgtttcgtagaaataaattatttttttggaccacagaaattttactcttaaccatcatcttttacctatggagacagatgggrtctttgattaacccttttgttagcgtgcttaatacaattatgattccatttttattaggrggctttytttattatttgacaaaccctattgttactttcttaaataaagtctgtaaactcaatcgtttgcttggtattttaattaccttgtgtactttggtctggggaatggtcataggtgttgtctatctcttacctattttgattaatcagttatctagtttgattatatctagtcaaactatttatagtcgagtacaagacttaatcatagacttatctaattatcctgcgctccagaatttggatgtagaagctacaattcagcagttaaacttatcctatgttgatattcttcaaaatatcctaaatagcgtatcaaatagtgtggggagcgtcttgtcagctcttatcagtactgttttgattttgattatgactccagtttttttggtttatttcttattagatggacataaattcttgcccatgcttgaaagaacgattctaaagagggatcgcttgcatattgcaggcttattaaagaatttaaatgcgacgattgctcgctatattagtggagtttcgattgacgcaatcattataggttgtttrgcttatattggctatagtattattggtttaaaatatgctttagtttttgccattttttctggtgtagccaatttaattccttatgtggggccaagtattggtttgattcctatgatcatcgcaaatatattcactgwwccccatagactgctgattgcagtgatttatatgcttgttgttcagcaggtagatggcaatatcttatatcctcgaatygtaggaagtgttatgaaggttcatccaatcacgattttagttttacttttgttgtcaagcaatatytatggtgtagttggaatgattgtcgcagtgccaaccwattctatcttgaaagaaatttctaagttcttatcccrtttgtatgaaaatcataaaataatgaaagaacgagaaagagaattagctaagtaactaat

SEQ ID NO: 3084 - DNA, 258 bp, Streptococcus pneumoniae
  misc_feature (1)..(258): tiling:Spneumo1:WAN024DUU; Cluster includes WAN023KCO 3140 74_3670||||1980957..1981214|+|258 bp|EGAD orf prediction|S .pneumoniae|R6|NC_003098.1|ORF|110
atgtttctcagatgtgctactttcaagcttgctgacagcagactcaacatcttcacgtgttttttctttggagagataagattcaacagtcgcaatcaagttgtcaaagctttcatcactgatggtaccgttatttccaccattatagtcagaggcactgttccctgcaatcaatggacgaagacctgcccagctgctttcgatatcatcaatggtgatgttggattctggraagcggttgttgacaatgccaagtag

SEQ ID NO: 3085 - DNA, 254 bp, Streptococcus pneumoniae
  misc_feature (1)..(254): tiling:Spneumo1:WAN024GDD; Cluster includes WAN0244B5 spr0 657||15902701|NP_358251.1|662105..662353|+|249 bp|Conserve d hypothetical protein|S.pneumoniae|R6|NC_003098.1|ORF|111
atgtttgaaaaagtcaatcgctctggcttgattatctatctttactataatcgtgatgccaaaaaactgcaggattatggagatattacctatcattccaagaaacatcgttacttacaactctatgttccaactcaagaagtggagcaattggtcggacgcttgagcaaggaaaaatttattaaaaaagttagggtttgtcatatccaagagttggaaacaccctttgtgggcaatctttatcgatarctaat

SEQ ID NO: 3086 - DNA, 78 bp, Streptococcus pneumoniae
  misc_feature (1)..(78): tiling:Spneumo1:WAN024FRI; Cluster includes WAN023PXC pne0 6_13||||7513..7590|+|78 bp|Type 6A capsule operon, Glimmer 2.02 orf prediction|S.pneumoniae||WAN01UCKJ|ORF|000
atgtttgaaataaaggaaaaagtgttagaattagagaatgtattaatgagtttaggagaaagtatagatgtcaatata

SEQ ID NO: 3087 - DNA, 1040 bp, Streptococcus pneumoniae
  misc_feature (1)..(1040): tiling:Spneumo1:WAN024FVG; Cluster includes WAN0243VI spr1 221||15903264|NP_358814.1|1218032..1219066|-|1035 bp|Hypot hetical protein|S.pneumoniae|R6|NC_003098.1|ORF|111
atgtttgaacattattcagtagctgatttgtttgcaaatctttataaaaarcgaaaagcaaatattttagctctcatcgctttatttgctctcattgctgtaccatttacaattaaagcagttaggaataaaaacactgtcaaagatacaacaagttattcaacttatcttatctataaaatcactcctccaraagaktcggmcaaaacgattttgaatcatcaaattggtggttatagtgatttttmtrrsaaattgattgatggtaatttgaatggagcttatcttttcaatgatgtagaacccagtgagttgaaaaaaattgccagtgaattagacacgacrgaaacaaccttgaaaaattcaacgaatgactattggtggaaaaaattgaccgtctactatatgattgacgatgcaggggttggtgtgaaaattttgacatcaagtaaagatgccaatracttgttagagaaaaaaattgatgggttgattgagaaatttaaacatgcytatgcaaatgtgaaaattgaaaaactggaaaccatcaactctaaagaattgaacgcaaatggtgaaacagcgcttggcttaaatgtgaaaaatctgattcttcgtttagttgttattggagtggtttgtgtgattttggttgtgatgggaaatgtgttagtttatctctttaatccaacaatcaatagagtaggtgatttttcycagtatcaaattgattttgtaacagagattacaacaattgctaacctagcagatgttttgtcatacaaaaatactggacaggaattgaccatcgttagctcaaataaagctatcytagataaattgaaacagagtcaagaagctttaaaaggaatgcattttgtagatttrcaggatgtatcatctcttttggmaagagatacagtccttcttgttgaagagtacggagtgactcgttataagaaatttgagcaaagtcttcaaattctcagaaacttaaatcgttctatcctyggtgtagcaacctttaaattataactaat

SEQ ID NO: 3088 - DNA, 249 bp, Streptococcus pneumoniae
  misc_feature (1)..(249): tiling:Spneumo1:WAN024D6J; Cluster includes WAN023L06 3151 71_2614||||1394398..1394646|+|249 bp|EGAD orf prediction|S .pneumoniae|R6|NC_003098.1|ORF|110
atgtttgagaagaccttacgtccttcttccactgcgacgataatagtcgcaaagttatcatctgcaagaatcatatcagaagcccccttagaaacctctgtaccagtgattcccataccgataccratatcggctgttttcagagctggcgcgtcattgacaccgtcacctgtcatggcaacgactttaccttgtttttgccaagccttgacgatacgaaccttgtgttctggagacacacgggcataa

SEQ ID NO: 3089 - DNA, 306 bp, Streptococcus pneumoniae
  misc_feature (1)..(306): tiling:Spneumo1:WAN024DWL; Cluster includes WAN023KED 3130 84_3599||||1933594..1933899|+|306 bp|EGAD orf prediction|S .pneumoniae|R6|NC_003098.1|ORF|110
atgtttgagcaagattttagcatagcrakctgtgttttccaagacctcgtggyccttaagctctgcaaagattggctctgttccttttggttggaaatagatatactcgtttccgatgtccccacggtcttcaaagcggataaagtcttcataggcttcgtgagttgtcttrtcatagactgtgatgttgtcatccacactcaccgttacgaatggtgtatcaatcactccgttttggtaaataccctcacggtgttcttgttytccttccagcaattggaaggttgtccaagaaagcggygctag

SEQ ID NO: 3090 - DNA, 2036 bp, Streptococcus pneumoniae
  misc_feature (1)..(2036): tiling:Spneumo1:WAN024DWU; Cluster includes WAN0243BL spr1 940||15903981|NP_359531.1|1921373..1923403|-|2031 bp|Conse rved hypothetical protein|S.pneumoniae|R6|NC_003098.1|ORF| 111
atgtttgattatagagcactagttattttgatgactttgatggatcattgtgagctatcattatatgaattatctgttaaggtgagcttacctataaaggaagtcaaagaaggaatagattatttagtgccttatctagctaataaagggatagtgctggataaaaarcaaggtcgctatagtttatcaaatcgtacgaagcagtctttgacagatattattaagtcggatgaattggttttaccaaagtcgactcgcttagctttaatctatctttacactttttgccgattagattttatatcgaatartcattaccaagactttttgaaagtaagtaagaatacaaccttatctgatattcaatcattaagaaagattatgttagataatgatttggagctagggtacagtagagcaaaaggttatactttacacggttcagagtggaataagcaccgcttagcttttcaaatggttagtgagttgctggaatcctccatagggatttgggrtttggattatgttttatccagttgggggtattcattaacttatgatttgatwratcaggtagttaaagattattatgagaagctacarctagtacctattgttaatcaattaaaagtttrccttttcggtttagtattcattctgtgtaggtatcaaagggatgttgaaagagtatgtctttcagagacattagtatctcctgttattcaagatataaccactattttattggatacagtggttgatttgggaattatagatacggtgttttctgaggatgattatcgctatatcacmgttttattatcaagttgctttgaaggtgaagtagatgttgctccggtttactttaatcaattaacagaggctattataagtagaatggaagatatttctttgttacattttaaacaaagggaaggattgagagaaaatcttcgccgccaccttataccggcttactatagattaaagttcggcctacctagttcaaatgaatatgtattgcatgttaaagaacattatcctgatttatttgaattagtcaaagattctttgatgcccttgatggacgctattgacaatcccatacctgatagtgaaacagcatattttgttatccatttcggaggttatttaaagaaagcagatactttgcctcaaaaatgstataaagcagcaatcatttgtcctaatggtgttagttcttcattgatgttaaaagagaatctattagcattatttcctcaaattgagtttatagsaacctcaaagattgatgatttacaggtgaaagytagtagtgactatgatatggttttttctaccataaaggtggagacagaaaagccaaattatctagtttcggttatgatgactgaagagcaagcaatacaactagtagaactagtgttaaaagattttccgaatttagagtatggagattttgagattgaacaaatcctgaatattgtcaaaagatatggaattattacacaagaattggaattaagattggcgttaaagaattatctttaycaaaaaaatgatagaaaggaaattgtaccagtgctagaacaacttattaccaaagaaacctatcaggttagttcgcaaaaattaggatggaaggaggcgattcgtttagcagctaaaccgcttttggatcaagataagataactgagaactaccctgaggcaatgattcaaaaagtagaagagtttggaccttttattaatttagggaagggagtagcaattcctcacgctcggccagatgaaggtgtgaatgaaataggaatgtcaatgttagttttggaagaaccgatttatttattggataatccagaacaagaggtaagattgttgatttgtattgcagccattgataatgagagtcatttaaaggctttgtcacatttaacaacaattttaagagataaaaatcatgttcaaactttaatatcatcaaaaaactatratgayattaaaatgataattaaacaggaggattarctaat

SEQ ID NO: 3091 - DNA, 800 bp, Streptococcus pneumoniae
  misc_feature (1)..(800): tiling:Spneumo1:WAN024DSP; Cluster includes WAN0240YZ-con |pspC||AAF73775.1|||1530 bp|surface protein PspC|S.pneumon iae||AF154008|ORF|000
atgtttgcatcaaaaaacgaaagaaaagtacattattcaattcgtaaatttagtattggagtagctagtgtagctgttgccagtctttttatgggaagtgtggttcatgcgacagagaasgaggkaactacccaagyasccacttcttctaatarggsaaatraaagtcagrcagaacatatgaaagctgctaaacaagtcgatgaatatatagaaaaaatgytgagtgagatccaattagatagaagaaaacatacccaaaatgtcggcttactcamaaagttgggcgcaattaaaacggagtatttgcgtggattaagtgtttcaaaagagaagtcgacagctgagttgccgtcagaaataaaagaaaagttaaccgcagcttttragcagtttaaaaaagatacattgaaaycagraaaaaaggtagcagaagctcagaaaaaagccaaggatcaaaaagaagctaaacaggagatagaagctctaatcgttaaacataaggggcgagaaatcgatttagatcgaaagaaggcaaaggctgcagttactgaacatctaaaaaaattattgaatgacatcgagaaaaatttaaaaaaagagcaacatacccatactgtagagttaattaaaaacttgaaagatattgaaaaaacgtatttgcataagttagatgaatcaacgcaaaaagcccaactacagaaactgatcgcagaaagtcaatcaaaactagatgaagctttttctaaatttaaaaatggcttatcttcttcgtcgaattcaggctcctccactaaacc

SEQ ID NO: 3092 - DNA, 1000 bp, Streptococcus pneumoniae
  misc_feature (1)..(1000): tiling:Spneumo1:WAN024DSR; Cluster includes WAN0240I4-con |pspC||AAF13456.1|||2106 bp||S.pneumoniae||AF068646|ORF|00 0
atgtttgcatcaaaaagcgaaagaaaagtacattattcaattcgtaaatttagtattggagtagctagtgtagctgttgccagtcttgttatgggaagtgtggttcatgcgacagaraasgargkaastacccaagyasccacttmttctaatatggcaaagacagaacataggaaagctgctaaacaagtcgtcgatgaatatatagaaaaaatgttgagggagattcaaytagatagaagaaaacatacccaaaatktcgccttmaacatraagttgagcgcaattaaaacgragtatttgyrtgrattaaatgttttagaagagaagtcgraagmtgagttgccgtcagaartaaaagcaaagttagacgcagcttttgagmagtttaaaaaagatacattgaaacyaggagaaaaggtagcagaagctragaagaaggttgmagaagctragaaaaaagccgaggatcaaaaagaagaagatcgtcgtaactacccaaccaatacttacaaaacgcttgaacttgaaattgctgagttcgatgtgaaagttaaagaagcggagcttgaactagtaaaagaggaagctaaagaatttcgaaacgagggcacaattaagcaagcaaaagagaaagttgagagtaaaaaagctgaggctacaaggttagaaaacatcaagacagatcgtaaaaaagcagaagaagaagctaaacgaaaagcagcagaagaagataaagttaaagaaaaaccagctgaacaaccacaaccagcgccggctactcaaccagaaaaaccagctccaaaaccagagaagccagctgaacaaccaaaagcagaaaaaacagatgatcaacaagctgaagaagactatgctcgtagatcagaagaagaatataatcgcttgactcaacagcaaccgccaaaaactgaaaaaccagcacaaccatctactccaaaaacaggctggaaacaagaaaacggtatgtggtacttctaca

SEQ ID NO: 3093 - DNA, 506 bp, Streptococcus pneumoniae
  misc_feature (1)..(506): tiling:Spneumo1:WAN024DSO; Cluster includes WAN0240Z8-con |pspC||AAF73785.1|||2100 bp|surface protein PspC|S.pneumon iae||AF154017|ORF|000
atgtttgcatcaaaaagcgaaagaaaagtacattattcaattcgtaaatttagtattggagtagctagtgtagtagttgctagcttgttcttaggaggagtagtycatgcagaagrggttrgwrgtragaatamccccacggwtacatctagtgggcaagatatatcgaagaagtatgctgatgaagtcragtcrcatctaraaaaaatattgagtgagatccaaacamawttagatagaarwmracataycraaactgtarmkctaattaacrarttgcaagrcattaagaraacgtatttgtatrawttaaatgttttaraagakaagtcgaaagytgagttgccgtcaaaaataaaagcaragttagacgyagcttttgakcagtttaaaaaagatacattsaaaccaggaraaaaggtagcagaagctmagaagaargttgmagaagctragaaaaaagccraggmtcaaaaagaagaagatyrccgtaactacccaaccaa

SEQ ID NO: 3094 - DNA, 1014 bp, Streptococcus pneumoniae
  misc_feature (1)..(1014): tiling:Spneumo1:WAN024DSN; Cluster includes WAN0240I5-con |pspC||AAF13457.1|||2219 bp||S.pneumoniae||AF068647|ORF|00 0
atgtttgcatcaaaaagcgaaagaaaagtacattattcaattcgtaaatttagtattggagtagctagtgtagtagttgctagtcttgttatgggaagtgtggttcatgcgacggagaatgagggaattacccaagtasccacttcttataataaggcaaatgaaagtcagacagaacataggaaagctgctaaacaagtcgatgaagatataaaaaaaatgttgagtgagatccaagaatatataaaaaaaatgttgagtgagatccaattagataaaagaaaasatacccaaaatskcamcttaaacagaaagttgagcgcaattcaaacgaagtatttgtatgaattaagagttttaaaagagaagtcgaaaaaagaagagttgacgtcaaaaacaaaaaaagagttagacgcagcttttgagaagtttaaaaaagaaccagaacttactaaaaaattagcagaagctaaacaaaaagccaaggctcaaaaagaagaagatttccgtaactacccaaccaatacttacaaaacgcttgaacttgaaattgctgagttcgatgtgaaagttaaagaagcggagcttgaactagtaaaagaggaagctaaaccccgaaacgaggaaaaaattaagcaagcaaaagmgaaagttgagagtaaaaaagctgaggctacaaggttagaagaaatcaagacagaacgtaaaaragcagaagaagaagctaaacgaaaagcagragaatctgagraaaaagctgctgaagccaamcaaaaagtggatactaaagagcaaggtaaaccaaagaggcgggcaaaacgaggagtttctggagagctagcaacacctgataaaaaagaaaatgatgcgaagtcttcagattctagcgtaggtgaagaaactcttccaagcccatcccttaatatggcaaatgaaagtcagacagaacataggaaagatgtcgatgaatatataaaaaaaatgttgagtgrgatccaattagatagaagaaaa

SEQ ID NO: 3095 - DNA, 1500 bp, Streptococcus pneumoniae
  misc_feature (1)..(1500): tiling:Spneumo1:WAN024DSF; Cluster includes WAN0240ZP-con |pspC||AAF73802.1|||2601 bp|surface protein PspC|S.pneumon iae||AF154033|ORF|000
atgtttgcatcaaaaagcgaaagaaaagtacattattcaattcgtaaatttagtattggagtagctagtgtagtagttgctagtttgttcttaggaggagtagttcaygcagaagaggttagaagagggaataacctcacggttacatctagtggggatgaagtcgagtcgcattatcaaagtatattggagaaggtcagaaaaagtttggaaaaagatcgacatacccaaaatgtcgacttaatcaaaaagttgcaagacattaagagaacgtatttgtataatttaaaagagaagccggaagctgagttgacgtcaaaaacaaawaaagagttagacgcagcttttgagaagtttaaaaaagaaccagaacttactaaaaaattagcagaagctgagaaaaaagccaaggatcaaaaagaagaagatcaccgtaactacccaaccaatacttacaaaacaatcgaactggaaattgcggaagcagaagtaggggtcgccaaggcagagcttgagcttgcacaagctcaagtccaaatacctcaagatactgagaaaattaatgctgctaaagctaaagtagaagctgctaaaagtaatgttaaaaaactagaaaaaattaaatcagatattgaaaaaacgtatttgtataaattagataactcaaccaaagaaacgccaaaatctagagtgcgaagaaattctccgcaagtaggcgattcgagagaacttaaggaaacgatagacaaagcgaaagaaactctgtctacctatatggtaactcgtttaacgaagctggatccatctgttttttggtttgcagatcttcttatggatgctaagaaagttgtggaagaatacaagacaaaattagaggatgcttcagataaaaaatcggtagaagacttgcgaaaggaagcagaaggaaaaatagagtctcttatcgtgactcaccaaaatagagaaaaagaaaaccaaccagcaccccaaccaggaggacaagcaggtggttcaatggttgtaccaccggtgacgcaaacacctccatcaacttcccaaagtccaggacaaaaggcgaccgaagctgaaaagaaaaagttacaagacttgattcgtcaattccaagaagccttgaacaaactagacgatgaaacaaagactgttccagatggggctaaactcacaggagaagctggaaaagcctataatgagactagaacttatgcgaaagaagttgttgacaagagcaagaagcttctatcacagacagcagtgacaatggatgaattggcaatgcaattaaccaaattgaacgatgccatgtctaaattgaaagaagctaaagcgaaattggtaccagaggttaaaccacagccggaaaacccagagccaaaaccacaaccagagggtgagaaaccaagcgtaccagatattaatcaggagaaagaaaaagctaaacttgctatagcaacatacatgagcaagattttagatgatata

SEQ ID NO: 3096 - DNA, 1000 bp, Streptococcus pneumoniae
  misc_feature (1)..(1000): tiling:Spneumo1:WAN024DSM; Cluster includes WAN0240YY |psp C||AAF73774.1|||1611 bp|surface protein PspC|S.pneumoniae| |AF154007|ORF|000
atgtttgcatcaaaaagcgaaagaaaagtacattattcaattcgtaaatttagtattggagtagctagtgtagywgttgccagtcttgttatgggragtgtggttcatgcgacagagaacgagggaagtacccaagcagccacttyttctaatatggcaaataaaagtcagacagaacaaggagaaatcaatatagaacgagataaggcaaagacagcggtcagtgaatataaagaaaaaaaagtgagtgagatctatacaaaattagagagagatagacataaagatactgtagatctagttaacaagttgcaagagattaagaacgagtatttgaataaaatagttsaatcaacctcaamaaycgaaatacagggacttattacaacaagtcgatcaaaactagatgaagctgtgtctaaatataaaaaggccccatcttcttcgtcaagttcaggctcytccactaaaccrgaarctycrsakmcrgmramrycaaacaagccgacagaactagaaaaaaaggtagcagaagctgagaagaaggttgaagaagctaagaagaaagccaaggatcaaaaagaagaagattaccgtaactacccaaccattacttacaaaacgcttgaacttgaaattgctgagtccgatgtggaagttaaaaaagcggagcttgaactagtaaaagaggaagctaaggaacctcgaaacgaggaaaaagttaagcaagcaaaagcgaaagttgagagtgaagaaactgaggctacaaggttagaaaaaatcaagacagatcgtaaaaaagcagaagaagaagctaaacgaaaagcagcagaagaagataaagttaaagaaaaaccagctgaacaacaagctgaagaagactatgctcgtagatcagaagaagaatataatcgcttgactcaacagcaaccgccaaaaactgaaaaaccagcacaaccatctactccaaaaacaggctggaaacaagaaaacggtatgt

SEQ ID NO: 3097 - DNA, 418 bp, Streptococcus pneumoniae
  misc_feature (1)..(418): tiling:Spneumo1:WAN024DSQ; Cluster includes WAN0240Z7-con |pspC||AAF73784.1|||2043 bp|surface protein PspC|S.pneumon iae||AF154016|ORF|000
atgtttgcatcaaaaagcgaaagaaaagtacattattcaattcgtaaatttagtgttggagtagctagtgtagtwgttgctagcttgttcttaggargagtagtccatgcagaaggggttagaagtkgggatacmcccaaggttacayctagtgggcaaratatatcgaaraagyatsctgatgaagtcaagtcgcatctagaaaaaatattgagtgagatccaattagataaaagaaaacatacmcaaaatctcgccttcaacaaaaagttgagcagaattcaaacggagtatttctatttaaaaaagaagttgaaagctgagttggcaaaracrraagwwgagwktgaacaagctgagactacaaggttaaaaaaaatcaagacagatcgtgaagaagctgagctaaaggttaaaa

SEQ ID NO: 3098 - DNA, 108 bp, Streptococcus pneumoniae
  misc_feature (1)..(108): tiling:Spneumo1:WAN024COQ; Cluster includes WAN0246T2 5613 45-44-6||||||108 bp|DNA Streptococcus pneumoniae phage Dp- 1 open reading frame 240|S.pneumoniae||WAN0246T2|ORF|000
atgtttggaataagcgtgaaacagagtttacatggcgaagtaacaaatacgaggacaaccctacgggaactcgaggtgaatggggactatttcaaaatttctggttag

SEQ ID NO: 3099 - DNA, 311 bp, Streptococcus pneumoniae
  misc_feature (1)..(311): tiling:Spneumo1:WAN024DKP; Cluster includes WAN0244NU spr0 200|rplX|15902244|NP_357794.1|201294..201599|+|306 bp|50S Ribosomal protein L24|S.pneumoniae|R6|NC_003098.1|ORF|111
atgtttgtaaaaaaaggcgacaaagttcgcgtaatcgctggtaaagayaagggaacagaagctgttgtccttactgcccttccaaaagtaaacaaagttatcgttgaaggtgttaacattgtkwagaaacaccaacgkycaactaacgagcttcctcaaggtggtatcatcgagaaagaagcagctatccacgtatcaaacgttcaagttttggacaaaaatggtgtagctggtcgtgttggwtacaaatttgtagacggtaaaaaagttcgctacaacaaaaaatcaggcgaagtgcttgattaactaat

SEQ ID NO: 3100 - DNA, 951 bp, Streptococcus pneumoniae
  misc_feature (1)..(951): tiling:Spneumo1:WAN024FQB; Cluster includes WAN023PPT pne1 9_17||||10649..11599|+|951 bp|Type 10C capsule operon, Gli mmer 2.02 orf prediction|S.pneumoniae||WAN01UCJ7|ORF|000
atgtttgtcagcatcgttgttccggtttataatgttgcagactatctgcattatgcgatagaaagcttaattaaacagacctatcaaaactttgaggtaatccttgtaaatgatggttctacagatgattctcctctattatgcgaagattatgcaaagcaatatgaaaatatccatgttttccacaaagaaaatggtgggttatctgatgcgcgtaactttggagtttctaaagcgagttcagattggattttctttttagatccggatgattatcttgaagaatatactctagagttaatcgtgaaaattcaggaaacacatcaagcagacttgatttcaacaaaggtaaaagctacttcaaaatataatgcttatacttcttatcgattgcaagactcagactataaagatttggcttcgattacaaaagaaaaggctmtggaactaatgttggatgacaaagttgcaacggtttctgcttgtgctaagctttatcggaaatgcatcttggaacgcgttccatttccagtcgggaagatctatgaggatttttatgttgtagcagaacatcttgccttagctgaaagaatcgtgatcagtccacttgaaacctacaattactatcgtagggaagggagtattgttcgttcaacatttactgaaaaaagatatgatttctttgaagctgttgcaaaaaatgaggaagttgttaaaagagagtacattcagattccagaattaaagcaagctttgcaagctaagaaattattaggtggttttgtagtaattggtgcaaaagctgactcaggcttaaaagatttttcaaaagataaagagttgttgagagtcgaaatgagcgagttattaaaaaatagtaagttatcatggaaactaaaactaaaatatcttatttttatgtttagccctaaattgtatttgttgctacga

SEQ ID NO: 3101 - DNA, 333 bp, Streptococcus pneumoniae
  misc_feature (1)..(333): tiling:Spneumo1:WAN024F2L; Cluster includes WAN023KMG 3130 48_3259||||1744192..1744446|+|255 bp|EGAD orf prediction|S .pneumoniae|R6|NC_003098.1|ORF|220
atgtttgttccatacccgtctcctttgtcagcttctttcttttattttaccacatttcgtggaaaaatggagaaagttttcagaagagagaatgagagaaccctcgggttctctcattctctcttattctactgtttcttccacagtttcaacggcagtatccacaactacttctgttgtttcttcatttccttcttcctctactggaggattaaggtattcttcttcgttgacagcatgtggttcaaggttacggtaacgggccataccagtaccagctgggatgatcttaccgatgataacattttctttaagtccaaggagatggtcttt

SEQ ID NO: 3102 - DNA, 1300 bp, Streptococcus pneumoniae
  misc_feature (1)..(1300): tiling:Spneumo1:WAN024DSC; Cluster includes WAN0240ZE-con |pspC||AAF73791.1|||2313 bp|surface protein PspC|S.pneumon iae||AF154022|ORF|000
atgtttrmatcaaawwrygaaagaaaartryrytattcwattcgwaaatttagtatwggagtagctagtgtagctgttgccagtcttgttatgggaagtgtggttcatgcgacagagaacgagggaactacccaagcacccacttcttctaataggggaaatgaaagtcaggcagaacaacgtagrgaactcgatttagaacgagataaggtaaagaaagaggtcagggaatataaagaaaaaaaagtgaaagagctctattcaaaatcaactaaaagtcgacataagaagactgtagatatagttaacaagttgcaaaacattaataacgagtatttgaataaaataattcaatcaacctcaacatacgaagaactacagaaactgatgatggagagtcaatcagaagtagataaagctgtgtctgartttgaaaaggacttatcttcttcgtcmagttcaggctcttccacggaaccggaagcttcagatacagcgaagccaaacaagccgacagaactagaaaaaaaggtagcagaagctmagmagaaggttgaagaagctgagaaaaaagccaaggatcaaaaagaagaagatyrycgtaactacccaaccattacttacaaaacgcttgaacttgaaattgctgagtycgatgtgraagttaaaraagcggagcttgaactaktaaaagtgaaagctaasgaatctcgagacgagaaaaaaattaagcaagcagaagcggaagttgagagtaaacaagctgaggctacaaggttaaaaaaaatcaagacagatcgtraaaaagcagaagaagaagctaagttgaaggaagctgttgaaaagaatgcagcgacttcagagcaaggtaaaccaaagaggcgggtaaaacgrrgagctcttggagagcaagcaacacctgataaaaaagattattttgaaaaagacttccgtccagctttcaataaaaaccrgcagatggtagccattcaagaatccttgaacaaactrgatgrtgaaacaaaaactgtkccagatggggctaaactcacaggagaagctggaaatgcctataatgaggtcagagattatgcaataaaagttgtttctgaaaacaagaaacttctatcacagacagcagtgacaatggatgaactggcaatgcaattaaccaaattgaacgatgccatgtctaaattgaragargctaaagcgaaattggtaccagaggttaaaccgcagccggaaaatccagagcatcaaaraccaacaactccagctccggataccaaaccaatcc

SEQ ID NO: 3103 - DNA, 633 bp, Streptococcus pneumoniae
  misc_feature (1)..(633): tiling:Spneumo1:WAN024DCJ; Cluster includes WAN02444D spr0 901||15902945|NP_358495.1|887403..888035|-|633 bp|Hypothet ical protein|S.pneumoniae|R6|NC_003098.1|ORF|111
atgttttacttgagtttgtcaaggattgctttaagctcctctactagtttagtttctgtctctgctgagccattttcttctttcacgaaatcaagggtttcttggagaaggttttgggctttggcaaggacttttttatccgctttttctgcatctagctgtcctagaaccttgrtcaattccgtgcttaattgctggatttctgactctttcttacggcgaatyagccagaaggcaatcacgcctaggagggcaagtagactgaccacaatcactcctgcyggaactgagtttgtttcagtcatcttatctgaatccttactatcttccgttccttgttttgcatccttcttgtcctgtgyaggcttgctgtcgctagcatttgctttcacatctttgagagagtccaaggcagcccagccttcacagactctactgcagtatgcagaccttactctgtcaaggcactatcttccggagctttttgagcatctaggaggacagccttggttgcatcgattttcggatcagatactgttgccaaagctttcaagcgttggtctaactcttgactcaaggcacgaagttcagacttgtcaacttgctcttgagcttgtgtgctcgttgagctag

SEQ ID NO: 3104 - DNA, 755 bp, Streptococcus pneumoniae
  misc_feature (1)..(755): tiling:Spneumo1:WAN024EY6; Cluster includes WAN0243OQ spr1 465||15903508|NP_359058.1|1447154..1447948|+|795 bp|Conser ved hypothetical protein|S.pneumoniae|R6|NC_003098.1|ORF|2 21
atgttttatacttatttgcgtggattagttgtattgctcttatggtccatcaatggcaatgctcactatcataatactgataaaattcctaatcaaratgaaaattatattttagttgcgcctcaccgtacctggtgggatcctgtttatatggcctttgcgaccaagccaaaacagttcatctttatggcaaaaaaagaactctttaccaaccgtatctttggttggtggrttcgtatgtgtggcgcctttcccatcgaccgtgaaaatcccagcgcctcagccatcaaatatcctatcaacgttctcaaaaaaagtgaccgctctctcatcatgtttccaagtggtagccgccactcaaacgatgtcraggggggcgcagcactkattgccaaaatggccaaggtccgtatcatgccggttacctacaccggtcccatgactttgaagggcttgattagccgtgaacgtgtcgatatgaactttggaaatccaatcgatatctcagatatcaagaaaatgaatgatgaaggcattgaaacagtcgccaatcgtattcaaacagaattccaacgtctggacgaagaaacgaaacaatggcacaatgataaaaaaccaaatccactctggtggtttatccgcatccctgccctcatccttgctattatcctcgctatcctaaccatcatctttagctttatcgcaagcttcatctggaacccagataagaaaagagaagaacttgcatarctaat

SEQ ID NO: 3105 - DNA, 878 bp, Streptococcus pneumoniae
  misc_feature (1)..(878): tiling:Spneumo1:WAN024CCS; Cluster includes WAN0244QS spr0 094|sdaA|15902138|NP_357688.1|102117..102989|-|873 bp|L-se rine dehydratase alpha subunit|S.pneumoniae|R6|NC_003098.1 |ORF|221
atgttttattctatcaaagaattggtcgagcaagcagatctggactttcaaggaaatgtcgcagaactcatgattacaacagagtttgaattgaccggtcgcgaacgtgaagaagtcttccttctcatggaacgcaatctggaagttatgaaagcctctgtccaacttggcctcaatgaaaataaatctcgtagtggcctgacaggtggagatgctgccaaattggatcactacatcraaaacgraaaaactytrtcagattayacgattctctckgctgcccgaaatgcyatcgcagtcaatgaacacaatgccaaaatgggcttggtctgtgccacyccaaccgctggaagtgctggctgtctsccwtccgttctcactgctgctattgaaaaattagacctcagccacgagcaacaattggatttcctctttgctgctggtgcctttggactagtcatcgcaaacaatgcctccatctcaggtgctgagggtgggtgtcaagctgaagttggttcagcctctgctatgagtgctgccgccttgactctggctgcaggtggaacaccttatcaggccagtcaagctattgcctttgtcattaaaaatatgctaggcctcatctgtgaccctgttgcaggtttggtcgaagttccctgtgtcaaacgtaatgccatgggagctagctttgctttcatcgcagcagacatggccttggcaggtatcgaatctaaaatccctgtggatgaagtgatcgatgccatgtaccaagtaggagcaagcatgccaactgcctttcgtgaaacagctgaaggtggactcgctaccacccctactggtcgtcgcctccaaaaagaaattttcggagaataactaat

SEQ ID NO: 3106 - DNA, 834 bp, Streptococcus pneumoniae
  misc_feature (1)..(834): tiling:Spneumo1:WAN024CED; Cluster includes WAN023RVB cont ig_1609_69||||57342..58175|-|834 bp|Glimmer 2.02 orf predi ction|S.pneumoniae|670|WAN01UDCD|ORF|001
atgttttcaaatgcgaatagctttaaagcaaaaatcaaaaayatttcaaaagataagggaattccagctcaacaagtacaacaacattatttaattgagcaagtrttaaagctgatttctactagttcttatagagattccttcattgtaaaaggagggtatctaataggtcaaatgattggactagataagcgaacyacaatggatttagatgtcactctgaagggaaccgaaatgagcagagaaaatttgattsatatctttgaagagattctttgttctaaaactgatggwttttcattttcagtagataagctagaacctattcgccaagatgatgaatatggaggattttcattaaaattaaatgcaacttttgatacattaaaggaggttgtttttattgatattactactggtgataagatyacaccaagagaaattacttattcaatgacttctatctttactaatgaaagyatcaagatatggacatataatctagagactgtacttgctgaaaagttagaaacratyatcagtaggggattagcttcgacacgcccacgtgatcgatatgatcttttcaccttgtataaacttagaaaagaagagattaatctagaagtattaaaaaatgcacttgagaatacggcagaaaaacgtaaaagtaaagawactatttataattgggaagaacaagtgagaggaattgaaatttctgattatcagaaagagctatggattcgttatcaacgccaatttaagtatgctaaagatatctcatttgataactctgttcaggtyattagggaaattatgcaacaaatattt

SEQ ID NO: 3107 - DNA, 114 bp, Streptococcus pneumoniae
  misc_feature (1)..(114): tiling:Spneumo1:WAN024DTF; Cluster includes WAN024367 SP00 94||15900037|NP_344641.1|96713..96820|+|108 bp|hypothetica l protein|S.pneumoniae|TIGR4|NC_003028.1|ORF|120
atgttttctcttgtccttattttaaccattcargaaatttcgagaaccctctacaatttccagtcaaataaattgcattcgttttctcaagcaggtatactagtgctarctaat

SEQ ID NO: 3108 - DNA, 773 bp, Streptococcus pneumoniae
  misc_feature (1)..(773): tiling:Spneumo1:WAN024D5K; Cluster includes WAN0243M3 spr1 560||15903603|NP_359153.1|1539872..1540720|+|849 bp|Hypoth etical protein|S.pneumoniae|R6|NC_003098.1|ORF|111
atgttttggaatttagttcrctacgaatytaaaaatgttaacaagtggtatttagccctctacgcagccgtgctagtcctttctgccctcrtcggaatacagacacaaggctttaaaaatctaccttaccaaraaagtcaggctactatgctactttttctagcyacagtctttggtggcttgatgcttacacttgsgatttcaaccattttcttgattattaaacgcttcaaaggtagtgtctacgaccgacaaggctatctgactttgaccttgccagtttctgaacaccatatcatcacagccaaactaatcggtgcctttatctggtcattgattagcaccgctgtattggctctaagtgctgttattattctggctttaacagctccagaatggattcctctttcttatgtgattacatttgtagaaacacatctccctcagatctttcttacaggtatatccttcctactaaatacyatttcaggaatcctctgcatctacctggctatttccattggacagcttttcaatgaataccgtacagcactcgctgttgcagyctacattggtatccaaatcgtcattggatttattgaacttttcttcaatcttagttctaatttctatgtcaattcactggtaggactcaatgaccatttctatatgggagcaggtatagccattgttraagaactcatattcatagctatcttttatctcggaacctactacatcttgagaaataaggttaatttgctttaactaat

SEQ ID NO: 3109 - DNA, 105 bp, Streptococcus pneumoniae
  misc_feature (1)..(105): tiling:Spneumo1:WAN024DP6; Cluster includes WAN0242FT SP11 20||15900987|NP_345591.1|1053582..1053686|-|105 bp|hypothe tical protein|S.pneumoniae|TIGR4|NC_003028.1|ORF|120
atgtttttattatactacctttttagagaagattcaagtaaattactakacttctttaattattttgaaaatctacaacaagttcacttactcgttcaattgtaa

SEQ ID NO: 3110 - DNA, 261 bp, Streptococcus pneumoniae
  misc_feature (1)..(261): tiling:Spneumo1:WAN024C75; Cluster includes WAN023M6X 3143 82_492||||252589..252849|-|261 bp|EGAD orf prediction|S.pn eumoniae|R6|NC_003098.1|ORF|110
atgtttttctgctacctctttgataaagatgaaaagcagacgaccagtcgcttccgcatcgtagttggccatgtggtgatgttccaaggccacaccaaaacgcttggtcaaaggccccaaaccatggcgtttatactcaggatagaggtttctagcaaactccagcgtatcaataactggctgactaatctttggaagatcatgmcgctcataattagcattcataaagccaacgtcaaaggtagcattgtgggcaactag

SEQ ID NO: 3111 - DNA, 394 bp, Streptococcus pneumoniae
  misc_feature (1)..(394): tiling:Spneumo1:WAN024EVS; Cluster includes WAN023KC9 3130 94_3691||||1994344..1994598|+|255 bp|EGAD orf prediction|S .pneumoniae|R6|NC_003098.1|ORF|230
atgtttttgatattcttcctgagtrgtggcaccaaccgttctcaaagttccacgcgccaaggctggtttcaagatattggccgcatccagagtcgaatcaatcccgctaccagaacccatgatggtgtggagttcatcgataaagaggatgacttggccatcttcttcaatatccttgatgatattattcatgcgttcttcaaagtcaccacggaagcgtgtccctgcaacgacattcatcaaatcaagttctaacacgcgcatcttagccatttccgcaggcacgtcaccactrgcaatacgctgrgcaagaccaagcgccagagctgttttcccgacaccagcatccccaaccaagacagggttgttcttagtcttccggctcaagatttga

SEQ ID NO: 3112 - DNA, 348 bp, Streptococcus pneumoniae
  misc_feature (1)..(348): tiling:Spneumo1:WAN024CGI; Cluster includes WAN023S40 cont ig_356_1||||214..561|-|348 bp|Glimmer 2.02 orf prediction| S.pneumoniae|670|WAN01UD9A|ORF|000
atgtttttggacatcgggggcaagcctcttgatttttgggatttgacggtgcttgaaatcagggaaatgatagaaagctacaaccgtgtcaaaacccaagagcgtaaagagaagattattgactcatacagactttcgcagatgatttccaatcacgtttctttattactgtccaatgacgctaagattgttgagttctgggagtatgcgcctgagttatttgtagaagaacaacaagcggtagaactggaacgacagaaacaagcacttttgttgcataaggaacggatgcgtgaatttgcagagagacataatcgaaaaaggaaggaggaagtaaatggcaactct

SEQ ID NO: 3113 - DNA, 1316 bp, Streptococcus pneumoniae
  misc_feature (1)..(1316): tiling:Spneumo1:WAN024DKM; Cluster includes WAN0244NL spr0 209|secY|15902253|NP_357803.1|205609..206919|+|1311 bp|Mul tispanning membrane protein, translocator of proteins|S.pn eumoniae|R6|NC_003098.1|ORF|111
atgttttttaaattattaagagaagctcttaaagtcaagcaggttcgatcaaaaattttatttacaatttttatcgttttggtctttcgtatcggaactagcattacagttcctggtgtgaatgccaatagcttgaatgctttaagtggattatccttcttaaacatgttgagcttggtgtcggggaatgccctaaaaaacttttcgatttttgccctaggagttagtccctatatcaccgcttctattgttgtccaactcttgcaaatggatattttacccaagtttgtagagtggggtaaacaaggggaagtaggtcgaagaaaattgaatcaagctactcgttatattgctctagttctcgcttttgtgcaatctatcgggattacagctggttttaataccttggctggagctcaattgattaaaactgctttaactccacaagtttttctgacgattggtatcatcttaacagctggtagtatgattgtcacttggttgggtgagcaaattacagataagggatacggaaacggtgtttccatgattatctttgccgggattgtttcctcaattccagagatgattcagggcatctatgtggactactttgtgaacgtcccaagtagccgtatcacttcatctatcattttcgtaatcattttgattattactgtattgttgattatttactttacaacttatgttcaacaagcagaatacaaaattccaatccaatatactaaggttgcacaaggtgctccatctagctcttaccttccgttaaarrtaaaycctgctggagttatccctgttatctttgccagttcgattactgcagcgcctgcggctattcttcagtttttgagtgccacaggtcatgattgggcttgggtaagggtagcacaagagatgttggcaactacttctccaactggtattgccatgtatgctttrttgattattctctttacattcttctatacgkttgtacagattaatcctgaaaaagcagcagagakcctacmaaagagtggtgcctatatccatggagttcgtcctggtaaaggtacagaagratatatgtctaaacttcttcgtcgtcttgcaactgttggttccctcttccttggtgtgatttccattttaccgattgcagctaaagatgtatttggtctttctgatgttgttgcctttggtggaacaagtctcttgatcattatctctacaggtatcgaaggaatcaagcaattggaaggttacctattgaaacgtaagtatgttggtttcatggacagaacagaataactaat

SEQ ID NO: 3114 - DNA, 386 bp, Streptococcus pneumoniae
  misc_feature (1)..(386): tiling:Spneumo1:WAN024F4S; Cluster includes WAN023M7G 3150 90_469a||||240296..240532|-|237 bp|EGAD orf prediction|S.p neumoniae|R6|NC_003098.1|ORF|210
atgwacggckatttcmgtatctgtytgcccyttgaagtggtgmccwgcaaggtattcttcyttratttcaagrtagttytcaatcaccccattrtgmaccaagacaaaacgttcygtctcagagcggtgtgggtgagcattgtcytcmgttggtttyccrtgagtwgcccaacgagtatgtccgataccagttgttccctcaacaccagctgtcttggcagacaattctgcratacgaccaacmgccttcaccaaatggttatcagcaccatctaggacaaaaattcccgcagaatcatagccacggtattcaagcttttcaagcccttgaatcaaaatatcagttgcatttgtgtttccaacaacaccaacaattccacacatag

SEQ ID NO: 3115 - DNA, 167 bp, Streptococcus pneumoniae
  misc_feature (1)..(167): tiling:Spneumo1:WAN024F98; Cluster includes WAN0243GR spr1 753||15903795|NP_359345.1|1721537..1721710|-|174 bp|Hypoth etical protein|S.pneumoniae|R6|NC_003098.1|ORF|121
atgwatrtgataaatgtatgtgatgttggaaaaagaataaaagaacttagaatatcttcaaatcttactcaagataagattgctgagtatttgtctttgaatcaaagcatgattgccaaaatggaaaaaggtgaaaggaatatcacgaatggatttaagtaactaat

SEQ ID NO: 3116 - DNA, 423 bp, Streptococcus pneumoniae
  misc_feature (1)..(423): tiling:Spneumo1:WAN024B86; Cluster includes WAN0244T0 spr0 014|transposase A|15902058|NP_357608.1|20207..20554|+|348 bp|Transposase|S.pneumoniae|R6|NC_003098.1|ORF|774
atgwggtataatcytyytatrgvatattcaatagattttcgtaaaaaagytctctcttattgtgagcgaayagrtagtatarcagaagyrtcayacgttttccaaatmtcaygtawtwssrtttatggctggttaaagctaaaagaraaaacaggagagytaaaycaccaagtawarskaayaaarycaaswaavgttgatagagatrgacttaaaaactatcttactrayaatccmgaygcttatttgactgaaatagcttctgamtttgsctgtcatccaactaccatccactatrcgytcaaagckrtgggytacactckaaaaaarracyacasytactaykaacaakasccagaaaaagtagccttatttcttaaraattttaatagtttaaagcacctarcacctgttctarctaat

SEQ ID NO: 3117 - DNA, 1227 bp, Streptococcus pneumoniae
  misc_feature (1)..(1227): tiling:Spneumo1:WAN024G4D; Cluster includes WAN0241YV SP17 66||15901597|NP_346201.1|1668931..1670151|-|1221 bp|glycos yl transferase, family 8|S.pneumoniae|TIGR4|NC_003028.1|OR F|011
atgwkaaakaymaramrygctgtagtatttgcaggtgattacgcttatattcgacaaatcgaaacggcgatgaagtcactctgtagacacaatagtcatttgaaaatttatctgctaaatcaggacattcctcaggaatggtttagtcaaataagaatatatttacaagagatggggggcgacttgattgactgcaagttaattggctcacagtttcaaatgaattggtctaataaattacctcatatcaatcatatgacatttgcacgctattttattccagattttgtaacagaagataaagttctctatctagatagtgatttgattgtgactggtgatttgaccgatttgtttgaattagacttaggtgaaaattatttggcagcagctcgttcttgctttggagcaggagtcggcttcaatgctggtgttctcttgattaacaacaaaaaatggggatctgaaactattcgacaaaaattgattgacttaacagaaaaagaacatgagaatgtggaagaaggagaccagtcaattttgaatatgttgtttaaagatcaatatagttcccttgaagatcaatataattttcaaataggatatgattatggggcggcarcctttaaacatcaattcatttttgatattccgctcgaaccactgccactaattttacactatatttctcaggataagccttggaatcaattttctgttggacgtctaagagaagtttggtgggaatactctttgatggattggtctgttattttaaatgaatggttttcaaagagtgtgaagtaycctagtaaatcacaaatatttaagttgcaatgtgttaatttaacgaattcttggtgtgtcgagaaaatcgattatttggcggagcaattgccagaagttcattttcatattgttgcttatacaaatatggcaaatgaactactagctttaacgcgttttcctaatgttaccgtatatccaaattccttaccaatgttattggaacaaatagtaatagcttcagatttgtatttggatttgaatcatgatcgaaaattagaagatgcatatgagtttgtgcttaagtacaaaaaaccaatgatagctttcgacaatacttgctctgaaaatctttctgagatttcatatgaaggtatctatccaagctccattccgaaaaaaatggttgcagcaatcagatcttacatgaggctarctaat

SEQ ID NO: 3118 - DNA, 240 bp, Streptococcus pneumoniae
  misc_feature (1)..(240): tiling:Spneumo1:WAN024BHD; Cluster includes WAN023RVF cont ig_1609_65||||54143..54382|-|240 bp|Glimmer 2.02 orf predi ction|S.pneumoniae|670|WAN01UDCD|ORF|001
atgwttacgcattttaaaggttttgtttatggagtagacgcaagtgcyatgtttgcacaagctatgtctttgttacagaagggattgattgcsgttggtgcctttctcgttgttgtkgggattgtcaatcttgcaaccaayattaaagatggwggaccaggtgttcggaatgccattcttgaaattgtcggtggwgttatggtmggggctgctggagcctttgtaacycaratttcaatt

SEQ ID NO: 3119 - DNA, 792 bp, Streptococcus pneumoniae
  misc_feature (1)..(792): tiling:Spneumo1:WAN024BHW; Cluster includes WAN023PR2 pne1 7_11||||5979..6770|+|792 bp|Type 10A capsule operon, Glimm er 2.02 orf prediction|S.pneumoniae||WAN01UCJH|ORF|000
atgycaaaaaagtataaaattatagtagcgactcataaaaratttcaaatgccagaagataaggryttatatattcctgttcargttggcagtgaaggaaaggaaaatttrggytaycaacgagatgatcaaggtaatcatatctcacacctcaatccttattattgtgaattracaggattatactgggcttggaaaaatttagamtgtgattacctaggattagttcattaccgacgttattttacagayaggaaccgaccttatcatgataagattaacatgaatgaagttatcctatcggcagatcaagttaagrarytcatgtctgaagtagatgtcgttgttcccaaaaagagaaaatattatatagaaactctctattctcattatgctcayactcatrattccagtcatttagatgtaacrcgagaaattataaaagaggtttcgccagaatatttagcaacatttgacaaggtgatggactgtcgtagtggctacatgttcaatatgtttatcatgkmcaaagaaaatgtatcatcttattgtgagtggttrttccctatcattgatgagttgtacagaagattggatataacaggrtactctrcttttgatgcaagactatttggacgtrttagtgagcgtctctttaatgtttggttagaytrccaaaatctacgtgttaaagaagtwccrtttatgtatatggraaaagtgaatttatttgagaagggcaaatccttcttgaaagcyaagtatttcggaaaaaaatatggacagagtttt

SEQ ID NO: 3120 - DNA, 690 bp, Streptococcus pneumoniae
  misc_feature (1)..(690): tiling:Spneumo1:WAN024BI8; Cluster includes WAN024176 |cps 9vD||AAM62288.1|||690 bp|autophosphorylating protein-tyros ine kinase Cps9vD|S.pneumoniae||AF402095|ORF|001
  misc_feature (669)..(669): n is a, c, g, or t
atgycaacrttagaaatytcacakgcraaattggattytgtaaaaaaggcagaggaawattataaykcyttgtgyaygaacctacagttaagtggagrtrrtttraragtattktctatcacttctgtgaaavhrggagaaggaaaatcaaygacttccrycaatatygcttggrcttttgcgcrtgcaggttacaaaacgytgctgattgatgsagatattcgcaattctgttatgtyaggtgtctttaaagcaagrrataagattacaggcctgacagaatttttatcaggaactacrgacytatcacaagggctttgtgataccaatrtcgaaaatctctttgtaattcaggctggctctgtgtcaccgaatccgacagctcttcttcaaagkragaatttcastacaatgcttgaaacmttgcgtaaatattttgaytayatcattgtaratacwgctcctrtyggtgtygtgattgatgcggytattattacgcraaamtgcgatgcttctattttagtgacgraggyagrtgaartaamtcgwcgggatattcaaaaagcaaaagaacagttggaacacacaggraagccgtttttgggarttgtgttgaatarattcgatacttcagtaracmaatrcggttcttatrgrrrytayrgrranwahkrraaraataaaaaatag

SEQ ID NO: 3121 - DNA, 704 bp, Streptococcus pneumoniae
  misc_feature (1)..(704): tiling:Spneumo1:WAN024FWL; Cluster includes WAN0243W7 spr1 196|nanE|15903239|NP_358789.1|1193495..1194193|-|699 bp|N- acetylmannosamine-6-P epimerase|S.pneumoniae|R6|NC_003098. 1|ORF|211
atgycacagattagyaaagaagccttgattgagcaaatcaaagatggaatcatcgtttcttgtcaggctcttcctcatgaaccgctttatacagaagcgggaggggtgattcccttgctggtcaaagcggctgagcaaggtggagcagtcggtatccgagcaaacagtgttcgcgatatcaaggaaattaaggaagtcactaaacttccaatcattgggattatcaaacgtgattatccacctcaggaacccttcatcacggctactatgaaagaagttgatgaattggcagaactggacatcgaggtgattgctctggattgtaccaagcgtgaacgctacgatggtttggaaattcaagagttcattcgtcaggttaaggagaaatatcctaatcagcttttgatggctgatactagtatcttcgaagaagggctagcagctgtagaagcaggaattgactttgtcggaacaaccttatcaggctacacatcctacagtccaaaagtagacggtccagattttgaattgattaagaaactctgtgatgcyggtgtagatgtcattgcagaaggaaaaattyatacaccagaacaagccaaacaaatccttgaatatggagtgcgaggcatcgttgttggtggcgcyattactagaccaaaagagattacagaacgyttygtwgckrgwytwaaatarctaat

SEQ ID NO: 3122 - DNA, 315 bp, Streptococcus pneumoniae
  misc_feature (1)..(315): tiling:Spneumo1:WAN024DY9; Cluster includes WAN023KGM 3141 64_3507||||1880731..1881045|-|315 bp|EGAD orf prediction|S .pneumoniae|R6|NC_003098.1|ORF|110
atgycagttgtttyatcaactagcttcaaaagatctgttttccctttttctttgaggttatattccaattcgaagtttgaatcraagtggtcctcaatagaacgttttgatttaccagtgacaactagaatatcttcaatacctgatttgagagcytcttccacgataaactggatagttggtttgtctacgattggcaacatttctttggcaagggccttggttgctggtaaaaatcgagttcctagtccagcagcagggatractgcctttctaacttttgatgtcataaaaatcctttctatagagggttaa

SEQ ID NO: 3123 - DNA, 1238 bp, Streptococcus pneumoniae
  misc_feature (1)..(1238): tiling:Spneumo1:WAN024BHH; Cluster includes WAN0243PS spr1 427|clpX|15903470|NP_359020.1|1411427..1412659|-|1233 bp|A TP-dependent Clp protease ATP-binding subunit (class III h eat-shock protein)|S.pneumoniae|R6|NC_003098.1|ORF|220
atgyctacaamtagraawaatgatatgatggtttattgctcattttgtggcaaaaaccaagaagaagtacaaaaaataatygctggcaacaatgcttttatttgtaatgaatgcgtggagttrgctcaggaaatcattcgagaagaattggttgaggaagtcttggcagacttgtctgaggtgccaaaaccaattgaactcctccatatcttgaaccactatgtwatyggycaagatcgtgccaagcgtgcyttggcagtggcrgtttayaaccactacaaacgyatcaayttccacgatacrcgygaagagtcagaagatgtggatttgcagaartcaaacattttgatgattggcccaactggttcagggaaaactttccttgcccagaccttrgctaagagyttraatgtrccttttgcyattgcrgatgcgacagctctkackgaggctggttatgtrggtgaggaygtggaaaatatmctcctyaaactcttgcaggytgctgactttaayatcgarcgtgcagagcgtggsattatctaygtggatgaaattgacaagattgccaagaagagygagaaygtgtctatcacacgtgaygtttctggtgaaggggtgcaacaagcccttctcaagattatygagggaactgttgctagcgtrccgcctcaaggtggacgcaaacatccacaacaagagatgattcaagtggatacaaaaaatatcctcttcatcgtgggtggtgcttttgatggtattgaagaaattgtcaaacaacgtmtgggtgaaaaagtcatcggatttggtcaaaayaataaggcgattgacgaaaacagctcatayatgcaagaaatcatcgctgaagacattcaaaaatttggtattatccctgagttgattggacgcttgcctgtttttgcggctcttgagcaattgacygttgatgacttggttcgcatcttgaaagagccaagaaatgccttggtgaaacartaccaaacyttgctttcttatgatgatgttgagttggaatttgacgacgaagcccttcaagagattgctaataaagcaatcgaacggaagacaggggcgcgtggacttcgctccatyatcgaagaaaccatgctagatgtyatgtttgaggtgccgagtcaggaaaatgtgaaattggttcgcatcactaaagaaactgtmgatggaacggataaaccgatcctagaaacagcctarctaat

SEQ ID NO: 3124 - DNA, 701 bp, Streptococcus pneumoniae
  misc_feature (1)..(701): tiling:Spneumo1:WAN024FQW; Cluster includes WAN0243TJ spr1 292||15903335|NP_358885.1|1287540..1288235|+|696 bp|Conser ved hypothetical protein|S.pneumoniae|R6|NC_003098.1|ORF|1 11
atgyctactttttcttcaaatgctccctttaatcccaatccgatctctaagatattagtcgtatttatcacaggcttaactgttatgcatagcataaacatccgttttgagctggcaattgtttgtcttattggtattttgctttatttgaatggatacaaaaaaacacttttcaaatggattatattgtgtgggatactttactccttgcctaattttatggtgytatctgaattaaaccctatagttaagatgtttttgagtatacctattgttattagaatgtttattttaccatttatggcagcaagctttatgataaagacctcggatgtaggcgcaataatttcatcgatggataagcttaagatttcaaagaatgtatccatacctattgcggttatgtttagattcttcccatcttttaaggaggagaagaaaaacatcaaaatggctatgagagtaagagggataarttttaaaaacccagtcaaatatcttgaatatgtttctrtgccactactcattatatcatctaatatatcagatgacattgcaaaagcggcagaaacaaaggcaatagaaaatccaattgccaagaccagatacattcgcgtaaagatacagctaattgattttgtttatgttttagcggttgctggacttattgtgggaggcttaatatggttgaaataactaat

SEQ ID NO: 3125 - DNA, 261 bp, Streptococcus pneumoniae
  misc_feature (1)..(261): tiling:Spneumo1:WAN024F25; Cluster includes WAN023LQW 3146 86_1349a||||716427..716687|-|261 bp|EGAD orf prediction|S. pneumoniae|R6|NC_003098.1|ORF|110
atgygttccaccttcatgkgtatgaatattattggcgaaactcatgacattttcatggtaaccmgttgtgtactgcatggctacctcaactgtgatatcatccatctcaccgtctgtatagattggtgtatcaaagattacatccttgttctcgttgatatattcaacgtaactagcaatcccaccttcataatgataatgcttggtttgttccaaaccttggcgcttatcwgtratwgaaatttgaagaccgcgatttag

SEQ ID NO: 3126 - DNA, 867 bp, Streptococcus pneumoniae
  misc_feature (1)..(867): tiling:Spneumo1:WAN024D3P; Cluster includes WAN0243HU spr1 714|msmR|15903756|NP_359306.1|1688139..1688999|+|861 bp|MS M (multiple sugar metabolism) operon regulatory protein|S. pneumoniae|R6|NC_003098.1|ORF|111
atgytagttttttcagaataccagactggaacaatygaccttgccctaagcttttatggatatgaggaatgcacacctaattactcttttggtccagccattcgtgatacatacgtyctacattacattastaaaggacaaggaaaatttyattacaagggtaaaattgttratttaaaagaaggagatttctttctattaaaaccagaggaactaaccttttatcaagcagatagtaaagaaccttgggcctactactggttaggaatcactggagggaaakcccctgattattttgctctttcycaaatttctgatcaatcctatctcatccaatctgaaacttgtcatacccagactactgcaaaactcatctcagacattgtccgcttcgctcagattacaaaatcaagtgaattagctcaactccatatcatgggacaacttcatgaactgatgtttcatctgggaactattgctcccaatcagaaaaaaaagaatatttcatcaacccaccaactctatcttgaatgcaaacgattaattgatagccactatcctcaatcacttacaattcaagatttagcaaaagaactatccgttcacagaagctacttatcaagcgtattcaaagaatttaataccttatcacccaaagaatacctactctacgttcgaatgcaccgagctagacaacttctcgaaaatacccaagagtccatcaaggtaattgcatactcggtaggtttttcagatccactccatttttcgaaagcttataaacaatactttaatcagwctccaagtcatacaagaaaagaatactctcaataccaactagtragaaaggcaacattaykaactaat

SEQ ID NO: 3127 - DNA, 225 bp, Streptococcus pneumoniae
  misc_feature (1)..(225): tiling:Spneumo1:WAN024CPQ; Cluster includes WAN023M6U 3153 54_498a||||256653..256877|-|225 bp|EGAD orf prediction|S.p neumoniae|R6|NC_003098.1|ORF|110
atgytcytcccargccttaacaggatctgcttcgtagacacggcaagttttgaaratttggtcccaaaggaratcractgcttcttcgtcgctcgcagcatttgggaagactttcttagcccactcaagtccwgcwgcrgctgctacagtccagctaaccttgttagattgagttgcgatwcgcatwggcttcatggcaagtcccatagctttagcagaagctga

SEQ ID NO: 3128 - DNA, 959 bp, Streptococcus pneumoniae
  misc_feature (1)..(959): tiling:Spneumo1:WAN024G89; Cluster includes WAN02444X spr0 881|coiA|15902925|NP_358475.1|871667..872620|+|954 bp|Comp etence protein|S.pneumoniae|R6|NC_003098.1|ORF|111
atgyttgttgcgagagatrctaggggagaattggtaaatgtgttagaggataaacttgagaagcaagcatacacctgcccagcttgtggaggccagmtccatttgcgtcaaggaccaagtgtacggacgcattttgcccataaatyyttaaaagactgtgattttttctttgaaaatgaaaktccakaacwmmtrgccaataaggaatycctctatcactggttgaaaaaagagacaaaggttcaattagagtacccgctttcagaacttaaacagattgcggatgtatttgtaaatggcaatctagctctagaagttcagtgtagtcccttgcctcagaaagtccttaaagagcgaagtgagggctatcgtagtcagggttaccaagtactgtggttgctgggtcaaaaactgtggctcaaggagcgtttgactcgtctacagcaaggttttctktatttcagtcaaaacatgggcttttatgtttgggaattagacaaggraaaacaagttttaagactcaaatacctgatttaccaggatctccgcggtaaactccattatcaaatcaaggaattttcctatggycaaggtagtttattggaaatattgcgtcttccctataagaracaaaaaatatctcattttacagtttctgaggacaaggacatctgtcgctatatycggcaacaactttattatcaaaatctcttttggatgaaagaacaagcagaagcctatcaaaagggagaaaatatcctgacttatggactgaaagaatggtatccacaaattcgaccaatagtgggcaaatttttccagattgaacaagacttgactagctattatcrgmacttttatacctattaccaaaaaaatcctcaaaatgattggcaaaagctttatccaccagccttttatcagcaatatttcttgaaaaatatggtagaatarctaat

SEQ ID NO: 3129 - DNA, 951 bp, Streptococcus pneumoniae
  misc_feature (1)..(951): tiling:Spneumo1:WAN024FQA; Cluster includes WAN023PQX pne1 7_16||||11110..12060|+|951 bp|Type 10A capsule operon, Gli mmer 2.02 orf prediction|S.pneumoniae||WAN01UCJH|ORF|000
atgytyattagtgttgttgttccggtttataatgtttctgaytayttacactttgccatggatagtctgataaarcaaacrtatcaaaattttgaartaatccttgtaaatgatggttcaacagataactcycctcagttatgtgaagagtatgctaagcratatgaaaaygtctctgtttttcataaagaaaatggaggrttgtctgatgcycgtaatttwggagtttcraaagcatcatcagaktggattttctttytagatccagatgattatttggaagattatactctagaattgatagtgaaaattcarcaggaacatcaagcaracttgatttcwacyaaagtraaggcaacktctaartataatgattatartccttatcaacttgagragtcagattataaggmtttgtgtgttkttacaaaagagaaggctcttgagctaatgctagacgayaagattgcgacagtttctgcttgtgctaagytktatcacaarartatcttggaaaaarttccatwtccwgttggaaaaatctatgaagacttttatgtggtagcggatcaccttgccttagcgsataaaattgtgattagtccacttgaaacatataactattaccgtagagaaggtagtattgtycgttcgacttttactgagaaaagatatgatttttttgatgctgtttcgaaaaacgaasaagttataaakaaagaatacacacaaagtytagaattacarcaatytctgcaagcgaaaaaattacgaggaggytttgttgtaattggtgcraargctgactctggtttaacagatttttcgaaagatmgaracctattaaaagttgattttaaaamcatgttattaaataaaaaaatatcrtggaaaytaaaattaaaatatacaatatttatgctrtcatctaaartrtatttaagattaagr

SEQ ID NO: 3130 - DNA, 825 bp, Streptococcus pneumoniae
  misc_feature (1)..(825): tiling:Spneumo1:WAN024FAT; Cluster includes WAN0243FI spr1 798||15903840|NP_359390.1|1769404..1770282|-|879 bp|Conser ved hypothetical protein|S.pneumoniae|R6|NC_003098.1|ORF|1 11
atssagggacaaatcattaaagccttggcwggkttctactatgtrgagagtgatggccargtytatcaaacacgcgcgcgtgggaatttccgtaaaaaaggscataccccttaygttggggactgggtagatttctctgccgaggaaaattcagaaggctatatyctcaarattcacgaacggaaaaacagtctggtycgtccgcctattgtcaatatcgaycaagctgtagtaatcatgtccgtcaaggaacctgattttaacagcaatttgctggatcgtttcttggttcttttggagcayaagggyatycatcccatygtctatatttcyaaaatggatttgttggaagayrggggagaactggatttttaccrgcagacctatggtgacatcggmtatgactttgtgaccagtaaagaggaactcctgyctttgttaacaggcaaggttacggtctttatggggcagacrggtgttgggaartcaactcttctcaataaamtcgyaccagayctyaatcttgaaacgggagaaatttcagacagtctrggtcgcggkcgycataccactcgagctgttagtttttacaayctcaaygggggtaaaatcgcagayacaccaggmttttcatchytggaytatgaagtatcaasggctgaagacctcaatcaggcyttyccagagattgcyactgtyagycgagaytgyaarttccgtacttgtacccatacccatgagccgtcttgtgccgtcaaaccagctgttgaagagggtgttattgcaaccttccgttttgayaattacctgcaattccttagtgaa

SEQ ID NO: 3131 - DNA, 858 bp, Streptococcus pneumoniae
  misc_feature (1)..(858): tiling:Spneumo1:WAN024DC4; Cluster includes WAN02443P spr0 925|hemK|15902969|NP_358519.1|911365..912204|+|840 bp|HemK protein homolog; possible protoporphyrinogen oxidase|S.pn eumoniae|R6|NC_003098.1|ORF|111
attaaacaaataatgaaattagctcaattrttttcaaattttgaagaagagttgataagacawggagaggaagcggaaagcctctcttttgtctatcgtagtctgaaaaatctatcttttacagactttatttttgccctccagcaggaggtgacaacagaggaagaaaaacaatttgtagaagatatttaccagcaactagcagctcacaagccagctcagtacatcattggacaggcagatttttatggaatgcatttaaaggtggatgaacgggttttgattcctcgtccagaaacagaggagttrgtggagcttatyctrrctgaaaatcytgwgamraatctywyrgtyctrgatatyggaacaggtagtggagctattgctctcgctctagcaaaaaayagaccagattggtcagtgacrgcagcagatrtttcycaagakgcyttagakbtwgctakmagaraatgctarmratcaaaatyttmawatatttttwaaaaaatctgaytgttttrcagaaatttctgaaaaatatgatataattgtwtccaatccaccctatatctctcgtgaagatgagtcagaggtaggyttgaatgtyttgyattcggagcctcatctagctctctttgcagaygaggatggcctagctatttacygtagaattgcggaagatgcaamagactatctcaargatrgtggtaagatttaccttgaaattggatacaagcaaggtcaawgtgttccygaactttttagraaacatcttcctgaaaarmragtwcgaacactcaargaccaatttggtcaarataggatggtygtsgttgatgatggacaggattarctaat

SEQ ID NO: 3132 - DNA, 79 bp, Streptococcus pneumoniae
  misc_feature (1)..(79): tiling:Spneumo1:WAN024A8V; Cluster includes WAN024EGM-rc R 6.IG_1061||||1002136..1002214|-|79 bp|Between spr1022 (rgg D) (+ strand) and spr1023 (+ strand)|S.pneumoniae|R6|NC_00 3098.1|IG-rc|110
attaaagctcctctcaaattttgaaactattgtatcaaaaccgaaaggagctttttattttttcccttatttgggaaaa

SEQ ID NO: 3133 - DNA, 624 bp, Streptococcus pneumoniae
  misc_feature (1)..(624): tiling:Spneumo1:WAN024FRD; Cluster includes WAN023PW2 pne0 8_12||||8862..9560|+|699 bp|Type 7A capsule operon, Glimme r 2.02 orf prediction|S.pneumoniae||WAN01UCKE|ORF|000
attaagaataaattaaaaccaatcgtttatccaattatcaattttatccctagacgaagactcaagaataaaaattttacaatcatttgcgacaattgttgggcaggaaaagtctatcaggaattgggcttgccttatcaaactccatttgtaggtatgtttgtcttttctcctgactacatcaaaatgctcaagaatttaaaacactatttgagtggaaatatccctttgacatttgttaaggaatcaaaatatgtcaaagactttgataatgcctatcccctggctcttttagacgatatcgaattgcatttcttacattatgcagatgaggaagaagcaactcaaaaatggaaccgtcgtttagaaagaattcattgggataatttgtatttcaagttcaatgataatgatgcctgtacttatgaattgatgaaagagtttgaagaacttccgtacaagagtaaggttatcttctcttcgagaaattacagtggtttaccttccttagttcatttcaaatcagctgaaaagcaaggacacgttgggattgatttgaaaacttatcaccgctattttaattgtgttacttggttgaataagggtggggaggatttaactaaa

SEQ ID NO: 3134 - DNA, 115 bp, Streptococcus pneumoniae
  misc_feature (1)..(115): tiling:Spneumo1:WAN024AOG; Cluster includes WAN024EOO-rc R 6.IG_438.2.2||||411998..412112|-|115 bp|Between spr0414 (d inP) (- strand) and spr0415 (pfl) (+ strand)|S.pneumoniae| R6|NC_003098.1|IG-rc|110
attaatgtcctcttttttctagtaacagtcatctgttacattcataagacaagtataccatawagtaaccgatttcaacaagtgmaaawtccctatttttacactttcttttcta

SEQ ID NO: 3135 - DNA, 93 bp, Streptococcus pneumoniae
  misc_feature (1)..(93): tiling:Spneumo1:WAN0249E5; Cluster includes WAN024E3D R6.I G_2228||||2014022..2014114|+|93 bp|Between spr2021 (- stra nd) and spr2022 (mreD) (- strand)|S.pneumoniae|R6|NC_00309 8.1|IG|110
attacgtagatactccttcttttaaagacaatactagtataccaaaaaaaggcctaataaatattacgcctttgttacatttatatgtcgttc

SEQ ID NO: 3136 - DNA, 231 bp, Streptococcus pneumoniae
  misc_feature (1)..(231): tiling:Spneumo1:WAN0249TO; Cluster includes WAN024ECD R6.I G_1386.2.1||||1326644..1326742|+|99 bp|Between C (transpos ase) (- strand) and spr1343 (tufA) (- strand)|S.pneumoniae |R6|NC_003098.1|IG|210
attactattgtataatgctttttgattttagtctagtattayactcttcgaaaatctcttcaaaccrcgtcarcktcgccttgycgtatakatgttactgacttcgtcagttctatctrcaacctmaaaacrrtgttttgagcagycygyrgctaryttyctagtttgctagtgtgctctttgattttcattgagtataacacaaaaggtagcccatcagctacctttttc

SEQ ID NO: 3137 - DNA, 84 bp, Streptococcus pneumoniae
  misc_feature (1)..(84): tiling:Spneumo1:WAN024ALA; Cluster includes WAN024EN6-rc R 6.IG_536.2||||511336..511418|-|83 bp|Between spr0512 (+ st rand) and spr0513 (+ strand)|S.pneumoniae|R6|NC_003098.1|I G-rc|110
attactcccaatagcactattcttcatcacttaaccctctttyttttacgtctatgtatttttaaaaaaatgagcgaattatga

SEQ ID NO: 3138 - DNA, 68 bp, Streptococcus pneumoniae
  misc_feature (1)..(68): tiling:Spneumo1:WAN024A6S; Cluster includes WAN024EFH-rc R 6.IG_1140||||1104794..1104861|-|68 bp|Between spr1102 (- s trand) and spr1103 (- strand)|S.pneumoniae|R6|NC_003098.1| IG-rc|110
attacttttttcaagtaaattttcattctttaaaatatgatataatagggcttacaatataagagagg

SEQ ID NO: 3139 - DNA, 82 bp, Streptococcus pneumoniae
  misc_feature (1)..(82): tiling:Spneumo1:WAN0249ET; Cluster includes WAN024E3N R6.I G_2203||||1990256..1990337|+|82 bp|Between spr1996 (- stra nd) and spr1997 (hk06) (- strand)|S.pneumoniae|R6|NC_00309 8.1|IG|110
attagtatcctttcttttatctacacaaagaataacacacttatgttaaccctatatgaactttaataaaaaactaatctgt

SEQ ID NO: 3140 - DNA, 63 bp, Streptococcus pneumoniae
  misc_feature (1)..(63): tiling:Spneumo1:WAN0249DM; Cluster includes WAN02471E-rc R 6.IG_231||||207709..207770|-|62 bp|Between spr0210 (adk) ( + strand) and spr0211 (infA) (+ strand)|S.pneumoniae|R6|NC _003098.1|IG-rc|110
attataagtcagactatytcagtataacatttgtagcggatttttgcaagtgtgaaaaacgct

SEQ ID NO: 3141 - DNA, 1705 bp, Streptococcus pneumoniae
  misc_feature (1)..(1705): tiling:Spneumo1:WAN024DBU; Cluster includes WAN024438 spr0 942|ccrB|15902986|NP_358536.1|926056..927735|+|1680 bp|Low similarity to site-specific recombinase|S.pneumoniae|R6|N C_003098.1|ORF|112
attatattgaggttaatactatgtcaaaagaaaaaataaaagtatacctctatacacgagtatctacgtcaatacagawagaggggtattcgttagrggcacaaaaatcacgaatgaaagcttttgctatttacaaygattatgaaattgttggagartatgaagatgccgggaagtctgrcaagtctattgaaggtagaatacagttcaatcgaatgatggaagatataaaatctggaaaagatggagtatcttttgttcttgtgtttaagttatcaagatttgcaagaaatgccgctgatgttctttctacacttcakataatgcaggattatggagttaatcttatctgcgttgaagatggcattgattcatctaaagatgctgggaaactaatgatttctgttttatcagctgtggctgaaatagaaagagaaaacatcmgtattcaaacaatggaaggtygcattcaaaaagcargggaaggaaaatggaatggtggctttgctccgtatggatataaacttgaagacggcaagctgtttataaatgaggaagaggcagttgcaataagaacgattttcgaccagtatgtaaatactacgataggagccaatgggatatctaaatacttagagaatcatggaattagaaaaatcccaagacagaatggtaagaatcctttgtttgatgcaggtcttataagaaagatattaaagaatcctgtatataatgggaaaatagcatttggaagaagaactttagaaaaagttcatggtacaagaaatgaatataagcaggttgaacaagatgaatatctaatatctgaagggatacatgaagctatagtttccgatgaagtttggyaagctgctcaggttaagctaaaatctcaagcaaagaaatatgagcatgtgaataaaggaaaagatacacgcacacacttgctttctggaattgtaaaatgcccgatatgtggagtgggaatgtttgggaacaagtgtatcaagaaaaagaaagatggcacaaagtataaagatttttattactatggttrtaavcataggcagatgataagaggtmataagtgtacattcagtaagcaaattagagaagaattkttagatgatgctgttgcagaggtgattgtcaagatagtaagtaatccgaaatttgcttctatgatgcaagaaaaaatcaacatgaaggtggatacctctgaaatagaaaaagaaatagataattaccaaaaggaattgagaaagagtcattctacaaagtttaagctaattgaggaaatagataatttagatgttgaagataagcattataagagaaggaaacaggatttagatgatagactatatcgtatgtatgacaaamtagatgaattagaatcatcactaattgatgcgaaagcaaagaaacagactattgaagctgaaaagcttacaggagataacatatataaggttctratctattttgataagctctataaagtcatgaatgatgtagagcgtaggcagttaatttcagctttgatttctgaaattcaagtttatgaagaaaaacaatctaacggacaatggctaaaatccattacttttaagctaccaattatagaagaaaatctcaacatagrtttggayaatgatgaacaagttgaatgtgtaagtttattagagaaacgtagttaactaat

SEQ ID NO: 3142 - DNA, 75 bp, Streptococcus pneumoniae
  misc_feature (1)..(75): tiling:Spneumo1:WAN024ALW; Cluster includes WAN024ENH-rc R 6.IG_506.2||||485474..485548|-|75 bp|Between spr0482 (rbfA ) (+ strand) and spr0483 (+ strand)|S.pneumoniae|R6|NC_003 098.1|IG-rc|110
attatatttcctacaaaaaaagcattttctaattagataacattaaaaaatacagaatcccttttttatattaaa

SEQ ID NO: 3143 - DNA, 66 bp, Streptococcus pneumoniae
  misc_feature (1)..(66): tiling:Spneumo1:WAN0249M5; Cluster includes WAN024E7T R6.I G_1755||||1676928..1676993|+|66 bp|Between spr1706 (amiC) (- strand) and spr1707 (amiA) (- strand)|S.pneumoniae|R6|N C_003098.1|IG|110
attatttcctttaaaaatcccaaaagaaccttctcctcatggagagaaagttctattagaaattat

SEQ ID NO: 3144 - DNA, 147 bp, Streptococcus pneumoniae
  misc_feature (1)..(147): tiling:Spneumo1:WAN0249W7; Cluster includes WAN024EA9 R6.I G_1562.1||||1493434..1493580|+|147 bp|Between spr1515 (ddl ) (- strand) and spr1516 (recR) (- strand)|S.pneumoniae|R6 |NC_003098.1|IG|110
attatttgtcctaattctactagaatactcgctctttagtatatcatatttgcttggttttttaaaacttgaacctgagcctactcatcacactatacaaaaagaggccgataggaacgattttcagcctctttgattttttataaa

SEQ ID NO: 3145 - DNA, 1842 bp, Streptococcus pneumoniae
  misc_feature (1)..(1842): tiling:Spneumo1:WAN024F2M-3; Cluster includes WAN0243G4 sp r1776|rpoC|15903818|NP_359368.1|1744311..1747988|-|3678 bp |DNA-dependent RNA polymerase|S.pneumoniae|R6|NC_003098.1| ORF|551
attcaagaagaaaaacctyggaaatatcatcgctgaaatcttcaaacgtttccgtacgacagaaacttctgccctacttgaccgcatgaagaacctcggttaccaccactcaactcttgcaggattgacagtgggtattgccgatatcccagtcgttgatgacaagrctgaaatcattgaagaatcacacaaacgtgtcgaacaaatcaccaaacaattccgtcgtggtatgatcacagacgacgagcgttacaatgctgttacagctgaatggcgtgctgcccgtgaaaaacttgagaaacgcttgattgctaaycaagatcctaagaacccaatcgttatgatgatggactctggagcccgtggtaacatctcaaacttctcacagcttgccggtatgcgtggtctgatggctgctccgaatggacgtatcatggaattgccaatcctttcaaacttccgcgaaggtttgtcggtattggaaatgttcttctcaactcacggtgctcgtaaaggtatgaccgatacggcccttaagacagccgactcaggttacttgactcgtcgtttggtcgacgttgcccaagacgttatcatccgtgaggacgactgtggaactgaccgtggtctcttgatccgttctatcgcagaaggaaaagagatgatmgagtctctcgaagagcgtctcaacggtcgttacactaagaaaactgttaaacatccagaaactggtgcagtgattattggtccaaatgaattgattacagaagacaaggcgcgtgaaattgtcaatgctggtgtggaagaagtgactatccgttctgtatttacatgtaacactcgtcrcggtgtctgccgtcactgttacggtatcaacttggcgactggtgatgcggttgaagttggtgaagcagttggtacaatygctgcccaatctatcggggaacctggtacacagcttacaatgcgtaccttccacacaggtggggttgcctcaaataccgatatcactcagggtcttcctcgtgtccaagaaatctttgaagcccgyaatcctaaaggggaagcggttatyacagaggttaaaggacaagttactgctatcgaagaagatgcatcaactcgtaccaagaaagtctttgttaagggtgaaactggcgaaggtgaatatgtcgttccatttacagctcgtatgcgtgtcgaagttgggggccaagtagcgcgtggtgctgctctgacagaaggttctatccaaccaaaacgtctccttgcagttcgtgatgtcttgtcagttgaaacgtaccttctcggtgaagtacaaaaagtttaccgtagccaaggggtagaaatcggtgacaaacacatcgaggtaatggttcgtcaaatgatccgtaaagtccgtgtcatggatccaggtgatacagatcttctcatgggtaccctcatggatatcaatgactttacagatgccaacaaagatgtccttatcgcaggtggagttccagcgacaggtcgcccagtccttatgggaattaccaaagcctcacttgaaacaaacagtttcttgtcagcrgcttccttccargaaacaactcgtgtccttactgacgcagctatccgtggtaagaaagaccatctccttggacttaaagaaaatgttatcatcggtaagatcatcccagctggtactggtatggcccgttaccgtaaccttgaaccacatgctgtcaacgaagaagaataccttaatcctmcagtagaggaagaaggaaatgaagaaacaacagaagtagttgtggatactgccgttgaaactgtggaagaaacagtagaataactaat

SEQ ID NO: 3146 - DNA, 180 bp, Streptococcus pneumoniae
  misc_feature (1)..(180): tiling:Spneumo1:WAN024A6Y; Cluster includes WAN024EE7-rc R 6.IG_1244.1||||1195922..1196101|-|180 bp|Between spr1200 ( - strand) and spr1201 (- strand)|S.pneumoniae|R6|NC_003098 .1|IG-rc|110
attcatttaaattgtaaactttagagattctctggagttatggatgtcgttccaatatgtgcacgttggaatgttagtgcttatatggggggaacagaatcctctcttgattgaagacaagctagtcattaggctggtttgtctttttgtcaactgtagtgggttgatataatagtatta

SEQ ID NO: 3147 - DNA, 131 bp, Streptococcus pneumoniae
  misc_feature (1)..(131): tiling:Spneumo1:WAN024AFT; Cluster includes WAN024EK2-rc R 6.IG_781||||754722..754850|-|129 bp|Between spr0757 (parC) (+ strand) and spr0758 (ilvE) (+ strand)|S.pneumoniae|R6| NC_003098.1|IG-rc|110
attccactccttattctaaaaacctatttcttatattctacactatttttctaaaatagcaagtatattttgtaattttcagaaaattyctccaataaaaaccaactcttagaactgattcttcatttcac

SEQ ID NO: 3148 - DNA, 82 bp, Streptococcus pneumoniae
  misc_feature (1)..(82): tiling:Spneumo1:WAN024ADK; Cluster includes WAN024EIV R6.I G_885.1.2||||846753..846810|+|58 bp|Between spr0849 (phoL) (+ strand) and spr0850 (+ strand)|S.pneumoniae|R6|NC_0030 98.1|IG|110
attccgaacaagtctaatatacttttgagagaggaaaatccagttgtataggctaaaggttttatccaaaggtctgagacaa

SEQ ID NO: 3149 - DNA, 61 bp, Streptococcus pneumoniae
  misc_feature (1)..(61): tiling:Spneumo1:WAN0249IJ; Cluster includes WAN024E5O R6.I G_2015||||1830998..1831057|+|60 bp|Between spr1855 (- stra nd) and spr1856 (- strand)|S.pneumoniae|R6|NC_003098.1|IG| 110
attcctatcttaccaaatttcccttcttttttccatccttatagaaaaatcactccctgac

SEQ ID NO: 3150 - DNA, 58 bp, Streptococcus pneumoniae
  misc_feature (1)..(58): tiling:Spneumo1:WAN024ADT; Cluster includes WAN0247I0-rc R 6.IG_116.2||||103853..103910|-|58 bp|Between spr0095 (sdaB ) (- strand) and spr0096 (+ strand)|S.pneumoniae|R6|NC_003 098.1|IG-rc|110
attcgaaaattctccttctttctatagttctatcataccctttaaatattaccgtttc

SEQ ID NO: 3151 - DNA, 130 bp, Streptococcus pneumoniae
  misc_feature (1)..(130): tiling:Spneumo1:WAN024AEW; Cluster includes WAN024EJM R6.I G_828.1.1||||792302..792431|+|130 bp|Between spr0792 (hsdR ) (+ strand) and spr0793 (argR) (- strand)|S.pneumoniae|R6 |NC_003098.1|IG|110
attctaaagtgattgccatgctgagactcatttaaaattaaaaagagtagaaatttatgctatatatgagaagttttattaggaagaatgtcatcgttttcctagaatacagtatcagttgttaagtggt

SEQ ID NO: 3152 - DNA, 203 bp, Streptococcus pneumoniae
  misc_feature (1)..(203): tiling:Spneumo1:WAN024A98; Cluster includes WAN024EGS R6.I G_1055.1||||995435..995636|+|202 bp|Between spr1016 (+ str and) and spr1017 (mreA) (+ strand)|S.pneumoniae|R6|NC_0030 98.1|IG|110
attctaccttttcggcaccaattagtaatttaaagttctcaggagttagttgcattgctttttcatacataagcatagtatgacactttatggttaccgaacaagtctaatcactccttgcaaaattttgaagatgtcctacaagtttttgagaagaatattgcaaagttcatagttaagcaacgatagaataaagtgctttt

SEQ ID NO: 3153 - DNA, 66 bp, Streptococcus pneumoniae
  misc_feature (1)..(66): tiling:Spneumo1:WAN0249KZ; Cluster includes WAN024E75 R6.I G_1869||||1723026..1723090|+|65 bp|Between spr1754 (lytA) (- strand) and spr1755 (- strand)|S.pneumoniae|R6|NC_00309 8.1|IG|110
attctactccttatcaattaaaacaactcattttttacaatccagaaccagaaactcctttatttc

SEQ ID NO: 3154 - DNA, 406 bp, Streptococcus pneumoniae
  misc_feature (1)..(406): tiling:Spneumo1:WAN024A3G; Cluster includes WAN024EDD-rc R 6.IG_1318.2.2.2||||1270207..1270612|-|406 bp|Between spr12 74 (- strand) and spr1275 (- strand)|S.pneumoniae|R6|NC_00 3098.1|IG-rc|120
attctattttctgtttctatcgaagtcaactatttattgtaaatataataattagcattccaagtttatttgmaaytttaaaatagcatattgattagtacaagacagatgttctagttccttctttaatctggtttagtrttagttaaaaaatcgctttaagcttgtaactaagagggagctaatcgactagattctccagycgaacaggtggtaatgtrctttttatagtgtaatcctagctgttgttaaatttaaaatagaatcytctatcgagttagggaattaaattcaaccaattttattyatgtttttttctatcaaattatctaatattaaaatagtctcattctgatgagaaaactattctatttatactgcatagttgtataaggaatgatgaaag

SEQ ID NO: 3155 - DNA, 132 bp, Streptococcus pneumoniae
  misc_feature (1)..(132): tiling:Spneumo1:WAN024AJP; Cluster includes WAN024EM8-rc R 6.IG_607||||600016..600132|-|117 bp|Between spr0583 (+ str and) and spr0584 (glcK) (+ strand)|S.pneumoniae|R6|NC_0030 98.1|IG-rc|110
attctcctttttcattgtgtagtaattgaaaatgcttacagtactagtatatcaaaatycattcacttatgcaaaggtttgcgtrartgaattataaggaatttttttcgcctaccagtatctgttaatcat

SEQ ID NO: 3156 - DNA, 99 bp, Streptococcus pneumoniae
  misc_feature (1)..(99): tiling:Spneumo1:WAN0249VI; Cluster includes WAN024721-rc R 6.IG_168||||156309..156407|-|99 bp|Between spr0147 (+ stra nd) and spr0148 (dapE) (+ strand)|S.pneumoniae|R6|NC_00309 8.1|IG-rc|110
attctctctacctttctatgaacgaatagtcttctttacaatctatactctatacaaaagcaagaggtggaattttctctcccacctccctgtttctta

SEQ ID NO: 3157 - DNA, 624 bp, Streptococcus pneumoniae
  misc_feature (1)..(624): tiling:Spneumo1:WAN024AIM; Cluster includes WAN024ELO R6.I G_650||||634341..634964|+|624 bp|Between spr0626 (lysS) (+ strand) and spr0627 (lctO) (+ strand)|S.pneumoniae|R6|NC_ 003098.1|IG|120
attcttatcctctggstcttatcagrggattttttgattcaaaaagagactgaatttaaggagaaaatgaagtgtagtatattgaarttgaaatagtacactttgatttctaagacattgttagaaattggtttaaattccctaakcaatttgtgcatgttttatttcattttacgatagtacgctgaaacttttcaaaaagtactagaaattgacttggattccccaattgatttgttcagattcactataaataaaaaattaataagtgggataggaagttagcgtcaactaggatagtatcttgcttaaacagtatatatgggaytgatataagtccataggtcctattagaggatgttctggtgtcttattcacttgtttttttatagtattagtagatagaatcagcaaataaaaaagtagttcaaatgcctggcagcaaaaaatctcaacgattcacttaatatagactaargtttagagtttaaggaaagtagggctagtatattgtatgaaaaaataagatggtttttaagcaaaactcttgaaaatgattgaaaaaagagttattatagttgtatagtaaaaagcaaacgcttacttaatcraggaggacagttt

SEQ ID NO: 3158 - DNA, 86 bp, Streptococcus pneumoniae
  misc_feature (1)..(86): tiling:Spneumo1:WAN024AQO; Cluster includes WAN024EPX-rc R 6.IG_327.2||||305971..306051|-|81 bp|Between spr0306 (+ st rand) and spr0307 (clpL) (+ strand)|S.pneumoniae|R6|NC_003 098.1|IG-rc|110
attctttacctctttttgtttayttagttatgattactgatattgactatctttgaccwttkytttaaaaaatttagactagctaa

SEQ ID NO: 3159 - DNA, 302 bp, Streptococcus pneumoniae
  misc_feature (1)..(302): tiling:Spneumo1:WAN0249RY; Cluster includes WAN024CE1-rc T IGR4.IG_671.2||||682860..683025|-|166 bp|Between SP0716 (+ strand) and SP0717 (+ strand)|S.pneumoniae|TIGR4|NC_00302 8.1|IG-rc|020
attgaaatccttccttttcactttatacgatctactaatttcgatttatctttagttgagaattkytttcatytacatkgaatrayttatactcaatgaaaatcaaagagcaaactaggargctaaccgcaggttgctcaaaacactgttttgaggttgtggatgaaactgacgaagtcagctcaaaacaccgttttgaggtggcagatagaactgacgaagtcagtaacatatatatacggtaaggcgacgctgacgtggtttgaagagattttcgaagagtattaagctagtttttaggt

SEQ ID NO: 3160 - DNA, 372 bp, Streptococcus pneumoniae
  misc_feature (1)..(372): tiling:Spneumo1:WAN024AMN; Cluster includes WAN024ENT R6.I G_474||||458713..459084|+|372 bp|Between spr0450 (hsdR) (- strand) and spr0451 (+ strand)|S.pneumoniae|R6|NC_003098. 1|IG|110
attgaaccctccgcattctaaaaatctacttctccataaaataaactatcagaacaaattatacttctattatatcacacttataaaaatactctgctaaattgttgaaaataagtatgcaatatactttcgcatcgcgtcagattatctccgcataacacygctatttttcgctgttttcggcaggcgacttattatcattctataagcactttcagtcgggctggtgakctatttttcaaaaataaataatcacatttaaacattttgaaagtataaaatatctacatcagccgttcaaaaactggcgtaaattttgccataatattttcgtttaaataaagatttttttatgccaaaaggattttaaca

SEQ ID NO: 3161 - DNA, 70 bp, Streptococcus pneumoniae
  misc_feature (1)..(70): tiling:Spneumo1:WAN0249X4; Cluster includes WAN024EAV-rc R 6.IG_1515.1||||1450629..1450691|-|63 bp|Between spr1468 (- strand) and spr1469 (+ strand)|S.pneumoniae|R6|NC_003098. 1|IG-rc|110
attgacattgattattaagagtgtcacaattkctgtaactaaaataattacaacaagagaggtataaaaa

SEQ ID NO: 3162 - DNA, 73 bp, Streptococcus pneumoniae
  misc_feature (1)..(73): tiling:Spneumo1:WAN024AH4; Cluster includes WAN024EKS R6.I G_713||||690338..690410|+|73 bp|Between spr0689 (- strand) and spr0690 (+ strand)|S.pneumoniae|R6|NC_003098.1|IG|110
attggcctcccttcttttatatcaatattatataaaattttcctaaaatctacaagattttacgaataaacta

SEQ ID NO: 3163 - DNA, 74 bp, Streptococcus pneumoniae
  misc_feature (1)..(74): tiling:Spneumo1:WAN024AIH; Cluster includes WAN024ELL-rc R 6.IG_651.2||||636582..636655|-|74 bp|Between spr0627 (lctO ) (+ strand) and spr0628 (+ strand)|S.pneumoniae|R6|NC_003 098.1|IG-rc|110
atttacttctcctctctttacttgttagtaattaataaaacaccaagaaatatcaagcaaaatcgtaattccac

SEQ ID NO: 3164 - DNA, 155 bp, Streptococcus pneumoniae
  misc_feature (1)..(155): tiling:Spneumo1:WAN024AKK; Cluster includes WAN024EMP-rc R 6.IG_574||||550513..550667|-|155 bp|Between spr0550 (+ str and) and spr0551 (brnQ) (+ strand)|S.pneumoniae|R6|NC_0030 98.1|IG-rc|110
atttataaaatactgacctagtataccacgattaggagtctgaaaaaagcatcacgakgcaaatattaaatgttttcaaytttcttaaaaataagaattatctaaaaataaaactctcctacccagtccacaccaagtaggagaaatgcaaaatt

SEQ ID NO: 3165 - DNA, 382 bp, Streptococcus pneumoniae
  misc_feature (1)..(382): tiling:Spneumo1:WAN024A9Z; Cluster includes WAN024EH9-rc R 6.IG_1013||||960322..960703|-|382 bp|Between spr0974 (ppc) (+ strand) and spr0975 (+ strand)|S.pneumoniae|R6|NC_0030 98.1|IG-rc|110
atttcacttatctaaacaagcgacgccatcgttttctttccatactaacctccatcaaaaaaatcctcacacaaaaaacttgtgtgaggacgtcgatgcgcggtaccacctcaattatagggaatttccctatcgctcagtctcgcaataacgagatgcactgtaaggtgtgcttaccgaatttttataatttcaaattctaaatagcattcagcccaattttcatcattgccacttatctgttttcagctaccacagactctctaaaaagtttgtatgattacttttctgaatggttaaattatatcatttttaaactacttgtcaatagtctattagaatttttttgatattcacttttagcattcactcttgaaaatta

SEQ ID NO: 3166 - DNA, 70 bp, Streptococcus pneumoniae
  misc_feature (1)..(70): tiling:Spneumo1:WAN0249QA; Cluster includes WAN024EGE-rc R 6.IG_1077.1.1||||1020976..1021044|-|69 bp|Between A (trans posase) (- strand) and spr1039 (rexB) (+ strand)|S.pneumon iae|R6|NC_003098.1|IG-rc|110
atttccctaatcaagctrttcgtatcttatttcaatctactatartaaaatgaaccaaaaatagtacaca

SEQ ID NO: 3167 - DNA, 178 bp, Streptococcus pneumoniae
  misc_feature (1)..(178): tiling:Spneumo1:WAN0249DO; Cluster includes WAN024E36-rc R 6.IG_2246||||2032279..2032456|-|178 bp|Between spr2039 (- strand) and spr2040 (+ strand)|S.pneumoniae|R6|NC_003098.1 |IG-rc|110
atttcctccttgtaaacaaattagactatatgtctaaaaatagattttttatcttgtaatttagattttttaatgtataatctattatatcaaaattttagacaatatgtttaaaaaaggagaaactaagtttaaagaatggaaagcaatttaaaaaaaaccaacctttattattgtc

SEQ ID NO: 3168 - DNA, 83 bp, Streptococcus pneumoniae
  misc_feature (1)..(83): tiling:Spneumo1:WAN024ASQ; Cluster includes WAN024801-rc R 6.IG_3||||2917..2999|-|83 bp|Between spr0003 (+ strand) an d spr0004 (+ strand)|S.pneumoniae|R6|NC_003098.1|IG-rc|110
atttctcattctccgttttcatttcaatccctaatattataacacaaaaagggataaagtgctaaccctctaactaagggttc

SEQ ID NO: 3169 - DNA, 118 bp, Streptococcus pneumoniae
  misc_feature (1)..(118): tiling:Spneumo1:WAN024A5C; Cluster includes WAN024EEK-rc R 6.IG_1215||||1173838..1173955|-|118 bp|Between spr1171 (rp lS) (- strand) and spr1172 (crcB) (- strand)|S.pneumoniae| R6|NC_003098.1|IG-rc|110
atttctttacttttttttagaaatttggtaaactatatcttgtgtgtaatggacgcacaaaaatacagtttatccgctgaggaagattcctcaagattgacaaagataggagaataaa

SEQ ID NO: 3170 - DNA, 179 bp, Streptococcus pneumoniae
  misc_feature (1)..(179): tiling:Spneumo1:WAN024AKX; Cluster includes WAN024EMY R6.I G_550||||527019..527197|+|179 bp|Between spr0526 (vex3) (+ strand) and spr0527 (pep27) (+ strand)|S.pneumoniae|R6|NC _003098.1|IG|110
atttgaaaaaatgagtctrgaataaagattgcatcttgtgtttctattcaagaatagtggataggaatggctatttaacaattcaaaataaatccgaaagcagtggtgaaaatcattgctttcagttgytttctttgtactttaktgcttaaatataatatactaaagytatggaattt

SEQ ID NO: 3171 - DNA, 182 bp, Streptococcus pneumoniae
  misc_feature (1)..(182): tiling:Spneumo1:WAN0249DG; Cluster includes WAN024E33-rc R 6.IG_2260||||2036224..2036393|-|170 bp|Between spr2044 (- strand) and spr2045 (sphtra) (+ strand)|S.pneumoniae|R6|NC _003098.1|IG-rc|110
atttgcctccatatgtttgaattactgaaagtataaactgactagcttaattataacttaaacacaaaagttttacacaaactgtggataactcttttgaaattgtgattttcttaattgaaatctattttttattttgtgaataagatgtgaaaaaatagagaatatgttagaatagagtc

SEQ ID NO: 3172 - DNA, 128 bp, Streptococcus pneumoniae
  misc_feature (1)..(128): tiling:Spneumo1:WAN024AR4; Cluster includes WAN024EQ8-rc R 6.IG_304.2.2||||281875..282001|-|127 bp|Between spr0283 (+ strand) and spr0284 (xylS) (+ strand)|S.pneumoniae|R6|NC_ 003098.1|IG-rc|110
atttgttttcctccttttatggtagcataaaaacagaacgcaccatttttgatgcgtttttcattattctgaatgcaatgttctatctgttatatctatgacaaataatagtcaattgaaaaaaatgt

SEQ ID NO: 3173 - DNA, 49 bp, Streptococcus pneumoniae
  misc_feature (1)..(49): tiling:Spneumo1:WAN024A5R; Cluster includes WAN024EEU R6.I G_1195||||1159318..1159366|+|49 bp|Between spr1154 (carA) (- strand) and spr1155 (pyrB) (- strand)|S.pneumoniae|R6|N C_003098.1|IG|110
attttcacctctcgtggacgctcactggcgtcttttaacgtcttgtgtt

SEQ ID NO: 3174 - DNA, 92 bp, Streptococcus pneumoniae
  misc_feature (1)..(92): tiling:Spneumo1:WAN0249YM; Cluster includes WAN024EBU R6.I G_1419||||1359137..1359228|+|92 bp|Between spr1375 (snf) ( - strand) and spr1376 (patB) (- strand)|S.pneumoniae|R6|NC _003098.1|IG|110
attttcacctttaccttatctttttattataccatattttcgcctatgaaaatagccttctaggaagacttttctcctagaaggctggattt

SEQ ID NO: 3175 - DNA, 299 bp, Streptococcus pneumoniae
  misc_feature (1)..(299): tiling:Spneumo1:WAN0249IS; Cluster includes WAN024E5S R6.I G_1997||||1814370..1814647|+|278 bp|Between spr1837 (adhE) (- strand) and spr1838 (- strand)|S.pneumoniae|R6|NC_0030 98.1|IG|110
attttcctccatagctttcaaggaacgatatcctttgttaattttttcacaagtttattataacgcattatttcaactttgtaaacagtttcataaacatttcacaaagaatttttaaactcttgtgaaacttttctcattttcttttcttatcaggttttatctttgaagtttgtgaaatttatttcaaatattttttatttcacaaacttgcttggaagagggatttggaaagaaagggatttrcaggtaagcgcttaccttgyrattctaataatacctcctttgataaggaggct

SEQ ID NO: 3176 - DNA, 67 bp, Streptococcus pneumoniae
  misc_feature (1)..(67): tiling:Spneumo1:WAN024AMC; Cluster includes WAN024ENP-rc R 6.IG_482||||466802..466868|-|67 bp|Between spr0458 (- stra nd) and spr0459 (+ strand)|S.pneumoniae|R6|NC_003098.1|IG- rc|110
attttctccaaatctggtataatgtagctatattatatcaaaattcagtacagtagaggtagatttt

SEQ ID NO: 3177 - DNA, 141 bp, Streptococcus pneumoniae
  misc_feature (1)..(141): tiling:Spneumo1:WAN024AKH; Cluster includes WAN024EMK R6.I G_580.2.2.1.2||||558284..558424|+|141 bp|Between spr0556 ( rplA) (+ strand) and spr0557 (+ strand)|S.pneumoniae|R6|NC _003098.1|IG|110
attttctggatagagggagtatccgattttatgatcaaagttaataccgccctctggtgagaagatgagtaggttggtaatttaaactattaaacagaatttttgattaaaagtattatttyatgagagaaatcctaattt

SEQ ID NO: 3178 - DNA, 101 bp, Streptococcus pneumoniae
  misc_feature (1)..(101): tiling:Spneumo1:WAN024ACX; Cluster includes WAN024EIM-rc R 6.IG_913||||867833..867933|-|101 bp|Between spr0877 (secG) (+ strand) and spr0878 (rnr) (+ strand)|S.pneumoniae|R6|N C_003098.1|IG-rc|110
attttctttctagattttttaattttcttttactgtaaaaccttctcaaacatcctttaaaaataaaaagaggcaaagacctagtcctgcccattattttc

SEQ ID NO: 3179 - DNA, 80 bp, Streptococcus pneumoniae
  misc_feature (1)..(80): tiling:Spneumo1:WAN024ABI; Cluster includes WAN024EHX R6.I G_960.2||||909128..909207|+|80 bp|Between spr0921 (xylH) ( - strand) and spr0922 (tdk) (+ strand)|S.pneumoniae|R6|NC_ 003098.1|IG|110
attttgccgtttaaagcttaagaaaattatgatatactagaatgtagcaaaaatttagaaatggacgtgaagcaagaaac

SEQ ID NO: 3180 - DNA, 79 bp, Streptococcus pneumoniae
  misc_feature (1)..(79): tiling:Spneumo1:WAN0249VQ; Cluster includes WAN024EA2-rc R 6.IG_1576.2||||1507028..1507098|-|71 bp|Between spr1529 (n anE) (- strand) and spr1530 (- strand)|S.pneumoniae|R6|NC_ 003098.1|IG-rc|110
attttggtattctcctatttataggtcgacttgctcctctgaaagtacttttagaggagctgtttgacttkgctagttt

SEQ ID NO: 3181 - DNA, 55 bp, Streptococcus pneumoniae
  misc_feature (1)..(55): tiling:Spneumo1:WAN024AJ6; Cluster includes WAN024ELX R6.I G_633.1||||622223..622277|+|55 bp|Between spr0609 (+ stran d) and spr0610 (+ strand)|S.pneumoniae|R6|NC_003098.1|IG|1 10
atttttggatttttagraccatctggttctggaaagaccacaacgattaatattc

SEQ ID NO: 3182 - DNA, 143 bp, Streptococcus pneumoniae
  misc_feature (1)..(143): tiling:Spneumo1:WAN0249X7; Cluster includes WAN024EAX-rc R 6.IG_1512.2||||1448098..1448240|-|143 bp|Between spr1465 ( + strand) and spr1466 (cadD) (- strand)|S.pneumoniae|R6|NC _003098.1|IG-rc|110
atttttttgtttcactaggattttagcccgagctcaaatcagctctctgattttcagagggctttttcattgagtataaatggacaatcttaaagttactctattgtagagtggcttttgatttgattaggagattcttataa

SEQ ID NO: 3183 - DNA, 147 bp, Streptococcus pneumoniae
  misc_feature (1)..(147): tiling:Spneumo1:WAN0249IZ; Cluster includes WAN024E5X R6.I G_1990.1||||1805544..1805690|+|147 bp|Between spr1830 (+ s trand) and spr1831 (- strand)|S.pneumoniae|R6|NC_003098.1| IG|110
attyattatctaacttaagggtggacttggtataataaagtagacacaaaattaagtggaaacgaggaaaagtcattatgccaagaaaaacctttgataaagccttcaaactctctgctgtaaayctcatcctgtaaaaatrattag

SEQ ID NO: 3184 - DNA, 121 bp, Streptococcus pneumoniae
  misc_feature (1)..(121): tiling:Spneumo1:WAN024BFY; Cluster includes WAN023PWD pne0 7_22||||17141..17260|-|120 bp|Type 6B capsule operon, Glim mer 2.02 orf prediction|S.pneumoniae||WAN01UCKH|ORF|011
awtgtttatactcttcgaaaatctcttcaaaccgcgtcagcktycatctgcaacctcaaaacagtrttttgagcaacctgyggctagyttcctagtttgctctttrattttcattgagtat

SEQ ID NO: 3185 - DNA, 96 bp, Streptococcus pneumoniae
  misc_feature (1)..(96): tiling:Spneumo1:WAN0249V5; Cluster includes WAN024720 R6.I G_172.2||||160167..160262|+|96 bp|Between spr0151 (- stran d) and spr0152 (+ strand)|S.pneumoniae|R6|NC_003098.1|IG|1 10
aycatggtttggtgggattgtaaatggatactagaagtttttgaaaacgcttgaaatatgatataatggtttcatagttatttttaggggaatatc

SEQ ID NO: 3186 - DNA, 1567 bp, Streptococcus pneumoniae
  misc_feature (1)..(1567): tiling:Spneumo1:WAN024CS8-3; Cluster includes WAN02447B sp r0795|dnaE|15902839|NP_358389.1|795966..799094|+|3129 bp|D NA-polymerase III alpha-chain|S.pneumoniae|R6|NC_003098.1| ORF|112
ayctkaaaattgaagaaatmgatttrgaagacaaagaaacgttagmtttatttgcctctggwaatacaaaaggtatctttcaatttgagcaaccwggtgcyattcgyytgctyaarcgtgtkcaaccagtctgttttgaagatgtcgtmgcractacttctctaaatcgaccrggtgcwagtgactayatcaataattttgtggcaagraagcatgggcaggaagaagtgactgttctrgatycagywctggaggatattttggctccaacytayggcatwatgctctatcaggagcaggttatgcaggttgcycagcgayttgcyggatttagtcttgggaargccgatattttgcgtcgrgctatgggkaaaaaggatgcctctgcyatgcatgagatgagggcttcctttattcaaggytcmwtagaagcwggycatactgyggaaaaakcagagcaggtytttgatgttatggagaagtttgcaggytatggwtttaayagrtcwcaygcctaygcctactcagcmttggccttccagttggcttatttyaaaacrcattatccagccatwttttatcagrtyatgttraattmtkccaacagtgattacttaatagatgcacttgaagcaggttttgaagtrgcsyctctrtccatcaayacbattccctatcacgataaaattgccaacaagkcyatctatmtaggtttgaaatcsattaarggrstcagyaakgayttrgckctytggattattgaamatagaccttattctaayattgaagattttatagctaaattacctgagaattatctgaaacttcctctgctagaacctttggtaaaagttggtcttttcgattcatttgaaaaaaatcgtcaaaaagtatttaataayttagctaatctatttgaatttgtgaaagagttgggaagtttgtttggagatgctatttatagttggcaggaatcggaagattggacggaacaagaaaaattttatatggaacaagagcttttagggataggtgtcagcawacatccactacaagctattgcaagtaaggctatttacccgattaccccaatcggaaatttgtcagaaaatagctatgctattatyttggttgaagttcagaaaataaaagtgattcgtaccaaaaagggtgaaaatatggccttcttacaggcagatgatagtaagaaaaaattggatgtcactctcttttcagacttatatcgtcaggttggacaggaaataaaagagggagccttctactatgtaaaaggaaaaatacaatcacgtgatggccgtytgcaaatgattgcacaagaaataagagaagcagttgctgaacgcttttggatacaggtgaaaaatcatgaatcggatcaagaaatttcacgyattttagaacaatttaaaggcccaatcccagtcatcatccggtatgaagaggaacagaaaaccatcgtttytccccatcattttgtagctaaatccaatgaattagaggagaaattgaatgaaatcgttatgaaaacgatttatcgctaactaat

SEQ ID NO: 3187 - DNA, 115 bp, Streptococcus pneumoniae
  misc_feature (1)..(115): tiling:Spneumo1:WAN0249Y6; Cluster includes WAN024EBI-rc R 6.IG_1452||||1392827..1392941|-|115 bp|Between spr1408 (de f) (- strand) and spr1409 (- strand)|S.pneumoniae|R6|NC_00 3098.1|IG-rc|110
caaaaaagtcatcttcggatggctttttgctacagttgagggaaagggtttgcagttatcggcttttgtgctataattgctataatatagtaaaaagcaagaggagtgtgaggaa

SEQ ID NO: 3188 - DNA, 219 bp, Streptococcus pneumoniae
  misc_feature (1)..(219): tiling:Spneumo1:WAN0249SM; Cluster includes WAN024EQV R6.I G_258.1||||231088..231306|+|219 bp|Between spr0237 (+ stra nd) and spr0238 (ruvB) (+ strand)|S.pneumoniae|R6|NC_00309 8.1|IG|110
caaaacttgttttttcttaagcaaaatttaaggatggtctagtattatatagtcattaaataaagacctcctaactttatttaataaaatcctaaacttttttcatcacaatctcctaatgaagccacccaatcaggtggcttttttgcgtggtgaggtgctggtgatagaaattttttgcaaaatagtaaaattttagaaaagttaagctagttttaa

SEQ ID NO: 3189 - DNA, 80 bp, Streptococcus pneumoniae
  misc_feature (1)..(80): tiling:Spneumo1:WAN024ANF; Cluster includes WAN024EO6 R6.I G_462.1||||438631..438710|+|80 bp|Between spr0438 (pyrG) ( + strand) and spr0439 (- strand)|S.pneumoniae|R6|NC_003098 .1|IG|110
caaaatcagaacctttgagaaaaatctcagaggttttttgcatacgatgatattgcagtatatctgaggtaggrgtcctc

SEQ ID NO: 3190 - DNA, 1998 bp, Streptococcus pneumoniae
  misc_feature (1)..(1998): tiling:Spneumo1:WAN024D3Y-3; Cluster includes WAN024376 SP 0057||15900002|NP_344606.1|59624..63562|-|3939 bp|beta-N-a cetylhexosaminidase|S.pneumoniae|TIGR4|NC_003028.1|ORF|020
caaacgcatcgtagacaaggccagtgagctcggatattctgatgtccatctccttctaggaaatgacggacttcgctttctactcgatgatatgaccattactgccaacggaaaaacctatgctagtgatgacgttaaaaaagctattatcgaaggaactaaagcttactacgacgatccaaacggtactgcactaacacaggcagaagtaacagagctaattgaatacgctaaatctaaggacatcggtctcatcccagctattaacagtccaggtcacatggatgctatgctggttgccatggaaaaattaggtattaaaaatcctcaagcccactttgataaagtttcaaaaacaactatggacttgaaaaacgaagaagcgatgaactttgtaaaagccctcatcggtaaatacatggacttctttgcaggtaaaacaaagattttcaactttggtactgacgaatacgccaacgatgcgactagtgcccaaggctggtactacctcaagtggtatcaactctatggcaaatttgccgaatatgccaacaccctcgcagctatggccaaagaaagagggcttcaaccaatggccttcaacgatggcttctactatgaagacaaggacgatgttcagtttgacaaagatgtcttgatttcttactggtctaaaggctggtggggatataacctcgcatcacctcaatacctagcaagcaaaggctataaattcttgaataccaacggtgactggtactacattcttggtcaaaaaccagaagatggtggtggtttcctcaagaaagctattgagaatactggaaaaacaccattcaatcaactagcttctaccaaatatcctgaagtagatcttccaacagtcggaagtatgctttcaatctgggcagatagaccaagcgctgartacaaggaagaggaaatctttgaactcatgactgcctttgcagaccacaacaaagactacttycgtgctaattataatgctctccgcgaagaattagctaaaattcctacaaacttagaaggatatagtaaagaaagtcttgaggcccttgacgcagctaaaacagctctaaattacaacctcaaccgtrataaacaagctgagcttgacayrcttgtagccaacctaaaagccgytcttcaaggcctcaaaccagctgyaactcattcaggaagcctrgatgaaaatgaagtggctgccaatgttgaaaccagaccagaactcatcacaagaactgaagaaattccatttgaagttatcaagaaagaaaatcctaacctcccagcyggtcaggaaaatattatcacagcaggagtcaaaggtgaacgaactcattacatctctgtactcactgaaaatggaaaaacaacagaaacagtccttgatagccaggtaaccaaagaagttataaaccaagtggttgaagttggcgctcctgtaactcacaagggtgatgaaagtggtcttgcaccaactactgaggtaaaacctagactggatatccaaraagaagaaattccatttaccacagtgactygtgaaaatccactcttactcaaaggaaaaacacaagtcattactaagggygtcaatggacatcgtagcaacttctactctgtgagcacttctgccgatggtaaggaagtgaaaacacttgtaaatagtgtcgtagcacaggaagccgttactcaaatagtcgaagtcggaactatggtaacacatgtaggcgatgaaaacggacaagccgctattgctgaagaaaaaccaaaactagaaatccyaagccaaccagctccatcaactgctccygctgaggaaagcaaagytcttcctcaagatccagctcctgtggtaayagagaaaaaacttcctgaaacaggaactcacgattctgcaggactagtagtcgcaggactcatgkccacactagcagcctatggactcactaaaagaaaagaagactaactaat

SEQ ID NO: 3191 - DNA, 132 bp, Streptococcus pneumoniae
  misc_feature (1)..(132): tiling:Spneumo1:WAN024AOT; Cluster includes WAN024EOV R6.I G_428.1||||400958..401089|+|132 bp|Between spr0404 (+ stra nd) and spr0405 (+ strand)|S.pneumoniae|R6|NC_003098.1|IG| 110
caaatatagttggtaaatcattaggacctaaatcagctgttagattcggagaagctttatcctatattgaaggtcctcttcgcagaataaatgagacgatagatggcggtttatatcaaatagagcaaatta

SEQ ID NO: 3192 - DNA, 1655 bp, Streptococcus pneumoniae
  misc_feature (1)..(1655): tiling:Spneumo1:WAN024G53-3; Cluster includes WAN02440J sp r1039|rexB|15903083|NP_358633.1|1021482..1024757|+|3276 bp |Second subunit of major exonuclease|S.pneumoniae|R6|NC_00 3098.1|ORF|111
caacagtggacactgttctggtgcagagttacgatttgattgcaccattgactgctgactttgtctatgctattggactaactcaggacaatttaccaaaaatttctcaaaacaccagtcttctgacagatgaagaaaggcaaaayctaaaccaarcgaccgaagaaggcgttcaattactgattgccagcagtgaaaatctcaagaaaaatcgctacactatgctttccttggtcaattctgctcgtaagcagttgttcttgtcggctccaagcctttttaacgaaagtgaaagtaaggaatctgcctatcttcaagagttgatccattttggatttaggcggagagagaagaggatgaatcacaaaggactgtctaaggaggatatggggtcctatcacagtcttttgtctagtctggttgcctatcascagcagggtgagatgagcgatactgagcaagatttgacttttgtcaaggttctgtcgcgtgtcataggtaaaaaactagatcwgcaaggtctggaaaatccagctatcccaaccagtccaagcagcaagaccttarccaaggacaccttgcaagctctctatcctgccaaacaggagttttacctgtctacgtcgggtttgacagagttytatckcaatgaatacagttatttcctacgctacgttttaggcttgcaggaggaattacgtttgcrtcctgatgcccgtagtcacgggaatttcttgcatcgtatctttgaacgcgccttacagttgcctaatgaagattcctttgaccaacgtctagaacaagctattcaagaaaccagtcaagaacgcgaatttgaagctatttatcaagaaagtttggaagcccagtttaccaaggaagttttgcttgatgttgcacggacractggacatattctccgacacaatccagccatcgaaaccatcaaagaagaagcaaattttggtggaaaagaccaagcctttattcaattagacaatggacgcagtgtctttgtacgaggcaaggtggaccggattgaccgtttgaaagctaatggagcgataggagtagtagactacaaatccagtctgactcagttccagtttcctcatttctttaatgggctcaattctcagttaccaacctatcttgctgccctaaaaagagaagggragcagaactttttcggcgccatgtacttggaaatggctgaacctrtccaatctctgatggcggtaaaaagtctggcaggagcagtggtagaagccagcaaatctatgaaataccaagggctcttcttggaaaaagaaagcagttatttaggcgaattttataacaaaaacaaggctaatcaactgacagatgaggaatttcagctcctactggactacaatgcctatctttacaagaaagctgctgagaagattttagcaggccggttcgccatcaatccttatactgaaaatggcagaagcattgccccatacgtccagcaacatcaggctattacaggctttgaagccaattaccatctgggccaagcccgtttcctaraaaagttggacctagctgatggcaagcgtctggtcggagaaaaactcaagcaagcttggyttgaaaaaataagagaggagttraatcgaykaactaat

SEQ ID NO: 3193 - DNA, 50 bp, Streptococcus pneumoniae
  misc_feature (1)..(50): tiling:Spneumo1:WAN0249DX; Cluster includes WAN024E3A R6.I G_2239||||2023498..2023547|+|50 bp|Between spr2032 (recF) (+ strand) and spr2033 (imdH) (- strand)|S.pneumoniae|R6|N C_003098.1|IG|110
caacattgtaaaagaactcctgttttcactggagttcttttcattgtttt

SEQ ID NO: 3194 - DNA, 2349 bp, Streptococcus pneumoniae
  misc_feature (1)..(2349): tiling:Spneumo1:WAN024GL9-3; Cluster includes WAN023M13 31 3746_828||||441399..441635|+|237 bp|EGAD orf prediction|S. pneumoniae|R6|NC_003098.1|ORF|111
caagacacaagtcttccaagacctctagcagaaaacatcgttccaggggctactgttatcggaagtaccttcccagatacagaaggtggagaaggtattgaaggtatgttgaacggtaccattactagcttgtcagataaatggtcttcagctcagttgagtggtagtgtggatattcgtttgaccaagccacgtaccgttgttagatgggtcatggatcatgcaggggctggtggtgagtctgttaacgatggcttgatgaacaccaaagactttgacctttattataaagatgcagatggtgagtggaagctagctaaggaagtccgtggcaacaaagcacacgtgacagatatcactcttgataaaccaatcactgctcaagactggcgcttgaatgttgtcacttctgacaatggaactccatggaaggctattcgtatctataactggaaaatgtatgaaaagcttgatactgagagtgtcaatattccgatggccaaggctgcagcccgttctctaggcaataacaaggtacaagttggctttgcagatgtaccggctggagcaactattaccgtttatgataatccaaattctcaaactccactcgcaaccttgaagagcgaagttggaggagacctagcaagtgcaccattggatttgacaaatcaatctggtcttctttattatcgtacccagttgccaggcaaggaaattagtaatgtcctagcagtttccgttccaaaagatgacagaagaatcaagtcagtcagcctagaaacaggacctaagaaaacaagctacgccgaaggggaggatttggaccttagaggtggtgttcttcgagttcagtatgaaggaggaactgaggacgaactcattcgcctaactcacgcaggtgtatcagtatcaggttttgatacgcatcataagggagaacagaatcttactctccaatatttgggacaaccagtaaatgctaatttgtcagtgactgtcactggccaagacgaagcaagtccgaaaactattttgggaattgaagtaagtcaggaaccgaaaaaagattacctagttggtgatagcttagacttgtctgaaggacgctttgcagtggcttatagcaatgacaccatggaagaacattcctttactgatgagggagttgaaatttctggttacgatgctcaaaagactggtcgtcaaaccttgacgcttcgttaccaaggtcatgaagtcaactttgatgttttggtatctccaaaagcagcattgaacgatgagtacctcaaacaaaaattagcagaagttgaagctgctaagaacaaggtggtctataactttgcttcaccagaagtaaaagaagctttcttgaaagcaattgaagcggccgaacaagtgttgaaagaccatgaaactagcacccaagatcaagtcaatgaccgacttaataaattgacagaagctcataaagctctgaatggtcaagagaaatttaaggaagaaaagacagagcttgatcgtttaacaggtgaggttcaagaactcttggctgccaaaccaaaccatccttcaggttctgccctagctccgcttcttgagaaaaacaaggccttggttgaaaaagtagatttgagtccagaagagcttgcaacagcgaaacagagtctaaaagatctggttgctttattgaaagaagacaagccagcagtcttttctgatagtaaaacaggtgttgaagtacacttctcaaataaagagaagactgtcatcaagggtttgaaagtagagcgtgttcaagcaagtgctgaagagaagaaatactttgctggagaagatgctcatgtctttgaaatagaaggtttggatgaaaaaggtcaagatgttgatctctcttatgcttctattgtgaaaatcccaattgaaaaagataagaaagttaagaaagtatttttcttacctgaaggcaaagaggcagtagaattggcttttgaacaaacggatagtcatgttatctttacagcacctcactttactcattatgcctttgtttatgaatctgctgaaaaaccacaacctgctaaaccagcaccacaaaacacagtccttccaaaacctacttatcaaccggcttctgatcaacaaaaggctcctaaattggaagttcaagaggaaaaggttgcctttcatcgtcaagagcatgaaaatgctgagatgctagttggggaacaacgagtcatcatacagggacgagatggactgttaagacatgtctttgaagttgatgaaaacggtcagcgtcgtcttcgttcaacagaagtcatccaagaagcgattccagaaatg

SEQ ID NO: 3195 - DNA, 129 bp, Streptococcus pneumoniae
  misc_feature (1)..(129): tiling:Spneumo1:WAN0249FK; Cluster includes WAN024E47-rc R 6.IG_2169||||1950204..1950332|-|129 bp|Between spr1962 (- strand) and spr1963 (adh2) (- strand)|S.pneumoniae|R6|NC_0 03098.1|IG-rc|110
caagagattrgacgacaataggacaattcacctctaattattgacatttcaggaaaaatcgcagtaaaaacggcacagccttctttaaatgtgctataatactagaaaaatacttgtggaggttccatt

SEQ ID NO: 3196 - DNA, 122 bp, Streptococcus pneumoniae
  misc_feature (1)..(122): tiling:Spneumo1:WAN0249PU; Cluster includes WAN024EAJ R6.I G_1537||||1466782..1466903|+|122 bp|Between spr1490 (+ str and) and spr1491 (pepO) (- strand)|S.pneumoniae|R6|NC_0030 98.1|IG|110
caagatgatgacaatcgaaatttaagtaaactatccagcaaatctttctattayaaaaggcatcctatcaaggttttcacacrtgattggatgccttttttctgatgactagattttttgya

SEQ ID NO: 3197 - DNA, 666 bp, Streptococcus pneumoniae
  misc_feature (1)..(666): tiling:Spneumo1:WAN024D9O; Cluster includes WAN0243XA spr1 157|nth|15903200|NP_358750.1|1161041..1161670|-|630 bp|end onuclease III (DNA repair)|S.pneumoniae|R6|NC_003098.1|ORF |111
caaggactatttgacggagatgaataatggtcttgtcaaaaaaacgagcacgaaaggtgctagaagaaatcattkccctcttcccagatgccaagcctagtcttgattttaccaatcattttgaactcctggttgcggtcatgttatcagcccagacgacagatgcagcggtaaataaggccacaccaggtctctttgttgcctttccaacaccccaagctatgtctgtagcgacagagagtgagattgcttcacatatttctcgcttgggattgtatcggaataaagctaaattccttaaaaaatgtgcccaacagttactagacgattttgatggtcaagtccctcagacacgtgaagaattggagagtttkgcaggtgttggtcgcaagacagccaatgttgtcatgagtgtaggatttggrattccagcctttgcagtggatactcatgtggagcgtatttgcaaacaccacgatattgtcaaaaaatcagcgacgccacttgaggtggaaaagcgggtcatggatatcttgccgcctgagcagtggttagmtgcccatcaggccatgatttattttggaagagccatttgccatccaaaaaatccagagtgtgaccagtacccacaattatatgattttagcaatttgtaagmtrmtacat

SEQ ID NO: 3198 - DNA, 131 bp, Streptococcus pneumoniae
  misc_feature (1)..(131): tiling:Spneumo1:WAN024AML; Cluster includes WAN024ENS R6.I G_476||||459830..459959|+|130 bp|Between spr0452 (+ strand ) and spr0453 (hrcA) (+ strand)|S.pneumoniae|R6|NC_003098. 1|IG|110
caaggttctaggtcttcagattgatttttagcactcttkataaaagagtgctaattttttgagtttttgtcttgacattctcttctaagggtgtataatagaatcatragttagcacttggatgcattgag

SEQ ID NO: 3199 - DNA, 66 bp, Streptococcus pneumoniae
  misc_feature (1)..(66): tiling:Spneumo1:WAN024ANC; Cluster includes WAN024EO5-rc R 6.IG_462.2.1.1||||438797..438862|-|66 bp|Between spr0438 ( pyrG) (+ strand) and spr0439 (- strand)|S.pneumoniae|R6|NC _003098.1|IG-rc|110
caatccagttcctaaaactttgctagaaattgatttggctttccgaattaatttgttcaaatttta

SEQ ID NO: 3200 - DNA, 163 bp, Streptococcus pneumoniae
  misc_feature (1)..(163): tiling:Spneumo1:WAN024A6B; Cluster includes WAN024EF8 R6.I G_1171||||1136080..1136239|+|160 bp|Between spr1130 (- str and) and spr1131 (- strand)|S.pneumoniae|R6|NC_003098.1|IG |110
caatctaactccttttactaatgatgtttaaatattggcattacttattaacatatattttctacatagaataccatatcctatagaaaaagaaaagaaattctaaacaaaagcccagtgttaggagctttaatatctcataacactagacttcttctctatc

SEQ ID NO: 3201 - DNA, 554 bp, Streptococcus pneumoniae
  misc_feature (1)..(554): tiling:Spneumo1:WAN0249U4; Cluster includes WAN024EGA R6.I G_1084.2||||1039801..1040077|+|277 bp|Between spr1045 (+ s trand) and spr1046 (xerC) (+ strand)|S.pneumoniae|R6|NC_00 3098.1|IG|220
caattcagaaatcacttgttaatttatccgtgatatgttagatttgcyagtaaaaytatgaccattttggaggaaagcaatatttataccagactaaaatcaaaaagcattatataatagtratatgaaatcaactaaagaagaaatccaagccatcaaaacacttttaaaagactctcgtacagctaaatatcataaacgccttcaaatcgttctatagtaaaacgaaacaagaacagggcaaatcgatcaggacagtcaaatcgatttctaacaatgttttagaagtmsagrtgtactattctagtttcaatctaytatacaatgtgttttgtatctcatagctccttatatagctcttcagttatgtagtattaacagaagtttagtgggtgagatttttattattttccttattctgttttgtttgtaggtctaagtctttttatcactttgaaaaactcctataacatctttccgaaaaactataattttcttgaaaaatatacaagtctatgctatactactagtatacttamttatggagaaaatac

SEQ ID NO: 3202 - DNA, 59 bp, Streptococcus pneumoniae
  misc_feature (1)..(59): tiling:Spneumo1:WAN024AOC; Cluster includes WAN0247R1-rc R 6.IG_66.2||||46437..46492|-|56 bp|Between spr0045 (purC) ( + strand) and spr0046 (purL) (+ strand)|S.pneumoniae|R6|NC _003098.1|IG-rc|110
caattcttattcctttatttcagctcttgcaatattcccaaacagccttgaggttgtta

SEQ ID NO: 3203 - DNA, 590 bp, Streptococcus pneumoniae
  misc_feature (1)..(590): tiling:Spneumo1:WAN024EW3-M; Cluster includes WAN0243C1 sp r1924|aspS|15903965|NP_359515.1|1906865..1908628|-|1764 bp |Aspartyl-tRNA synthetase (aspartate-tRNA ligase)|S.pneumo niae|R6|NC_003098.1|ORF|221
cacaaatcacgaaacagctcttgatgaatgctggttttgaccgttactaccaaatcgttaaatgtttccgtgacgaggacttgcgtggagaccgccagcctgaatttactcaggtcgacttggaaacgtccttccttactgagcaagaaatccaagatattacagaargcttgatcgcgcgcgtgatgaaggaaacaaaagrcatcgaagtaacgctaccrttccctcgtatgaaatacgatgatgctatggctctttacggttctgacaagccagatactcgttttgacatgttgcttcaggacttgacagaagtggtcmraggtgtagactttaaagtcttttcagaagcacytgctgtaaaagcgattgtggtcamaggagctgcggacaactattcacgtaaagacatcgacaagatgacggaagtagccaaacagtatggtgccaaaggtcttgcttgggtcaaggtggttgatggagaattaaacggaccagttgccaagttcttgactggtatccaagaagaattgacaacagcgcttgytcttgaagataaggacttggttctctttgtggcggatacgctt

SEQ ID NO: 3204 - DNA, 71 bp, Streptococcus pneumoniae
  misc_feature (1)..(71): tiling:Spneumo1:WAN0249XG; Cluster includes WAN024741-rc R 6.IG_164||||152263..152330|-|68 bp|Between spr0143 (+ stra nd) and spr0144 (+ strand)|S.pneumoniae|R6|NC_003098.1|IG- rc|110
cacaactccttcttaagttcaaatgggaatctttccccaaggatagaccgcgatactactaacaaccaaaa

SEQ ID NO: 3205 - DNA, 103 bp, Streptococcus pneumoniae
  misc_feature (1)..(103): tiling:Spneumo1:WAN024AEN; Cluster includes WAN024EJI-rc R 6.IG_833.2.1.2.1||||802147..802249|-|103 bp|Between spr079 7 (pykF) (+ strand) and spr0798 (- strand)|S.pneumoniae|R6 |NC_003098.1|IG-rc|110
cacactccttagtacactagctgagaagaatgctataatggttagagtrgaacacaaaaacgctaaaacagtaaataacatctacactcacgtaagtaaaaga

SEQ ID NO: 3206 - DNA, 166 bp, Streptococcus pneumoniae
  misc_feature (1)..(166): tiling:Spneumo1:WAN0249WA; Cluster includes WAN024EAB-rc R 6.IG_1558.2||||1489374..1489539|-|166 bp|Between spr1511 ( ftsA) (- strand) and spr1512 (- strand)|S.pneumoniae|R6|NC _003098.1|IG-rc|110
cacagagctttcttttttgctcttagagagtttttacaagcagcttataaaataagaatttctgaatagacaaactcaaaaaatggctgggaaatttaggaaaaaagcaagcacgattaaattttttgtgttataatattttgtgaatagctatgcctatgtttag

SEQ ID NO: 3207 - DNA, 136 bp, Streptococcus pneumoniae
  misc_feature (1)..(136): tiling:Spneumo1:WAN024AO6; Cluster includes WAN024EOH-rc R 6.IG_444.2||||418323..418455|-|133 bp|Between spr0420 (xyl R) (- strand) and spr0421 (+ strand)|S.pneumoniae|R6|NC_00 3098.1|IG-rc|110
caccggaactcctttttttattttttataaattaaatataccactaacagaaagcgttgtcaatatattttttgttgtttttacaatatttttttctttgtatagaataataattttaattgattttttcttatgt

SEQ ID NO: 3208 - DNA, 321 bp, Streptococcus pneumoniae
  misc_feature (1)..(321): tiling:Spneumo1:WAN0249UV; Cluster includes WAN024E9G R6.I G_1611||||1545149..1545467|+|319 bp|Between spr1564 (+ str and) and spr1565 (scrK) (- strand)|S.pneumoniae|R6|NC_0030 98.1|IG|110
cacgtaaaaaatccgtttggtttcccaagtggatttttaaagcgtagattaactatagcttgatactaaatatactttggtatggaaatyatgcatatttttcgatagtgaggcgaggacttacctagcctttccgccgtgatagaaacacctgaaatctaatggtttcaggtattcggaaactttgagacactagtgtctcaaagtttaggtatggaatttygaagaaagtcgctaccgtccgtaatcacttaaggaaaggctcaaaaatattgttttcaaccacaaaatccgtttggtttcccaagcggattttgtgct

SEQ ID NO: 3209 - DNA, 92 bp, Streptococcus pneumoniae
  misc_feature (1)..(92): tiling:Spneumo1:WAN024AGX; Cluster includes WAN024EKQ-rc R 6.IG_720.2||||698703..698791|-|89 bp|Between spr0696 (metS ) (+ strand) and spr0697 (+ strand)|S.pneumoniae|R6|NC_003 098.1|IG-rc|110
cacttctcccttctaatctattttgtaatacctactagtracttcacctatagtatatcacttctacactagtttgtaaagcataatagtta

SEQ ID NO: 3210 - DNA, 1878 bp, Streptococcus pneumoniae
  misc_feature (1)..(1878): tiling:Spneumo1:WAN024CHF-3; Cluster includes WAN0244S4 sp r0046|purL|15902090|NP_357640.1|46493..50221|+|3729 bp|Pho sphoribosylformylglycinamide synthetase|S.pneumoniae|R6|NC _003098.1|ORF|551
cagaagagcgtcaaacatctgctgaaacactggaatcagatacccttacggttctatctgacctcaaccatgcaagtcaaaaaggattacagactrtctttgactgctctgttggacgctcaacggttaatcacccacttggtggtcgttaccaactcacaccaactgaggcatctgtgcagaaattgccagttcaacacggtgtgactcatactgcgtcggtcattgctcaaggtttcaacccatatgtagctgaatggtctccataccacggtgctgcttaygcggttatcgaagcaactgctcgtttggtggctgctggtgccaactggtyyaaggctcgtttctcttaccaagartatttcgagcgkatggayaarcaagcagagcgtttyggtcagccagtagcygcycttctaggytctattgaagcwcarattcarcttggcttgccatctatcggtggtaaggactccatgtctggtacctttgaagaattgacygttccgccaaccttggytgcctttggggtgacgacggcagatagccgtaaggtgctctctccagaatttaaagctgttggggaaaatatctactacatcccaggtcaagccstctctgcagagattgattttgacttgattaagaaaaattttgctcagtttgaagcmakccaagctgaccataaagtgacatctgcatcagctgtcaaatacggtggtgtagttgaaagtttggctcttgctacctttggaaactatattggtgcagaggtgaccttgcctgaacttraaacagctttgacagctcaattaggcggctttgtcttcacatctcctgaagaaattgctggagtagagaagrttggacaaacgaaagcagactttacactgactgtcaacggtgtgaagctagatggacacaagcttgacagtgcatttcaagggacattggaagaagtttacccaacagaatttacccaagcgaaagaactagaagaagtaccagctgtggyatcagatgttgtgattaaagccaaagaaaaggttgaaaaacctgtggtttacatcccagtctttccaggaaccaactcagaatatgattcagctaaggccttcgaaaaagaaggtgcagaggtcaatttggtgccattcgtgaccttgaatgaagaagctattgtcaagtcagttgaaactatggttgacaatatcgacaagactaatattctcttctttgcyggtggattctcggctgcggatgaaccagatggttcagctaagtttatcgtcaatatcctgcttaatgaaaaagtgcgtgtggctattgatagctttatcgcccgtggtggyttgattatcggtatttgtaatggattccaagccttagtcaaatcgggtctcctaccmtacggaaactttgaaghtgctaacartactagyccaaccctcttctacaatgatgccaaccaacacgtggccaagatggtggaaactcgyattgccaataccaactcaccatggttggytggtgtgcaagtgggcgatatccacgctattcctgtttcgcacggtgaagggaagtttgtcgtgacggctgaggaatttgcagagctccgtgacaatggacaaattttcagccaatacgttgactttaacggtaaaccaagtatggattctaagtacaatccgaatggttctgtccatgccatcgaaggaattaccagcaagaatggtcaaatcatcggtaagatgggccaytcagaacgttatgaggayggtcttttccaaaatatcccaggcaataaagaccarcacctgttcgcrtcagcggttaaacatttcactggaaaataasamttacagattttctaatagatag

SEQ ID NO: 3211 - DNA, 71 bp, Streptococcus pneumoniae
  misc_feature (1)..(71): tiling:Spneumo1:WAN0249JR; Cluster includes WAN024E6H R6.I G_1921||||1775430..1775500|+|71 bp|Between spr1803 (plcR) (- strand) and spr1804 (- strand)|S.pneumoniae|R6|NC_00309 8.1|IG|110
cagacgcctcctcttctacctgcttcgaaaaatactgtgaaacttaaaaaattgtaacggyyacatctttc

SEQ ID NO: 3212 - DNA, 775 bp, Streptococcus pneumoniae
  misc_feature (1)..(775): tiling:Spneumo1:WAN024GKP; Cluster includes WAN0244H0 spr0 446|hsdS|15902490|NP_358040.1|451871..452470|-|600 bp|Type I restriction enzyme EcoKI specificity protein (S protein )|S.pneumoniae|R6|NC_003098.1|ORF|212
cagctagataaagaatttccagataaactaaaaaaatctattcttcaatatgctatgcaaggaaaattagttgaacaagacccaaatgatgaatcagtcgaagttttacttgaaaaaatacgagcagaaaaacaaaaactctttgaagaaggcaagattaaaaagaaagatktggamatkwctaytgytwyyywwgkagatkatrrctcttattatgggaatatacctatgaattgggttgttataaaaataaaagatattttttcaatraatacaggtctttcttacaagaagggcgatttaagcattaataataaaggtgttagaattatacgtggtggtaatattaagcctttagaattttctctgttggataaygattactacattgatacacaattcatctcctctgarcaagtttatttaaaacataatcagctaataacacctgtakcaacctctttagaacatattggaaagtttgcaagaatcgakaaagactatgatggtgttgtggctggtggatktattttccaattmacaccattcgmaagtkcagagatkatktcaaaatbtctattatktaacttgtcctctccgttattttataaacaattgaaagcaatmactaaactatcaggtcaagctttatataatattcctaaaactacactragcgagctattaattccgttagctccttttgaggaacaggaacttattactcaaaaagttgagaaactttttgaaaaagtaaatcaacttykraamtaat

SEQ ID NO: 3213 - DNA, 324 bp, Streptococcus pneumoniae
  misc_feature (1)..(324): tiling:Spneumo1:WAN0249RK; Cluster includes WAN024EP6-rc R 6.IG_398||||375437..375760|-|324 bp|Between spr0374 (lysC) (- strand) and spr0375 (phaB) (+ strand)|S.pneumoniae|R6| NC_003098.1|IG-rc|110
cagggctcctttttattttataagcagtttatactcttcgaaaatctcttcaaaccgcgtcagcttccatctgcaacctcaaaacagtattttgagctgacttcgtctagcttcttagtttgctctttaatttttattgagtgttaaattatttcactgtcaaagtatatcttttttaggatcagaaagcaagaaaaaatcgactgaaagtgtctcagccgataagaaaggctcgctttaggctagaaagcatcttattttcttcattgaaaaaagcctttctttctgctataatcgtataaaatacttactttaggagttctt

SEQ ID NO: 3214 - DNA, 130 bp, Streptococcus pneumoniae
  misc_feature (1)..(130): tiling:Spneumo1:WAN024APN; Cluster includes WAN024EPB R6.I G_392.1||||368748..368876|+|129 bp|Between spr0368 (mutS2) (+ strand) and spr0369 (dagA) (+ strand)|S.pneumoniae|R6| NC_003098.1|IG|110
cagtattctggactttataaagtaaaaactgttgaactaatttttactaataaacacattgacaaaagccaacattttttgtaaaattagaatcaattaaataccaacaccgaatgaagtttaatagaag

SEQ ID NO: 3215 - DNA, 106 bp, Streptococcus pneumoniae
  misc_feature (1)..(106): tiling:Spneumo1:WAN024AMJ; Cluster includes WAN024ENR-rc R 6.IG_478.2.1||||461899..461987|-|89 bp|Between spr0454 (gr pE) (+ strand) and spr0455 (dnaK) (+ strand)|S.pneumoniae| R6|NC_003098.1|IG-rc|110
cagtggcgacgccgtcagagcttgacttcgtcaatctctttgactaaactttgagcctaaggtctcaaaatttgcgcaaatagcrccacggcgaagagtatcgtst

SEQ ID NO: 3216 - DNA, 259 bp, Streptococcus pneumoniae
  misc_feature (1)..(259): tiling:Spneumo1:WAN024A2V; Cluster includes WAN024ED2 R6.I G_1331.1||||1281808..1282066|+|259 bp|Between spr1287 (spn IM) (+ strand) and spr1288 (- strand)|S.pneumoniae|R6|NC_0 03098.1|IG|110
cagttactatagtttgcaaattatttacagaaagaacaaaaaatgctctgaaacactgatttcaargcattttttgttagtttaaaattactcccattcttcttttccaaacrtacaatatatccaaaaccattcaaaatactagattctattttttataatatcactaaatccacctaattataggacgttttcagatttttagtcccgtcccagtcccagtaccggagaaatattgttttaatataatatctctttt

SEQ ID NO: 3217 - DNA, 50 bp, Streptococcus pneumoniae
  misc_feature (1)..(50): tiling:Spneumo1:WAN0249IL; Cluster includes WAN024E5P R6.I G_2010||||1826429..1826478|+|50 bp|Between spr1850 (- stra nd) and spr1851 (- strand)|S.pneumoniae|R6|NC_003098.1|IG| 110
cagtttaacctcctctaactagcaaaaaatcaggataaacctgattttac

SEQ ID NO: 3218 - DNA, 114 bp, Streptococcus pneumoniae
  misc_feature (1)..(114): tiling:Spneumo1:WAN0249UT; Cluster includes WAN024E9F R6.I G_1612.2||||1546390..1546503|+|114 bp|Between spr1565 (scr K) (- strand) and spr1566 (scrA) (- strand)|S.pneumoniae|R 6|NC_003098.1|IG|110
catacttcgaaagtctaaatgtctctattttttagattttcctctgtaaatcttactatctaataaaaacgaacaaacatgtcatttgttcgttttcacattagagaggattga

SEQ ID NO: 3219 - DNA, 61 bp, Streptococcus pneumoniae
  misc_feature (1)..(61): tiling:Spneumo1:WAN0249LU; Cluster includes WAN02471T-rc R 6.IG_189.1||||177190..177250|-|61 bp|Between spr0168 (- st rand) and spr0169 (- strand)|S.pneumoniae|R6|NC_003098.1|I G-rc|110
catagctttctcttatattttgtgataaaataggctcaatctatttctaggaggatgagat

SEQ ID NO: 3220 - DNA, 244 bp, Streptococcus pneumoniae
  misc_feature (1)..(244): tiling:Spneumo1:WAN024ADO; Cluster includes WAN024EIX R6.I G_879||||841561..841804|+|244 bp|Between spr0843 (+ strand ) and spr0844 (gidA) (+ strand)|S.pneumoniae|R6|NC_003098. 1|IG|110
catataattgattcttaactggaatactcactatctctttacatcaagaaaatgactaaacagggaagtttgccttcttccctttttttgttatactagtagaagaaaaaatagaaagatttgtgggwgtsaaamagyccwgtggrstttttmakcctgagccaagaaactcgaaagctcgtaagtctgattggctttttcaatgtgaatcttaacttcatactcccaaagaggtattagtgtc

SEQ ID NO: 3221 - DNA, 103 bp, Streptococcus pneumoniae
  misc_feature (1)..(103): tiling:Spneumo1:WAN024A44; Cluster includes WAN024EDM-rc R 6.IG_1301.1.2||||1256556..1256658|-|103 bp|Between spr1257 (pstS) (- strand) and spr1258 (- strand)|S.pneumoniae|R6| NC_003098.1|IG-rc|110
catatgaaaaaaggaggttaggaaagagtaatatagcctatattatataaataatcaattgcgcagaaatttggtaagaattcatgcgtcaactcataaagaa

SEQ ID NO: 3222 - DNA, 187 bp, Streptococcus pneumoniae
  misc_feature (1)..(187): tiling:Spneumo1:WAN024AS2; Cluster includes WAN024EQO-rc R 6.IG_268.1||||247145..247331|-|187 bp|Between spr0247 (pul A) (- strand) and spr0248 (rpsL) (+ strand)|S.pneumoniae|R 6|NC_003098.1|IG-rc|110
catcatcttcctaataayacggcttggcttaygtgacatttttatctccgtcatttatactgatatataaaatagtacrgaaaacttctcaaaagtaagaatttytttcacaaatcaaagaaaacgcttgcatattgttttactacatgctatactgatatagaaatttattgattggagaatcatt

SEQ ID NO: 3223 - DNA, 212 bp, Streptococcus pneumoniae
  misc_feature (1)..(212): tiling:Spneumo1:WAN024A2L; Cluster includes WAN024771 R6.I G_147.2||||137156..137367|+|212 bp|Between spr0126 (- stra nd) and spr0127 (orf51) (- strand)|S.pneumoniae|R6|NC_0030 98.1|IG|110
catgacatgacaatggaattttcaaagcttattatttttatgggagtcattgttctgmtcaaaaatagagttgaagcataaaaataaaacaatacaaacagataaatcgaatggtaaagggatrgtagtaatgttcaaatcattgagaatgctgagcaaactgtaagagatgaagacaataaaatttatccttctaaaaatgtgtttcttat

SEQ ID NO: 3224 - DNA, 110 bp, Streptococcus pneumoniae
  misc_feature (1)..(110): tiling:Spneumo1:WAN0249LI; Cluster includes WAN024E7E-rc R 6.IG_1846||||1708822..1708931|-|110 bp|Between spr1731 (- strand) and spr1732 (- strand)|S.pneumoniae|R6|NC_003098.1 |IG-rc|110
catgtaagttaagctagtcctacaaccacttactgcttcaaattgaccacttgcttttttgcccttgtattcctaacttagctttgatatagtagagtcagaaaggagat

SEQ ID NO: 3225 - DNA, 257 bp, Streptococcus pneumoniae
  misc_feature (1)..(257): tiling:Spneumo1:WAN0249U8; Cluster includes WAN024ENO R6.I G_484.1||||468647..468738|+|92 bp|Between spr0460 (+ stran d) and spr0461 (blpT) (- strand)|S.pneumoniae|R6|NC_003098 .1|IG|220
cattgctgatacgacactaaaaaagaagttgagttcagtctgtctcarcttcttttttgttactacaggataatggttggtccgtagagacttatactcttcgaaaatmwmttcaaaycacgtmagcgtcgycttaccgtactcaagtayagcytgcggctagcttcctagtttgctctttgattttcattgagtataaatcaagcgactytattcaaaaagtgytataatagaattagaaaatcggaggaaatatt

SEQ ID NO: 3226 - DNA, 1770 bp, Streptococcus pneumoniae
  misc_feature (1)..(1770): tiling:Spneumo1:WAN024CWN-M; Cluster includes WAN0244KA sp r0328||15902372|NP_357922.1|327393..332696|+|5304 bp|Conse rved hypothetical protein|S.pneumoniae|R6|NC_003098.1|ORF| 111
cattgcttatcgtagcattatgaacaaycctcaaggttggraaaarkttaaggatatcacagcttaccgtatcgcgatgaactttggttctcaagcacaaaacccattccttatgaccttggatggtatcaagaaaatcaatctccayacagatggtcttgggcaaggtgttctccttaaaggatatggtagygaaggycatgactctggtcacttgaactatgctgatattggtaagcgtatcggtggtgtcgaagacttcaagaccctaattgagaaggctaagaaatatggagctcatctaggtatccacgttaacgcttcagaaacttatcctgagtctaaatayttcaatgaaaaaattctccgtaagaatccagatggaagctatagctatggttggaactggctagatcaaggtatcaacattgatgctgcctatgacctagctcatggtcgtttggcacgttgggaagatttgaagaaaaaacttggtgacggtctcgactttatctatgtggacgtttggggtaatggtcaatcaggtgataacggtgcctgggctacccacgttcttgctaaagaaattaacaaacaaggctggcgctttgcgatcgagtggggccatggtggtgagtacgactctaccttccatcactgggcagctgacttgacctacggtggctacaccaataaaggtatcaacagtgccatcacccgctttatmcgtaaccaccaaaaagatgcttgggtwggggactacagaagttatggtggtgcagccaactatccactgctaggtggctacagcatgaaagactttgaaggctggcarggaagaagtgaytacaatggctatgtaacyaacttatttgcccatgacgtcatgacyaagtayttccaacacttcactgtaagyaaatgggaaaatggtacaccggtgactatgaccgataacggtagcacctataaatggactccagaaatgcgagtggaattggtagatgctracaataataaagtagttgtaactcgtaagtcaaatgatgtcaatagyccacaatatcgcraacgtacagtaackctcaacggacgtgtcatccaagatggttcagcttacttgactccttggaactgggatgcraatggtaagaaacttyctactgataaggaaaaratgtactacttcaatacgcagrcyggtgcaacaacttggacccttccaagygattgggcaaagagcaaggtttacctttacaagctaactgaccaaggtaagacagaagagcaagaactaactgtaaaagatggtaaaattaccctaratcttctagcaaatcaaccatacgtwctytaycgttcraaacaaacyaatcctgaaatgtcatggagtgaaggcatgcacatctatgaycaaggatttaayagyggwaccttgaaacaytggaccatttcaggcgatgcttctaaggcaraaattgtcaagtctcaaggggcaaacratatgcttcgtattcaaggaaacaaagaaaaagttagtctcactcaraaattaactggyttgaaaccaaataccaagtatgccgtttatgtyggtgtmgataaccgtagtaatgccaaggcragyatcactgtraayactggtgaaaaagaagtgactacttataccaataagtctctcgcbctcaactatgtwaargcctaygcccacaatacacgtcgtracaatgctacagttgacratacaagttacttccaaaacatgtacgc

SEQ ID NO: 3227 - DNA, 166 bp, Streptococcus pneumoniae
  misc_feature (1)..(166): tiling:Spneumo1:WAN024AQF; Cluster includes WAN024EPP-rc R 6.IG_349.1||||332697..332826|-|130 bp|Between spr0328 (+ s trand) and spr0329 (pbpA) (- strand)|S.pneumoniae|R6|NC_00 3098.1|IG-rc|110
catttatcacccagatttttctgggtgattttgtcatagcactattgtatttatgtgcttaacaaaagcctgagaagacatcttctcaggctttttctgtactataaacctcattggaaaagatagagactrcttccgtaatcttgttaagaggttttactaaata

SEQ ID NO: 3228 - DNA, 202 bp, Streptococcus pneumoniae
  misc_feature (1)..(202): tiling:Spneumo1:WAN024AN8; Cluster includes WAN024EO2-rc R 6.IG_463.1||||440821..441022|-|202 bp|Between spr0439 (- s trand) and spr0440 (+ strand)|S.pneumoniae|R6|NC_003098.1| IG-rc|110
catttttatcctaaaacatttttagacaaaaamcaataactgtttgcacaaatctaaaataaggttaaaaactcttaaaaataatacacttatcaattataattttcttttacaaacttgacattaacacttgttagatttacttttatcctttaaaatagaataggagatattccgcgattatttttcggaggaaaaagaa

SEQ ID NO: 3229 - DNA, 223 bp, Streptococcus pneumoniae
  misc_feature (1)..(223): tiling:Spneumo1:WAN0249NY; Cluster includes WAN024E8T-rc R 6.IG_1670.2||||1596566..1596788|-|223 bp|Between spr1621 ( scrR) (- strand) and spr1622 (- strand)|S.pneumoniae|R6|NC _003098.1|IG-rc|110
ccaaaaataacaaaaaaacgctatttcgcgtttgaactgtacctcaaaagttagacagaaaaagtctaattttkrgggtgtttttgttaagaaaagaccttcaatcatttaagmaaaatgtacatctagatttatagccmtctaaaactcttgctttttttrtagaagataygaaaaaagccatgaaaccaaggcttttcctgttttatgtagatgtttacac

SEQ ID NO: 3230 - DNA, 77 bp, Streptococcus pneumoniae
  misc_feature (1)..(77): tiling:Spneumo1:WAN0249NH; Cluster includes WAN024E8J R6.I G_1693.2||||1617013..1617089|+|77 bp|Between spr1644 (- st rand) and spr1645 (- strand)|S.pneumoniae|R6|NC_003098.1|I G|110
ccaaaagcctctctttatttcttccwtaaatttagaaataatagagagacttggacataaaaawtaactcttatttc

SEQ ID NO: 3231 - DNA, 1585 bp, Streptococcus pneumoniae
  misc_feature (1)..(1585): tiling:Spneumo1:WAN024DLS-3; Cluster includes WAN02431M SP 0268||15900202|NP_344806.1|242845..246687|-|3843 bp|alkali ne amylopullulanase, putative|S.pneumoniae|TIGR4|NC_003028 .1|ORF|011
ccaaacgsctcctarttgactctatcaaatacctagttgatacctacaaagtggatggmttccgyttcgatatgatgggagaccatgacgccrcttctatcgaagaagcttacaaggctgcacgcgccctcaatccaaayctmatcatgytwggkgaaggttggagaacctatgccggtgatgaaaacatgcctactaargctgctgaccaagattggatgaaacataccgatactgtcgctgtcttttcagatgacatccgtaacaacctcaaatctggttatccaaacgaaggtcaacctgcctttatcacaggtggcaagcgtgatgtyaacacyatctttaaaaatctcattgctcarccaactaactttgaagctgacagccctggagatgtcatccaatacatcgcagcccatgataacttgaccctctttgacatcattgcccagtctatcaaaaaagacccaagcaaggctgagaactatgctgaaatccaccgtcgtttrmgacttggaaatctcatggtcttgacagctcaaggaactccrtttatccactcyggycaggaatatggacgtacyaaacaattccgtracccagcctacarractccwgtagcagaggataaggttccaaacaaatctcacttgttgcgtgataaggacggcaacccatttgactatccttacttcatccatgaytcttacgattctagygaygcagtcaacaagtttgactggactaaggctacagatggtaaagcttatcctgaaaatgtcaagagccgtgactatatgaaaggtttgattgcccttcgtcaatctacagatgccttccgacttaagagtcttcaagatatcaaagaccgtgtccacctcatcactgtcccaggccaaaatggtgtggaaaaagaggatgtagtgawtggctaycaaatcactgctccwaacggygatatctacgcagtctttgtcaatgcggatgaaaaagctcgcgaatttaatttgggaactgcctttgcacatctaagaaatgcggaagttttggcagatgaaaaccaagcaggaycagtcggaattgccaacccgaaaggacttgaatggactgaaaaaggcttgaaattgaatgcccttacagctactgttcttcgagtctctcaaaatggaactagccatgagtcaactgcagaagagaaaccagactcaaccccttccaagcctgaacatcaaaatgaagcttctcaccctgmacatcaagayccagctccagaagctagacctgattctactaaaccagatrccaaagtagctgatgcggaaaataaacctagccaagctacagctgattcacaagctgaacaaccagcacaagaagcacaagmakcatctgtaaaagaagcggttcgaaamgaatcggtagaaaactctagcaagraaaatatayctgcaaccccagataracaagctgaacttccaaatacaggaatyaaaaacgaaaacaaactcctatttgcaggaatcagcctccttgcgctccttggtctcggtttcttactaaaaaataaaaaagagaactarctaat

SEQ ID NO: 3232 - DNA, 119 bp, Streptococcus pneumoniae
  misc_feature (1)..(119): tiling:Spneumo1:WAN0249IR; Cluster includes WAN02471N R6.I G_203||||191059..191171|+|113 bp|Between spr0182 (+ strand ) and spr0183 (nrdD) (+ strand)|S.pneumoniae|R6|NC_003098. 1|IG|110
ccaaatcaatatcttgtgtatttttaaaaattttaggatttttaacacaagatattgatttttctttttagagtggtataatactttttagaaagaacattttagaaaagagcatgcat

SEQ ID NO: 3233 - DNA, 149 bp, Streptococcus pneumoniae
  misc_feature (1)..(149): tiling:Spneumo1:WAN024APD; Cluster includes WAN024EP7 R6.I G_396||||373549..373697|+|149 bp|Between spr0372 (serS) (- strand) and spr0373 (- strand)|S.pneumoniae|R6|NC_003098. 1|IG|110
ccaacttcacaggtgtgcacttgattgtgtatgtaattgtcactaacggtagaatttcacctatccctcctatctgctcgcagyacccgcagactttctgaaagaagaagataacctacttatccgttgctatgattatactaaagttt

SEQ ID NO: 3234 - DNA, 60 bp, Streptococcus pneumoniae
  misc_feature (1)..(60): tiling:Spneumo1:WAN024AGN; Cluster includes WAN024EKK-rc R 6.IG_740.2.1.1||||719809..719868|-|60 bp|Between spr0716 ( ezrA) (+ strand) and C (transposase) (+ strand)|S.pneumoni ae|R6|NC_003098.1|IG-rc|110
ccaagttactcaaagtacagatttgaagctgcagataagactgrcgaaatcactttaata

SEQ ID NO: 3235 - DNA, 72 bp, Streptococcus pneumoniae
  misc_feature (1)..(72): tiling:Spneumo1:WAN024FA6; Cluster includes WAN023I05 tRNA -Arg|tRNA-Arg|||1131546..1131617|-|72 bp|tRNA-Arg|S.pneumo niae|R6|NC_003098.1|RNA|110
ccacccttagtgtaatggatatcacgtaagattccggttcttgagatgggggttcgattccctcagggtgga

SEQ ID NO: 3236 - DNA, 77 bp, Streptococcus pneumoniae
  misc_feature (1)..(77): tiling:Spneumo1:WAN024AQ5; Cluster includes WAN024EPK R6.I G_365||||346896..346972|+|77 bp|Between spr0341 (fni) (+ s trand) and spr0342 (+ strand)|S.pneumoniae|R6|NC_003098.1| IG|110
ccagcgcctttttttccatcctcagactgaggtgacttttttgaattgtgataaaatagaagggagaggatgaacct

SEQ ID NO: 3237 - DNA, 137 bp, Streptococcus pneumoniae
  misc_feature (1)..(137): tiling:Spneumo1:WAN024A83; Cluster includes WAN024EG6-rc R 6.IG_1094||||1051484..1051603|-|120 bp|Between spr1055 (un g) (- strand) and spr1056 (- strand)|S.pneumoniae|R6|NC_00 3098.1|IG-rc|110
ccagtctttataaactgtattcacgtattcaaatcgtatatatagtcgatttattaaatctttagataaactgtaaaaagtggtttccatagccactttttgctataatagaggcagtaaaaatgaaggagtcggct

SEQ ID NO: 3238 - DNA, 87 bp, Streptococcus pneumoniae
  misc_feature (1)..(87): tiling:Spneumo1:WAN024AFI; Cluster includes WAN024EJV R6.I G_800.1||||764970..765056|+|87 bp|Between spr0770 (+ stran d) and spr0771 (+ strand)|S.pneumoniae|R6|NC_003098.1|IG|1 10
ccctcagcttccagacaaaatcaaagccttttaggcttttttttgttatactagaaaagtatatttatagaatttttgctctatttc

SEQ ID NO: 3239 - DNA, 121 bp, Streptococcus pneumoniae
  misc_feature (1)..(121): tiling:Spneumo1:WAN024AN6; Cluster includes WAN0247Z1 R6.I G_12||||14133..14253|+|121 bp|Between spr0012 (ftsH) (+ st rand) and spr0013 (comX1) (+ strand)|S.pneumoniae|R6|NC_00 3098.1|IG|220
ccctgagagaggctggagcytctcttttttgtgcagtttaggagctaaagggaacagaatggagaaaatggaacaaatgtgttttctaatctgttagactgtatctagaaaggggaaaatt

SEQ ID NO: 3240 - DNA, 109 bp, Streptococcus pneumoniae
  misc_feature (1)..(109): tiling:Spneumo1:WAN024APG; Cluster includes WAN024EP8-rc R 6.IG_394||||371178..371274|-|97 bp|Between spr0370 (mip) ( + strand) and spr0371 (shetA) (+ strand)|S.pneumoniae|R6|N C_003098.1|IG-rc|110
cctaacctccaataatcatrttagtttcagtataacataaaagcgcttaaatgaggatttaaaaaaacgaagtccgcttatttcagacttcattttactcagatatgaa

SEQ ID NO: 3241 - DNA, 63 bp, Streptococcus pneumoniae
  misc_feature (1)..(63): tiling:Spneumo1:WAN024AGL; Cluster includes WAN024EKI-rc R 6.IG_743.2.1.1||||721635..721694|-|63 bp|Between E (transp osase) (- strand) and spr0720 (- strand)|S.pneumoniae|R6|N C_003098.1|IG-rc|220
cctaattccccaacttccagtatacyagataaaaaataattatcggaggaaaggtattgtact

SEQ ID NO: 3242 - DNA, 2043 bp, Streptococcus pneumoniae
  misc_feature (1)..(2043): tiling:Spneumo1:WAN0249TI; Cluster includes WAN024EJ9 R6.I G_846.2||||812860..813000|+|141 bp|Between spr0810 (+ stra nd) and spr0811 (- strand)|S.pneumoniae|R6|NC_003098.1|IG| 120
cctaggggaggtctatctcgtgtgtgggaaaactgatatgagacaaggaatcgattcactggcttatctggttaaaacccactttgaattggatcctttctccggtcaagtctttctcttttgtggtggacgtaaagaccgctttaaagtcctttactgggatggtcaaggattttggctactatataaacgctttgagaacggcagattgatttggctaagtacagaaaaggatgtcaaagctctcacaccagaacaagtagactggcttatgaagggcttttctatcactccaaaamtatagtrgattgraactagaatagkacacctmtrcttctaaaacattgttagaaatcgatttkactrtcctgatcgatttgtcctgttcttatttcattttaytataaawscatmakaaaskcrtgwtttytawtgaaatgaggactttctttttatactcatctgctttcaaaaagcattctagtccatctccgattaacgatggactttatcacctccttctccagtccttgtataacatcttggagttgattcatgacatcttccaaagtttaaaaggctttattcttaaatccacgtttacgaatctctttccacacttgttcaatggggttcatctctggtgtgtatggaggaataaatgcaaagccaatattagtcggaatctttaaggtacttgatttatgccatatagcattgtccataacgagtaaaagataatcatctggataagcttgtgaaatctcctattcctaaagcccctttagcgcataactttggctcagcttctattatcgctcacaccatccatcagaagtttaatctgaaggtacccaattatcgccaagaagaagattgggctaggatgggtttaccaatcacacgtaaggaaatctctaattggcatatcaaggcgagtcaatactatttggagcccctttataacctcttgcgagagagactattgactcagcccttacttcatgcggatgaaacttcttatagggtgctagagagtgatagtcagctgacttactattggacttttttgtcaggtaaagcagagaaacaagggattacgctttaccaccatgatcagtgtcgaagtggttcagtagtacaagaattcctaggagattattctggctatgtgcattgtgatattttgcggcagtaacttaggactttagtcctctagttctgcctatgcgatagcagtccaaggtttaggagcaaggcgacgctaagcttggtaaacttcgaaccgctcgtctgcttatcgtcaactggaagaagctgaacttgttggatgttgggcgcatgtgagaaggaagttttttgaagcgcccccccaagcaagcggataaatcatccttaggagctaaaggtttagcttattgtgatcagttattttccttggaaagagactgggaggctttgccagctgatgaacgactacagaaacgtcaagaacatctccagcccttaatggaagacttctttgcttagtgccggcgtcagtcagttttagcaggttcaaaactaggaagggcaattgaatacagcctcaagtatgaagaaacctttaagaccattttgaaagacggacatctggtcctttccaataatctagctgaacgcgccattaaatcattggttatgggacggagtaaaagagtccagtggactcttttagcctaagctcagtttaaaaaagcgagggtggttattttctcaaagttttgaaggagctaaagcaagagctattattatgagtttgttggaaacagctaaacgtcatcaattaaatagcgagaaatatctatcctatcttctagaatgtcttccaaacgaggaaactctcgtaaacaaagaggttttagaggcttatttaccatggactaaagttgtacaagaaaagtgcaaataagaaatctccagattaggaactatccgtgagttctccagtctggagatttttcaatagacttcctgcgaaacaaaatatggtataatagttct

SEQ ID NO: 3243 - DNA, 68 bp, Streptococcus pneumoniae
  misc_feature (1)..(68): tiling:Spneumo1:WAN024A6T; Cluster includes WAN024EFH R6.I G_1140||||1104794..1104861|+|68 bp|Between spr1102 (- stra nd) and spr1103 (- strand)|S.pneumoniae|R6|NC_003098.1|IG| 110
cctctcttatattgtaagccctattatatcatattttaaagaatgaaaatttacttgaaaaaagtaat

SEQ ID NO: 3244 - DNA, 825 bp, Streptococcus pneumoniae
  misc_feature (1)..(825): tiling:Spneumo1:WAN024FEE-3; Cluster includes WAN0243CG sp r1909|pbp1b|15903950|NP_359500.1|1886036..1888501|-|2466 b p|Penicillin-binding protein 1b|S.pneumoniae|R6|NC_003098. 1|ORF|111
cctgagtacggtattgagagyttgccaatgggtggtggtattgaagtcacagttgcccagcataccaatggctatcagaccttagctaataatggagtttatcatcagaagcatgtgatttcaaagattgaagcagcagatggtagagtggtgtatgagtatcaggataaaccrrttcaagtctattcaaaagctactgcgacgattatgcagggattgctacgagaagttctatcytctcgtgtgacaacaaccttcaagtctaacctgayttctttaaatmctactctggctaatgcagattggattgggaagactggtacaaccaaccaagacgaaaatatgtggctcatgctttcgacacmtagattaaccctaggtggytggattgggcatgatgataatcattcattgtcacgtagagcaggttattctaataactctaattacatggctcatytrgtaaatgygattcagcaagcttccccaagcatttggggraacgagcrctttgctttagatcctagtgtagtgaaatcggaagtcttgaaatcaacaggtcaaaaaccagrgaaggtttctgttgaaggaaaagargtagargtcacaggttcgactgttaccagctattgggctaataagkcaggagcgmcagcracaagttatcgctttgctattggyggaagtgatgcggattatcagaatgcttggtctagtattgtggggagtctaccaactccatccagctccagcagttcaagtagtagttctagcgatagcagtaactcaagtactacacgaccttcttcaagggcgagacgataa

SEQ ID NO: 3245 - DNA, 81 bp, Streptococcus pneumoniae
  misc_feature (1)..(81): tiling:Spneumo1:WAN0249XQ; Cluster includes WAN024EB9-rc R 6.IG_1484||||1422080..1422160|-|81 bp|Between () (- strand ) and spr1438 (entB) (- strand)|S.pneumoniae|R6|NC_003098. 1|IG-rc|110
cctggttggtgaaaatgaaaaaatttgaaaaaaagtgttgacaagcatcccaaaagttgatatactagtaaagtaatcgac

SEQ ID NO: 3246 - DNA, 95 bp, Streptococcus pneumoniae
  misc_feature (1)..(95): tiling:Spneumo1:WAN024AIT; Cluster includes WAN024ELS-rc R 6.IG_639||||626365..626459|-|95 bp|Between spr0615 (+ stra nd) and spr0616 (+ strand)|S.pneumoniae|R6|NC_003098.1|IG- rc|110
ccttactcctccttataataaaaatagggtgtagcattcttttttcatgctacacccacaatcaaccatctttaaggcttactctgacaagtaag

SEQ ID NO: 3247 - DNA, 1140 bp, Streptococcus pneumoniae
  misc_feature (1)..(1140): tiling:Spneumo1:WAN024FJT; Cluster includes WAN0244ZH |||| ||2340 bp|Incyte orf contig SPN2C0382 24-2363|S.pneumoniae |23F|WAN0244ZH|ORF|001
ccttatgttcactttgcgtattctgaaaatgcagatggatcaggtttgacaatgacagataacggacagcgttattttggtcattattcagattatgagaaacctgatagttcggataaaactaagtacaaatgggctgatcgwtgggctaaagttgatggaggttatgtaaatatctatgcattgtctaagaatagaagtattgggaaatcttatcatgtttctgaatttaatatggatgtactttcaggaaatatcactctaaaagcaattgggtcagatccatacattggcgccgtttcttctcatccaggtatttttataaagcaacagggaatgaaaatcccagttatacaagggagatctatttgtataacaataacaaatcctttatttagaaaaaattacatctcgttttttaattcattaggtaaaactgttaaaacatataagcattacaacacaaataaatttttaatatcttcagctgatttggtaggtgttgaatttatcgctttacgatatggtgcaggaagctcgaatatacaaattggaaccgtactagagacaaaagtaaaggtagaatatggaaccgtgcatagcgactggtcgcccgctccagaagatattgaaagtaatattaactctaaagctgatcagggtctgactcaagagcagttaaatgccctcaatgagaagtcacaaattttagaggctgaaatgaaagcgaaagcatcgatggaggcctttagtgaattagaaaaagcatataatgcctttgtgaaatcaaatgcagatagtcgaaaaaaatctgagtctgatttagttgaagcaggtagaagaattgatttgctgacgacacaatttggaggattagcagagcttaaaacattcattgatacttacatgaaaagcacaaatgagggcttgattataggtaagaatgatgcaagctctactattaaggtatcaagtgatagaatatccatgttttctgcaggtaaggaagttatgtacatttcgcaaggtgtaataaatattgataatggtatttttactgcatcaattcaaattggacgttttagaacagaacagtatcatcttaacaaagatgtgaatgtcatacgatatataggaggt

SEQ ID NO: 3248 - DNA, 92 bp, Streptococcus pneumoniae
  misc_feature (1)..(92): tiling:Spneumo1:WAN024AJK; Cluster includes WAN024EM5 R6.I G_619.1||||608512..608603|+|92 bp|Between spr0595 (+ stran d) and spr0596 (+ strand)|S.pneumoniae|R6|NC_003098.1|IG|1 10
ccttatttccaaattagtcgaatgataggatgaagctattgttttatagtataattaatttgtataaaatttaaggagttcttagaacataa

SEQ ID NO: 3249 - DNA, 114 bp, Streptococcus pneumoniae
  misc_feature (1)..(114): tiling:Spneumo1:WAN0249FF; Cluster includes WAN024E44 R6.I G_2179||||1962518..1962616|+|99 bp|Between spr1972 (fucA) (- strand) and spr1973 (fcsK) (- strand)|S.pneumoniae|R6|N C_003098.1|IG|110
ccttgtcctcctcatatcaaaacactaaatatttttcaattcaccaattatccccccttcctgcacaaaagctaagaagggggagggaggcaaatttacaaactctcaatcttt

SEQ ID NO: 3250 - DNA, 156 bp, Streptococcus pneumoniae
  misc_feature (1)..(156): tiling:Spneumo1:WAN024AOY; Cluster includes WAN024EOY-rc R 6.IG_422||||394965..395120|-|156 bp|Between spr0398 (rpmB) (+ strand) and spr0399 (asp23) (+ strand)|S.pneumoniae|R6 |NC_003098.1|IG-rc|110
cctttttacctcaactagttgatactctattttatcatatttcagcccaagtgtaaaagcagaatgatgtatcagcggatatttactctatttttcaaacgatgttatacccacaataaaagaaaaaagaccctaaggtctcctttgcttttatta

SEQ ID NO: 3251 - DNA, 141 bp, Streptococcus pneumoniae
  misc_feature (1)..(141): tiling:Spneumo1:WAN024AGD; Cluster includes WAN024EKA-rc R 6.IG_753||||729282..729422|-|141 bp|Between spr0729 (folD) (+ strand) and spr0730 (+ strand)|S.pneumoniae|R6|NC_0030 98.1|IG-rc|110
cctytwwtcmyctcactyytattatacaayaaaaaggagrcgcaracctccttttrtaawcttatwtctaaaatttaatattcatttctrycattttagatatagctatagaaaatacactytmytmakmraatkyttmtc

SEQ ID NO: 3252 - DNA, 114 bp, Streptococcus pneumoniae
  misc_feature (1)..(114): tiling:Spneumo1:WAN024AK6; Cluster includes WAN024EMF-rc R 6.IG_585.1.2.1||||569054..569167|-|114 bp|Between spr0561 (prtA) (+ strand) and spr0562 (+ strand)|S.pneumoniae|R6|N C_003098.1|IG-rc|110
cgaaaaacttccttccaaataaaaaggaattaagcaaccaaacgctacttaattcctygaaattgtctcatcacctctattagcctttaaattttgatagactctattttctaa

SEQ ID NO: 3253 - DNA, 2104 bp, Streptococcus pneumoniae
  misc_feature (1)..(2104): tiling:Spneumo1:WAN024FNJ; Cluster includes WAN0243SJ spr1 328|glyS|15903371|NP_358921.1|1314334..1316370|-|2037 bp|G lycyl-tRNA synthetase beta chain|S.pneumoniae|R6|NC_003098 .1|ORF|111
cgacgtccccagtacctaaggtgcatatcaaaaaagattgaagaaaatgtaaaggaaaaaacatgacaaaaaacttattagtagaactcggtcttgaagaattaccagcctatgttgtyacrccaagtgaaaaacaactaggcgaaaaaatggcagccttcctcaaggraaamcgcctgtcttttgaagccattcaaacyttctcaacaccacgtcgtttggctgttcgtgtractggtytwkcagacaaacagtctgatttracagaagatttcaagggwccagcaaagaaaattgccttrgatagtgatggaaacttcaccaaagcagctcaaggatttgtccgtggraaaggyttgactgttgaagatatcgaattccgtgaaatcaagggtgaagaatatgtctatgtcactaaggaagaarttggtcaakcagttgaagccattgttccwggyrttgtrgatgtcttgaagtcaytgactttccctgtcagcatgcactgggckggaaatagctttgaatacatccgccctgtycacactttaactgttctcttggatgagcaagagtttgacttggatttccttgatatcaagggargtcgtgtgagycgtggccatcgtttyttgggrmaagaaaccaarattcagtcagcattgagctatgaagaagaccttcgtaagcagtttgtaatcgcagatccatgtgaacgtgagcaaatgattgttgaccaaatcaagraaattgaggcaaaacatggtgtacgtatcgaaattgatgcggatttgctgaatgaagtcttgaatttggttgaatacccaactgccttcatgggaagttttgatgctaaataccttgaagttccagaagaagtcttggtgacttctatgaaggaacaccagcgttactttgttgttcgtgatcaagatggaaaactcttgccaaacttcatttctgttcgtaacggaaacgcagagcgtttgaaaaatgtcatcaaaggaaatgaaaaagtcttggtagcccgcttggaagacggagaattcttctggcgtgaagaccaaaaattggtgatttcagatcttgttgaaaaattaaacaatgtcaccttccatgagaagattggttcycttcgtgaacacatgattcgtacgggtcaaatcactgtacttttggcagaaaaagctrgtttgtcagtggatgaaacagttgaccttgctcgtgcagcagccatttacaagtttgacttgttgacaggtatggttggtgaatttgacgaactccaaggaattatgggtgaaaaatacacccttcttgctggtgaaactccagcggtggcagctgctattcgtgaacactacatgcctacatcagctgaaggagaacttccagagagcaaggtcggygcagttctagccattgcagacaaattggatacgattttgagtttcttctcagtaggattgattccatcaggttctaatgacccttatgcccttcgtcgtgcaactcaaggtgtggttcgtatcttggatgcctttggttggcacattgctatggatgagctgattgatagcctttatgcattgaaatttgacagtttgacttatgaaaataaagcagaggttatggactttatcaaggctcgtgttgataagatgatgggctctactccaaaagatatcaargaagcagttcttgcaggttcaaactttgttgtggcagatatgttggaagcagcaagtgctctcgtagaagtaagcaaggaagaagattttaaaccatctgttgaatcactttctcgtgcctttaacctggcygagaaggcagaaggggttgcyacrgttgattcagcactatttgagaatgaccaagaaaaagctttggcagaagcagtagaaacactcrttttatcagracctgcaagtcagcaattgaaacaactytttgcgcttagcccagtcattgatgctttctttgaaaatactatggtaatggctgaagatcaggctgtccgtcaaaatcgtttggcaatcttgtcacaactaaccaagaaagcagctaagtttgcttgttttaaccaaattaacactaaataactaat

SEQ ID NO: 3254 - DNA, 395 bp, Streptococcus pneumoniae
  misc_feature (1)..(395): tiling:Spneumo1:WAN0249PL; Cluster includes WAN024EH5-rc R 6.IG_1027.1.1.1.1.2||||972654..973037|-|384 bp|Between spr 0988 (IS1167) (- strand) and spr0989 (murZ) (+ strand)|S.p neumoniae|R6|NC_003098.1|IG-rc|110
cgattcttatttccagcgtcagacttaaaacggtctatccccagaccrttttaatccrctacctcacgatagtcaggcttgggaatcgctatttgactcgccgagaactttgacatcagatatactataacaaattgaaataagaatcaaacaatttaattttgaaattcaaatcaatttataacaatatagttgattgaaactagamtagtacayctctgcttmtaaaacattgttagaaatcgattttactgtcctgatcgatttgtyctgttctcatttcattttactatattttagaagatatgctgtgctattccagattcagttygctatacatgccygtcgtaccacaaaatcccgtgtytgatgwggcacgggattttttagcttct

SEQ ID NO: 3255 - DNA, 161 bp, Streptococcus pneumoniae
  misc_feature (1)..(161): tiling:Spneumo1:WAN0249R6; Cluster includes WAN024EMN-rc R 6.IG_580.1.1.1||||556072..556232|-|161 bp|Between spr0556 (rplA) (+ strand) and spr0557 (+ strand)|S.pneumoniae|R6|N C_003098.1|IG-rc|110
cgattcttatttccagcgtcagacttgggaatcgctattgggttcaccggtagtaggtgcccaccgaggacttacacctcagatatacracatgcccgtcgtacatcaaaaaaagttgagacatagygtcttcaacttttttacattastttaactactga

SEQ ID NO: 3256 - DNA, 74 bp, Streptococcus pneumoniae
  misc_feature (1)..(74): tiling:Spneumo1:WAN024F9R; Cluster includes WAN023HZX tRNA -Met|tRNA-Met|||1691152..1691225|-|74 bp|tRNA-Met|S.pneumo niae|R6|NC_003098.1|RNA|220
cgcgggatggagcagctcggtagctcgtcgggctcataacccgaaggtcgtaggttcaaatcctgctcccgcaa

SEQ ID NO: 3257 - DNA, 215 bp, Streptococcus pneumoniae
  misc_feature (1)..(215): tiling:Spneumo1:WAN024AG6; Cluster includes WAN024EK7 R6.I G_761.2.2||||736290..736504|+|215 bp|Between spr0737 (+ st rand) and spr0738 (deoD) (+ strand)|S.pneumoniae|R6|NC_003 098.1|IG|110
cgctcactgcgcccaactcctattttcccttcgctttttgatgggtttggtatctttctcaatataaaatataaaataaagaaaggtagagcgtgtgttttgatttgaacacgagcggaaaactcggaaaatagataatctgactgaaaaatcaggatttctcgtcaggttcctaattttcagtcgttttcttctcgctctttgtatcataaatt

SEQ ID NO: 3258 - DNA, 228 bp, Streptococcus pneumoniae
  misc_feature (1)..(228): tiling:Spneumo1:WAN024A9D; Cluster includes WAN024EGW-rc R 6.IG_1046.1||||990438..990665|-|228 bp|Between spr1007 (pt a) (+ strand) and spr1008 (- strand)|S.pneumoniae|R6|NC_00 3098.1|IG-rc|110
cggaaaattctcttttcatactcatttaaaatcaaaaagggaatttatcgttttacggayatgtatattacagatttctataggtcgtgtatagacaggatatcatcgcttggaagttttcctttttgacaccaatcagtaatttagttctcaggaattaatggcagtgcttttcgtacatagtttcataactacagtatagcatagtatatcactttatagttttca

SEQ ID NO: 3259 - DNA, 74 bp, Streptococcus pneumoniae
  misc_feature (1)..(74): tiling:Spneumo1:WAN024F9O; Cluster includes WAN023HZT tRNA -Pro|tRNA-Pro|||1691505..1691578|-|74 bp|tRNA-Pro|S.pneumo niae|R6|NC_003098.1|RNA|220
cgggaagtagctcagcttggtagagtrcttggtttgggaccaaggtgtcgcaggttcgaatcctgtcttcccga

SEQ ID NO: 3260 - DNA, 56 bp, Streptococcus pneumoniae
  misc_feature (1)..(56): tiling:Spneumo1:WAN024AMS; Cluster includes WAN024ENU R6.I G_471||||453279..453334|+|56 bp|Between spr0447 (xerD) (- strand) and spr0448 (hsdS) (- strand)|S.pneumoniae|R6|NC_0 03098.1|IG|110
cgtaaaactcctatcttatgtttgatagaaattccaccgcacgtaaaactattata

SEQ ID NO: 3261 - DNA, 150 bp, Streptococcus pneumoniae
  misc_feature (1)..(150): tiling:Spneumo1:WAN0249CY; Cluster includes WAN024EQY-rc R 6.IG_252||||222433..222573|-|141 bp|Between spr0231 (+ str and) and spr0232 (pflF) (+ strand)|S.pneumoniae|R6|NC_0030 98.1|IG-rc|110
cgtaagcacctttctttcgaaaatattttyatttctttcgaaaatataataccgatttttatagaaattttcaagcttttaactagaaaaattttaactctctaatttttagcacaaatgtgtgagtttaacagtaacacacaaatacct

SEQ ID NO: 3262 - DNA, 204 bp, Streptococcus pneumoniae
  misc_feature (1)..(204): tiling:Spneumo1:WAN024A8Y; Cluster includes WAN024EGN R6.I G_1059.2||||999164..999367|+|204 bp|Between spr1020 (hlpA) (+ strand) and spr1021 (+ strand)|S.pneumoniae|R6|NC_0030 98.1|IG|110
cgtacgtaaatgatgaaaagaattaaataatagacttgtgcgataactatttgaaacaagattagctggttagaaaatccaacaagatagtgaagkaatctaatataaaatatacataatttagtttattttatgttataaaagttgtactaaaagacttacgattatcttgaatgccttagggaaacatgctatactacttgt

SEQ ID NO: 3263 - DNA, 1758 bp, Streptococcus pneumoniae
  misc_feature (1)..(1758): tiling:Spneumo1:WAN024CWF-3; Cluster includes WAN0244T8 sp r0006|mfd|15902050|NP_357600.1|4756..8265|+|3510 bp|Transc ription-repair coupling factor|S.pneumoniae|R6|NC_003098.1 |ORF|111
cgtagtcagttgaagggttttgctttctcagctgatgatgatgatcaagatgcctttgatgatgctttcccttatgttgaaacggatgatcaacttcgtagtattgaggaaatcaagagggatatgcaggcttctcagccaatggaycgacttttagttggggatgttggttttggaaagactgaagttgctatgcgtgcagcctttaaagcagtcaatgatcacaaacaggttgtcattctagttccgacgacggttttagcgcaacagcactatacgaattttaaggaacgattccaaaattttgcagttaatrttgatgtgttgagtcgctttagaagtaaaaaagagcagactgcaacacttgaaaaattgaaaaacggtcaagtcgatattttgattggaacacatcgtgttttgtcaaaagatgttgtgtttgctgatttgggcttgatgattattgatgaggaacagcgatttggtgtcaagcataaggaaactttgaaagaactgaagaaacaagtggatgtcctaaccttgaccgctacgccaatccctcgtaccctccatatgtctatgctgggaatcagagatttrtctgttattgaaactccgccgactaatcgctaycctgttcagacctatgttttggaaaagaatgatagtgtcattcgtgatgctgtcttgcgtgaaatggagcgtggaggtcaagkttaytatctttacaacaaagttgacacaattgttcagaaggtttcagaattacaggagttgattccrgaggcttcgattggatatgttcatggtcgaatgagtgaagtccagttggaaaatactctattagactttattgagggacaatacgatatcttggtgackactactattattgagacaggggtggacattccaaatgctaatactttatttattgaaaatgcggaccatatgggcttgtcaaccttatatcagttaagaggaagagtcggtcgtagtaatcgtattgcttatgcttatctcatgtatcgtccagaaaaatcaatcagtgaagtctctgaaaagagattagaagcgattaaaggatttacagaattgggctctggctttaagattgcaatgcgagatctttcgattcgtggagcaggaaatcttttaggaaaatcccagtctggtttcattgattctgttggttttgaattgtattcgcagttattagaggaagctattgctaaacgaaacggtaatgctaacgctaacacaagaaccaaagggaatgctgagttgrttttgcaaattgatgcctatcttcctgatacttatatttctgatcaacgacataagattgaaatttacaagaaaattcgtcaaattgacaaccgtgtcaattatgaagagttacaagaggagttgatagaccgttttggagaatacccagatgtagtagcctatctkttagagattggtttggtyaaatcatacttggacaaggtctttgttcaacgtgtggaaagaaaagataataaaattacaattcaatttgaaaaagtcactcaacgrctgtttttagctcaagattattttaaagctttatccgtaacgaacttaaaagcaggcatcgctgagaataagggattaatggagcttgtatttgatgtccaaaataagaaagattatgaaattttagaaggtytgctgatttttggagaaagtttattagagataaaagagtytaaggaaraaaattccattykaactaat

SEQ ID NO: 3264 - DNA, 149 bp, Streptococcus pneumoniae
  misc_feature (1)..(149): tiling:Spneumo1:WAN024AQ3; Cluster includes WAN024EPJ R6.I G_371||||350080..350228|+|149 bp|Between spr0347 (+ strand ) and spr0348 (+ strand)|S.pneumoniae|R6|NC_003098.1|IG|11 0
cgtgattgaaaagcgcagtcattaattgaaaagtttrcctgtttatgtgataatggagggtatttaaagaaggtggtagatttcttgattctatagtagattragaaatttagaatagtacgctataattacattaggaggatacaata

SEQ ID NO: 3265 - DNA, 99 bp, Streptococcus pneumoniae
  misc_feature (1)..(99): tiling:Spneumo1:WAN024ADB; Cluster includes WAN024EIR-rc R 6.IG_896.2||||855163..855260|-|98 bp|Between spr0860 (+ st rand) and spr0861 (infC) (+ strand)|S.pneumoniae|R6|NC_003 098.1|IG-rc|110
cgttatgatagcgtttcttcgaaacttttcatccgtagggccaggcaacttaatgtcacaaggcgagaagctctcacttctgcttttctcaacttttat

SEQ ID NO: 3266 - DNA, 49 bp, Streptococcus pneumoniae
  misc_feature (1)..(49): tiling:Spneumo1:WAN024AOR; Cluster includes WAN024EOU R6.I G_429||||401552..401600|+|49 bp|Between spr0405 (+ strand) and spr0406 (ilvA) (+ strand)|S.pneumoniae|R6|NC_003098.1 |IG|110
ctaaaaaacagtcattagtgactgttttttatagaaaaagaggttttat

SEQ ID NO: 3267 - DNA, 161 bp, Streptococcus pneumoniae
  misc_feature (1)..(161): tiling:Spneumo1:WAN024AFL; Cluster includes WAN024EJW-rc R 6.IG_793||||759576..759736|-|161 bp|Between () (+ strand) and spr0764 (rpsA) (+ strand)|S.pneumoniae|R6|NC_003098.1| IG-rc|110
ctaaaaaatcctccaacaatcaagtttttcttaaacttgacatacttataatttttttcctaagcaccmgcaaggacatgttcatatcattcacgtctttcaattataaaaataaaataccctaagatattttgctttytatcttgattattacctaagaa

SEQ ID NO: 3268 - DNA, 288 bp, Streptococcus pneumoniae
  misc_feature (1)..(288): tiling:Spneumo1:WAN024AG8; Cluster includes WAN0247K0-rc R 6.IG_101.2||||87489..87776|-|288 bp|Between spr0080 (+ str and) and spr0081 (+ strand)|S.pneumoniae|R6|NC_003098.1|IG -rc|110
ctaaaaattcttttttagacttttgataacgattacattattagtatactcctatttgcaggttaggttaaactcctaattatagaaaaaactccacaaattatgtagcagatttaaaactttatcaccactatcaaacaaatgtcctaaatcaattgtttattttatctctattagcccagtgatggcgtcactctgttataagcatccaacaacggggtatactgaaaaatctccagactagggaactcagmgatagttcctaatctggagatttttaatatgtta

SEQ ID NO: 3269 - DNA, 359 bp, Streptococcus pneumoniae
  misc_feature (1)..(359): tiling:Spneumo1:WAN024AIG; Cluster includes WAN024ELI R6.I G_662||||645843..646177|+|335 bp|Between spr0638 (thiD) (- strand) and spr0639 (copY) (+ strand)|S.pneumoniae|R6|NC_ 003098.1|IG|110
ctaaaacctcccaaccaactgaagtttgtattcttaagaacaagctagtctgttttagaaaggcaatagaagactgctagtccccattatcatttccacttccatcagctagcattacctagattgagtcagagggatctaacagtcgttaatctcagctttacgcacccctagtggttgttttcttttttctttagtatagcatatttttattgtttatatagtaatatttgactgcaaatcgtttttcaaatgattaaaattctatttttcgaagaaaatattatttctataattgacaaatgtagattttaagagtatactgatgagtgtaattgacaaatgtagattttggaggt

SEQ ID NO: 3270 - DNA, 166 bp, Streptococcus pneumoniae
  misc_feature (1)..(166): tiling:Spneumo1:WAN0249WB; Cluster includes WAN024EAB R6.I G_1558.2||||1489374..1489539|+|166 bp|Between spr1511 (fts A) (- strand) and spr1512 (- strand)|S.pneumoniae|R6|NC_00 3098.1|IG|110
ctaaacataggcatagctattcacaaaatattataacacaaaaaatttaatcgtgcttgcttttttcctaaatttcccagccattttttgagtttgtctattcagaaattcttattttataagctgcttgtaaaaactctctaagagcaaaaaagaaagctctgtg

SEQ ID NO: 3271 - DNA, 190 bp, Streptococcus pneumoniae
  misc_feature (1)..(190): tiling:Spneumo1:WAN0249SE; Cluster includes WAN0247M1-rc R 6.IG_89.1.1||||76076..76265|-|190 bp|Between spr0068 (+ st rand) and spr0069 (+ strand)|S.pneumoniae|R6|NC_003098.1|I G-rc|110
ctaaatcttaycracataaaacgcatagtrtcaaarttttcatcacctgatatgatacgtttttctgattttaaagatttttcccaacctcaacatgcctaggacaagaggaaggtgacctcgtttaaacatatttttgaaaagtatgagctagacattttatgataaaacaaatcctttgccwgtacaa

SEQ ID NO: 3272 - DNA, 87 bp, Streptococcus pneumoniae
  misc_feature (1)..(87): tiling:Spneumo1:WAN024A4C; Cluster includes WAN024790-rc R 6.IG_141.2.2||||128269..128355|-|87 bp|Between spr0120 (+ strand) and spr0121 (pspA) (+ strand)|S.pneumoniae|R6|NC_0 03098.1|IG-rc|110
ctaaatttacctcttttctgatagtcattttyagactatamttatattaagtatasycycctccgtaaatatttgtcaartgtttta

SEQ ID NO: 3273 - DNA, 134 bp, Streptococcus pneumoniae
  misc_feature (1)..(134): tiling:Spneumo1:WAN024AOK; Cluster includes WAN024EOR-rc R 6.IG_433.2||||406216..406349|-|134 bp|Between spr0409 (gln H) (- strand) and spr0410 (+ strand)|S.pneumoniae|R6|NC_00 3098.1|IG-rc|110
ctaagccccctttttatctttcttatcattatagcattttttcgtaagtaaagrcttacttatgttgaaaaattacgcatttttcgataaaataggagacagttattttttaatagatcagaataggagaaatc

SEQ ID NO: 3274 - DNA, 126 bp, Streptococcus pneumoniae
  misc_feature (1)..(126): tiling:Spneumo1:WAN024AIY; Cluster includes WAN024ELU R6.I G_636.2||||624287..624412|+|126 bp|Between spr0612 (- stra nd) and spr0613 (pyrF) (+ strand)|S.pneumoniae|R6|NC_00309 8.1|IG|110
ctaaggttagacggtgaaagggtggagactacccatttttcgtggaaccttgctgttggcaggttccttttttcgtggcttctgttggccagactctctcactagtaaaggtaaaaggagaaacct

SEQ ID NO: 3275 - DNA, 420 bp, Streptococcus pneumoniae
  misc_feature (1)..(420): tiling:Spneumo1:WAN024AAH; Cluster includes WAN024EHG-rc R 6.IG_993.1.2||||937415..937834|-|420 bp|Between spr0954 (+ strand) and spr0955 (+ strand)|S.pneumoniae|R6|NC_003098. 1|IG-rc|110
ctaatctctaacaccactgcatgtaccgtcctatatttatgatcagctcccatcgtttacattttcaggtcactgtcttttcataccaggaattagaattgacaaatttaattagagaggtattcatttaattgttcacttcttcgctccatttccattacagaaatttcttcaatactatgtgttcagctgactcccatgattcgttgtactacgtcctaaacgctcacggaataagccgtacatctttcctagtttactctcgtaatttacgtatataggttacgacacctatttggattttagagttcctcatccgctatatatggcttcaagtcacgattctgtttgtagaaccttgatttcgctaattccttcctatcccccctacctcacgatattcaggcttaggagtcgcta

SEQ ID NO: 3276 - DNA, 147 bp, Streptococcus pneumoniae
  misc_feature (1)..(147): tiling:Spneumo1:WAN0249IY; Cluster includes WAN024E5X-rc R 6.IG_1990.1||||1805544..1805690|-|147 bp|Between spr1830 ( + strand) and spr1831 (- strand)|S.pneumoniae|R6|NC_003098 .1|IG-rc|110
ctaatyatttttacaggatgagrtttacagcagagagtttgaaggctttatcaaaggtttttcttggcataatgacttttcctcgtttccacttaattttgtgtctactttattataccaagtccacccttaagttagataatraat

SEQ ID NO: 3277 - DNA, 152 bp, Streptococcus pneumoniae
  misc_feature (1)..(152): tiling:Spneumo1:WAN0249VH; Cluster includes WAN024E9V R6.I G_1582.2.2.2||||1514792..1514943|+|152 bp|Between spr1535 (- strand) and spr1536 (nanA) (- strand)|S.pneumoniae|R6|N C_003098.1|IG|110
ctactatattttatagaacagactactctgaaagtagtttcagacctcttatgatttcgtatcagcctgaatgtcatcaaaaaaagatagcaggcttgaaaacctgctatctccttctatttttacrrwwtcaaatgtttagaattcttctc

SEQ ID NO: 3278 - DNA, 199 bp, Streptococcus pneumoniae
  misc_feature (1)..(199): tiling:Spneumo1:WAN024A39; Cluster includes WAN024ED9 R6.I G_1323.1||||1274526..1274724|+|199 bp|Between spr1279 (- s trand) and spr1280 (- strand)|S.pneumoniae|R6|NC_003098.1| IG|110
ctactcttaaaaaatccaaaaccaacacaagctatcagctatttattataaccccattaatttgcactccagtattatcttcagccgaaaatcagtattttaggttgtttgaaataaacttcctagtttactcttttatttttatttagtattagctttagtargatcttttaaacgartttttattgcttatatttct

SEQ ID NO: 3279 - DNA, 228 bp, Streptococcus pneumoniae
  misc_feature (1)..(228): tiling:Spneumo1:WAN0249L3; Cluster includes WAN024E76-rc R 6.IG_1868.1||||1721711..1721938|-|228 bp|Between spr1753 ( - strand) and spr1754 (lytA) (- strand)|S.pneumoniae|R6|NC _003098.1|IG-rc|110
ctagaaagttatgctcaaataaaatctaaatttgacaatgtaaaccgagtcggatagctttaagtactgttttgaggttgaagatacgatttttgataggaactcatcaattttagatttttaagcagcatcaataaattgcttccttgttttgtcataatttttttatttaaaaaattatgacaaragtgtgctattctttttatgagaggtgtatgaatatgataa

SEQ ID NO: 3280 - DNA, 76 bp, Streptococcus pneumoniae
  misc_feature (1)..(76): tiling:Spneumo1:WAN024AOU; Cluster includes WAN024EOW-rc R 6.IG_427||||400615..400690|-|76 bp|Between spr0403 (ilvC) (+ strand) and spr0404 (+ strand)|S.pneumoniae|R6|NC_00309 8.1|IG-rc|110
ctagaaccaataataacgatgcaatttttctcataatctttttcataaaatcatctccagcgctatatatttctaa

SEQ ID NO: 3281 - DNA, 116 bp, Streptococcus pneumoniae
  misc_feature (1)..(116): tiling:Spneumo1:WAN024AL9; Cluster includes WAN024EN5 R6.I G_537||||511686..511801|+|116 bp|Between spr0513 (+ strand ) and spr0514 (metE) (+ strand)|S.pneumoniae|R6|NC_003098. 1|IG|110
ctagaatcagttatagtcttttctaataacargycatagtcacttataagaattactaataacrygtttkarymktctaaytgaaataaagctataaaacaagctatacaaaggat

SEQ ID NO: 3282 - DNA, 148 bp, Streptococcus pneumoniae
  misc_feature (1)..(148): tiling:Spneumo1:WAN024A6I; Cluster includes WAN024EFC-rc R 6.IG_1159||||1122564..1122711|-|148 bp|Between spr1121 (gl nQ) (+ strand) and spr1122 (zwf) (+ strand)|S.pneumoniae|R 6|NC_003098.1|IG-rc|110
ctagctacctaatttctatttttattcctagtcttgctaggtatgaggaaacctcatttcataaacttaattctaacataattttccgaaaaatcaaaaattccaatacgaggtagaaaaactgcaaggaaatccttacagtttgagt

SEQ ID NO: 3283 - DNA, 63 bp, Streptococcus pneumoniae
  misc_feature (1)..(63): tiling:Spneumo1:WAN024A3E; Cluster includes WAN024EDC-rc R 6.IG_1319.1||||1271165..1271227|-|63 bp|Between spr1275 (- strand) and spr1276 (nadE) (- strand)|S.pneumoniae|R6|NC_ 003098.1|IG-rc|110
ctagctgttactgagttgagyctttttactacgagyatagaaataaggaagtgaggtagcatc

SEQ ID NO: 3284 - DNA, 191 bp, Streptococcus pneumoniae
  misc_feature (1)..(191): tiling:Spneumo1:WAN024AJ3; Cluster includes WAN024ELW-rc R 6.IG_635.2||||623777..623951|-|175 bp|Between spr0611 (+ s trand) and spr0612 (- strand)|S.pneumoniae|R6|NC_003098.1| IG-rc|110
ctagcttattaatcaccgtccccaaaaatacttggattacaagacaggttttgaagcactttttgaagcacttatagaggagatttaaaaatgttgcattttttattgcaatttatcagttatcttatcacccaaaacttctgcaattagtatgagcactattgttatttttcttttttcgtacactcaaa

SEQ ID NO: 3285 - DNA, 90 bp, Streptococcus pneumoniae
  misc_feature (1)..(90): tiling:Spneumo1:WAN0249W9; Cluster includes WAN024EAA R6.I G_1559||||1490245..1490334|+|90 bp|Between spr1512 (- stra nd) and spr1513 (mutT) (- strand)|S.pneumoniae|R6|NC_00309 8.1|IG|110
ctagtcttcctcataattcaaaattttcctgcatattattataccatgctagttgttaaaaatggatttagaaatacgataatcatcttc

SEQ ID NO: 3286 - DNA, 75 bp, Streptococcus pneumoniae
  misc_feature (1)..(75): tiling:Spneumo1:WAN0249SP; Cluster includes WAN0247L0 R6.I G_99.2||||86485..86558|+|74 bp|Between spr0078 (rpsD) (+ s trand) and A (transposase) (+ strand)|S.pneumoniae|R6|NC_0 03098.1|IG|110
ctataatcgttgagacataactagaccgatatagtccaaagtgatatagtaaaatgaaccaaaaatagtacacaa

SEQ ID NO: 3287 - DNA, 77 bp, Streptococcus pneumoniae
  misc_feature (1)..(77): tiling:Spneumo1:WAN024AQT; Cluster includes WAN024EPZ R6.I G_322.1.2||||300849..300925|+|77 bp|Between spr0301 (yorfE ) (- strand) and spr0302 (yllC) (+ strand)|S.pneumoniae|R6 |NC_003098.1|IG|110
ctatattatagtcttttaaacataaagtgtcaagtatttttgacatattttttgaagaaatagtagtctccttgtcc

SEQ ID NO: 3288 - DNA, 417 bp, Streptococcus pneumoniae
  misc_feature (1)..(417): tiling:Spneumo1:WAN0249IX; Cluster includes WAN024E5V R6.I G_1991.1||||1806104..1806520|+|417 bp|Between spr1831 (- s trand) and spr1832 (- strand)|S.pneumoniae|R6|NC_003098.1| IG|110
ctatattattcgtaatgaaaaataaaaaaataaaatttttttaaatgattatgattyagaatttattyaatatattaaaasaakatwtgaacaaataaattgggagattgaaattcatttctagcaatttgttagaagtcacagtctactattctaaccwcagtatactatatgtgttacaagaaaagactcaaaaacttctcgtcagtgtaagaatrtttgaaacactatttaaaactaaataactataagaagtagatcaggtgaacaatttcagtacctactctataagctatacgaagatatttttcaacatgatggatamaacgatcactcttttaaagccatcttatttagaaaagagaaaccatttaagcatagatgggaccttcttgccctgttttaaatttttcttaa

SEQ ID NO: 3289 - DNA, 134 bp, Streptococcus pneumoniae
  misc_feature (1)..(134): tiling:Spneumo1:WAN024ANY; Cluster includes WAN024EOD R6.I G_451.2||||428299..428432|+|134 bp|Between spr0427 (trkA) (- strand) and spr0428 (+ strand)|S.pneumoniae|R6|NC_00309 8.1|IG|110
ctatcataccctttttcaagaaaaaawgcacctactagctaataacaagaryttttagtagraaattygctataaggtaaaactataccctaaccaattgaaatagctattagcgactttctctgaaatatggt

SEQ ID NO: 3290 - DNA, 67 bp, Streptococcus pneumoniae
  misc_feature (1)..(67): tiling:Spneumo1:WAN0249HF; Cluster includes WAN024E53 R6.I G_2113||||1884065..1884131|+|67 bp|Between spr1906 (hipO) (- strand) and spr1907 (dapD) (- strand)|S.pneumoniae|R6|N C_003098.1|IG|110
ctatctgtcctccgatatagcagaaagaggctggaaaaagggttccgcctcttttttacttttacaa

SEQ ID NO: 3291 - DNA, 123 bp, Streptococcus pneumoniae
  misc_feature (1)..(123): tiling:Spneumo1:WAN0249M8; Cluster includes WAN024E7U-rc R 6.IG_1745.2.1||||1665739..1665861|-|123 bp|Between spr1696 (murI) (- strand) and spr1697 (- strand)|S.pneumoniae|R6| NC_003098.1|IG-rc|110
ctatgttggttatggtttagggatgagactttttccttgcattctattgatatttgattatgattaagagagaggtagttgacattctatcaagctgtcggtcagttcgttcagtacaaggaa

SEQ ID NO: 3292 - DNA, 90 bp, Streptococcus pneumoniae
  misc_feature (1)..(90): tiling:Spneumo1:WAN0249WW; Cluster includes WAN024EAS-rc R 6.IG_1522||||1456745..1456834|-|90 bp|Between spr1475 (+ s trand) and spr1476 (- strand)|S.pneumoniae|R6|NC_003098.1| IG-rc|110
ctattagattctatttaaaaagacttagaatgcacatgaaagtatgtattctaggtcttttgttttgtatacatttaattttcaagagta

SEQ ID NO: 3293 - DNA, 287 bp, Streptococcus pneumoniae
  misc_feature (1)..(287): tiling:Spneumo1:WAN0249RQ; Cluster includes WAN024EKJ-rc R 6.IG_740.2.2.2||||720203..720315|-|113 bp|Between spr0716 (ezrA) (+ strand) and C (transposase) (+ strand)|S.pneumon iae|R6|NC_003098.1|IG-rc|200
ctattgaatttagtatcgtaaataataaagcgtttggtttctagattattgtcattcaaattggataatgataaatctagaaaccaaatatattttccgcataaaatgagggattatatatctcactttywkacrawwgtatartrrattraaactagaatagtrcayctctacttctaaaacattgttagaaatcratttgactgtcctratygatttgtactgttcttatttcattttactataatttagtgtgagtaaaatataataataaaggagttaaaaca

SEQ ID NO: 3294 - DNA, 160 bp, Streptococcus pneumoniae
  misc_feature (1)..(160): tiling:Spneumo1:WAN0249YB; Cluster includes WAN024751 R6.I G_160.1.1||||149105..149264|+|160 bp|Between spr0139 (ugd) (+ strand) and spr0140 (mutR) (+ strand)|S.pneumoniae|R6| NC_003098.1|IG|110
ctattgatattaaaaaggmaataatttataaaatttgtacaaaaaaatgttaaattttcacattttcatagtatactgtttaatagaaagtaggttctttgtaaccgctccattataaaatcctttcactcttccggtatactattaggaaaaacataac

SEQ ID NO: 3295 - DNA, 66 bp, Streptococcus pneumoniae
  misc_feature (1)..(66): tiling:Spneumo1:WAN024A4Z; Cluster includes WAN024EE2 R6.I G_1258.2||||1210010..1210075|+|66 bp|Between spr1214 (trzA ) (- strand) and spr1215 (- strand)|S.pneumoniae|R6|NC_003 098.1|IG|110
ctattgtaacaaaaaagtcactcgaaggcaacttttttcgtccataaactttcaaaagagaatggc

SEQ ID NO: 3296 - DNA, 210 bp, Streptococcus pneumoniae
  misc_feature (1)..(210): tiling:Spneumo1:WAN024AJX; Cluster includes WAN024EMB R6.I G_598||||585424..585633|+|210 bp|Between spr0574 (+ strand ) and spr0575 (ccdA) (+ strand)|S.pneumoniae|R6|NC_003098. 1|IG|110
ctatttatccattacaaaagcgcatagtatcaaggctttatagaatcttgatactatgcgcttttgtgctttgacagttttttgtatagtttttgtccaagatttctaaatcatctgattaaattcctattttcccctatcattgtccctgttttttcgaaaatggaaggagtataataaatctatcaataaaatgataggaggaacttt

SEQ ID NO: 3297 - DNA, 136 bp, Streptococcus pneumoniae
  misc_feature (1)..(136): tiling:Spneumo1:WAN024A77; Cluster includes WAN024EFL R6.I G_1137.2||||1097989..1098124|+|136 bp|Between spr1099 (gyr A) (- strand) and spr1100 (ldh) (+ strand)|S.pneumoniae|R6 |NC_003098.1|IG|110
ctatttcagcctctaaaccactaaaacgtttacatcgagaactataaggcatattcgtgacaaagttttttaaaagtgatagaatgaagttgtctagggaaaatcccctaataaaattaaggagatgtttaaaaca

SEQ ID NO: 3298 - DNA, 335 bp, Streptococcus pneumoniae
  misc_feature (1)..(335): tiling:Spneumo1:WAN024A5V; Cluster includes WAN024EEX R6.I G_1190||||1151028..1151362|+|335 bp|Between spr1149 (- str and) and spr1150 (+ strand)|S.pneumoniae|R6|NC_003098.1|IG |110
ctattttctcctttgtcttactaaaaaaacttattctctctattataccacaatctagtcctatcataaaagaaatactggtcctccccttctagaataggagaattatgcagttctattattcaaagaaactagtccatttctagtaatgactaggaattctgtagcaattactaataaatggctgcgaaattttagagtccttcagaataatatactttccttaaagaaaacttaaaacttaagatttgaaacttcaaagtgattacttgacttactgcccttcatttcttattagctaactttatgatataatgaaaaacgaggtaaattga

SEQ ID NO: 3299 - DNA, 131 bp, Streptococcus pneumoniae
  misc_feature (1)..(131): tiling:Spneumo1:WAN024AMK; Cluster includes WAN024ENS-rc R 6.IG_476||||459830..459959|-|130 bp|Between spr0452 (+ str and) and spr0453 (hrcA) (+ strand)|S.pneumoniae|R6|NC_0030 98.1|IG-rc|110
ctcaatgcatccaagtgctaactyatgattctattatacacccttagaagagaatgtcaagacaaaaactcaaaaaattagcactcttttatmaagagtgctaaaaatcaatctgaagacctagaaccttg

SEQ ID NO: 3300 - DNA, 413 bp, Streptococcus pneumoniae
  misc_feature (1)..(413): tiling:Spneumo1:WAN0249NN; Cluster includes WAN024E8M R6.I G_1687.2.2||||1611575..1611987|+|413 bp|Between spr1638 (- strand) and spr1639 (ccpA) (- strand)|S.pneumoniae|R6|NC_ 003098.1|IG|110
ctcaattataaagggactatccctttacatctctgccttgtttaacaacaagctgcactgtaaggtgtgcgcaccgaattttcattgtttcaaattcattttcaaaatcagcccactttcactacttccaaccacctattcacaatcaccacaggctccctgaagatcaaaaatagttacttttctgatttgttgaacttattttaatactttgttttttctttgtcaagacttttttacgatttttttgaaaatatcattcgaatrtgaccatgtcttccttagatcgaacatgaacatgtcccactysttagaaattggatccaactcaatagaaactgaatggaggctaaacagaacttattttagaacactccatcttttccactaggattttcaagaattaaacaata

SEQ ID NO: 3301 - DNA, 77 bp, Streptococcus pneumoniae
  misc_feature (1)..(77): tiling:Spneumo1:WAN024APQ; Cluster includes WAN024EPD-rc R 6.IG_389||||365374..365450|-|77 bp|Between spr0365 (rnhB) (- strand) and spr0366 (+ strand)|S.pneumoniae|R6|NC_00309 8.1|IG-rc|110
ctcacgatattataccaaaattcgctaattttgtcagtttttacaaattttactgcttttgtggtacaatagaaact

SEQ ID NO: 3302 - DNA, 94 bp, Streptococcus pneumoniae
  misc_feature (1)..(94): tiling:Spneumo1:WAN0249YD; Cluster includes WAN024EBO R6.I G_1437.1||||1374276..1374369|+|94 bp|Between spr1393 (- st rand) and spr1394 (rpsR) (- strand)|S.pneumoniae|R6|NC_003 098.1|IG|110
ctcactacctctttcaatctaactctttccattatatcataaagtaggcaaatcccctattttcaaaaagtttatcatttttattttaatttct

SEQ ID NO: 3303 - DNA, 148 bp, Streptococcus pneumoniae
  misc_feature (1)..(148): tiling:Spneumo1:WAN024FAC; Cluster includes WAN023I0E 5S r RNA|5S rRNA|||19924..20038|+|115 bp|5S rRNA|S.pneumoniae|R 6|NC_003098.1|RNA|440
ctcagagttaagtgacgatagcctaggagatacacctgtacccatgccgaacacagaagttaagccctagaacgccggaagtagttgggggttgccccctgtgagatagggaagtcgcttagctttaatccgccatagctcagttggt

SEQ ID NO: 3304 - DNA, 83 bp, Streptococcus pneumoniae
  misc_feature (1)..(83): tiling:Spneumo1:WAN024AP5; Cluster includes WAN024EP2 R6.I G_420.1||||393907..393989|+|83 bp|Between spr0396 (prfC) ( + strand) and spr0397 (+ strand)|S.pneumoniae|R6|NC_003098 .1|IG|110
ctcagtaccaacaattggaactaaagttccaaattgttggacgctagtcgctatttggcgaactagctaactgcctcactaac

SEQ ID NO: 3305 - DNA, 67 bp, Streptococcus pneumoniae
  misc_feature (1)..(67): tiling:Spneumo1:WAN0249OL; Cluster includes WAN024E96 R6.I G_1644||||1576336..1576402|+|67 bp|Between spr1598 (dctA) (+ strand) and spr1599 (+ strand)|S.pneumoniae|R6|NC_00309 8.1|IG|110
ctcatcaaggcaagyctgctcatgtcttgtcttttacgcttttattctaacttattaggaaattctt

SEQ ID NO: 3306 - DNA, 127 bp, Streptococcus pneumoniae
  misc_feature (1)..(127): tiling:Spneumo1:WAN024A7F; Cluster includes WAN024EFQ R6.I G_1127||||1085316..1085436|+|121 bp|Between spr1089 (xseA) (- strand) and spr1090 (udK) (- strand)|S.pneumoniae|R6|N C_003098.1|IG|110
ctccacctactattcatttacttgctctttcatgggtattattataccaaaaatatgcctaaaaatctccatttatgtaccattatgagggaaaaatagaaaaaggaggcaaggcctccacatgtga

SEQ ID NO: 3307 - DNA, 115 bp, Streptococcus pneumoniae
  misc_feature (1)..(115): tiling:Spneumo1:WAN024AJV; Cluster includes WAN024EMA R6.I G_603||||590747..590840|+|94 bp|Between spr0579 (hk09) (+ strand) and spr0580 (+ strand)|S.pneumoniae|R6|NC_003098.1 |IG|110
ctcccagtcaattctgggagttttatgcgtaattgggcaaactttctaggttgtctatcttgctaaaaacaagaaaaaacggtatgatagaagagtgacaacagaggtaacagag

SEQ ID NO: 3308 - DNA, 105 bp, Streptococcus pneumoniae
  misc_feature (1)..(105): tiling:Spneumo1:WAN0249WT; Cluster includes WAN024EAQ R6.I G_1526||||1458568..1458672|+|105 bp|Between spr1479 (- str and) and spr1480 (marR) (+ strand)|S.pneumoniae|R6|NC_0030 98.1|IG|110
ctcctcgttttttctcttgcaataagtataacataaaaagtcacagctagagaaatctagctttttttgatatactagataaagatattagacaagaggaaacga

SEQ ID NO: 3309 - DNA, 56 bp, Streptococcus pneumoniae
  misc_feature (1)..(56): tiling:Spneumo1:WAN024AFR; Cluster includes WAN024EJZ-rc R 6.IG_782||||755874..755928|-|55 bp|Between spr0758 (ilvE) (+ strand) and deletion (+ strand)|S.pneumoniae|R6|NC_0030 98.1|IG-rc|110
ctcctgctgttaagagccactttttctatttcataaaraatctcctttggtttatt

SEQ ID NO: 3310 - DNA, 177 bp, Streptococcus pneumoniae
  misc_feature (1)..(177): tiling:Spneumo1:WAN0249YU; Cluster includes WAN024760-rc R 6.IG_155.2||||142418..142594|-|177 bp|Between A (transposa se) (- strand) and spr0135 (epsG) (+ strand)|S.pneumoniae| R6|NC_003098.1|IG-rc|110
ctccttaaacgacgcattatgatatttgatagagaaatttttatgaataactcaataattttatagtaaatcatgcttatatctcaaagatacctattttatcttgtctcgaccttctccaaagaattgctataatactattacaaatmcatctgcactacacttcaaattttagca

SEQ ID NO: 3311 - DNA, 85 bp, Streptococcus pneumoniae
  misc_feature (1)..(85): tiling:Spneumo1:WAN0249YX; Cluster includes WAN024EBY R6.I G_1404||||1343802..1343886|+|85 bp|Between spr1360 (atpD) (- strand) and spr1361 (atpG) (- strand)|S.pneumoniae|R6|N C_003098.1|IG|110
ctccttctcctattctatataagatactgtcggttcctagctcaactaggtcctaagttcattttcatacgagctggactagagc

SEQ ID NO: 3312 - DNA, 100 bp, Streptococcus pneumoniae
  misc_feature (1)..(100): tiling:Spneumo1:WAN0249Y3; Cluster includes WAN024EBG R6.I G_1458.1||||1401905..1402004|+|100 bp|Between spr1414 (dap B) (- strand) and spr1415 (- strand)|S.pneumoniae|R6|NC_00 3098.1|IG|110
ctctactcctgtctaagatacaaagtccgtaagaacacaaagtgaaaataggaattccaatcaagaagtgtctacttcttggaagaactatctttttcac

SEQ ID NO: 3313 - DNA, 148 bp, Streptococcus pneumoniae
  misc_feature (1)..(148): tiling:Spneumo1:WAN0249WR; Cluster includes WAN024EAM R6.I G_1534||||1465158..1465304|+|147 bp|Between spr1487 (relA) (- strand) and spr1488 (- strand)|S.pneumoniae|R6|NC_0030 98.1|IG|110
ctctactctccaattcttcctaccattttatcacttttttaagaatatgaaaactagattggaacagaataagaaaaaaataattcaaaattgcttgataattctgaattattggyccgtaatatactacgaagttagattttaaact

SEQ ID NO: 3314 - DNA, 467 bp, Streptococcus pneumoniae
  misc_feature (1)..(467): tiling:Spneumo1:WAN0249R4; Cluster includes WAN024E3T R6.I G_2192.2.1||||1977967..1978431|+|465 bp|Between H (transpo sase) (- strand) and spr1986 (+ strand)|S.pneumoniae|R6|NC _003098.1|IG|110
ctctccctgctacctcacgatagtcaggcttgggaatcgctattggstctcmcygstakcagrtgcmsrcygaggacttacacctcagatatacgacatgcccgtcgtactacaaaaaaacgacgatttaaatcgtcgttttgctaakataaatatgcattttttttttttttgaaaatacgtctatttattttttattgtttttttattgtagagcagacccaagcgaatgaacataggtkgtaaaaagcaaatgaaaaaactgcgaggataatagcttctgtgtctaaataacccatttcgagacctcttttcaacaacaacaagcctgtagtttcgataacgatcaaacataaaaatatataaaaaattttcgcattaagcatattgttaccgctttctttttatttggttttattgtataataaaagttgaaaaaaatcaaaaatacaaaggagtttccgtta

SEQ ID NO: 3315 - DNA, 155 bp, Streptococcus pneumoniae
  misc_feature (1)..(155): tiling:Spneumo1:WAN024ALE; Cluster includes WAN024EN7-rc R 6.IG_534||||510691..510845|-|155 bp|Between spr0510 (- str and) and spr0511 (+ strand)|S.pneumoniae|R6|NC_003098.1|IG -rc|110
ctctgtgccttttaatcatttcaatcttaaattggactttttttacttgggttgtacttaatctatraggaagacaagaaaaagaatatcaatcaagtaaagtcacaaagtcacattagctccgagcaaccattgcaaattgaggtactcacaca

SEQ ID NO: 3316 - DNA, 115 bp, Streptococcus pneumoniae
  misc_feature (1)..(115): tiling:Spneumo1:WAN024AJU; Cluster includes WAN024EMA-rc R 6.IG_603||||590747..590840|-|94 bp|Between spr0579 (hk09) (+ strand) and spr0580 (+ strand)|S.pneumoniae|R6|NC_00309 8.1|IG-rc|110
ctctgttacctctgttgtcactcttctatcataccgttttttcttgtttttagcaagatagacaacctagaaagtttgcccaattacgcataaaactcccagaattgactgggag

SEQ ID NO: 3317 - DNA, 84 bp, Streptococcus pneumoniae
  misc_feature (1)..(84): tiling:Spneumo1:WAN024ACT; Cluster includes WAN024EII-rc R 6.IG_926||||880223..880305|-|83 bp|Between spr0890 (- stra nd) and spr0891 (gcaD) (+ strand)|S.pneumoniae|R6|NC_00309 8.1|IG-rc|110
ctcttgaatgaaaaaatgctctaaagtctcttccttaacccatttttttgattttttttgatttttagggtagaattataagat

SEQ ID NO: 3318 - DNA, 265 bp, Streptococcus pneumoniae
  misc_feature (1)..(265): tiling:Spneumo1:WAN0249Q8; Cluster includes WAN024EMU-rc R 6.IG_560.2||||535215..535288|-|74 bp|Between spr0536 (- st rand) and spr0537 (recJ) (+ strand)|S.pneumoniae|R6|NC_003 098.1|IG-rc|110
ctctttctaagaattctattgcttcattataacatgatttagacgttttctctatccagattgcttttttataacattttatagtatattgaaactagaatagtacacctctacttctaaaatattgttagaaatcgatttgactgtcccgatcgatttttcctgttcttatttcactatagtgaattttttcagatatgatttgacaagaacattcttttattgtagaaccgtgttataaaatataacacaatagagatctctc

SEQ ID NO: 3319 - DNA, 200 bp, Streptococcus pneumoniae
  misc_feature (1)..(200): tiling:Spneumo1:WAN024ASJ; Cluster includes WAN0247V1-rc R 6.IG_39||||23922..24121|-|200 bp|Between spr0021 (purA) (+ strand) and spr0022 (+ strand)|S.pneumoniae|R6|NC_003098. 1|IG-rc|110
ctcttttctcttttcctacttatcgattttattattatatcatgaatcccaacacaaaaaaagccaccgaatgcggtgactctatagggagattattatgaaaaagaaaagtttaggatatttgttacaacaagttaggaggtcttcttgtaaccgtctatagtatacccgacctatcttaaacaaatcttaaaaatctc

SEQ ID NO: 3320 - DNA, 91 bp, Streptococcus pneumoniae
  misc_feature (1)..(91): tiling:Spneumo1:WAN0249YZ; Cluster includes WAN024EBZ R6.I G_1401.2||||1340816..1340906|+|91 bp|Between spr1357 (- st rand) and spr1358 (+ strand)|S.pneumoniae|R6|NC_003098.1|I G|110
ctcttttttaaagtgcttacatctaattggatatctttaatttacttgtttttgtgatataatagtcttatctttacacagaggtatagta

SEQ ID NO: 3321 - DNA, 156 bp, Streptococcus pneumoniae
  misc_feature (1)..(156): tiling:Spneumo1:WAN024CMS; Cluster includes WAN023SG0 NC_0 03028.1_221||||164848..165003|+|156 bp|Glimmer 2.02 orf pr ediction|S.pneumoniae|TIGR4|NC_003028.1|ORF|010
ctgaaaaagaaaagtgatatctttaaggttgttcttcttggtggtgagattcgtgagacaacccaagcttttgtcggaaagattaccaatgctttgatggataggatgtactttagcaagatgtttttagtggtaacggtatcgtggatggacgtg

SEQ ID NO: 3322 - DNA, 108 bp, Streptococcus pneumoniae
  misc_feature (1)..(108): tiling:Spneumo1:WAN024D8T; Cluster includes WAN023UG8 AX57 1763.1_393||||334408..334515|+|108 bp|Glimmer 2.02 orf pre diction|S.pneumoniae||AX571763.1|ORF|000
ctgaaaacctccagtggaggtttttcttgctttttaatttcagggcaagaagctaaaaaggtcccccggacctttttactcccaaaagtcatcaaatacggtgatggg

SEQ ID NO: 3323 - DNA, 1385 bp, Streptococcus pneumoniae
  misc_feature (1)..(1385): tiling:Spneumo1:WAN024CAY; Cluster includes WAN0244P1 spr0 157||15902201|NP_357751.1|165249..166511|-|1263 bp|Conserv ed hypothetical protein|S.pneumoniae|R6|NC_003098.1|ORF|21 2
ctgaaaattcaaaaaggagtatttatcatgtcgcaagctatttccttaaatcaatcaacctgggcaagcaagctaaaagcaatgggacctggaatcctaatggcaactgccgctgttggaggttcccacattgtatcctcaactcaagctggcggttcttacggttggtctctacttctcttggtcatcttagccaatgtctttaaatatccatttttccgttttggtgctgaatacacagctgatactggaaagactttggttgaaggttatgccgwwaaaggaaaacyctatctctggattttctttatyctcaatgtcttttcggctatggtcaacacggctggtgttgccattctgtgctcagctatcatcgccagtgccttcccaatgattggacttagyattactcagtggtccctcattctcgttgcaatcatttgggctatgctactctttggaggctacaaacttttagacggcatggtcaaatggattatgtctgccttaaccattgcgactgttctkgcagttatcatwgcrgcggtcaagcatccagaatacagttctgattttgtcgagaagacaccttggcaaatggcagctctgcccttcatcgtctccctcctaggatggatgccggctcctattgaaatttcagccatcaattcactttggtcagctgaaaagagaaagaccgtcaactttaacacaraaracgctctgtttgactttaacactggttatattggaacagctatcctagccgtcttctttgtggcactgggagcactgattcartatcctacagggcaggcggttgaagctgcttcagccaaatacatctctcaattcgtgggcatgtatgcctctgttcttggcgaatggtcccgttacttgattacctttattgccttcctctgtatctttggaacagttataactgttatcgatggctattctcgcgttaatcaggaatctctccgactgctaatcagtcaaaaagaggacaatcgtmaatctttgaacatctggatgaccatcactgctatcatcggtatcgtcattatcaagttcttcgctggtcaggtttcaaccatgctccgctttgccatgattggmtctttcctgacaacacctttctttgctcttttgaattacgccttggtaacrcgtgaaaacaaaaatcttccttcttggctcaaacaccttgccattgcgggattgattttcctctttggcttcgccatcttctttatctacgcactcgcaatcggaaaagcagggtaaskrayaagcgcgagatgaagataaggtttcatttcaagagaaaattcagcaaatatttctatgataaaaagcataagaacaaggttttgaagacc

SEQ ID NO: 3324 - DNA, 503 bp, Streptococcus pneumoniae
  misc_feature (1)..(503): tiling:Spneumo1:WAN024DJN; Cluster includes WAN0244KU spr0 308|luxS|15902352|NP_357902.1|308453..308935|-|483 bp|Auto inducer-2 production protein|S.pneumoniae|R6|NC_003098.1|O RF|111
ctgaaaggatttaccatgtcaaaagaagttattgtcgaaagttttgaacttgaccacaccattgtcaaagcaccctatgttcgcttgattggggaagaaacaggaccaaaaggagacatcatctccaattatgatattcgcttggtgcarccaaacgaagactctatccctactgccggccttcacactatcgagcacctcttagccaaactcatccgtacccgcattgacggcatgattgactgttcaccatttggttgycgcacaggcttccacatgattatgtggggacgtcacaccagtgctaaaatcgcagctgttatcaaggattcgctcaaggaaatcgctgaaactactacttgggaagatgtcccagggacaaccatcgaatcttgcggaaactacaaggaccacagcctcttctctgctaaagaatgggcaaractcatcttggaacaagggatttcagatgatgcctttgaacgtcatgtgatttaactaat

SEQ ID NO: 3325 - DNA, 102 bp, Streptococcus pneumoniae
  misc_feature (1)..(102): tiling:Spneumo1:WAN024CLO; Cluster includes WAN023S98 NC_0 03028.1_2119||||1600551..1600652|+|102 bp|Glimmer 2.02 orf prediction|S.pneumoniae|TIGR4|NC_003028.1|ORF|011
ctgaaagtagttttagaaacgaaaaaagagcatttcgctctctcttctgtttatactagttttttgcttccttcttttggaaagtggtttggtaatttactt

SEQ ID NO: 3326 - DNA, 201 bp, Streptococcus pneumoniae
  misc_feature (1)..(201): tiling:Spneumo1:WAN024GMI; Cluster includes WAN0244HZ spr0 411|transposase F|15902455|NP_358005.1|408239..408400|-|16 2 bp|Degenerate transposase|S.pneumoniae|R6|NC_003098.1|OR F|111
ctgaaattaaccacagggattacctttgaaaaaatggactttttcaagggctttttgccgtgctctaaaatcatcgccaaatcatcaaattgaaataagaaatagtttagataaaactattgacttttcttatagtttgtctttyttctatcttccattatatcatactttttcagtctatggtagctctctttaactaat

SEQ ID NO: 3327 - DNA, 129 bp, Streptococcus pneumoniae
  misc_feature (1)..(129): tiling:Spneumo1:WAN024CN4; Cluster includes WAN023SGQ NC_0 03028.1_93||||73315..73434|-|120 bp|Glimmer 2.02 orf predi ction|S.pneumoniae|TIGR4|NC_003028.1|ORF|010
ctgaaattgaggcgacaagaatccaatctttataaatcaaaagaggccaatgttcgccatcaacctctttcttatcgttcattctttttgctaagtaagatgaatgctttacctatggccctaactaat

SEQ ID NO: 3328 - DNA, 246 bp, Streptococcus pneumoniae
  misc_feature (1)..(246): tiling:Spneumo1:WAN024FMI; Cluster includes WAN023L37 3131 58_2491||||1328692..1328928|+|237 bp|EGAD orf prediction|S .pneumoniae|R6|NC_003098.1|ORF|110
ctgaacattttgttgaggaaggtaaatcaattcctcacaatgtttgagaaagaagggaggactattccaacttcaacccactataaagcagacttacaagatagggaacccatctccgataatattccgataatatatagtagaatgaaaactgcacaatttgattggagaattcaaaccaatttctcacaatgttttagaaacaagggtctattatttcaactgcaacctactatagtccattga

SEQ ID NO: 3329 - DNA, 423 bp, Streptococcus pneumoniae
  misc_feature (1)..(423): tiling:Spneumo1:WAN0249UG; Cluster includes WAN024EOP R6.I G_437||||410512..410656|+|145 bp|Between spr0413 (bacA) (+ strand) and spr0414 (dinP) (- strand)|S.pneumoniae|R6|NC_ 003098.1|IG|320
ctgaacttatgcttttttacgttcttaaagactgtttatactcaaaaaacagttgaamaactwsmwssrmctcwwmkaagdwcttwatactmttmgaraatctcttcaaaccrcgtcarctytatctgcaacctcaaarcwgtgytttgarcarcstgcgrctagcytyctagtttgctctttgattttcattgagtataaattaagtatagcacagttagggagaataggtaaggatttaaaatgaacttaaaaaccagcatgactagatgaagacaggctggttatcaatttatcaatattggaaaggtgtcaattgcccttcataggttgcataaactccgtcattagcttgtttgatagacgtgatgtttagagtgctaccgtagttggcttctcatttgtcgctataytcactataag

SEQ ID NO: 3330 - DNA, 1062 bp, Streptococcus pneumoniae
  misc_feature (1)..(1062): tiling:Spneumo1:WAN024DFC; Cluster includes WAN0244AP spr0 673|holA|15902717|NP_358267.1|678831..679868|+|1038 bp|DNA polymerase III, delta subunit|S.pneumoniae|R6|NC_003098.1 |ORF|111
ctgaagaaaggagagacgatgctagccattgaagaaagtcagaagttgactttatcaaatttaccgagcctgagcctatttacagggacagatcagggtcagtttgaagtgatgaagagtcaartgttgaaacagattgggtatgattctgctgacctcaactttgcctactttgatatgaaagaagtagtttacaaggatgtggaaytggagttggtcagycttcctttctttgcggatgagaaaatcgtgatattagattattttatggatatcacgactgctaagaaacgctttttgacagatgatgagcttaagtcatttgaggaataccytgacaatycttctccaacaacyaagttgataatctttgcagaaggaaagctggatagcaaaagacggttagtcaaattacttaagcgtgatgccaaggyyttcgatgcagtagaagtaaaagaacaagaattgcgccagtayttccaaaagtggagtcagaaacaaggtctgcagtttaccaatcattcttttgaaaatctcctcatcaagtcggggtttcaatttagcgaaatccagaaaaatcttctctttttacagtcctataaggcgrattctgttatygaggaagaggatattgttaacgyaattcccaagaccttgcaggacaatatttttgatttaactcagtttattctractaaaaagatggatcaggcgcgcgatttggtgagagacttgaccttgcaaggggaagatgaaatcaarctrattgcagtcatgctgggacaatttcggacttttactcaggtgaagattttggcggagtctggccaaacagaatcgcagattgcaagtagtttaggtagttatctgggacgtaacccaaatccttatcaaatcaagtttgcattaagagattcgagaggactttctttgagctttytgaagcaagctatttcctatttgattgagacagactatcagattaagacaggtctttatgaaaaaggtttcctttttgaaaaggcactcttacagattgctagtcaggtcaatykaactaat

SEQ ID NO: 3331 - DNA, 441 bp, Streptococcus pneumoniae
  misc_feature (1)..(441): tiling:Spneumo1:WAN024FDN; Cluster includes WAN0241YG SP17 83||15901612|NP_346216.1|1701401..1701829|-|429 bp|MutT/nu dix family protein|S.pneumoniae|TIGR4|NC_003028.1|ORF|010
ctgaagatggaactagaaatttctgatttcacaggttgcaagattgctttgttttgtggggataagcttttgactatcttacgcgatgataaggcaagtattccctgggccaatatgtgggaactgccaggtggtggccgtgaaggggacgaaagcccttttgaatgcgctcggcgtgaagtttatgaggaactgggaattcatttagatgaagactgtctgctttggagcaagatttatcctagcgtaatttttaaaggcaagaaatcggtctttatggttggtcagctaagacaagaacaatttgacaatatcatcttcggagatgaaggacagggctatcagctgatgaatgttgaggaatttcttagttccagtcaagttgtgcctcagttgcaagagagattaaaagattatttaaaagtaagtgatctarctaat

SEQ ID NO: 3332 - DNA, 435 bp, Streptococcus pneumoniae
  misc_feature (1)..(435): tiling:Spneumo1:WAN024FDO; Cluster includes WAN0243KR spr1 609|mutT|15903651|NP_359201.1|1585068..1585496|-|429 bp|7, 8-dihydro-8-oxoguanine-triphosphatase|S.pneumoniae|R6|NC_0 03098.1|ORF|101
ctgaagatggaactagaaatttctgrtttcccaggctgtaagattgctttgttttgtggggataagctcttgactatcttacgtgatgataaggcaagtattccctgggccaatatgtgggaactgccaggtggtggacrwgarkgtsakgaaartcykwtwgagtgtgtagcgcgtgaagtttatgaagaactgggcattcatctgactgaagattgtmtgctttggagtaaggtttacccaagtatgctttttgcagacaaacagtccgtttttctagttggtcagttgacacagaaccagtttgacagtatsgtatttggagatgaaggacagggctatcagctgatgaatgttgaggaatttcttagttccagtcaagttgtgcctcagttgcaagagagattaaaagattatttaaaagtaagtgattag

SEQ ID NO: 3333 - DNA, 2169 bp, Streptococcus pneumoniae
  misc_feature (1)..(2169): tiling:Spneumo1:WAN024F2U; Cluster includes WAN023PPJ pne2 0_2||||218..2386|-|2169 bp|Type 11A capsule operon, Glimme r 2.02 orf prediction|S.pneumoniae||WAN01UCJ5|ORF|000
ctgaatatgaatgaaacgaaaaaatatcttgtgataaaagctatagcccaaggaaagaaaacaaagaaacgagcctgtgtcgtgctcaatctttctgaaaggcaaatcaatcgtctgctactagcctgtcaacagaaaggaaaagaagccttcagacacggaaacagaaatcgaaaaccaaaacatgcaatccctgatgaaatcaaagaacgtatcctaaagaaatacctctcctatgaaacatataaaccaaatgtccgtcatttctgtgaattgctagctgaagaagaaggaattcagctctctgatacaactgttagaaaaatactctataagaaaaatatcctgtcgcctaagtcccatagaaagacaaagaagagagtaagaaaacaagctaaactgaaccccaagcaacccctagacaatctaatcttaccgacggctgaagacttcctggaaaaccctaaaaaagtacatcctagtagacccagaaagaaatttgctggtgaactcattcaaatggataccagccctcatgcctggtttggagcagaaacctctaacttacacctagccattgatgatgcttctggcaatatcctaggcgcttattttgataaacaagagaccttgaatgcttactatcatgtcctcgaacaaatcttagccaaccacggcattcctcttcaaatcaaaacagataagagaacggtctttacctatcaagcccccaactctaagaaaatggaggacgacacccatacacaatttggatacgcctgtcaccaactggggattctccttgagacaacctctatccctcaagctaaagggagagtcgaaagactcaatcagatactacaatctcgcctgcctatcgaactggaacgaaacaagattcataccttggaagaagccaatattttccttctttcctatatccaaacttttaatgaacagtttggaaacaagacaaaactctctgtctttgaggaggctcctaagctctctgaacgaaatctcattctagctagactggcggagagagtcgtcgatagtggacgccatatccgattccaaaatcgttgctatattcctaccgaacaaggaaaagaagtctatttcatcagaaagacaaaagcattagttataaaagcatttgatggtgacatctacctcaatatcgctgacaaaatctatcacacaaaggagctactaaatcatgagctctattcgaaaaactttgaacaagaaccagaacaaaaaaagaaagacgcaagtatatccctccacaaacccatccgtggaaactcacatctttcaaacaatatcttcataaaaataaaaaggattatgaagagtttaaaggaggatttttcagtacgtgctgaaaaatatgagaactatcaggagacakttsaagggcctaacagtttttccaaaaccgatccagatgccacttttatgcggatgaaggaagawcatatgaaaaatrgtcaacycaaggctgcttataatcttcaaatcgctacggaaaaccaatttgttcttcactatgatgtcttttcaaatccgacagataccaagactcttctgccattccttgaaacctatccgcatgacttgaagacagttgtcgcagatgctggatatggaagtgaagagaacctccttcgtttagatgaaaaggaggtaaaccatctgattaaatatgccatgtttgataaggaacagaagagaggctataaacagtcagctaraaacttagcgaattggcactataatgacaaggaggatagctatacacatcctgatggctggtattatcgttttcaccataccaaacatcagaaaacacagacagactttcaacaggaaatcaaggtttactacgccgacgaacctgaatcagcccctcaaaagggactgtatatgaacgaaggctatcaaaacttgaaagctaaagaatgtcargcgcttttatctccccaaggtagacagattttcgctcaacgcaagattgatgtggaacctgtctttgggcagataaaggcttgtttgggttacaagagatgtaatctgaggggcaagcgtcaagtgagaattgacatgggattggtacttatggccaataaccycctaaaatacaataagagaatgactcaaaat

SEQ ID NO: 3334 - DNA, 854 bp, Streptococcus pneumoniae
  misc_feature (1)..(854): tiling:Spneumo1:WAN024FCN; Cluster includes WAN0243JC spr1 660|exoA|15903702|NP_359252.1|1633221..1634048|+|828 bp|Ex odeoxyribonuclease|S.pneumoniae|R6|NC_003098.1|ORF|221
ctgaatgaaaaaggtaactttatgaaacttatctcatggaatattgattccctaaacgctgccctaactagtgactcagctcgtgccaaattgtcccaagaagtcctacaaaccttggtcgctgaaaatgctgatatyattgctatccaagaaaccaagctttctgccaaaggacctacaaagaaacacgtggaaattttagaagaactcttcccaggctacgaaaacacrtggcgytcttcccaagagcctgcccgtaaaggctatgctggaaccatgttcctttataagaaagaacttacrcctackatcagyttyccagaaatcggtgccccttctaccatggacttggaaggycgtatcatcactctagaatttgatgcatttttcgtaacccaagtttacactccaaacgctggtgacggtctcaaacgcttggaagaacgccaagtctgggatgyyaaatatgctgagtatttggctgaactagacaaagaaaaaccagtccttgcgaccggtgactacaacgtagcccacaatgaaatcgaccttgcaaatcctgctagcaaccgccgttcacctggatttactgacgaggaacgtgctggatttaccaacctwttggcaactggatttacwgayaccttccgccatgttcatggcgatgttcctgaacgctacacttggtgggcacaacgcagcaaaacttctaaaatcaacaatacaggctggagaatcgactactggctcacaagtaaccgtatcgctgacaaggtcactaaatctgatatgattgactcaggtgctcgccaagaccatacaccgattgtcttggaaattgayttgtaactaat

SEQ ID NO: 3335 - DNA, 635 bp, Streptococcus pneumoniae
  misc_feature (1)..(635): tiling:Spneumo1:WAN024DPI; Cluster includes WAN024437 spr0 943||15902987|NP_358537.1|927958..928569|+|612 bp|Hypothet ical protein|S.pneumoniae|R6|NC_003098.1|ORF|111
ctgaattggtcaggtgacgtgcttatttacattagcctgataatgaaaatggagagattatcgatggttatattggaattgtaccaaaatgattattctaaagatttagtagcatttgattccatagaagatgggaaagcctttgtagctcaaatcccgggatacactctggaaacagaagatggtkttgaagtggagtattttaatcctaaaaacataccggattatatggaaattatttttaacggaaatattgttcctttatctaratttatgttcgatcctgrggaaaatgtaaacattatttggaaagagatttcaaatttatccctcaaaaatgatagagtgatcgaaggatattcaaaaattgatgcatatgtcgttaacaaccatgaagttaaagcctatgtcgaaacaagagaaacgaactatcgtaaagcaaaagacttcttagaaagccgcggatatgaaatcgacagaagctttttcggaagtgaagacggtgaagcgattctttacagaaaaaaagggatcgaagtttggcatttcttgtgtcacttagacccaatgtttgtagagattgaagatgtagaaggatatgttaaagaagaagttggagagattcaatarctaat

SEQ ID NO: 3336 - DNA, 437 bp, Streptococcus pneumoniae
  misc_feature (1)..(437): tiling:Spneumo1:WAN024D2J; Cluster includes WAN0243G5 spr1 775|ndk|15903817|NP_359367.1|1743787..1744200|-|414 bp|Nuc leoside diphosphate kinase|S.pneumoniae|R6|NC_003098.1|ORF |111
ctgacaaaggagacgggtatggaacaaacattctttatcatcaaaccagatggtgtaaaaagagggctagtgggtgaagtgttaaagcgcatcgaacaacgtggatttacaatcgaaaaattggagtttcgttcacaggtttcagaagagttgattgaccagcactatcaggacttggttggtcagagtttttaccyaccgattcgtgaattcatgacttcaggtccagttcttgtgggtgtcatttctggtcccaaagtaatcgaaacttggcggaccatgatgggtgcaactcgtccagaagaagctttaccaggcactattcgaggtgaytttgcaaaagctgctggagaaaatgagrttatccaaaatgttgtacatggttcagattcagaagagtcagctaagcgagaaattgctctttggttttaactaat

SEQ ID NO: 3337 - DNA, 1200 bp, Streptococcus pneumoniae
  misc_feature (1)..(1200): tiling:Spneumo1:WAN024GN6; Cluster includes WAN023ZBY AL44 9924.1_107||||75840..77015|+|1176 bp|Glimmer 2.02 orf pred iction|S.pneumoniae||AL449924.1|ORF|001
ctgacaactaggaagaaaactaatatgaccttatctaagaaacaattacaactaagagctaaaatactggaaacagtttacacattaggtcccatttcacgaattgaaatcgctactaaaacaggaataacacctgcaacaactagcagtatcacaaatgatctgattaaagaaaatattctcttagaacttggtgaagacgaacacgatacaagcgtagggagaaaaaaaatcctgctagacattcaagctaaacgattttactacattggttgtgaactatctgaaaaacatttcacttttgctttaggagataatctaggaaatatcttaaaggaagagaaagaaattgttactaaacagttaatccaagaaaagggaaatmaactcattaaccagacactaaagcaattcttaaataactgctctgattatgaaatagaagcaattggaatcgcgctacctggtcgctatttagatrattataaaataacaacaaacaatcctttatggcaacatatcgacttagaaatgattcaatcccactttgataagcctttgtttttctctaacaatgttaactgtatggctataggtaaacgcctatttagtcgccaacagaatgaccctaattttgcttattttcattttgctagaggtatgcactgttcttatatctacgacggaaacatttatgggaaaggaaatctaatgattggagaaatagggcatacagttgtttcatctgagggagaagaatgtagytgcgggcgcaagggatgcttacaaacttttgctggagaatcttggttaatcaaaaaatcaaaaattctatatcatcaatctccctattctctacttcctagtttagtcaaaaatgccgatgatattgatatccaagttattttaaccgcttatcaattaggtgacactggaataatcacacttatccatcaagccttactctatcttagtcaaaccattttaaatatcagtatgatgattgactctcaaaaaatctacctacatagtcctttactaacaaatcaacacatcatccaaaaactatatagtgaaatgaactacaaacccaaactgctctataatcgcctacctgaagtcattattgaaccttacaatgattttacagccgcacactcagctattgcactttgtttgtatcatacaattctacattct

SEQ ID NO: 3338 - DNA, 201 bp, Streptococcus pneumoniae
  misc_feature (1)..(201): tiling:Spneumo1:WAN024CMM; Cluster includes WAN02430U SP02 96||15900230|NP_344834.1|273171..273302|-|132 bp|hypotheti cal protein|S.pneumoniae|TIGR4|NC_003028.1|ORF|020
ctgacacacgctacaccgcataaattacgacatacaggagcgacacttgctaaaaaagcaggaatgagcttagaagccatttctgaagcattaactcatagcgataccgttacaactaagacttatgttaatacttcaaacatagttccattatctgctggacaagttgcctaccaacatcttaaaaataagctarctaat

SEQ ID NO: 3339 - DNA, 81 bp, Streptococcus pneumoniae
  misc_feature (1)..(81): tiling:Spneumo1:WAN024DO4; Cluster includes WAN023SIX NC_0 03098.1_1827||||1428312..1428392|+|81 bp|Glimmer 2.02 orf prediction|S.pneumoniae|R6|NC_003098.1|ORF|100
ctgacagccctctttgggctgtttttacttctacgaaacaccaaatctgtcttttccctcttttgtgatataatagaaaca

SEQ ID NO: 3340 - DNA, 951 bp, Streptococcus pneumoniae
  misc_feature (1)..(951): tiling:Spneumo1:WAN024GEZ; Cluster includes WAN0244D2 spr0 588|miaA|15902632|NP_358182.1|602334..603269|+|936 bp|tRNA isopentenylpyrophosphate transferase|S.pneumoniae|R6|NC_0 03098.1|ORF|111
ctgacctttttgtgttataataatagtaacgaaaaaatgggaatttttcaaggaaaaaagatgaraacaaaamtaatwrtgattgttggaccgactgctgttggaaagacggctctagctattgaagttgcaaagcgytttaatggcgaagtggttagtggagatagccarcaagtctatcgaggacttgatattgggacggccaaggctagtccagaagagcaggcagctgttcctcatcatttaatcgatgttagagagataaccgagtcttactcggcttttgattttgtttcagaagctaagatgactattgaggrtattcasarccgtggcaagctagccattatcgccggtgggactggactttatatccagagcttgctagaaggttaccacctaggtggggagactcctcatgaggagattttagcttatcgagctagtttggagccatattcagatsaggaattagcccatttggtggakcaagcaggccttgagattccccagtttaatcgtcgtcgtgctatgcgtgccttagaaattgcccattttggtcaggatttggaaaatcaagagayyttgtatgaaccgctgattatctgcttggatgatgaacgtagtcaactttatgagcgtatcaaccaccgagtggatttgatgtttgaggctgggcttttggatgaggccaagtggctgtttgaccattcccctaatgtacaggctgctaaaggaattggctataaggaactctttccttatttccgtggagagcagaccttkgaggaagctmgtgagagtcttaaacaggcgacycgtcgttttgccaagcgtcasctgacctggttccgtaatcgcatgcaggtcaccttttatcagattggagaatctggtgtacaagaccgcattttaagccagatagaggagtttttagatgatykaactaat

SEQ ID NO: 3341 - DNA, 150 bp, Streptococcus pneumoniae
  misc_feature (1)..(150): tiling:Spneumo1:WAN024BF3; Cluster includes WAN023S4K cont ig_385_1||||578..685|-|108 bp|Glimmer 2.02 orf prediction| S.pneumoniae|670|WAN01UD7P|ORF|000
ctgacgaagtcagttacctatacctacggcaaggtgaagctgacgtggtttgaagagattttcgaagagtataagacagaaaaatcaaagtttgatagctatttggatagcagtcaggctttgattttttacagtctgcaactaactaat

SEQ ID NO: 3342 - DNA, 1001 bp, Streptococcus pneumoniae
  misc_feature (1)..(1001): tiling:Spneumo1:WAN024FJD; Cluster includes WAN0243PY spr1 421|trxB|15903464|NP_359014.1|1406614..1407582|+|969 bp|Th ioredoxin reductase|S.pneumoniae|R6|NC_003098.1|ORF|111
ctgactagaaaaaacaaaggagaaactatgtctcaactctatgatattaccattgtgggtggtggtcctgtcgggctttttgcagccttttatgcccacstacgccaagccaaggttcaaatcatcgactctcttccccagctaggtggacaacctgctattctctaccctgaaaaggaaatcctagacgtaccaggcttcccaaacctgactggagaagagttgactaaccgcttgattgaacagctaaatggatttgatacccctattcatctcaatgaaacggttcttgarattgacaaacaagaagaagaatttgccatcacaacttcyaaaggaagtcacctgactaaaacagttatcatcgctatgggtggcggtgccttcaaaccacgtccgctggaacttgaargkgttgaggrctatgaaaatatccactaccacgtttctaacattcagcaatacgctggtaagaaagtgacgattcttggygggggagactcggctgtggattggrctttggcttttgaaaaaatcgcaccaactacccttgttcaccgcagagataatttccgtgccttggaacacagtgttcaarccttgcaagaatcatctgtaaccatcaagacaccattcgcccctagccaactccttggaratggaaaaacrcttgataaacttgaaatcacaaaagtcaaatctgatgaaactgaaaccattgacctagaccacctctttgtcaactatggtttcaaatcttctgtcggtaaccttaaaaactgggggctcgacctcaaccgtcacaagattatcgtcaacagcaaacargaatccagccaagcaggtatctatgctatcggtgactgctgctactatgacggaaaaattgatctgattgcgacaggyctmggrgaagctccaactgctgtcaacaacgctatcaactacattgaccctgaacaaaaagtacaaccaaaacactctacyagtttataactaat

SEQ ID NO: 3343 - DNA, 380 bp, Streptococcus pneumoniae
  misc_feature (1)..(380): tiling:Spneumo1:WAN024FUC; Cluster includes WAN0243V9 spr1 230||15903273|NP_358823.1|1227709..1228047|-|339 bp|Conser ved hypothetical protein|S.pneumoniae|R6|NC_003098.1|ORF|1 11
ctgactatacagtcgtcatcaaataaggagaagaacatgtcaaatatttacgatagtgcaaacgaactcagtcgcggtctacgcggattaycagaatacaaggctgttaaagcagctaaagatgcgattgcagcagatgctgaggcaagcaaaatctttacagawtatcttgcctttcaagaggaaattcaaaaactagcacakacaggtcaaatgccagatgcgtccttccaagctaagatggaaggctttggtaaacagattcaaggaaatagcctcttgtcagaattctttaccaagcaacaacaattggccatttacctttctgayattgaaaaaattgttttygaaccagtttcagaattgctgaaataactaat

SEQ ID NO: 3344 - DNA, 701 bp, Streptococcus pneumoniae
  misc_feature (1)..(701): tiling:Spneumo1:WAN024DG6; Cluster includes WAN0244CG spr0 610|ABC-NBD-truncation|15902654|NP_358204.1|622319..622972 |+|654 bp|ABC transporter ATP-binding protein - unknown su bstrate, truncation|S.pneumoniae|R6|NC_003098.1|ORF|110
ctgactgggcagttccttgccgataaaggacaatctattattttgggacaaaaatctcaaaatttaacaagcggtgaattaaagagaattggattggttagcgatacaagtggattttatgagaaaatgtctctgtataacaatcttcttttttatagtaaattttataatattagtaaatcacgtgttgataatttgttaaagcgagtaggattatatgatagtcgcaagatggtagcaggaaaattatccactggaatgaggcaacgaatgcttttagcacgagctcttatcaacaamcccgctgtactctttctggatgaaccgacctcaggtctagatcccacaacttctcgaacaattcatgagttaattttagaattgaaaacagcagggacaacgatttttctaacgactcatgatatgaatgaagcaactcttttatgtgattatgttgccttattaaataaagggaaattagttgagcaaggagctccttctgaactcattcaaagatataataaagataaaaagattaaggttacagattataatgggaatcagataacttttgattttacatcactagaacaggtatctcagrctgatctggaaaatattttttcaattcattcatgtgagcctactttagaagatatttttatcacattaacaggaggaaagctaaatgcttaactaat

SEQ ID NO: 3345 - DNA, 1397 bp, Streptococcus pneumoniae
  misc_feature (1)..(1397): tiling:Spneumo1:WAN024DDQ; Cluster includes WAN024470 spr0 806||15902850|NP_358400.1|808280..808648|+|369 bp|Hypothet ical protein|S.pneumoniae|R6|NC_003098.1|ORF|210
ctgacttactcaattagtgttgttttgttacatcaaggagataaaaatagtttattagagtctttgtcaatagtggagagacaaacattaaaagatatagaagttattattgtaaatcaatctacagaggagatagcttccattagccaacagatgaatctatcatttaatattaagattatagatgagaattcttttgctgagttgtctgatatgattacaggagattatattacgtttctatcttcaaatgattcattatttgattggacatttgaaaagatgtatcatgcgataaaattatccgattctgatgttgttcttggtcattttgctgatttggttgatggagtattttacttttatcctttkkggggggataattggttgacagaaaatttaacgaatgttcaagttttacaaaagatggatgatacagatcatcgaattagaaaacaatatcgctcattatttggaaaattattcaatagtaagcttttacgaaaaataaatcaatttgatataaacaaccttatttggagactttatattcactctaaaactgcaacctatattaatttcccgacatatatckataaacctgttatagatgctaaacctctaaaagactcctacaaaatcatattagaaaattatgaaaatagaatcaaagattgcgccgtcttagaaaactatgatatagaaagagcgaaaaaacaatatattcaagaattggcaaattttagtgcttggttaaaaaatgacggtgaatatttagattctgatattgtttatcataagttaatagctgcagagaaaggaattttcccttttcttgagcttgatagattagattttacgattataagtaataattgtgttggaggattaatttataaacagcttggttttcaatatagaacaccttttgttggtttatttattcttcctgatgattattataaacttacaaagcattttcgttattatatggaacaagaacttgttttcgaagaggaacttatttcaccgagctggactcatgaagtttatcctttggggcacttaggagatatagatattcattttctacattattctagtattgaagaagcacgaactaagtgggaaaaaagaaaaaaacgcataaattggaataatctttattttaaatttgataataaagattcagctagtgaagaaattttaaataagatggataatcttccttattctaataaattaattttagtcaatcgtccatataaaaatttgaaaagtcaatgtgttattccaggtcaggaacatcttccagaactggctattatgtctgatccattaaatacttttgatatcatggcttggttaaaaaaaggtggcaatgctctttaactaat

SEQ ID NO: 3346 - DNA, 114 bp, Streptococcus pneumoniae
  misc_feature (1)..(114): tiling:Spneumo1:WAN024BET; Cluster includes WAN023SDV NC_0 03028.1_827||||627777..627890|+|114 bp|Glimmer 2.02 orf pr ediction|S.pneumoniae|TIGR4|NC_003028.1|ORF|010
ctgacttcgtcagtcttatctacaacctcaaaacagtgttttgagcagcttgcggctagcttyctagtttgctctttgattttcattgagtataagattataartgaaggagtr

SEQ ID NO: 3347 - DNA, 150 bp, Streptococcus pneumoniae
  misc_feature (1)..(150): tiling:Spneumo1:WAN024BED; Cluster includes WAN023SHG NC_0 03098.1_2472||||1915791..1915940|-|150 bp|Glimmer 2.02 orf prediction|S.pneumoniae|R6|NC_003098.1|ORF|101
ctgacttcgtcagttctatccayaacytcaaaacastgttttgagcaacctgcggctagttttctagtttgccctttgattttcattgagtatcaaaaagcaagccattttyggcttgcttttttcatctttaaaartgattggcctgyt

SEQ ID NO: 3348 - DNA, 132 bp, Streptococcus pneumoniae
  misc_feature (1)..(132): tiling:Spneumo1:WAN024BF5; Cluster includes WAN023SN9 NC_0 03098.1_93||||76383..76514|+|132 bp|Glimmer 2.02 orf predi ction|S.pneumoniae|R6|NC_003098.1|ORF|110
ctgacttcgtcagttctatyyrcaacctcaaaacagtgttttgagcaacctgtgactagctttctaakcgatgccttggttytcattgcctataatcaaaaagagaaattttctcctgaaaagcatatagag

SEQ ID NO: 3349 - DNA, 153 bp, Streptococcus pneumoniae
  misc_feature (1)..(153): tiling:Spneumo1:WAN024DMQ; Cluster includes WAN02438E SP00 09||15899958|NP_344562.1|9151..9273|+|123 bp|hypothetical protein|S.pneumoniae|TIGR4|NC_003028.1|ORF|010
ctgacttgcttcaaaggtgataaaatggaaaatttattagacgtaatagagcaatttttgagtttgtcagatgaaaagctggaagaattggctgataaaaatcaattattgcgtttacaagaagaaaaggaaaggaagaatgcgctaactaat

SEQ ID NO: 3350 - DNA, 195 bp, Streptococcus pneumoniae
  misc_feature (1)..(195): tiling:Spneumo1:WAN024F7K; Cluster includes WAN023SER NC_0 03028.1_561||||422939..423133|+|195 bp|Glimmer 2.02 orf pr ediction|S.pneumoniae|TIGR4|NC_003028.1|ORF|011
ctgaggactwrkmwmarawtwycataccttcattttgatttcctatctattgacaagcatagtcayactgtctttaatactcttcgaaaatctcttcaaaccacgttagctctatctgmaacctcaaaacagtgttttgagcaayttgcggctagcttcctagtttgctctttgattttcattgagtataaggta

SEQ ID NO: 3351 - DNA, 99 bp, Streptococcus pneumoniae
  misc_feature (1)..(99): tiling:Spneumo1:WAN024CMY; Cluster includes WAN023SGN NC_0 03028.1_100||||81253..81351|-|99 bp|Glimmer 2.02 orf predi ction|S.pneumoniae|TIGR4|NC_003028.1|ORF|010
ctgaggagaaaaacatcccacttacgagatgctttgaacttgcttaatgaaacagacttgctaagagatagagtaggtaaatgtgaactgggtaaaaaa

SEQ ID NO: 3352 - DNA, 1388 bp, Streptococcus pneumoniae
  misc_feature (1)..(1388): tiling:Spneumo1:WAN024DHU; Cluster includes WAN0242UZ SP05 27||15900441|NP_345045.1|506311..507651|+|1341 bp|sensor h istidine kinase BlpH, putative|S.pneumoniae|TIGR4|NC_00302 8.1|ORF|011
ctgaggccatcaataaattacactgagctaggagaatttatgaayrttgcttggatattgttgtatacacttgttactmayggaytaraaattgtcatmttctttaaggtrgatggaattrrtctyrctttygagaggatttttaaggcctttcttttkaagatactgttggcckttgtttttgkratgmttrgctatatrgtaggaaatgtttacctatcttattttatggaacccttgtacggcataggcttatctttcttattrttragagrrcttcctaaaaaactccttytcttttatggtctctttccaatgatattrgtgaatctcttttatagaggwgtytcctattttgtgcttccatttttgggacaagggcaagtatatgatgrctactcatttaytkggttatgtataataattttcaatttcttcatttctctagcttttttgaaatggttggactaygatttyactagcttgagaaaggrgattctcgataaagmytttcaaaagtccctgactcagattaactggataatgggtggctactatytrgtsatrsaaartctgtcttwytttgaatatgaacarrgkattcaatcaamgactgttcgccatctcatcctagtcttttacctrctcttttttatggggrttatcaagaaattggatacctatttgaaggamaaactcyatgagagaytgramcaagagcaggmcytgcgctayagagakatggarcgstatagtcggcatatagaggagctttayaaggaagtacggagytttcgycatgaytayaccaacctcttgactagcttacgtctgggcattgaagaggaggatatggagcagataaaagagrtctaygrctcsgtcttaaaggattcyagtsaraaattgcagracaataaatatgacctkggcmgattggtraatrttcgkgatmrwgccctcaaaagtctyytagcwggraaatttwtaaaagcyagagataagaacattgtctttaatgtcgaagttccwgaggagattcaggtmgaggggrtgagtctacttgattttctaaccrttgtgtctatcctttgtgacaaygctattgaagcyagtgtrgaagcywgtcaacctcatgtttcaatygcctttttwaaaaatggagcacaggagacctttatcatygaaaaytccatcaaagaagagggmatcgatatttctgaaatcttctcctttggagcmagttctaaasgggaggagagaggagttggtctctataccgtyatgaarattgtggaaagycatccyaataccagtctmaataccacctgycaaratcamgtytttcgtcaggtacttactgtratacatayagaaykaaswaawaa

SEQ ID NO: 3353 - DNA, 1349 bp, Streptococcus pneumoniae
  misc_feature (1)..(1349): tiling:Spneumo1:WAN024FXZ; Cluster includes WAN0243X2 spr1 165|pyrP|15903208|NP_358758.1|1167230..1168549|+|1320 bp|U racil permease|S.pneumoniae|R6|NC_003098.1|ORF|111
ctgagggcctattgctgtaaaataatgggctcttttytgatgcccaaaagtgaggtttatatgaaacaagaatcaactgttgatttgttactagacgttgaccaacgtccttcggmtggaaaaggaattctccttagyttccaacacgttttcgccatgtttggtgcgaccatcttggtaccattgattttgggaatgcctgtatctgttgccctttttgcttcaggtgttggaacactcatctacatgattgctactggttttaaagttccagtttatctaggttcttcatttgcctttatcacagctatgtcactggctatgaaagaaatggggggkgatgtatctgctgcccaaacaggggttatcttgactggtttggtctatgtccttgttgctaccagcatccgatttgtaggaacaaaatggattgataaactcttgccaccaatcattatcggtcctatgatcatcgttatcggtcttggacttgcaggttcagctgttaccaatgcaggtcttgtagcagacggaaattggaaaaatgctctggtagccgttgttactttcctaattgctgcctttatcaatacaaaaggaaaaggcttcctacgaatcattccattcctctttgccattatcggtggttaccttttcgcactaactcttggcttggttgactttacaccagttcttaaagccaactggttcgaaaktcctggtttctacttgccatttagcacaggtggtgcctttaaagagtacaatctttactttggtccagaagccatcgctatcttgccaatcgctatcgtaacaatttctgaacatatcggagaccatactgttttgggtcaaatctgtggycgtcaattcttaaaagaaccaggtcttcaycgtactcttmttggtgacggtatcgcaacttctgtttctgccttccttggtggaccagccaatacaacttacggagaaaatacaggggttatcggtatgactcgtatcgcttctgtctcagttatccgtaacgctgccttcatcgcgattgccctcagcttccttggtaaattcactgccttgatttcaactattccaaacgctgtacttggtggtatgtcaatccttctctatggggttatcgccagcaatggtttgaaagtcttgattaaagaacgtgttgatttcgctcaaatgcgaaacctcatcatcgcaagtgctatgttggttcttggacttggaggagctatccttaaacttggtccagttacactttcaggtactgccctttcagccatgacaggaatcatcttgaacttgatcttgccatacgaaaataaagactaactaat

SEQ ID NO: 3354 - DNA, 735 bp, Streptococcus pneumoniae
  misc_feature (1)..(735): tiling:Spneumo1:WAN024GKB; Cluster includes WAN023M06 3145 42_863a||||460932..461297|-|366 bp|EGAD orf prediction|S.p neumoniae|R6|NC_003098.1|ORF|331
ctgagtaaaaaagatagattttcttgtgttcatcgaacacttcgtcaatctcctatttttactgcgagctttttacgrgctttgtatcttagttatacaccactaccattgctgggcgtaggatgcggtcatggagtttgtagcctttttgaaagacttgrgcgatggtatctactgggtgttcatcgtctsctgggagagtttggatggccatatggtagttatggtcaaattcgccatctgctgcgatttcttcaattccttcttctttcaaagcgtgaatcaagctttcttgcaccatcsccaagcccttcttcacatcatctgtcaaaccttcaactgcaagtgcacgctcaaggttgtcaagagatggtaagattgcttttgccaagtcctggctacgataacgttgcaagttttgacgttcttcattggcacggcgttggatattttgcatttctgcatgagcgcgaagatatttgttttcgaactcatctgcacgttcatttgccaagtccaactcagacttttcaggagttgtttcttcagctgtttycacaacttcctcttcttgaacttcttctacttcttcattttttatatcttgggccatgttcgcctcctttaatgatttcaatcttaatgtacttcrtaatgattactgctgaggtagcggtaaaaatctgtcaacttcatggtcaaaacacggttgaccacattgayttgattgattag

SEQ ID NO: 3355 - DNA, 105 bp, Streptococcus pneumoniae
  misc_feature (1)..(105): tiling:Spneumo1:WAN024DMX; Cluster includes WAN023SHE NC_0 03098.1_2485||||1928121..1928225|+|105 bp|Glimmer 2.02 orf prediction|S.pneumoniae|R6|NC_003098.1|ORF|111
ctgagtaaaaactctcgaaattcaattcgctatattatcactcaacttgaacaaataccagaaccacaaaaaacagatgtaaaggaaaaatatggacttaaaatt

SEQ ID NO: 3356 - DNA, 87 bp, Streptococcus pneumoniae
  misc_feature (1)..(87): tiling:Spneumo1:WAN024DFS; Cluster includes WAN023Q8T cont ig_1257_15||||8116..8202|+|87 bp|Glimmer 2.02 orf predicti on|S.pneumoniae|670|WAN01UEGC|ORF|001
ctgagtaaattcacattctacaatcaagtcagccaacaaattcctaatcctacgggaacaaaccttgtctttgatatcttggacaag

SEQ ID NO: 3357 - DNA, 387 bp, Streptococcus pneumoniae
  misc_feature (1)..(387): tiling:Spneumo1:WAN024B7Z; Cluster includes WAN0244SX spr0 017|IS1167-truncation|15902061|NP_357611.1|21106..21312|-| 207 bp|Degenerate transposase (orf2)|S.pneumoniae|R6|NC_00 3098.1|ORF|212
ctgagtgataaacgattttatcgccctacttttcgtatgcacttgactaataaagaaattctagataaacttttgagctattccgaagacttkaaacaccactataatctctatcagctcttgcttttccacctctgtttcagactttgtttaaaaccttcctcaaagataaagagaaaatcgtcaacgcccttcaattaccttattccaacgccaaactggaagccaccaataatctcatcaaacttatcaagcacaatgcctttggttttaggaactttgaaaacttcaaaaaagaaaggacgaaatttgtcctttctagatcttcgctttcttcaacccactacagtyracwaakaaccgaaaaatgtctcgcctctaatatag

SEQ ID NO: 3358 - DNA, 1011 bp, Streptococcus pneumoniae
  misc_feature (1)..(1011): tiling:Spneumo1:WAN024DDN; Cluster includes WAN023RUW cont ig_1609_84||||64847..65782|-|936 bp|Glimmer 2.02 orf predi ction|S.pneumoniae|670|WAN01UDCD|ORF|000
ctgagttctttgctaaaggtttatttacaagcgccagaccatccatatgatgcgaccattaccattaactctatcttgaaacattcaaaatcagatagcttagaaggatcgcgtctgcaagtcttggatccgacagaaagattccaaaactcagcagatcttcaaaactatgttcacaacatgtttgacctcatctatatgttggaatatctagaagggcaatcgattgttaagaaactgaatgtttctcagaaaatggaagctctcagaaaaatcgagaatcaatatctaacagatcctgctgatggaaatgaggtttacgctactaacgtagtcaaagaattgacagaagaagaggcccgaaacctgaatagttttgatagtttgattgacaataatattctttcagctcgtgagtataaggctggtacatatgagagaaatggctactttactataaaactctttgcaccaatcttttcagcmttgagcagtgagaaaggtactcctggagatcttatgggacgaaggatagcttatgaactcttagctgctaaaggatttaaagatggtatggtaccatatatttccaaccaatatgaaggaattgctaaacaaaatggtcagacaatcaacctttacggtaaaaagcaaggattagtgacagataagcttgttttggaaaagatattctctggcaagtatccatcttggacagcctttaaaaaagctatgtatcaagagcgtattgctcagtttgatcatttgactaaagttatttttaaagatccgacaaaaccatggccaagctatggcacaaagactatcaataatgtggatgaattgcaagccctcatggaccaagctgttctcaaggatgctgaaggtccacgttggagtaattataatccagaaatcgacagtgccgttcataagttgaagagagcaatctttaaagcctatcttgaccaaacaaatgattttagaagttcaatttttgagaataaaaaa

SEQ ID NO: 3359 - DNA, 1212 bp, Streptococcus pneumoniae
  misc_feature (1)..(1212): tiling:Spneumo1:WAN024F84; Cluster includes WAN0244HW spr0 414|dinP|15902458|NP_358008.1|410657..411727|-|1071 bp|DNA -damage-inducible protein P|S.pneumoniae|R6|NC_003098.1|OR F|366
ctgataggctccattttatactcaatgraaatcraaragcaaactaggaarctagyyrcagrttrctcaaarcachgyyttgargttkcaratararytgacryggtttgaagagattttcgaagagtatmwaamkrtgctaggcatgttgatttttcctttgttaaatgatttgtcaagaaaaatcatccatattgacatggatgccttttttgctgcrgtggaaatcarggataatcctaaactcagaggaaaacctgtcattattggaagcgaccctcgrcaaacaggtggrcggggagtcgtttctacctgtagytatgaggcwmgagcttttggtgtccattctgccatgagttccaaggaagcttatgaacgttgtccccaggcygtctttatctcaggraattatgagaaatacaarkctgtgggactccrgattcgagctatttttaagcgctatacagatttgattgaacccatgagyattgacgaagcctatttggatgtgacagaaaataaactcggtatcaagtcagcggtcaaaattgctcgcctcattcaaaaagatatctggmaagaactccatctaactgcttcygcmggyrtttcytayaacaarttcttagctaaaatggcgagtgattatcaaaaaccwcatggtttgacagtgattctacctgaacaggctgaggattttctcaaacaaatggatatttccaaatttcatggagtaggaaaaaagacagtagaacgtcttcatcaaatgggcgtttttactggtgctgatttacttgaagttcctgaggtraccctaatagaccgttttggtagactaggctatgatctgtatcgaaaggctcgtggcattcacaactctccagtcaaatccaatcgcatccgtaaatcaatcggcaaggagaaaacctacgggaagattctccktgcygaggaagatatcaaaaaagagctgactcttctatcagaaaaagtcgctctcaatctacatcaacaagaaaaagctggaaaaattgtcattttgaaaatccgctacgaggacttttcaactcttaccaaacgaaaaagtmttgctcaaaaaacacaagatgctagtcagataagccaaatagccctgcaactctatgaagaattaagyragaaagaaagaggtgtccgcctattggggattaccatgactggattttaactaat

SEQ ID NO: 3360 - DNA, 927 bp, Streptococcus pneumoniae
  misc_feature (1)..(927): tiling:Spneumo1:WAN024CQO; Cluster includes WAN0242AD SP13 29||15901183|NP_345787.1|1253674..1254591|-|918 bp|N-acety lneuraminate lyase|S.pneumoniae|TIGR4|NC_003028.1|ORF|011
ctgatgaaagatttaactaaatacaaaggcgttatycctgcattttatgcttgctatgatgaaaatggtgaaattagccaagawcgtgtaaaatctctggtrcaatatttcattgacaaaggtgtaaaaggtatctatgtaaatggttcttcaggtgaatgtatttaccaaagtgtagaagatcgtaaacaaattattgaagctgttatggaagttgctaaaggtaaattaacagttatcaaccatrttgcatgtaataacacgaaagatagtatygaattggcaaaacattcagaaagtgttggagtcgatgctattgcwgctatcccacctatttayttcaaattgccagartattcaatygcagcatattggaatgcaatgagtgaagctgcgycaaatacagattttatyatytataatattccacaattggcaggggttgcgttgactggtagtttgtatgcaacaatgcgtcaaaatcctcgtgtgattggagttaaaaattcttctatgcctgtacaagatattcaaatgtttgtagctgcaggtggagaagattacattgtattcaatggtccagatgaacaatatcttggtggtcgcttgatgggagcagaagctggtattggtggtacttatggcgttatgccagatttgttcttgaaattggaaagtttgattcaagaacgagatttagatacwgctaaaaaacttcaatatgctatcaatgaagttatctataagatgatatcaggtaaggcaaatatgtatgctgtagcaaaagargttttgcgtctaaatgaaaaacttgatttaggttctgttcgtcaaccyttagaagcattggcagaaggtgacttggaagttgcaaaacaagcagcagaacttattcaacaagcacgaaaagaatttttactaactaat

SEQ ID NO: 3361 - DNA, 680 bp, Streptococcus pneumoniae
  misc_feature (1)..(680): tiling:Spneumo1:WAN024CCR; Cluster includes WAN0244QR spr0 095|sdaB|15902139|NP_357689.1|102998..103669|-|672 bp|L-se rine dehydratase beta subunit|S.pneumoniae|R6|NC_003098.1| ORF|111
ctgatgaaatcacttcgttttcaatctgtctttgatatcatcggaccagttatgattggcccatctagtagccataccgctggtgctgttcgtattgggaagattgtctcttccatttttgatgatactccracagaagttgaattccaactttttaactcatttgccaagacctatcgtggtcacggaacagacctagcccttgttgcaggtattttrggaatggatacagatgatcctgaaattccaaatagtctggaaattgcccacaagcgtggtatcaagattgtctggaccattcagaaagacagcaatgcccctcaccctaacaccactaaaattactgttaaaaatgcccacaagaccatcagcgtgactggtatttctatcggtggaggaaatattcaggtaaccgaactcaatggttttgccgtctctctcaatatgaatacaccgactatcatcatcgttcatcaagatattccaggtatgattgcccttgttacagaggcgctttcccgctatggtatcaatatcgcccagatgaatgtcactcgtgaaaaagctggtgaaaaagccattatgattatcgaagttgacagtcgcaactgtgatgaggctatcgaagaaattcgaaaaatccctcatctccacaatgtcaatttctttaaatarctaat

SEQ ID NO: 3362 - DNA, 711 bp, Streptococcus pneumoniae
  misc_feature (1)..(711): tiling:Spneumo1:WAN024EWM; Cluster includes WAN0244A4 spr0 694|ABC-NBD|15902738|NP_358288.1|694381..695082|+|702 bp|A BC transporter ATP-binding protein - unknown substrate|S.p neumoniae|R6|NC_003098.1|ORF|111
ctgatgaagcaactaattagtctaaaaaatatcttcagaagytaccgtaatggtgaccaagaaytgcaggttctcaaaaatatcaatctagaagtgaatgagggtgaatttgtagccatcatgggaccatctgggtctggtaagtccactctgatgaatacgattggcatgttggatacaccaaccagtggagaatattatcttgaaggtcaagaagtggctgggcttggtgaaaaacaactrgctaaggtccgtaaccaacaaatcggttttgtytttcagcagttctttcttctatcgaagctcaatgctctgcaaaatgtagaattgcccttgatttacgcaggagtttcgtcttcaaaacgtcgcaagttggctgaggaatatttagacaaggttgaattgacagaacgtagtcaccatttaccttcagaattatctggtggtcaaaagcaacgtgtagccattgcgcgtgccttggtaaacaatccttctattatcctagcggatgaaccgacaggagccttggataccaaaacaggtaaccaaattatgcaattattggttgatttgaataaagaaggaaaaaccattatcatggtaacgcatgagcctgagattgctgcctatgcyaaacgtcagattgtcattcgggatggggtcatttcgtctgacagtgctcagttaggaaaggaggaaaacctaactaat

SEQ ID NO: 3363 - DNA, 1352 bp, Streptococcus pneumoniae
  misc_feature (1)..(1352): tiling:Spneumo1:WAN024FZJ; Cluster includes WAN0243Y2 spr1 129||15903172|NP_358722.1|1132842..1134185|-|1344 bp|Hypot hetical protein|S.pneumoniae|R6|NC_003098.1|ORF|120
ctgatgacaatgaargygatgaaaacgatgatgcggattactgataatcaacacaagattattaaagaaaaatttgttgaagaatatcctaaactaagcaatcytcttttagacagaaccttggaaagtctatcccaagatgawcgtattttcatttttccaaatgattwgactcatactccwgatttggataarrahcaaaagattttkgaaacrrtcaatcagraaatcaagacaggraaygtgattggttttcttggatatggtcaggaaagattaacratttcctcacgattttctgatgagagtaatgaccaytttttgcattatctcttaaacaaggttcttyatatcaatctcactagtttagatgttgctttgtctcgtgaagagaggctttatcaacttttgrtgyatctcttycccaagtatctacaagctgctattcgaaaaggtctttataaggaatatcatcgattttctcataacgacagtmatgttaagggagtgattgwtgtaagaaaccatctcaagaaaaatcttcctttcacgggaaatattgcctacrcaacgagagagttcacctatgataatcccctcatgcagttggtccgtcacactattgaatacattaagaatcagaaaagcattggtcaaggggtactagataatctctcaactagtcgtgaaaacgtatctgaaatcgtgcgtgtaacgccctcttataaactagctgatcgtgctaagattaytcggrgaaatcaatctaaacctatacgtcatgcatactttcacgagtacagaaayttacaagaactttgtctgatgatcctaaaccaagaaaagcacggtttagggtatcaagatcaaaaaatctatggtattctctttgatgttgcctggctttgggaagagtatgtttacaccttgttgccaaaaggttttgtacatcccagaaataaggataagacggatggaatttcagtattttctgttgggaaacgaaaagtatatccagatttttatgacagagaacgaaagattgttctagatgcaaaatataaaaaactggaattgactgaaaaaggaatcaaccgtgaggacttattccagctgatttcctattcttatattttaaaagctgagaaggctggactkrtttttcckagyawggasmagtyaktraatartgarataggaaamstagcwggytatggagctywrttgaagaartggtctatycraatycctcagaakkcytcatyytatagtrcattttgtaaaatgatggaaaattcagaagarmwwwytaawgcgattattgatgaagaagtggggagaaaataactaat

SEQ ID NO: 3364 - DNA, 1475 bp, Streptococcus pneumoniae
  misc_feature (1)..(1475): tiling:Spneumo1:WAN024CPV; Cluster includes WAN0244IG spr0 394|gatA|15902438|NP_357988.1|390381..391847|-|1467 bp|Glu -tRNAGln amidotransferase subunit A|S.pneumoniae|R6|NC_003 098.1|ORF|221
ctgatgacttttaacaataaaactattgaagagttgcacaatctccttgtctctaaggaaatttctgcaacagaattgacccaagcaacacttgaaaatatcaagtctcgtgaggaagcymtcaattcatttgtcaccatcgctgaggagcaagctcttgttcaagctaaagccattgatgaagctggaattgatgctgacaatgtcctttcaggaattccacttgctgttaaggataacatctctacagacggtattctcacaactgctgcctcaaaaatgctctacaactatgagccaatctttgatgcgacagctgttgccaatgcaaaaaccaarggcatgattgtcgttggaaagaccaacatggacgaatttgctatgggtggttcmggtgaaacttcayactacggagcaactaaaaacgcttggraccacagcaaggttcctggtgggtcatcaagtggttctgccgcagctgtagcctcaggacaagttcgcttgtcacttggttctgatactggtggttccatccgccaacctgctgccttcaacggaatcgttggtctcaaaccaacctacggaacagtttcacgtttcggtctcattgcctttggtagctcattagaccagattggaccttttgctcctactgttaaggaaaatgccctcttgctcaacgctattgccagcgaagatgctaaagactctacttctgctcctgtccgcatcgccgactttacttcaaaaatcggccaagacatyaagggyatgaaaatygctttgcctaaggaatacctmggygaaggaattrayccagaggttaaggaaacmatyytaaaygcsgcyaaacactttgaaaaattgggtgctatygtcgaagaagtcagccttcctcactctaaatacggwgttgccgtwtaytacatcatcgcttcatcagaagcttcatcaaacttgcaacgyttygacggtatccgttacggctaycgcgcagaagatgcracyaaycttgatgaaatctatgtaaacagccgwagccaaggttttggtgaagargtraarcgycgtatcatgctgggtactttcagtctttcatcaggttactaygatgcctactayaaraaggctggwcargtccgtacmctyatcattcaagatttcgaaaaagtcttcgcggattacgatttgattttgggtccaactgctccaagtgttgcctatgacttggaytcwctcaaccatgacccagttgccatgtacttrgcygacctmttgaccatacctgtaaacttrgcaggwctscctggaatttcgattcctgctggattctctcaaggtctacctgtcggwctscaattgattggtcccaagyactctgaggaaaccatttaccaagytgctgctgcytttgaagcaacaacagrctaccacaaacaacaacccgtgatttttggaggtgacaactaactaat

SEQ ID NO: 3365 - DNA, 504 bp, Streptococcus pneumoniae
  misc_feature (1)..(504): tiling:Spneumo1:WAN024D7Y; Cluster includes WAN0243RJ spr1 364|atpF|15903407|NP_358957.1|1346837..1347331|-|495 bp|Pr oton-translocating ATPase, F0 sector, subunit b|S.pneumoni ae|R6|NC_003098.1|ORF|111
ctgatgcacgtaacagtaggtgaattaattggtaattttrttttaatcactggctcttttattcttttgctagtcttgattaaaaaatttgcatggtctaatattacaggcattttcgaagaaagagctgaaaaaattgcttcagatattgayagagctgaagaagcccgtcaaaaagcagaagtattggctcaaaaacgcgaagatgaattggctggtagccgtaaagaagctaagacaatcattgaaaatgcaaaggaaacagctgagcaaagtaaggctaatatcttagcagatgctaaastagaagcrggwcrcttaaaagaraargcsaatcaagaaattgctcaraataaagywgargctttrcaragtgttaagggygaggtsgcagatttgaccrtyagyytmgctggtaaaatcatctcamaaaaccttgacagtcatgcycataargmactcattgatcagtatatcgatcagctaggagaagctctaactaat

SEQ ID NO: 3366 - DNA, 1575 bp, Streptococcus pneumoniae
  misc_feature (1)..(1575): tiling:Spneumo1:WAN024B5X; Cluster includes WAN023J5T 8494 2_2021||||1153397..1154968|-|1572 bp|EGAD orf prediction|S .pneumoniae|TIGR4|WAN01UC25|ORF|010
ctgatgcatttttttagcgacaatgcttgctacttccttctgtcgaatttagacaattttaaaccccaattattcaccccaaatctaaaaaccatccagaatccttgccttagcttagatcctggatggtttcttttttcacccaatgggtgttttttactagacaaaaaagagtttcccctttatggtataagtgtagaaaaaaacacaaaaagaaaggaaactcacatgaacagtttaccaaatcatcacttccaaaacaagtctttttaccaactatctttcgatggaggtcatttaacccagtatggtggtcttatcttttttcaggaacttttttcccagttgaaactaaaagagcggatttctaagtatttagtaacgaatgaccaacgccgctactgtcgttattcggattcagatatccttgtccagttcctctttcaactgttaacaggttatggaacggactatgcttgtaaagaattgtcagctgatgcctactttccaaaattrttggaaggagggcagcttgcttcacagccaaccttatcccgttttctttccagaactgacgaggaaacagtccatagtttgcgatgcctcaaccttgaattggtcgaattctttttmcakkttcaccagctrmaccaactcattgtagatatcgattctacccatttcacaacttatggcaagcaagaaggtgttgcttataacgcccactatcgtgctcatggctatcatcctctttatgctttcgaggggaagacaggttattgtttcaatgcccagcttcgtcctggtaatcgttattgttctgaagaggcagacagctttatcacacctgttttagaacggtttaatcaacttctctttcgaatggatagtggctttgcgaccccaaaattatacgatttaattgaaaaaacagggcaatactacctcataaaactcaagaaaaatactgttctgagccgtcttggagacctttccctcccttgcccacaggatgaggacttaaccatcttgccccactccgcctactcagaaactctctatcaagcaggatcttggtcgcacaagcgtcgtgtctgccagttctctgaacgaaaagaaggaaacttgttctacgatgttatttctctcgttacaaatatgacgagtggaacaagccaagaccagtttcagctttatcgtggacgtggtcaagccgagaatttcatcaaggagatgaaggagggattttttggcgataaaacggatagttcaaccttaatcaaaaacgaagttcgtatgatgatgagctgtatcgcctacaatctctatctttttctcaaacatctagctggaggtgacttccaaactttaacaatcaaacgcttccgccatctttttcttcacgtggtaggaaaatgtgttcgaacaggacgcaagcagctcctcaaattgtctagtctctatgcctattccgaattgttttcagcactttattctaggattagaaaagtcaacctgaatcttcctgttccttatgaaccacctagaagaaaagcgtcgttaatgatgcattaa

SEQ ID NO: 3367 - DNA, 863 bp, Streptococcus pneumoniae
  misc_feature (1)..(863): tiling:Spneumo1:WAN024DBP; Cluster includes WAN024434 spr0 946||15902990|NP_358540.1|929956..930810|+|855 bp|Conserve d hypothetical protein|S.pneumoniae|R6|NC_003098.1|ORF|111
ctgatgcttggagcaattattggagatattgtcggttctgtttacgaatggaacaatatcaaaacaaaggactttcctttatttcggaaggactgcttttttacagatgacacggttatgacctgtgctgttgcagaagcaattatgaatggtggacaaaaagaygayttcattgacgcgatgaagamatatggcagaatgtatccgaatgctgattacggtgctcggtttaatgcatggctaaacagcgataaccgtgagccttataatagctttgggaatggatcagctatgcgtatttctccatgtgcttggatcatggactgtggtwtttatgcgaraactggtatrtggccatcatctagaggacttacgagtctttctgcagaggtaactcataatcatccagaaggtgtcaaaggcgcwatggctacagctgatgctatctttctatgtcgttkttactktggtggwwatygtagagagtacgagcmatcrattaacgrcaatcctacagagtgtaaaagacgaattaaggattatatagaaaaagaatacgattacaatctatctcaaactttagatgaaatccgtcctaactatcgttttaacgaaacatgtcaggaaactgtccctcaagccattatcgcctttcttgaaagtagagacttcgaagatgcgataagaaatgccatctcacttggtggcgacagtgatactctcgcagcaatcacttgtagcatagcagaggcagcttacggtattcctgattggatcaaggataaggcctattcttacttggatgaacccttaaaggatgtagttaggcgatgggaaaatagaataaaagcgtattaactaat

SEQ ID NO: 3368 - DNA, 1361 bp, Streptococcus pneumoniae
  misc_feature (1)..(1361): tiling:Spneumo1:WAN024DUH; Cluster includes WAN02439P spr2 008|dnaC|15904049|NP_359599.1|2000715..2002067|-|1353 bp|R eplicative DNA helicase|S.pneumoniae|R6|NC_003098.1|ORF|11 1
ctgatggcagaagtagaagagttacgagtacaacctcaagatatcttagctgagcaatccgttttaggggckatctttattgatgagagtaaacttgtttttgtgcgagaatacattgagtctcgggacttttttaagtatgcccatcgtttgattttccaagccatggtcgatttatccgatcgtggtgatgccatagatgcaacaacggttcgtactatccttgataatcaaggtgatttrcagaatattggtggcttgtcttacttggttgagattgtyaattctgtgccaacttctgctaatgcggagtattatgctaagattgttgcagaaaaagcaatgctacgtcgtttaattgccaagttgacagagtctgtcaaccaagcttacgaagcgtcacaaccagctgatgaaattattgctcaggcagaaaaagggttgattgatgtcagtgaaaatgcaaatcgaagcgggtttaagaacattcgagatgtgttgaatctcaactttggaaatctggaagctcgctcgcaacaaacgaccgatattacaggtattgcgacaggttatcgtgatttggatcatatgacaacaggacttcatgaggaggagttgattatcttagcagctcgtccagcagttggtaagacagcatttgccttgaatatcgctcagaayattgggactaagttggayaaaacggttgctattttttcactcgaaatgggtgcggaaagcttggtagaycgtatgttagctgcagaaggcttrgtggagtcacattctatccgtacagggcaattgacagatgaggagtggcaaaaatatactattgctcagggtaatctagctaacgccagyatctatatcgatgatacgccaggtattcggattacagagattcgttctcgttctcgtaaattggctcaagaaactggaaatcttggtttgattktgatagactatttgcaacttatcacgggaactggtcgagaaaatcgtcaacaagaagtttctgaaatttctcgtcagttgaaaatactagccaaggaattgaaggttccagtaatcgctctgagtcagctttctcgtggtgtagaacaacgtcaggacaagagaccggtcttgtctgatattcgtgaatctgggtctattgagcaggacgctgatatcgtagcttttctctatcgcgatgactactatgaacgtggtggtgaagaagaggagggtatcccaaataataaggtggaagttattatcgagaaaaaccgtagtggagctcgtggaacagtggaattgattktccaaaaagaatacaataaattttcaagtatctcaaagagggaggcataactaat

SEQ ID NO: 3369 - DNA, 955 bp, Streptococcus pneumoniae
  misc_feature (1)..(955): tiling:Spneumo1:WAN024F2F; Cluster includes WAN0244BI spr0 644|transposase C|15902688|NP_358238.1|651795..652448|-|65 4 bp|Degenerate transposase|S.pneumoniae|R6|NC_003098.1|OR F|998
  misc_feature (411)..(411): n is a, c, g, or t
ctgatgggcaaatcttataaagagattatagarcttttagactgtaatcaaacaaygatttggcgaaaygtaaaaaaatatgaggagttcggactcgactctctccttcaagaaacacgtggtggtcgtaaccatgcwtatatgacrrttgagsaaragaaagyctttcttgcycgycatttgaaggctrcagaggcaggagaatttgttacaattgatgccttatttcaggyttataaaaagragtkwggwygwwmctamwcacgtratgccttctatcaactgttgaagyrccatggttggcgaaatattayrccacgtccagaacatcctargaaagcagaygctcaaaccattgtygcgtctaaaaataaartctcaatycaagaagrhaaghdarckhwttaaawnyagtagacgttttcgtaaggttcgcttgatgtaccaagmtgargctggtttcggtagaatcagtaaactgggatcttgttggkctccaataggagtaggtcyacatrtccatagtcactatatacgagaatttcrctattgttatggagctgttgatgccyatacaggcgmatcakttttcttaatagctggtrgatgtaatactgwgtggatgaacgyctttttagaagagctttcacaagcttatccakatgattayyttttaytcgttatrgacaatgctatatggyawaaatcaagtrycttaaakattccgactaatattgrytttdcmtttaytcytccrtacacaccagaratgaaccccattgaayaagtgtggaaagagattcgtaaaygtggatttawrwrwaarryctwwcdaaytdwggaagatgtcaybaatsdamthsaagatgtyatrmawsraytkgagaaggaggtgataaagtccatcgktaatcggagayggamtagartgctttktgaaarcagaykaactaat

SEQ ID NO: 3370 - DNA, 602 bp, Streptococcus pneumoniae
  misc_feature (1)..(602): tiling:Spneumo1:WAN024D5A; Cluster includes WAN0243L9 spr1 591||15903633|NP_359183.1|1570023..1570616|-|594 bp|Conser ved hypothetical protein|S.pneumoniae|R6|NC_003098.1|ORF|1 11
ctgatgtcctatcaagactatatcaactgctcccgtgaggccttgttggaaaaaatggcagagcttctacctgagaaacgtctaacccattgtctaggtgtggagcgtgcygctatggarttagctcagcgctttggtgtagatgttgrgaaagcaagtctagcaggtcttcttcatgactatgctaaaaagttgtcagatcaggaatttctaghcttgattgaccgttaycagctagayyyygacctcaaaaactggggyaataatgtctggcatggtatggtcggaatttacaaaattcaggaagatttggatttgcatgattcwgaaatyctgcgagccattgaartycatacagtcggwgctggtcaaatgacagacctagataaggtcatctacgtcgcagactatatcgagcacaatcgrgcmtttcctggagtrgatgtggcgcgtgagattgcaagtctatcgctcaataaggcggtggcytacgaaacagctcgtaccgtggagtatctagctcatcagggattccccatctatccccaaacccttgaaacctataacgcctttgtgcactatttgaaagagractaactaat

SEQ ID NO: 3371 - DNA, 375 bp, Streptococcus pneumoniae
  misc_feature (1)..(375): tiling:Spneumo1:WAN024G5B; Cluster includes WAN023LHS 3125 11_1881b||||1016006..1016317|+|312 bp|EGAD orf prediction| S.pneumoniae|R6|NC_003098.1|ORF|111
ctgatgtctcaagtaaaaggcttgtgtgttttggatgtagatggaaccttaatcctagaagaagtgattgatyttttagggagagaggcaggtcatgaggcggaaatttcgcagattacaagtcgrgcaatgcgaggagagttggtctttgaaagcagtttaagaaaaagagtgtccttgttggaaggtcttcctattttggtctttgataacgtcttcaactcaattcatctatcgctaaatgtcccagagttcatctctattctccaaaagaatggcatcctagttgrtctggtgtctggtggatttacaccaatagttggagagattagcaaaatcccttggtattgcctatttcactgccaacyagcttga

SEQ ID NO: 3372 - DNA, 908 bp, Streptococcus pneumoniae
  misc_feature (1)..(908): tiling:Spneumo1:WAN024D2D; Cluster includes WAN0243FD spr1 803|plcR|15903845|NP_359395.1|1774530..1775429|-|900 bp|Tr anscriptional activator|S.pneumoniae|R6|NC_003098.1|ORF|11 1
ctgatgttaattggtcaaaaaattaaagagattcggatagaaaaaggarttagtcgtccagatttttgtggagatgagcaagractgacagttcgtcaactgtcgcgaattgaaagtggagcttcgcaaccgagtttgcscaagttagmctatattgctcgccggctargagttccagtttatagccttatgccggatttttcagctcttcctyctgcttatttagaattgaaataccagattttacgtgaaccaatctatggtaaagaagaggagtacgataagaaggaagcgtgtttggaagagatttataaaacatactttgataatcttcctaaagaagaacaattagcatgtgaagtattgcaggcgtgtttggatacttctagaactagaaggcctgaatatgcagagttaatacttgaggaacatatgyctcagatyatagaaaaagaagyttattcaayaaatgatatgttgttgattcgtttgtttttttatcaaatgctcattagaaaagatcttgccaaatttataaatcaaatcgaaaagctaatgctctttcttttggaacagaaraaggtaactmaawtagaraaytwctttataattagagatactcttatttcaggaatgtgttgtcttgaaaaggtaggagtaactgattgttttaatgattatctatcgtgtttacaagaaattatggataaaactcaagattatcaaaagaaacctcttgtatttatgtttttgtggaagcaagcattaagagwagaaagagattttagtttagctgaatcattttatcagtcttctaaaacatttgcgmagctaattggagatgratttctagtaaagraattgacagaggaatggcaagaggatgtcaaaaaatatttataactaat

SEQ ID NO: 3373 - DNA, 632 bp, Streptococcus pneumoniae
  misc_feature (1)..(632): tiling:Spneumo1:WAN024CZL; Cluster includes WAN0243E2 spr1 850||15903892|NP_359442.1|1825805..1826428|-|624 bp|Hypoth etical protein|S.pneumoniae|R6|NC_003098.1|ORF|111
ctgatgttgaataagataagagactatytagactttkctggtttgcagtaccgtartcctgataaagcgggagcagagcgagagaagatgctggcrttccgccacaaaggwcaagaggchcgaaaggyttttacagaaytggcyaaagyctttcargcaarycatccagaatggcaactccaacagactagycagtggatgaatcaggcccagcgtttgmgaccacatttttgggtttatctacarmgwgasggrmaagtgacagaacctatgatrgccttrcgtttgtatggracatctwctgaytttggwatttcyttrgargtcagtttcatcgaacgtaagaaggatgagcaaacactgggcaagcaggccaaagttttagamattccaaccgttaaagggatttattatctaacctactctaatggtcaaagtcaacggtgggaggcgaatgaagaaaagcgtcgtactttacgcgagaaggtgagaagtcaagaagttcgaaaagttttagtgaaggtagatgttcctatgacagaaaattcgtctgaagaagaaatcgtagaaggcttattgaagtcttattctaaaattcttccctattatctagstackagarrataactaat

SEQ ID NO: 3374 - DNA, 90 bp, Streptococcus pneumoniae
  misc_feature (1)..(90): tiling:Spneumo1:WAN024DPS; Cluster includes WAN023SD4 NC_0 03028.1_1055||||788216..788305|+|90 bp|Glimmer 2.02 orf pr ediction|S.pneumoniae|TIGR4|NC_003028.1|ORF|011
ctgattatagatgataaactttttgtttttatctggactgtgatatttatagttctaaatggtttattatttataagtgttgaaagagat

SEQ ID NO: 3375 - DNA, 156 bp, Streptococcus pneumoniae
  misc_feature (1)..(156): tiling:Spneumo1:WAN0249LN; Cluster includes WAN024E7G R6.I G_1838||||1704326..1704480|+|155 bp|Between spr1723 (groES ) (- strand) and spr1724 (ssbB) (- strand)|S.pneumoniae|R6 |NC_003098.1|IG|110
ctgatttcctccataatgagatagatattattagcactctttgaactkgagtgctaattcatarttctattgtatcacttggtcagaaatartcaagaaaaaagtctgactttctcaagataaaaagcctgagaccaactcagactttttaattct

SEQ ID NO: 3376 - DNA, 99 bp, Streptococcus pneumoniae
  misc_feature (1)..(99): tiling:Spneumo1:WAN024DOH; Cluster includes WAN023SJC NC_0 03098.1_1664||||1300489..1300587|+|99 bp|Glimmer 2.02 orf prediction|S.pneumoniae|R6|NC_003098.1|ORF|110
ctgatttcgattttgtcttctttgtatcttcgttctccctactttcttatgcaagccttttctttttattatatcacagataagtatttctttcacaat

SEQ ID NO: 3377 - DNA, 102 bp, Streptococcus pneumoniae
  misc_feature (1)..(102): tiling:Spneumo1:WAN024FVF; Cluster includes WAN023SAS NC_0 03028.1_1696||||1285326..1285421|-|96 bp|Glimmer 2.02 orf prediction|S.pneumoniae|TIGR4|NC_003028.1|ORF|010
ctgattttgaaggctttttctatctgtctgcagaaattttcttttggagtctcctatagaaagaccctagggaaaatctatccgtatagaggagccttcttt

SEQ ID NO: 3378 - DNA, 498 bp, Streptococcus pneumoniae
  misc_feature (1)..(498): tiling:Spneumo1:WAN024ERU; Cluster includes WAN023OYK pne6 6_11||||7198..7533|+|336 bp|Type 12A1 capsule operon, Glim mer 2.02 orf prediction|S.pneumoniae||WAN01UCD4|ORF|010
ctgattttgaggaagttcgcctgcaaaagaatagacttgttcggtaactgtaaaaagtgttatactatttttatggaaacagtatacgacaaagcacaaaaacttaactcaaaaaacttcaaactattgattggtgtcaaaaaggaaacctttcaactcatgctagaacacctgaattcagcctatcagattcagcaccgaaaaggtggacgtccacgtagtctgcccatggaagaccagctcattatgmccctccgttacttgcgatattatcccactcagcgtctgctggcctttgattttggcgtcggtgtagctacggtaaatgccatcatcacttgggtggaggatacacttcgtgcgtcaggtagctttgatttggaccatttagaagccccgagtgctgctgtggctattgacgtgaccgaaagtccgattcagcgtccaaamaaaaccaaagcaaaaattattctggtaaaaagaaacgacacaccttaa

SEQ ID NO: 3379 - DNA, 585 bp, Streptococcus pneumoniae
  misc_feature (1)..(585): tiling:Spneumo1:WAN024GLQ; Cluster includes WAN023M1E 3145 46_809a||||428556..429113|-|558 bp|EGAD orf prediction|S.p neumoniae|R6|NC_003098.1|ORF|111
ctgattttgatagaccagcatatcagcatgatagatggtcacttcaaaacgatcaccaaattctggttccagcttgtaaaattcttcccgtgtgatagaggtccaaagcgaaccgaaacgcacatccagaatatcaatggctcccttcaccagatgatcttctatgatggtcgctacgactggaagctctacaatctgktccacactgagctctggccctacttcctcaaaagtaatgtgaccactggccagtttagcaccagtataggcatagacatcacgaccgtggaaggtataagaatgctctgtgttttgacgcctattggccacctcagaaatctcacgaatggctacaatgccaacgtgtttcttgataaaggaaagcgtcccattatctggcgtgacaatgtattgattttttgcagtcttggcaactacactcttacgtttcgaaccgacacctggatcgacaaccgatacaaacgtcgttccctcaggccagtaatccaccgtctgaaagagacgatagctcccctcaaaaatattataaggcgtgatatcgtgcgtcaagtgatgkatttttaa

SEQ ID NO: 3380 - DNA, 144 bp, Streptococcus pneumoniae
  misc_feature (1)..(144): tiling:Spneumo1:WAN024DNU; Cluster includes WAN023SIK NC_0 03098.1_1943||||1514194..1514337|+|144 bp|Glimmer 2.02 orf prediction|S.pneumoniae|R6|NC_003098.1|ORF|111
ctgatttttctagcgacaaacagaataaataagttagttcaattagctmccttccttatagatgaaattgatattcatgamggaagtcgccctttattttttgcaaaagatactagtatgaatctatttggggacttgaattta

SEQ ID NO: 3381 - DNA, 87 bp, Streptococcus pneumoniae
  misc_feature (1)..(87): tiling:Spneumo1:WAN024D6C; Cluster includes WAN023Y3C AL44 9935.1_41||||28622..28708|+|87 bp|Glimmer 2.02 orf predict ion|S.pneumoniae||AL449935.1|ORF|000
ctgayttccccaattccattgaagatacgaaagataaacggtggaactcgtatcacatacactggtaccttgactggattttggaat

SEQ ID NO: 3382 - DNA, 87 bp, Streptococcus pneumoniae
  misc_feature (1)..(87): tiling:Spneumo1:WAN024DOZ; Cluster includes WAN023SBN NC_0 03028.1_1467||||1113477..1113563|-|87 bp|Glimmer 2.02 orf prediction|S.pneumoniae|TIGR4|NC_003028.1|ORF|011
ctgcaactcagttacagggatttttttgatattttaaaaagaattttcaagaaaatctttyttatagaaagtccaaccttgaaaaag

SEQ ID NO: 3383 - DNA, 108 bp, Streptococcus pneumoniae
  misc_feature (1)..(108): tiling:Spneumo1:WAN024EVA; Cluster includes WAN023SI2 NC_0 03098.1_2211||||1717709..1717816|+|108 bp|Glimmer 2.02 orf prediction|S.pneumoniae|R6|NC_003098.1|ORF|110
ctgcaaggcaagactgacgtggttgatgagattttggaagagtattacaatcatagattcaccagtagacttgaccgcagatttaactatagtagattgaaactagaa

SEQ ID NO: 3384 - DNA, 87 bp, Streptococcus pneumoniae
  misc_feature (1)..(87): tiling:Spneumo1:WAN024DTN; Cluster includes WAN023SNI NC_0 03098.1_28||||22492..22578|-|87 bp|Glimmer 2.02 orf predic tion|S.pneumoniae|R6|NC_003098.1|ORF|110
ctgcaattatatcttacaatttattataataaaaaatcgcctttttatcaagaagaaacaatagaaagatttgctatttccaactat

SEQ ID NO: 3385 - DNA, 2510 bp, Streptococcus pneumoniae
  misc_feature (1)..(2510): tiling:Spneumo1:WAN024CPD; Cluster includes WAN0243ZX spr1 061|phtA|15903105|NP_358655.1|1056930..1059416|-|2487 bp|P neumococcal histidine triad protein A precursor|S.pneumoni ae|R6|NC_003098.1|ORF|330
ctgcaatttaaaaatgaattgcaactagaaatatcaaatagaaagagagtttcgatgaaaatyaataaraaatayctwgytggktcwgyrgcasmyttgattttaagtgtytgtkcttaygarytrggwytgyatcaagctmraackgtwaargaaaataatcgtgtttcctatatagatggwaaacaagcrrcrcaaaaaacggagaatytgactcctgatgaggtyagyaarmrwgaaggwatcaatgcygarcaaatcgtcatcaagataacagaccaaggctatgtcacttcacatggcgaccactatcattattacaatggtaaggttccttatgaygckatywtcagtgaagaattactcatgaaagatccraactataagctaaaagatgaggatattgttaatgaggtcaagggtggatatgttatcaaggtagatggaaaatactatgtttaccttaaggaygctgcccacgcggataacgtccgtacaaaagaggaaatcaatcgacaaaaacaagarcatagtcaacatcgtgaargtggractccaagaaacgatggtgckgtwgccttkgcacgttcrcarggacgctayacyacagatgatggttatatctttaatgcttctgatatcatwgaggayackggtgatgcttatatcgttcctcatggmgaycattaccattacattcctaagaatgagttatcagctagcgagttrgctgctgcagaagccttcctatctggtcgrggaaatctgtcaaattcaagaacctatcgccgacaaaatagcgataacacttcaagaacaaactgggtaccttctgtaagcaatccaggaactacaaatactaacacaagcaacaacagcaacactaacagtcaarcaagtcaaagtaatgasattgatagyctyytgaaacarctytayrmmytgccwytsagymaacgmcaygtagaatctgatggccttgtyttygayccagcrcaaatcacaagtcgaacagcyagaggtgtwgcwgtsccwmacggagatcattaccacttcatcccttactctcaaatgtctgaattggaagaacgaatcgctcgtattattccccttcgttatcgttcaaaccattgggtaccrgattcaagrcyagaacaaccaagtcyacaaccgactccggaacctagtccaggcccgcaacctgcaccaaatcttaaaatagactcaaattcttctttggttagtcagctggtacgaaaagttggggaaggatatgtattcgaagaaaagggcatctctcgttatgtctttgcgaaagatttaccatctgaaactgttaaaaatcttgaaagyaagttatcaaaacaagagagtgtttcacacactttaactgctaaaaaagaaaatgttgctcctcgtgaccaagaattttwtgataaagcatataatctgttaactgaggctcataaasccttgtttgaaaataagggtcgtaattctgatttccaasccttrgacaaattwttagaacgcttgaatgatgaatcgactaataaagaaaaattggtagatgatttattggcattcctagcaccaattacccatccagagcgacttggcaarccaaattctcaaattgagtatactgaagacgaagttcgtattgctcaattagctgataagtatacaacgtcagatggttacatttttgatgaacatgatataatcagtgatgaaggagatgcatatgtaacgcctcatatgggccatagtcactggattggaaaagayagcctttctgataaggaaaaagttgcagctcaagcctatactaaagaaaaaggtatcctacctccatctccagacgcagatgttaaagcaaatccaactggagatagtgcagcagctatttacaatcgtgtgaaaggggaaaaacgaattccactcgttcgacttccatatatggttgagcatacagttgaggttaaaaacggtaatttgattattcctcataaggatcattaccataayattaaatttgcttggtttgatgatcacacatacaaagctccaaatggctataccttggaagatttgtttgcgacgattaagtactacgtagaacaccctgacgaacgtccacattctaatgatggatggggcaatgccagtgagcatgtgttaggcaagaaagaccacagtgaagatccaaataagaacttcaaagcggatgaagagccagtagaggaaacacctgctgagccagaagtccctcmagtagagactgaaaaagtagaagcccaactcaaagaagcagaagttttscttgcgaaagtaacggattctagtctgaaagccaatgcaacagaaactctagctggtttacgaaataatttgactcttcaaattatggataacaatagtatcatggcagaagcagaaaaattacttgcgttgttaaaaggaagtaatccttcatctgtaagtaaggaaaaaataaactaactaat

SEQ ID NO: 3386 - DNA, 2591 bp, Streptococcus pneumoniae
  misc_feature (1)..(2591): tiling:Spneumo1:WAN024CPC; Cluster includes WAN0243ZY spr1 060|phpA|15903104|NP_358654.1|1054238..1056805|-|2568 bp|H istidine Motif-Containing protein|S.pneumoniae|R6|NC_00309 8.1|ORF|511
ctgcaatttagaaatgaattgyramtmgaaatatacwwatagaaagagagkwwmgatgaaaatyaataaraaatayctwgytggktcwgyrgctasmyttgattttaagtgtytgtkcttaygarytrggwytgyatcaagctmraackgtwaargaaaataatcgtgtttcctatatagatggaaaacaagcgacgcaaaaaacggagaatttgactcctgatgaggttagcaagcgtgaaggaatcaaygcygarcaaatcgtcatcaaratwacrgaycaaggytatgtsacytcwcatggvgaccaytatcattaytayaatggyaaggtyccttatgaygcbatywtcagtgaagarytvctsatgaargatccraaytaymagytraargaykmrgayattrtyartgarrtcaagggtggwtatgtbatyaaggtarayggwaaatactatgtttaccttaaggatgcwgcycaygcggataaygtccgtacaaaagargaaatcaatcgrcaaaaacaagarcatagtcaryatcgtgaaggwgggactycarsaaacgatggwgckgtwgccttkgcacgttcrcarggacgctayacyacagatgatggttatatcttyaatgcwtctgatatcathgargatackggygatgcytatatcgttcctcayggmgaycattaccattacattcctaagaatgagttatcagctagcgagttrgctgctgcaraagccttcctatctggtcgggraaatctgtcaaattyaagaacctatcgccgacaaaatagcgataacactycaagaacaaactgggtaccttctgtaagcaatccaggaactacaaatactaacacaagcaacaacagcaacactaacagtcaagcaagtyaaagtaatgacattgatagtctcttgaaacagctctacaaactgcctttgagtcaacgccatgtrgaatctgatggccttattttcgacccagcgcaaatcacaagtcgaacmgcyarwggtgtwgcwgtvccdcayggwraycattaycacttyatyccttaykmwcaamtgtcwsmwttggaaraamgaattgctcgtattattccccttcgttatcgttcaaaccattgggtaccagattcaagaccagaasaaccaagtccacaaycgactccrgaacctagtccaagtccgcaayctgcaccaaatcctcaaccagctccaagcaatccaattgatgagaaattggtcaaagaagctgttcgaaaagtaggcgatggttatgtctttgagragaatggagttyctcgttatatcccagccaagratctttcagcagaaacagcagcaggcattgatagcaaactggccaagcaggaaagtttayctcataagctaggarctaagaaaactgacctcccatctagtgatmgagaattttacaataaggcttatgacttactagcaagaattcaycaagatttacttgataataaaggtcgacaagttgattttgaggytttggataacctgttggaacgactcaaggatgtctcaagtgataaagtcaagttagtggatgatattcttgccttcttagctccgattcgtcatccagaacgtttaggaaaaccaaatgcgcaaattacctacactgatgatgagattcaagtagccaagttggcaggcaagtacacaacagaagacggttatatctttgatcctcgtgatataaccagtgatgagggggatgcctatgtaactccacatatgacccatagccactggattaaaaaagatagtttgtctgaagctgagagagcggcagcccaggcttatgctaaagagaaaggtttgacccctccttcgacagaccatcaggattcaggaaatactgaggcaaaaggagcagaagctatctacaaccgcgtgaaagcagctaagaaggtgccacttgatcgtatgccttacaatcttcaatatactgtagaagtcaaaaacggtagtttaatcatacctcattatgaccattaccataacatcaaatttgagtggtttgacgaaggcctttatgaggcacctaaggggtatastcttgaggatcttttggcgactgtcaagtactatgtcgaacatycaaacgaacgtcckmaytcagataatggttttggtaacgctagygaccatgttcaaagaaacaaaaatggtcaagctgataccaatcaaacggaaaaaccaarcgaggagaaacctcagacagaaaaacctgaggaagawamssmwcrwgawgagwaaccrcaaagcgagaaaccagagtctccaaaaccaacagaggaaccagaagaagaatcaccagaagaatcaccagaggaatcagaagaacctcaggtcgagactgaaaaggttraagaaaaactgagagaggctgaagatttacttggaaaaatccagratccaattatcaagtccaatgccaaagagactctcacaggattaaaaaataatttactatttggcacccaggacaacaatactattatggcagaagctgaaaaactattggctttattaaaggagartaagtaa

SEQ ID NO: 3387 - DNA, 154 bp, Streptococcus pneumoniae
  misc_feature (1)..(154): tiling:Spneumo1:WAN024ANO; Cluster includes WAN024EOB-rc R 6.IG_455||||432690..432842|-|153 bp|Between spr0431 (+ str and) and spr0432 (cspR) (+ strand)|S.pneumoniae|R6|NC_0030 98.1|IG-rc|110
ctgcccggagtcaagctcagcaaacagcgtggttaaggcatcgttaacttacctcacaacaggtttgaagtaaatcagcgaaactactttcttagtmtaacactttcagaatcattgtcaatagaaaygacttrattttttcaattttttcaag

SEQ ID NO: 3388 - DNA, 114 bp, Streptococcus pneumoniae
  misc_feature (1)..(114): tiling:Spneumo1:WAN024DYI; Cluster includes WAN023SHQ NC_0 03098.1_2417||||1878995..1879108|+|114 bp|Glimmer 2.02 orf prediction|S.pneumoniae|R6|NC_003098.1|ORF|100
ctgcccttttttaggaaaaaatcaagacaaatctcctcaatyatgtctcgaacatcagaaattaagcaaaatcaccagaaggacagtatttcaactagcttttctggtaatttt

SEQ ID NO: 3389 - DNA, 827 bp, Streptococcus pneumoniae
  misc_feature (1)..(827): tiling:Spneumo1:WAN024D92; Cluster includes WAN0243UL spr1 254|pstB|15903297|NP_358847.1|1253023..1253826|-|804 bp|AB C transporter ATP-binding protein - phosphate transport|S. pneumoniae|R6|NC_003098.1|ORF|111
ctgcctaaaggagaagccatgtcaacatataactgggatgagaagcatatccttacctttcctgaagraaaagtagccctttctactaaggrtgtccatgtttaytatggtaaaaatgaatccattaaggggatkgatatgcaatttgaaagaaataaaattacagctttgattggyccgtcgggatcggggaaatcwacctacttacgcagtctcaatcgcatgaatgatacyattgatattgctaaagtaactgggcagattctctatcgtggaattgatgtcaaccgtccagaaatcaacgtttatgaaatgcgtaaacacattggaatggtttttcaacgycccaatccatttgctaagtcaatttaccgtaatattacctttgcgcatgaacgtgctggagttaaggataagcaagtcctagatgaaatcgtagaaacctcccttcgtcaggctgccctctgggatcaggttaaagacgatctccacaagtcagccttgaccttatcaggtggtcagcaacaacgtctctgtatcgctcgtgccatctctgttaagccagatatcctcttaatggatgagccagcytcagccttggatccgattgcgaccatgcaactagaagagaccatgtttgagctcaagaaaractttaccatcatcattgtaacgcataatatgcagcaggctgctcgtgcaagtgactatacaggcttcttttacttgggtgatttgattgagtatgacaagactgcaactattttccaaaatgccaagctacagtccaccaatgactatgtatctggtcactttggttarctaat

SEQ ID NO: 3390 - DNA, 132 bp, Streptococcus pneumoniae
  misc_feature (1)..(132): tiling:Spneumo1:WAN024DPW; Cluster includes WAN023SLA NC_0 03098.1_935||||733901..734032|+|132 bp|Glimmer 2.02 orf pr ediction|S.pneumoniae|R6|NC_003098.1|ORF|100
ctgcctatccgkattaaagaagaaacagaggaatactatgagcttcttcctgctcttataactgaaagaagcggaagaataggtatgtctgatctgatagccagcattgtgaaagacaagattctaggatac

SEQ ID NO: 3391 - DNA, 126 bp, Streptococcus pneumoniae
  misc_feature (1)..(126): tiling:Spneumo1:WAN024CM4; Cluster includes WAN023SDL NC_0 03028.1_878||||667907..668032|-|126 bp|Glimmer 2.02 orf pr ediction|S.pneumoniae|TIGR4|NC_003028.1|ORF|010
ctgcctctctggactgctttaaaggttttttactattctattatttctactagcacttgtcaagtaaaaacagctaaatccatgttgactgctattgaacacctcacaagactctttccaaaagaa

SEQ ID NO: 3392 - DNA, 168 bp, Streptococcus pneumoniae
  misc_feature (1)..(168): tiling:Spneumo1:WAN024BD9; Cluster includes WAN023YLU AL44 9928.1_94||||73515..73682|+|168 bp|Glimmer 2.02 orf predic tion|S.pneumoniae||AL449928.1|ORF|001
ctgcctcttttatggtggttgatactcttcgaaaatcaaattcaaactgcgtcagcttcaccttgccgtactcaagtacagcctgcggctagcttcctagtttgctctttgattttcattgagtatgaaatgagaagacaaaaagattgtcacaaacccctatttttt

SEQ ID NO: 3393 - DNA, 411 bp, Streptococcus pneumoniae
  misc_feature (1)..(411): tiling:Spneumo1:WAN024BGM; Cluster includes WAN023Z7Q AL44 9925.1_68||||60078..60488|-|411 bp|Glimmer 2.02 orf predic tion|S.pneumoniae||AL449925.1|ORF|001
ctgcgaaacaaaayatggtatartagttctatgaattatgaagcaagtaaacaactaactgatgcacgattkaaatgtcttgttggtgttcagcgcacsacttttgaagagatrttagctgtattaaaaacwgcttatcaacttaaacayrcaaaaggkggacgaaaacctaaattaagcctagaagaccttcttatrgccactcttcaatatgtgcgagaataccgcacttatgaasaaattgcggctgwttttggtatycacgaaagcaacttamtccgtcggakccaatgggttgaagtaactcttgttcaaagtrgtkttacgatttcaagaactcctctcagytctgaggacacggtaatgattgatagccattcccatcaatatcgtatctttggayatagccaa

SEQ ID NO: 3394 - DNA, 647 bp, Streptococcus pneumoniae
  misc_feature (1)..(647): tiling:Spneumo1:WAN024EZS; Cluster includes WAN02446S spr0 814||15902858|NP_358408.1|816411..817001|-|591 bp|Conserve d hypothetical protein|S.pneumoniae|R6|NC_003098.1|ORF|211
ctgcgygcrggtgttcttgrtgctaacgatggaattatttccattgctggtgtggttatcggrgttgccagtgccacgascaatatctggattatctttttatcaggwtttrcggctatcttagctggtgccttttcaatggctggtggagaatatgtatccgtttcaactccaaaagataccgaggaagctgccgtttcgcgagaaaaactcttgytagaccaagatagggaactagccaaaaaatccctctatgctkcttatatccaaaatggagaatkcaaaacttctgcccaactcttgacyaataagatctttcttaaaaatccactcaaggctctggtagaggaaaaatatgggattgagtatgaagaatttaccaatccttggcacgctgccatttctagcttcgttgcctttttccttagaagtttgcctccaatgctgtcagtgaccatwttyccaagtgawtaycgcatccctgctacygtccttatygtcggtgtrrcccttcttctcactggytacacwagtgcyagacttggaaargmyccracyaraacagctatgattcggaaccttgctattggtctcttracyatgggagttaccttcctgctcgracaacttttcagcatttarctaat

SEQ ID NO: 3395 - DNA, 692 bp, Streptococcus pneumoniae
  misc_feature (1)..(692): tiling:Spneumo1:WAN024D59; Cluster includes WAN0243XT spr1 138||15903181|NP_358731.1|1139817..1140473|-|657 bp|Hypoth etical protein|S.pneumoniae|R6|NC_003098.1|ORF|121
ctgctagccttgggtagcagttttcacttatgtttgaaatttttaaatcctatcaatttaatcaagaaaaggctcatgattatggttttatagaaaatagcgaagtctggacatatagttgccagattttgcaaggtgactttgtcatgactgtgtccatcactgctgataatgtgarctttcaagtctttgaccaagagactggtgacctctatcctcacgttyatatggaaagcatgaggggaagttttgtcggaaatgtccgtgaggcttgtctggagattctttaccagattcggaaggcttgttttgatgtgcaagattttatctgtcatcagactaagcgtatcatgactcaagttcaggaaaagtatggraaccagttggagtatctgtgggaaaaatcgcctgatacagctgtattgcgccatgaaggcaatcaaaagtggtatgccgtcttgatgaaaatctcttggaataagctggaaaagggcagagaaggacaagtggaagcagtcaacctcaagcatgaccaagtagctaatttgctttcacaaaaggggatttatccagccttccatatgagcaagcgctactggattagtgtgtcccttgatgatactttatcagatgaagaagtactggaattgatagaaaaaagttggaacttaacctctaaaaaaykaactaat

SEQ ID NO: 3396 - DNA, 797 bp, Streptococcus pneumoniae
  misc_feature (1)..(797): tiling:Spneumo1:WAN024CHH; Cluster includes WAN0244S5 spr0 045|purC|15902089|NP_357639.1|45545..46294|+|750 bp|Phosph oribosylaminoimidazole-succinocarboxamidesynthetase|S.pneu moniae|R6|NC_003098.1|ORF|221
ctgctatttattcggtyraattcttgtgttttttggttttttgtggtaaaatgtgctcaagtaatacgaaaggcgaactttaaaatgtcaaaacaattgatctattcgggaaaagctaaagatatctatacaactgaggatgaaaatcttattatttcaacttacaaggaccaggcgactgctttcaayggtgtcaagaaggagcagattgcaggtaagggagtcttgaataatcagatytcatcttttatttttgagaaattaaatgyggctggtgtggcgactcactttgtggagaaactttcagacacggaacaactcaataaaaaggttaagattattcctttggaagtcgtgctccgcaactatactgctggttccttttcaaaacgttttggtgtggatgagggaatcgccttggagactccgattgtcgaattttactacaaaaatgatgatttggatgatccatttatcaatgatgagcatgtgaaattcctacagattgcggrtgaccagcagattgcctacttgaaggaagaarcgcgtcgtatcaatgaactattgaaagtctggtttrctgagattgggcttaaattgattgactttaagctagagttcggttttgacaaggatggcaagattatcttggcagacgaattttcaccagataactgccgcttgtgggacgctgatggsaaccacatggataaggatgttttccgtagaggattgggagaactaaccgacgtttatgagattgtttgggaaaagttgcaggrwttraaataactaat

SEQ ID NO: 3397 - DNA, 1202 bp, Streptococcus pneumoniae
  misc_feature (1)..(1202): tiling:Spneumo1:WAN024CRI; Cluster includes WAN0244Q0 spr0 122|trmU|15902166|NP_357716.1|130562..131737|+|1176 bp|tRN A(5-methylaminomethyl-2-thiouridylate)-methyltransferase|S .pneumoniae|R6|NC_003098.1|ORF|111
ctgctcaagcgaccttcaatcgtgaagcacacacgaccttcaatcgtgaataaacgaatagatgggagacttaccatgagtgataactctaaaacacgtgttgtcgtggggatgagtggtggtgttgattcgtcggtgacggctcttttgctcaaggagcagggytmcgatgtgatcggtatcttcatgaagaactgggatgacacagatgaaaacggcgtctgtacggcgaccgaagattacaaggatgtggttscggtggcagaycagattggcattccctactactctgtcaattttgaaaaagagtactgggaccgcgtttttgagtatttcctagckgaataccgtgcagggcgcacgccaaatccggacgttatgtgcaacaaggaaatcaagttcaaggcctttttggactatgccatraccttgggggcagactatgtagcgactgggcaytatgctcgagtggcgcgtgatgaggayggyacygttcacatgcttcgtggcgtggacaatggcaaggaycagacctatttcctcagccaactttcgcaagaacaacttcaaaaaaccatgttcccactaggacatttgraaaagcctgaagtwcgmaractagcagaagaagcaggyctttcgactgctaagaagaaagactcgacagggatttgctttatcggagaaaagaactttaaaaacttyctcagcaactacctgccagctcagcctggtcgyatgatgactgtggatggtcgygatatgggcgagcatgcwggtctkatgtactatacratyggtcagcgtggcggactcggtatcggtgggcaacacggyggtgacaatgccccttggttcgttgtcggaaaagatctaagcaagaatattctctatgtaggmcaaggwttctaccatgattcgctcatgtcaacyagcctagargcyagycaagtccactttactcgtgaaatgccagaagagtttacgctagaatgtacggctaaattccgttaccgtcagcctgactctaaggtgaccgtycatgtcaaaggagamaagrcagargtyatctttgcggaaccacaacgcgcgattacaccaggacaggcagttgtcttttacgatggcgaagagtgtctaggtggyggtttgattgacaatgcttaccgcgatggacaagtttgtcagtacatttarctaat

SEQ ID NO: 3398 - DNA, 348 bp, Streptococcus pneumoniae
  misc_feature (1)..(348): tiling:Spneumo1:WAN024FLH; Cluster includes WAN023OV5 pne7 0_20||||18177..18524|+|348 bp|Type 32F1 capsule operon, Gl immer 2.02 orf prediction|S.pneumoniae||WAN01UCC2|ORF|000
ctgctcagagttctatatggttttgagtgcccacgtaaagctaaaattgggaaaaacgtcaatttttcacatcgtgggatgggaacagttgtaagtagtaatgctatcattggggataatgtgactatacaacatcatgtaacattaggaattaaaaacgataatgatagaattatcatcggggagaactgttttataggagcctatgcatttatcttaggaaatgtaaaaattggtgcaaattctaagattggagcaggtacgatggttttacatgatgtcccagatggaagcacagtagttaatcctgtggaactaaaagcacttgcttcaaaaaaagacgttcag

SEQ ID NO: 3399 - DNA, 309 bp, Streptococcus pneumoniae
  misc_feature (1)..(309): tiling:Spneumo1:WAN024CDH; Cluster includes WAN023MCA 3152 97_198||||96464..96724|+|261 bp|EGAD orf prediction|S.pneu moniae|R6|NC_003098.1|ORF|110
ctgctctataccaccgtttgtcaaggagtagtatttgcgcatgcgaccttggaactctctagaataggttgtcagaaagctattgccttccaattttttgagaatgggatagagtgtggattctttgatattagcgatsagcttaatggtttggctaatctcataaccataagaatcaccctgctccagtacrgccaagatgagaaattcaatcaaggcagaggatgttggaaagtacatgggaaacctccttttctaatgtgtaagatttttatatataatttttctacacatacattgtacatctaa

SEQ ID NO: 3400 - DNA, 99 bp, Streptococcus pneumoniae
  misc_feature (1)..(99): tiling:Spneumo1:WAN024DK5; Cluster includes WAN0244LS spr0 274|bglB-truncation|15902318|NP_357868.1|273803..273895|+| 93 bp|Phospho-beta-glucosidase, truncation|S.pneumoniae|R6 |NC_003098.1|ORF|110
ctgctcttgtttcaattgactataaatcgctataagaaaaaatcattttattggtataaagaagtgattgaaagtaatggcgaaacgttagataattag

SEQ ID NO: 3401 - DNA, 162 bp, Streptococcus pneumoniae
  misc_feature (1)..(162): tiling:Spneumo1:WAN024DO2; Cluster includes WAN02422J SP16 29||15901465|NP_346069.1|1529809..1529913|+|105 bp|hypothe tical protein|S.pneumoniae|TIGR4|NC_003028.1|ORF|121
ctgctcttttactttactatcataacctttggtgagtttatactaatttacttgctaatctatgaaacagttgctctggtsggcatggattctggtattagcatcaagcatattctacaaaaaatgaaaaacaaaaaactttcacaaaatcctykaactaat

SEQ ID NO: 3402 - DNA, 102 bp, Streptococcus pneumoniae
  misc_feature (1)..(102): tiling:Spneumo1:WAN024FHB; Cluster includes WAN023W7J AX57 0188.1_1||||1939..2040|-|102 bp|Glimmer 2.02 orf predictio n|S.pneumoniae||AX570188.1|ORF|000
ctgctgatgatgttgaagatggataaagggagtcaaatcttccttctctatcatcataagagtaatgttttgaagaccagctttgcctttgaaatccttgta

SEQ ID NO: 3403 - DNA, 732 bp, Streptococcus pneumoniae
  misc_feature (1)..(732): tiling:Spneumo1:WAN024CSV; Cluster includes WAN023L5C 3151 53_2382b||||1273030..1273344|+|315 bp|EGAD orf prediction| S.pneumoniae|R6|NC_003098.1|ORF|220
ctgcttcttacctggcgtcgacactttttccgcattattagacagcttaatcgtattgcgcatctgaccagtttcatcttcgattgcaacaatcttgtaaaccgccccaagagctggctggtcataggctgtaatcagcttggtacccacgccccagacatcaatcttggccttttgcatcttgaggttgaggatagtattttcgtccaaatcattagaagcataaatcttagcctctgtaaatccagcctcgtccagttgctgacggactttcttagaaatgtaggcaatatccccagagtcaatccgcacacccataaagttaatctratcacccagctcacgcgccacctgaatggcagctggtacaccgatgcgaagggtgtcataggtatccacaagaaagacacaatttttgtgggtcgcagcgtaagccttgaaagcttcatagtcattgccataaacctgtaccaaggcatgggcatgggttcccaaaacaggaatgtcaaagagcttacccgcacgcacgttgctggttccattggcgccaccaatcacagctgcgcgtgttccccagatggccgcatccatttcttgagcccgacgtgtcccaaactccatcaagggttcatcttcgataaccgaacgaatacgagctgccttcgtcgccaccaargtctggtagttgacgatgttcaaaagagccgtttcgaccaactgacattgggctag

SEQ ID NO: 3404 - DNA, 282 bp, Streptococcus pneumoniae
  misc_feature (1)..(282): tiling:Spneumo1:WAN024FCP; Cluster includes WAN0243JD spr1 659||15903701|NP_359251.1|1632631..1632900|-|270 bp|Hypoth etical protein|S.pneumoniae|R6|NC_003098.1|ORF|141
ctgcttttggtcagcatcacgacttatcaaaacaatcaagtttctaacaataaatttcaaacttcacttcatttcatcgaggttgtttccaaagatttgkrastarwcaagtcagaagtctatgttaatacttccacaaacacagatggcgcacttatcaaggtgggagatcgctattatcgtgccctaaayggaagtgagccagacaagtacctgttagagaaagtcgaattgtataagacagacgcaattgaactggtggatgtgaacaaaykaactaat

SEQ ID NO: 3405 - DNA, 258 bp, Streptococcus pneumoniae
  misc_feature (1)..(258): tiling:Spneumo1:WAN024CKR; Cluster includes WAN024348 SP01 71||15900108|NP_344712.1|165235..165468|+|234 bp|ROK famil y protein|S.pneumoniae|TIGR4|NC_003028.1|ORF|010
ctggaaatagataagaagttgattagtattgacctaggtggtacaaatattaagattactgttctttcaaatgacggtgagattgaaactttgtggagtattacaacagatacaagtgagaaaggttctcaaattatatcggacatcatcagttctattaaaaataaattgaccgaacggaatattcctgatagcgaccttcttggaatcggtatgggaagttgctcatcatactttccttgtaaatcactarctaat

SEQ ID NO: 3406 - DNA, 1901 bp, Streptococcus pneumoniae
  misc_feature (1)..(1901): tiling:Spneumo1:WAN024EYT; Cluster includes WAN0243R1 spr1 382|aliB|15903425|NP_358975.1|1363510..1365468|-|1959 bp|A BC transporter substrate-binding protein - oligopeptide tr ansport|S.pneumoniae|R6|NC_003098.1|ORF|111
ttgagcgcgtgtggaaattctagcackgcrtcaaaaacmtayaactatgtttattcaagtgatccatctagyttgaactatctagcagaaaaccgcgcavsaacmwmygatattgtkrcmaatytggtagayggkytmwtrgaaaatgaccaatatgggaatatkatkccatcmttdgcagargattggactgtttctcaggayggtttgacctatacctacaaacttcgtaaggatgccaagtggtttacttctgagggagaagaatatgcrcctgtaactgcccaggattttgtgacaggwttssaatatgcagctgataaaaaatcagaagcyttgtatctagtgcaggactctgttgcwggtttggatgactatatcactggtaaaacaagcgacttttcaactgtcggtrtcaaggcwcttgatgaycaaacsgttcaatayacyttggytmraccagaacyttactggaaytcaaaaacacytgcaacsatwcttttyccwgtyaatgcagatttcytgaaatcaaaaggggatgattttggsaaggyrgayccwkctartattttgtacartggacctttcttratgaaagcwyttgtytcaaaatctgyyatygaatayaagaaaaaycctaaytactgggatgctaaraatgtctttgtagacgatgtgaaattgacctactatgatggtagygaccaagawkcwctkgwwcgtaaytttacagmyggwgcytatactaygsctcgtctytwtcckaayagytcmagytwtgaagggattaaagaaaaatacaaarayratatcatctayagtatgcarratkcwacktcwtattwctkkaattttaacctagatagsaagtcttayaawtwtacttctaaracrasygacattgaaaagaaatcracycaggaagcagttctcaataaaaacttccgtcaggctatcaattttgcttttgacagaacatcttatggggctcagtctgaagggaaagaaggtgcaacaaagattttgcgtaacctagtggttcctccaaactttgtcagtatcaagggaaaagactttggtgaagttgtagcctctaagatggtcaactatggtaaggaatggcaaggtatcaactttgcggatggtcaagacccttactacaatcctgagaaagccaaggctaagtttgcggaagctaagaaagaactcgaagcaaagggtgttcaattcccaatccacttggataagactgtggaagtaacagataaagtaggcatacaaggagttagttctatcaaacaatcaattgaatctgttttaggttctgataatgtagtgattgacattcagcaattaacatcagatgagtttgacagttcaggctactttgctcaaacagctgctcagaaagaytatgatttatatcatggcggttgggracctgattaycaagayccrtcaacytatctsgayatyttkartrykaakagtggmggadtkctrcmaaatcttggwytagarccwggwgarkyyaatgamaargctaaggcrgttggrctkgatryctatactcaaatgttggaagaagctaataaagarcaagatccrgccaaacgttatgagaaatatgctgatattcaagcttggttgattgatagttctttagttcttccaagtgtttcgcgtgggggaacmccatcattgagaagaaccgtaccatttgctgstgcctatggtttaaccggtacaaaaggggttgaatcatataaatacctcaaagtacaagataagattgtcacaacagacgaatatgcaaaagcyagagaaaaatggttgaaagaaaaagaagaatccaataaaaaagcccaagaagaattggcaaaacatgtcaaataactaat

SEQ ID NO: 3407 - DNA, 1169 bp, Streptococcus pneumoniae
  misc_feature (1)..(1169): tiling:Spneumo1:WAN024FS3; Cluster includes WAN0243U9 spr1 266|hemN|15903309|NP_358859.1|1262170..1263300|-|1131 bp|C oproporphyrinogen III oxidase|S.pneumoniae|R6|NC_003098.1| ORF|221
ctggaatctagtctttgtggtataataattactatgcagaaaaaaccaacgtcagcctatgtgcacatcccattttgtacccagatttgttattattgtgatttttcaaaggtcttcatcaaaaatcagccagtcgacagctatttagagcatctgctggaagagtttcgttcttatgatattgaaaagttgtcaaccctttatatcggtggtggaacaccgacagccctgtcggctccgcaactggaggtgttactgaatggcttgactaaaaacttggayttgtctgtcttggaagagttgaccattgaagccaatccaggcgatttggatgcggataagatagctgttttgaaaaattcggctgtcaatcgtgtttcgctargtgtccagacctttgatgataagatgttgaaaaagattgggcgcagtcatttggagaaggatatttatgraaatatcgatcgyctgaaactggctggttttgacaayatctccaytgakttgatttatgctctgcctggtcagaccatggagcaagtaaaggaaaatgtggctaaagccattgraytggatattccccacatgagtttgtatagtttgattttagaaaaccatacggtctttatgaaccggatgcgacgtgggaaattgcctctgcctaaggaggaactagaagcggagatgtttgagtacatcattgcagagctggagcgagcgggttttgagcattatgagatttctaatttctccaaacccggytttgaaagtcgtcayaatctcatgtactgggacaatgctgaatactatggtattggtgcaggggcatctggttatgtcaatggagtacgctataaaaatcatggtcccattcgtcattatctcagtgcggttgaggaaggcaatgcttgtattacagaagatcacctgagtcaaaaggagcaaatggaagaagaaatrttcttgggactccgcaagaaatccggggtttccatggcgcgatttgaggaaaaatttggacagtcttttgctggactttatggagaaattgtcagagatttggttcaacaaggcctcatgcagattgagggtgaccacgttcgcatgacaaagagaggtctctttttgggagatactgtagcagaacgatttattttggagtarctaat

SEQ ID NO: 3408 - DNA, 159 bp, Streptococcus pneumoniae
  misc_feature (1)..(159): tiling:Spneumo1:WAN024DTH; Cluster includes WAN023SNB NC_0 03098.1_90||||75083..75241|-|159 bp|Glimmer 2.02 orf predi ction|S.pneumoniae|R6|NC_003098.1|ORF|100
ctggacaaaaaacaagcctacatcgtcagctgccacagtggtttgcgcagctatatcgcagagcctatcctcaagcaagcaggatttaccgyccaaaaccttgacggcgcttattcactatacaaaatggytaacccagaaggagtagaatatggaaac

SEQ ID NO: 3409 - DNA, 811 bp, Streptococcus pneumoniae
  misc_feature (1)..(811): tiling:Spneumo1:WAN024CTF; Cluster includes WAN0243HJ spr1 725|ydfG|15903767|NP_359317.1|1704954..1705715|-|762 bp|Ox idoreductase|S.pneumoniae|R6|NC_003098.1|ORF|111
ctggactgcctaggaacytgwyagaycwgmtagaaggaaataagatggcaaaaaatgtwktgattacrggagcracmtcaggaatcggtgaagcgattgcgcgtgcttatctggagcagggtgaggatgtcgttctaacaggacgacggatagacagaytagaaryyctyaagkcggagtttgcagwaasytttccaaatcaaacmgtytggacttttcymctakatgtsacggatatgrymatggtraagactgtytgctctgatattytagaaacgataggkmrgattgayatcytggtcaayaacgcmggactggctcttgrcttrgctccctatcaagactatgargagttggatatgytgaccatgttggataccaatgtyaaaggtytgatggcrgtyactcrctgtttcttgccagcaatgrtaaaagycaatcaaggtcayrttatcaatatggggtcaaccgcaggaatytaygcctatgctggtgcmgctgtttactcagcyaccaaggcdgcrgttaagaccttttcrgatggactgcgaattgataccatcgcaacggatatcaaggtgacraccattcagcctggrattgtcgaaacagatttytcwacwgtkcgttttcatggtgataaagarcgrgctgcgtccgtttaccaaggaatagaagcyttgcaagctcaggatattgcagayacagtagtctatgtgacyagtcarcctcgycgtgttcagattacagatatgaccattatggccaatcaacaggcgacaggtttcatgrttcataaaaaataactaat

SEQ ID NO: 3410 - DNA, 867 bp, Streptococcus pneumoniae
  misc_feature (1)..(867): tiling:Spneumo1:WAN024D2I; Cluster includes WAN0243G1 spr1 779|endA|15903821|NP_359371.1|1753876..1754700|-|825 bp|DN A-entry nuclease (competence-specific nuclease)|S.pneumoni ae|R6|NC_003098.1|ORF|111
ctggagaaccagcctttttctaaagataaggagaaatatgaacaaaaaaacaagacagacactaatcggactgctagtgttattgcttttgtctacagggagctattatatcaagcagatgcmgtcgrcasctaatagtccyaaaaccaakcttagtcagaaaaaacaagcgyctgaagctcctagtcaagcattggcagagagtgtcttaacagacgcagtcaagagtcaaataaaggggagtctggagtggaatggctcaggtgcttttatcgtcaatggtaataaaacaaatctagatgccaaggtttcaagtaagccctacgctgacaataaaacaaagacagtgggcaaggaaactgttccaaccgtagctaatgccctcttgtctaakgccactcgtcagtacaagaatcgtaaagaaactgggaatggttcaacttcttggactcctccaggttggcatcaggtcaagaatctaaagggctcttatacccatgcagtcgatagaggtcatttgttaggctatgccttaatcggtggtttggatggttttgatgcctcaacaagcaatcctaaaaacattgctgttcagacagcctgggcaaatcaggcacaagccgagtattcgactggtcaaaactactatgaaagcaaggtgcgtaaagccttggaccaaaacaagcgtgtccgttaccgtgtaaccctttactacgcttcaaacgaggatttagttccctcagcttcacagaytramgccaagtcttcggatggagaattggaattcaatgttctagttcccaatgttcaaaagggacttcaactggattaccgaactggagaagtaactgtaactcagtaactaat

SEQ ID NO: 3411 - DNA, 126 bp, Streptococcus pneumoniae
  misc_feature (1)..(126): tiling:Spneumo1:WAN024B7S; Cluster includes WAN023POF pne2 4_21||||20472..20597|-|126 bp|Type 12B capsule operon, Gli mmer 2.02 orf prediction|S.pneumoniae||WAN01UCJ2|ORF|000
ctggagatttttcaatatacttcgttattgggcggttactttcgaaactttgaaaacttcaaaaaacggatttttatcgctctgaacatcaaaaaagaaaggacgaaatttgtcctttctcaagct

SEQ ID NO: 3412 - DNA, 141 bp, Streptococcus pneumoniae
  misc_feature (1)..(141): tiling:Spneumo1:WAN024DL6; Cluster includes WAN023YH3 AL44 9930.1_49||||40945..41076|-|132 bp|Glimmer 2.02 orf predic tion|S.pneumoniae||AL449930.1|ORF|000
ctggagccgcttgattttggttacctcctgcatttgcagtattggtattctgttgagcaggytgttggacctgctgctgagcaacaggctgttgaacctgttgagctctttgtgaacaagctactaagagacctaactaat

SEQ ID NO: 3413 - DNA, 87 bp, Streptococcus pneumoniae
  misc_feature (1)..(87): tiling:Spneumo1:WAN024DT8; Cluster includes WAN023SMW NC_0 03098.1_189||||149264..149350|+|87 bp|Glimmer 2.02 orf pre diction|S.pneumoniae|R6|NC_003098.1|ORF|110
ctggaggatattttgagctcacacytcatcgttccagtggctgttccccaagctcgtgtactgcccaaaaaagttagacattctatt

SEQ ID NO: 3414 - DNA, 267 bp, Streptococcus pneumoniae
  misc_feature (1)..(267): tiling:Spneumo1:WAN024C9E; Cluster includes WAN023QZE cont ig_1394_7||||6016..6282|-|267 bp|Glimmer 2.02 orf predicti on|S.pneumoniae|670|WAN01UDYH|ORF|000
ctggataaaacagcgcaagtggctatggacttgggctttgactactttggttcagccttgaccatcagtcctcataagaattctcaaactatcaatagcatcggaatcgatgtgcaaaaaatttacacgccccactatyttcccaacgatttcaagaaaaatcaaggctacaaacgttcagtagagatgtgtgaggagtatgatatctatcgtcaatgttattgtggctgcgtctatgcagcccaagcccagaatattgacctggtt

SEQ ID NO: 3415 - DNA, 459 bp, Streptococcus pneumoniae
  misc_feature (1)..(459): tiling:Spneumo1:WAN024B23; Cluster includes WAN023K3A 8279 6_417||||231381..231608|-|228 bp|EGAD orf prediction|S.pne umoniae|TIGR4|WAN01UC25|ORF|021
ctggataagcttgtgaaatctcctattcctaaagcccctttagcgcataactttggctcagcttctattatcgctcacaccatccatcagaagtttaatctgaaggtacccaattatcgccaagaagaagattgggctaggatgggtttaccaatcacacgtaaggaaatctctaattggcatatcaagrcgagtcaatactatttggagcccctttataacctcttgcgagagagactattgactcagcccttacttcatgcggatgaaacytcytatmgggtkctagagagtgatagycakctgacytactattggacttttttgtcaggtaaagcagagaaacaagggattacgctttaccaccatgatcagtgtcgaagtggttcagtagtacaagaattcctaggagattattctggctatgtkcattgtgatatkttgcggcagctaactaat

SEQ ID NO: 3416 - DNA, 78 bp, Streptococcus pneumoniae
  misc_feature (1)..(78): tiling:Spneumo1:WAN024CMX; Cluster includes WAN023SGJ NC_0 03028.1_116||||91599..91676|-|78 bp|Glimmer 2.02 orf predi ction|S.pneumoniae|TIGR4|NC_003028.1|ORF|010
ctggatactaagagaaatcaaaaaagcactaagggagaacgtcccaaagtgcttaatatcaaggcctatcttattcaa

SEQ ID NO: 3417 - DNA, 272 bp, Streptococcus pneumoniae
  misc_feature (1)..(272): tiling:Spneumo1:WAN024D38; Cluster includes WAN0243GY spr1 746||15903788|NP_359338.1|1718122..1718382|-|261 bp|Hypoth etical protein|S.pneumoniae|R6|NC_003098.1|ORF|111
ctggatatgagrgagcgctctgcyacaggtgctcaagrtttaagtaagtccattaaaaagcatttgaatgaccttacccgtttgacagcttccttgctaggagatgaaaagttatcggctataacatcaagtagtgcggtaaaagcagacatgcaccgctttgtgatagaattagagcctgtgaagtcaactattcttcaaaatratgacatttcattggatcaaaatgaaatttttgaaattctgaaaaattttytcgatggttaactaat

SEQ ID NO: 3418 - DNA, 972 bp, Streptococcus pneumoniae
  misc_feature (1)..(972): tiling:Spneumo1:WAN024CFA; Cluster includes WAN023RWA cont ig_1609_31||||20669..21640|-|972 bp|Glimmer 2.02 orf predi ction|S.pneumoniae|670|WAN01UDCD|ORF|001
ctggcaacagcatttagtgggagcaggacgaatcaaacaatgagaaaggaagatttaatgatgaaatttagaaaaaatcagaataaagaaaaacagataccaaaggaaaagaaacctcgtgtctactataaggtcaatcctcataaaaaggttgtgattgccttgtgggtacttttagggcttagtttcagctttgcgatattcaagcactttacagctatagatactcatactattcacgaaacaactatcatagaaaaggaatacgttgatactcatcatgtagaaaattttgtagagaactttgcgaaagtctactattcatgggagcaatccgataagtccattgataatcgaatggaaagtctaaaaggctatctgacagatgaacttcaagctctcaatgttgatacagtacgcaaagatattcctgtatcgtcttctgtaagaggatttcagatatggacggtagagccaactggcgacaatgagtttaatgtaacctacagtgtagaccagctcattacagagggagaaaatacaaagaccgtccactctgcttatatagtgagtgtctatgtagatggttctggaaatatggtactggttaagaatccgaccattaccaacatacctaagaaatcaagttataaaccaaaagccattgaaagtgaggggacggttgattccattacaaccaatgaaatcaatgagtttttaacgacgttcttcaagctctatcctacagcgacagccagtgaactttcctactatgtgaatgacgggatattaaaaccaatcggaaaagagtacatctttcaagaactggtaaatcctattcacaatcgtaaggataatcaagtcacggtatcgctgacagtggagtatatcgaccagcagaccaaagcaacgcaggtatctcaatttgatttggtacttgaaaagaacgggagtaattggaagattatagaa

SEQ ID NO: 3419 - DNA, 1152 bp, Streptococcus pneumoniae
  misc_feature (1)..(1152): tiling:Spneumo1:WAN024CGJ; Cluster includes WAN023S41 cont ig_358_1||||30..686|+|657 bp|Glimmer 2.02 orf prediction|S .pneumoniae|670|WAN01UD96|ORF|000
ctggctaagttcgctggttttgcaatccttggtaagaaattacttgatgttgggatgtattcaacgcagacggctcttgaagtatcagcgtctatgaaccaaatcaagcgacagatgggcgagagttcgcaatctttcttaaaatgggttaacgataatgccaacgctatgaatatgggtgtgggtgaggctaccaactacggtgcagtctactcaaacttattttctggatttatcaaagataccaacaagctaagcgcctataccgctaagatgttgcagacatcggcagttgttgctgaaggttcagggcgcacgattacagacgttatggagcggattcgctcaggtttactagggaacaccgaagcgattgaggacctaggaatcaacgtcaacgtggctatrattgagtccactgaagcctttaagaagttcgcaaacggacagagctggcaacagttggattaccaaacccagcaacaaatccgccttatggctattctggaacaggctacagccaagtatggggataccttgtctaattctgtaaatggtcgtatcagcctatttaagtcgctgatgaaggacgcagcattgaaccttggtaactctatgttaccgattatcaatgccattatgcctgtcttgaactcttttgctatggtcttaaagaacgttactgctaaactcgctgagtttatcgctttgatgttcaacaagaaagcaacagtgaaagatggtgttggtggagcagttggagacatgggtaacgccatgaaggatgctgcaggcggagcaggagaccttgctgacgcagtagacgacgctggagattcagcaggaggacttgctgataatcttggagactcagccaaaaacgctaagaaagctgctaaagagttgctaggtcttttgggatttgatgagattaacatcttgcaaaaaccaaaagacgacgatgcaggcggttctggaggaggtggcaaaggtggtaaaggaaagggaggcggtggcggacctttcaaagacatcttgccagaagtcgagttgaccgacatggacaacaaattcaagagcatttttgatggtcttggagataagctcaaagggttgtttgacctcttcaagaaaggttttgatgcagctaac

SEQ ID NO: 3420 - DNA, 150 bp, Streptococcus pneumoniae
  misc_feature (1)..(150): tiling:Spneumo1:WAN024DK6; Cluster includes WAN023SDE-5 NC _003028.1_969||||730883..731212|-|330 bp|Glimmer 2.02 orf prediction|S.pneumoniae|TIGR4|NC_003028.1|ORF|011
ctggctagctttacgagctttcttaagatctggtttccaaaatactttgagtacacttatggtattgatgcccctaaacatctaaaaactctggtagaaaaagggtatgctcttgtcgaaacttcttttgactcacttgaccatctaaat

SEQ ID NO: 3421 - DNA, 141 bp, Streptococcus pneumoniae
  misc_feature (1)..(141): tiling:Spneumo1:WAN024DQ9; Cluster includes WAN023SDB NC_0 03028.1_974||||732657..732797|+|141 bp|Glimmer 2.02 orf pr ediction|S.pneumoniae|TIGR4|NC_003028.1|ORF|011
ctggctgatatcatttactacaccgtcgcaatcgtagctattaatcatattgaccttaccaagactgtctttgagaaagacaaaaccgcagccrttaattaccaacataaacatratttggaaggattwttgaagggaaag

SEQ ID NO: 3422 - DNA, 78 bp, Streptococcus pneumoniae
  misc_feature (1)..(78): tiling:Spneumo1:WAN024DNG; Cluster includes WAN023SI4 NC_0 03098.1_2190||||1707256..1707333|-|78 bp|Glimmer 2.02 orf prediction|S.pneumoniae|R6|NC_003098.1|ORF|111
ctggcttcatcaggtaagatgcttcgcaatacctacacacctgatrgttactacgttggcaacttaggtgcctggcaa

SEQ ID NO: 3423 - DNA, 1343 bp, Streptococcus pneumoniae
  misc_feature (1)..(1343): tiling:Spneumo1:WAN024FUQ; Cluster includes WAN0243VA spr1 229|aroA|15903272|NP_358822.1|1226334..1227629|-|1296 bp|3 -Enolpyruvylshikimate-5-phosphate synthetase|S.pneumoniae| R6|NC_003098.1|ORF|121
ctggctttttatgataaaataggtaaaagtattgcaagtatgaggtccagtatgaaactaaaaacaaayattcgccatttacatggtaktwtsmkcgtcccaggtgacaagtctatcagccaccgttccattatctttggaagtttggctgagggtgagaccaaggtttatgatattctgcgaggtgaasacgtyctttcgaccatgcaggtttttcgtgaccttggtgttgaaattgaggataaagatggggktattaccrttcaaggtgtaggcatggctggcttaaaagcgccrcaaaatgcccttaatatgggaaattctggcacctcgattcgcctgatttcaggtgtccttgctggtgcagatttcgaagtagagatgtttggagatgatagtctttcmaaacgtcytatggaccgtgtgacccttccactgaaaaaaatgggcgtcagcatytcaggrcaaactgaacgagacttgcctccccttcgcttaaaagggacgaaaaacctaagacctattcattatgagttgccaattgcctctgcccaagtcaagtcagccttgatgtttgcagccttacaagctaagggggagtcagttattatcgaaaaagagtrcacccgtaatcatactgaagatatgttgmaacaatttggtggtcatttaagtgtggayrgtaagaaaatcacagtccargggccacaaaaattgacaggacagaaggtggtcgtaccaggagatatttccagtgcagccttttggttagtcgcaggtttgattrhtccaaattctcrtctagtgctgcagaatgtgggratmaacgaaackcgyacyggtattattgatgtcattcgtgccatgggtggaaaattrgaartwactgaaatcgatccagtcgctaaatctkcwaccttgaytgttgagtcttctgacttgaaaggaacagarattkgtggcgctttgattccacgwttgattgatgaattgccyattattgccctrcttgcgacycaagcccaaggtgtaacagttatcaaggatgctgaggarctcaaggtcaaggaaacagaccgtattcaggttgtggcagacgccttaaatagtatgggagcagatattactcctacggcagatgggatgattatcaaaggraaatcagctcttcacggtgctagagtcaatacgtttggtgaccaccgtatcggcatgatgacagctatcgcagccctmttggttgcagatggagaggtggagcttgaccgtgcagaagccatcaataccagctatcctagtttctttgatgatttggagagcttgattcatggstaaskwrttat

SEQ ID NO: 3424 - DNA, 1307 bp, Streptococcus pneumoniae
  misc_feature (1)..(1307): tiling:Spneumo1:WAN024CUT; Cluster includes WAN0244SP spr0 025|radA|15902069|NP_357619.1|25849..27111|+|1263 bp|DNA r epair: sensitivity to gamma and UV radiation|S.pneumoniae| R6|NC_003098.1|ORF|121
ctgggacgttgccccaactgtgggtcttggtcttcttttgtggaagaggttgaggttgccgargtyaagaatgcgcgtgtgtccttgacaggtgagaaaaccaagcccatgaaactagctgaggtgacttccatcaatgtcaatcgaaccaagacggagatggaggaattcaaccgtgtgcttggaggcggagtkgtaccaggaagtctcgtcctyatcggtggggatcctgggattgggaaatcaactcttctcctacaagtctcaacccagttgtcccaagtggggacagttctctatgtcagtggggaggagtctgcccagcagattaaactacgtgcagagcgcttaggtgatwttgatagtgagttttatctctatgcagagaccaatatgcagagtgttcgtgcagaagtggagcgtatmcagccagactttctcattattgattccatccagaccatcatgtctcctgagatttcaggggtgcaggggtctgtttctcaggtrcgtgaagtgaccgctgaactcatgcagttggccaagaccaataacattgccatctttatcgtaggtcatgtgaccaaagaaggaaccttggctgggcctcgtatgttggagcatatggtggatacggtgctttactttgaaggggagcgtcaccacacctttcgtattttgagagcggtcaaaaatcgttttggttccactaatgagattgggatttttgagatgcagtcgggcggcttggttgaggtactcaatccgagtcaagttttcctagaagagcgtttggatggggcgactggttcctccatcgttgtaaccatggaagggacgcgtccgattttggcggaggttcaggctttggtaacaccgaccatgtttggaaatgccaagcgtactacgacaggacttgattttaaccgtgctagcttgattatggctgttttggaaaaacgggcagggcttctcttgcaaaatcaggatgcctatctcaaatctgctggtggtgttaaattggatgaacctgcsattgacttggctgttgcagttgctattgcttcgagctacaaagacaagccaactaatcctcaggaatgttttgtcggagaactgggcttgacaggagagattcggcgcgtgaatcgtattgagcaacgcatcaacgaagctgctaaactgggctttactaagatttatgtacctmagaattccttgacaggaatcactctgcctaaggaaattcaggtcattggcgtgacaacgattcaggaagtyttgaaaaaggtctttgcataactaat

SEQ ID NO: 3425 - DNA, 129 bp, Streptococcus pneumoniae
  misc_feature (1)..(129): tiling:Spneumo1:WAN024DTA; Cluster includes WAN023SXD BD00 3785.1_5||||5249..5350|+|102 bp|Glimmer 2.02 orf predictio n|S.pneumoniae|ATCC55840|BD003785.1|ORF|000
ctgggctgtttcccttacgtgacatggatgcttgaattcccttaytctctaggaaccgatgataagaatcgtgttgrtattgccagccttggtcactatggagaatcgtattctcgtagtgcttctctk

SEQ ID NO: 3426 - DNA, 839 bp, Streptococcus pneumoniae
  misc_feature (1)..(839): tiling:Spneumo1:WAN024GAQ; Cluster includes WAN02447Z spr0 771|ABC-NBD|15902815|NP_358365.1|765098..765889|+|792 bp|A BC transporter ATP-binding protein - unknown substrate|S.p neumoniae|R6|NC_003098.1|ORF|111
ctggggaaatcagacgtttttctagtaagtactgtaaaagttttgaaaaagaaaggaactatcatgtcagtawtagagatyaaagatcttcacgttgagattgaaggaaaagaaattttaaaaggggttaacctgaccctgaaaacaggagaaattgccgctatcatgggaccaaatggtacaggtaaatcgactctttctgccgctatcatgggaaatccaaactatgaagtaactaaaggtgaagttttgtttgatggcgtaaacatccttgagttggaagtggatgagcgtgcgcgtatgggacttttccttgctatgcaatacccatcagaaatccctggaattaccaatgctgagtttcttcgtgccgctatgaatgcgggtaaagaagrtgatgagaagatttcagttcgtgagtttattactaagctagatgaaaaaatggaattgctyaacatgaaagaagaaatggcagagcgttacctcaacgaaggcttctctggtggtgagaaaaaacgcaatgaaattctycaacttttgatgttggagccaacatttgctcttttggacgagattgactcaggtcttgatattgacgctcttaaagttgtgtctaaaggtgtcaatgccatgcgtggtgaaggttttggtgctatgatcatcactcactaccaacgtcttttgaactatatcacacctgatgtggtacacgtgatgatggaaggtcgtgttgtcctttctggtggtccagaattggctgcgcgtttggaacgtgaaggatacgcaaaattagctgaagaacttggctacgactacaaggaagaattgtaactaat

SEQ ID NO: 3427 - DNA, 1028 bp, Streptococcus pneumoniae
  misc_feature (1)..(1028): tiling:Spneumo1:WAN024CQF; Cluster includes WAN0244SD spr0 037|plsX|15902081|NP_357631.1|37744..38736|+|993 bp|Involv ed in fatty acid/phospholipid synthesis|S.pneumoniae|R6|NC _003098.1|ORF|121
ctggggacaattactaaaagaggaaaagaaatgaaaaaaatcgcagtagatgccatggggggcgattacgcacctcaggccatygttgagggtgtcaatcaagccctatctgacttttcagatatcgaggttcaactytacggagatgaagctaaaatcaagcmmtatctgacagcgacagagcgcgtcagcattatccatacggatgagaagattgattcggatgatgaacctacgagagctattmggaataagaaaaatgccagtatggtattggcagccaaggctgtcaaagatggtgaagcagacgctgtcctttcggctgggaatacaggtgcyttgttggcwgcwggattcttcatcgtgggtcgtatcaagaatatcgaccgtcctggrctyatgtcdachttgcckacygtwgatggraarggwtttgacatgctwgacctyggtgcyaatgcrgaaaatacagcccagcacctccatcaataygckgtyctaggwtcyttctatgcyaaraatgtycgtggcattgcgcaaccacgygttggyttgctyaayaacggaacagagagtagcaagggcgayccgcttcgtaaggaaacttatgaattactrgyggctgatgaaagtttgaactttatcggaaaygtggaagsgcgtgatttgatgaatggygttgcagatgttgttgtggcagatggtttcacgggaaacgctgtgctcaaatccatcgaagggacagctatgggaatcatgggcttgctcaagacagctattacaggtggtggycttcgagcgaaactaggtgccctccttctcaaggacagcctcagwggtttgaaaaaacagctcaatyattcagatgttggtggagcggtcttgtytggtgtyaaggcacctgttgtcaagactcatggctcaagcgatgccaaggctgtttatagtacgattcgycagatycgtaccatgctagaaacagamgtrgttgcccagactgcgcgtgaattttcaggagaataactaat

SEQ ID NO: 3428 - DNA, 518 bp, Streptococcus pneumoniae
  misc_feature (1)..(518): tiling:Spneumo1:WAN024CY8; Cluster includes WAN0243AJ spr1 978|adcR|15904019|NP_359569.1|1969116..1969616|-|501 bp|Tr anscriptional repressor for Zn(2+)-responsive expression|S .pneumoniae|R6|NC_003098.1|ORF|111
ctggtaaacaaaatgtcaaagaatagtatttttctcttaaaaaagagaagtctaaaaggaaaggagtcagatatgagacagctagcaaaggatatcratgcttttttgaatgaggtgattttgcaggcggaaaatcagcatgaaatcctaataggtcattgcactagygaggtggccctgaccaatactcaggagcatatccttatgctcttgtcagaggaatctttaacaaattcagaattggcccgtcgtctcaatgtcagtcaggcggcagttaccaaggccattaagtctttggtcaaggaagggatgttggaaacatctaaagattctaaagatgcgcgtgtgattttttatcagttgactgacttggctcgtccaatcgctgaggagcaccaccatcaccatgagcatacacttttaacctatgaacaagtggcgactcagtttactccaaatgaacaaaaagtgattcagcggtttttgactgctttagtaggagaaatcaaataactaat

SEQ ID NO: 3429 - DNA, 998 bp, Streptococcus pneumoniae
  misc_feature (1)..(998): tiling:Spneumo1:WAN024EW6; Cluster includes WAN0243E1 spr1 851||15903893|NP_359443.1|1826479..1827465|-|987 bp|Hypoth etical protein|S.pneumoniae|R6|NC_003098.1|ORF|221
ctggtartggtagtatttacaggttcaactgttgaagaagcaatccagaaaggattgaaagaattagatattccaagaatgaaggctcatatcaaagtcatttctagggagaaaaaaggctttcttggtctatttggtaaaaaaccagcccaagtggatattgaagcgattagtgaaacgactgttgtyaaagcaaatcaacaggtagtaaaaggcgttccgaaaaaaatcaatgatttgaacgagcctgtgaagacggttagtgaagaaaccgttgaccttggtcatgtggttratgctattaaaaaaatagaggaagaaggtcaaggtatttctgatgaagtcaaggctgaaatcttaaaacatgaaagacatgccagcactatcttagaagaaactggtcacattgagattttaaatgaacttcaaatcgaggaagcgatgagggaagaagcaggcgctgatgaccttgaaactgagcaagaycaarctgaaartcaagaactwgaagaswtgggcttgaargtygaracraastttgatattgmmcargtrgctacggawgtraykgcytatgttcaarcgattrtkgatgacatggatgttgargctacactttcaaatgattataaccgtcgtagcatcaatytrcaaattgayacyaacgaaccaggtcgtattatcggctaccatggtaaagtcttgaaggccttgcaactgttggctcaaaattatctttacaacygctattcmaraaccttctayrtyacwatyaatgtcaatgattatgtygaacaccgtgcagaagtcttgcagacctatgcgcaaaaattggcgahtcgtgttttrgaagaaggdcgyagtcatmaaacagatccaatgtcraatagygaacgcaagattatccaycgtattatttcacgtatggatggcgtgacyagttactctgaaggtgatgagccaaatcgctatgtygttgtagatacagaataactaat

SEQ ID NO: 3430 - DNA, 1295 bp, Streptococcus pneumoniae
  misc_feature (1)..(1295): tiling:Spneumo1:WAN024DV7; Cluster includes WAN0243AI spr1 979|dltD|15904020|NP_359570.1|1969711..1970994|-|1284 bp|- alanine transfer from undecaprenol-phosphate to the poly(g lycerophosphate) c...|S.pneumoniae|R6|NC_003098.1|ORF|221
ctggtattgtggagctacaaaatgcttaaacgcttatggatgatcttcggaccggtcttgatcgctggtttgttggtttttctgctcattttcttttatcctactgagatgcatcataatctaggagctgaaaagcgttcagcagtggctactactatcgatagttttaaggagcgaagtcaaaaagtcagagcactatctgatccaaatgtgcrttttgttcccttctttggctctagtgaatggcttcgttttgacggtgctcatyctgcggtattagctgagaaatacaatcgttcctaccgtccttatcttttaggacaggggggagctgcatcgcttaaccaatattttggaatgcaacagatgttaccacagctggagaataaacaagttgtgtatgttatctcacctcagtggttcagtaaaaatggctatgatccagcagccttccagcagtattttaatggagaccagttgactagttttctgaaacatcaatctggrgatcaggctagtcaatatgcagcgactcgcttactgcaacagttcccaaacgtagctatgaaggayctggttcagaagttggcaagtaaagragaattgtcgacagcagacaatgaaatgattgaattattggctcgttttaatgaaygccaagcytccttttttggtcagttttcggttagaggctatgttaactacgataagcatgtagctaagtatttaaaaatcttgccagaccagttttcttatcargcaatagaagatgttgtcaaagcagatgctgaaaaaaatacttccaataaygagatgggaatggaaaattatttctataatgagcagatcaagaaggatttgaagaaattaaaggattctcagaaaagctttacctatctcaagtcgccagagtataatgacttgcagttggttttaacacagttttctaaatctaaggtaaacccgatttttatcattccacctgttaataaaaaatggatgractatgctggtctacgagaggatatgtaccaacaaacggtgcagaagattcgctaccagttagaaagtcaaggttttaccaatatagcagatttttctaaggacggcggggagcctttctttatgaaggacaccattcaccttggttggttgggttggttggcttttgacaaggcagttgatcctttcctatccaatcccacaccagctccgacttaccatctgaatgagcgctttttcagcaaagattgggcgacttatgatggagatgtcaaagaatwwcwatarctaat

SEQ ID NO: 3431 - DNA, 317 bp, Streptococcus pneumoniae
  misc_feature (1)..(317): tiling:Spneumo1:WAN024FBA; Cluster includes WAN0243IB spr1 697||15903739|NP_359289.1|1665900..1666202|-|303 bp|Hypoth etical protein|S.pneumoniae|R6|NC_003098.1|ORF|230
ctggtcagggtggctagtttgtggtataatgaaagggactcaaaaagaaacaggagaaaaatgatggatttacttttagcaattgtattgattgtgctagcttttctaggaggagctctwggaggaatgtacttggttcgtaagcaaatcgaaaaagaatttgctgacaacccacgtttgaatgctgaagcagttcgtactcttttgagtgcaaatggtcaaaaaccaagcgaagctaaggtacaacaagtttaccaccaaatcatccgccaacaaaaggcagcccttgctaacaataaaaagaaaaaataactaat

SEQ ID NO: 3432 - DNA, 525 bp, Streptococcus pneumoniae
  misc_feature (1)..(525): tiling:Spneumo1:WAN024FBW; Cluster includes WAN023SON BD00 4013.1_1||||151..339|+|189 bp|Glimmer 2.02 orf prediction| S.pneumoniae|ATCC55840|BD004013.1|ORF|000
ctggtcttggaatacggcaaaacctctgaaaatatctatgctggaatggacgaggaataccgtcgttatcagcctgccatcatcacttggtacgaaacagccaaacatgcttttgatcgcggacagattggcaaaatatgggtggaatcgaaaacgacctcaagggcggtctctacagctttaaatccaagttcaatccgaccattgaggaattcgctggtgagttcaacctgccaactaatcctctttaccacctctccaatctggcctacactctcagaaagaaactgcgcagaagcattaacagaaaggaagcctatgacctttaaacttctcagccaagaagaattcatccagcatacctcagctagatcccaacgctcttttatgcagaccgtagaaatggcagagctgctgagcaagcgtggcttcagtacccagtatgtcggctacactgacccacaagggaaggtagtggtgtcagctgtcctctacagcatgcctatgactggtggccttcctaac

SEQ ID NO: 3433 - DNA, 533 bp, Streptococcus pneumoniae
  misc_feature (1)..(533): tiling:Spneumo1:WAN024DQ6; Cluster includes WAN02449W spr0 702||15902746|NP_358296.1|701973..702452|+|480 bp|Conserve d hypothetical protein|S.pneumoniae|R6|NC_003098.1|ORF|111
ctggtctttgaagtaggaggagttggatggaaatcaaaaawcactttggrgtctackstgtttgcttwgaaaatggraagttactytgyattgaaaaaacgagaggcccttatcaacatcggtatgatctacctggaggcagtcagcaacttggtgaaggactrackrawacgctgactagagaagttatggaagagacgggatttactgttagaagctactctaatcctcgaatctacgatgttttcgtcagrgaagagttaamaaattttatggttcaccatgtcatrgccttgtatgatgttgaaatgaatgagagtgcacctcaagttacgayttcggaagctgtgtctgatggtgcgaatgattcacttggatatatttggatggatattcaagagattacagaagaaaatgcatcgccattagtcttgaaggttaagtctgaattattaggatttccagaactggacaagacttcttacatgaattggaaggtgaakkakgagaaatcaacttgccctctarctaat

SEQ ID NO: 3434 - DNA, 1094 bp, Streptococcus pneumoniae
  misc_feature (1)..(1094): tiling:Spneumo1:WAN024GBB; Cluster includes WAN02448L spr0 749|ABC-MSP|15902793|NP_358343.1|745591..746676|+|1086 bp| ABC transporter membrane-spanning permease - ribose/galact ose transport|S.pneumoniae|R6|NC_003098.1|ORF|111
ctggtggaaacttgggaaaggagaagagtgatgtctaaaaaattacaacaaatttcggttcccttgatttctgtattcctaggaattttactcggagccattgtcatgtggatcttcggttatgatgctatttggggctacgaagaattgttctatacagcctttggcagtctgcgtgggattggagaaatcttccgtgctatgggtcctctggtcttgattggtcttggttttgcsgttgccagtcgagctggtttctttaacgtcggacttcctggtcaggctttggcaggttggattctcagtggttggtttgccctgtcgcatccagatatgccccgtcccttgatgattctagcaaccatcgtgattgccttgattgctggtgggattgtcggagcgattccaggtattcttagggcctatctagggacgtcagaggttattgtaaccatcatgatgaactacattrtcttgtatgtagggaatgcctttatccatgctttccctaaagacttcatgcaaagtacagattcgaccattcgtgttggggctaatgcaacctatcagacaccttggttrrctgagttgactggtaactcacggatgaatattggtattttctttgccatcattgccgttgcagttatttggttcatgctcaagaaaacaactcttggttttgaaatccgtgcagttggtcttaatccacatgcttcagaatatgctggtatttctgccaagcggactattatyctatctatgattatttcaggygccttggcaggtcttggtggakctgttgaaggtttgggaaccttccagaacgtctatgttcaaggttcgtcattagctatcggatttaacggaatggcggttagtttgcttgcggccaactcaccaattggtatactctttgcagccttcctatttggcgttctccaagttggggctcctggtatgaatgcggcgcaggtaccatctgagcttgtcagcattgtaacagcgtctattatcttctttgtcagtgttcattaccttatcgaacgctttgtcaaaccgaaaaaacaagttaaaggaggtaagtaactaat

SEQ ID NO: 3435 - DNA, 90 bp, Streptococcus pneumoniae
  misc_feature (1)..(90): tiling:Spneumo1:WAN024DN9; Cluster includes WAN023SHP NC_0 03098.1_2426||||1884840..1884929|+|90 bp|Glimmer 2.02 orf prediction|S.pneumoniae|R6|NC_003098.1|ORF|110
ctggttcgttataatgatacctattctaccaaaaaaggcctcaaatttgaaacctttttgtctgtttttaggtatgattttttagggatg

SEQ ID NO: 3436 - DNA, 180 bp, Streptococcus pneumoniae
  misc_feature (1)..(180): tiling:Spneumo1:WAN024CKZ; Cluster includes WAN023W3Y AX57 0451.1_1||||108..287|-|180 bp|Glimmer 2.02 orf prediction| S.pneumoniae||AX570451.1|ORF|001
ctggttgaggctgactcagatgcagatgtacttgccgactctgaagctgacaaactagttgaactcgctgaattacttgtagatatcgtacctagaactactgtatcatttgttgccaaagcatccgttttctctacagttttttcaagtactgcygactcatttgtaaataccttcgtt

SEQ ID NO: 3437 - DNA, 75 bp, Streptococcus pneumoniae
  misc_feature (1)..(75): tiling:Spneumo1:WAN024CLX; Cluster includes WAN023SBY NC_0 03028.1_1412||||1064391..1064465|-|75 bp|Glimmer 2.02 orf prediction|S.pneumoniae|TIGR4|NC_003028.1|ORF|010
ctggttgatctcatgtataaatacctaacaaaaccacgcgccttgcctgctgatggaaagaaaggtacaaataca

SEQ ID NO: 3438 - DNA, 498 bp, Streptococcus pneumoniae
  misc_feature (1)..(498): tiling:Spneumo1:WAN024CWL; Cluster includes WAN023M4M 3128 02_630||||327383..327805|-|423 bp|EGAD orf prediction|S.pn eumoniae|R6|NC_003098.1|ORF|110
ctggtttacctgcgttatcattttgagcagttgaggatagttggttgtagcggacacctttttcttcttcggatagkgactgttccctgttgytmtttwttckctaccgtwwgccattcaggggttaccgtcttaggygtttcaggtwtagcagctgcaggtttatcctcttttggtttttcttcagccggtttttctttttcaagtgctaatagttcttcttctgtcttaggtccatctgtaacttctggagaaccttggtcttctcccaccttaggcgcttcaaaatcaygcccatcattctcttttgctgttgcaagagcagtagctaaatcagctggtaagttcgccgtggaaccagactgcacgctatctgcaagaaccggacttgtcccaaagaatgyagctccaatcataacagaagcaacacctaatgaaaatttccgawtactatatttacaacgtttttcaaataatcctttattcataaacttctaa

SEQ ID NO: 3439 - DNA, 78 bp, Streptococcus pneumoniae
  misc_feature (1)..(78): tiling:Spneumo1:WAN024DOT; Cluster includes WAN023SJY NC_0 03098.1_1424||||1136612..1136689|+|78 bp|Glimmer 2.02 orf prediction|S.pneumoniae|R6|NC_003098.1|ORF|100
ctggtttccaaggaaggatacaaccaagaagaatatcttcatcccaatgtttttagtagaatgcttcaatttctgggt

SEQ ID NO: 3440 - DNA, 141 bp, Streptococcus pneumoniae
  misc_feature (1)..(141): tiling:Spneumo1:WAN024CL8; Cluster includes WAN023S7R NC_0 03028.1_2537||||1924686..1924826|-|141 bp|Glimmer 2.02 orf prediction|S.pneumoniae|TIGR4|NC_003028.1|ORF|011
ctgktcttatttyatttyactayatctcaaattgagtatgacgaagtgcgctcccatgtcctgggaacgcactttcttcatatttttcatattcttgaatccatcgataaagactattgggatgaatttttaaagttgaac

SEQ ID NO: 3441 - DNA, 123 bp, Streptococcus pneumoniae
  misc_feature (1)..(123): tiling:Spneumo1:WAN024DN7; Cluster includes WAN023SHM NC_0 03098.1_2441||||1899845..1899967|+|123 bp|Glimmer 2.02 orf prediction|S.pneumoniae|R6|NC_003098.1|ORF|111
ctgrtttccctctttagacagattycatatatttttattaaaaatactgtattcttatctatttcatacttttcttctattaaaatgcaaaattatgctatcaaatcaagcttaaaaattttt

SEQ ID NO: 3442 - DNA, 1206 bp, Streptococcus pneumoniae
  misc_feature (1)..(1206): tiling:Spneumo1:WAN024AUJ; Cluster includes WAN02407V |cps 23fF||AAC69529.1|||1179 bp|Cps23fF|S.pneumoniae||AF057294| ORF|001
ctgtatatccatcatattaggagagaaatgaaaaagtcagtttatatcattggttcaaaaggaattcctgctaagtatggaggatttgaaacttttgttgagaaattaacagccttccaacaagataaggctatccaatattatgtggcttgtatgcgtgaaaactctgcaaaatcagggactactgaggatgtttttgaacataatggtgctatctgttataacgtcgatgttcctaatwttggtccagcgcgagctatagcgtatgatatcgctgcaattaacagagctattgagattgccaaagaaaataaggatgaagatccaatcttctatattttagcttgtcgaattggtccgttcatccatggaattaagaaaaaaatccaggagataggtgggactcttctagttaatccagatggccacgagtggttgcgagctaagtggagtgctcctgttcgtcgctaytggaaaatttctgaaggtcttatggtcaaacatgcagatcttttagtgtgtgatagtaaaaatattgaaaaatatatccaagaagattataaacagtatcaacctaagacaacctatatcgcttatgggactgatacaacacgctccgtattaaagagtagtgatgaaaaagtacgttcttggttcaaagagaagaatgtttctgagaacgagtattatctagttgtaggacgttttgtaccagaaaacaactatgaatctatgattcgtggctttttggcgtctaactctaagraggactttgtcttaatcacaaatgtagaacagaataaattttataatcagttgttggcaaaaactggttttgataaggacccacgagtaaaatttgtaggtacagtctatgagcaagagcttcttaaatatattcgtgaaaacgcctttgcttacttccacgggcatgaagttggtggaaccaatccttcgcttttagaagctctggcatcaactaaactgaatttattgctagatgttggctttaaccgagaagttgctgaagatggtgccatttactggaagaaagataatcttcatgagattattgaaacgagtgaacaaaaaacacaaaaagagattgatgagaaagatatactttcaataaaacaagtgacggagcggttcycttgggaattgatagttaatgagtatgagaaactttttttatgtgagaaataa

SEQ ID NO: 3443 - DNA, 389 bp, Streptococcus pneumoniae
  misc_feature (1)..(389): tiling:Spneumo1:WAN024F99; Cluster includes WAN0243GT spr1 751||15903793|NP_359343.1|1720939..1721298|-|360 bp|Hypoth etical protein|S.pneumoniae|R6|NC_003098.1|ORF|221
ctgtatcatctttattatgatgaggtgaagaagagttcagtcagtcttatcttgattggtgaaggagatgaaactgaaagaaaagcggatcagyttgcttcttattttttaattttcccatcttcactgtataggatggttgaggaaatyagagaaaatgccaatagaactcatcttgaagtagaagatattataaaattgggtcagttttatggtatcagtcataaagytatgttatatagattgaggaatgatggataccttgatgcagaagaaattaaaaatatggatattagtgttatagagacagcttcaagattaggctatgatacaagtttatatcgtcctttgtcagaaagtaaaaargaaaygkyrtyaggataactaat

SEQ ID NO: 3444 - DNA, 87 bp, Streptococcus pneumoniae
  misc_feature (1)..(87): tiling:Spneumo1:WAN024DQW; Cluster includes WAN023SM1 NC_0 03098.1_555||||438710..438796|+|87 bp|Glimmer 2.02 orf pre diction|S.pneumoniae|R6|NC_003098.1|ORF|111
ctgtatgtacctgctaccgttgaaatcaatagsgactccctcttgccctgtgctagtgaatggatttatcagtatattgaaatgaaa

SEQ ID NO: 3445 - DNA, 81 bp, Streptococcus pneumoniae
  misc_feature (1)..(81): tiling:Spneumo1:WAN024CM3; Cluster includes WAN023SDI NC_0 03028.1_927||||701377..701457|+|81 bp|Glimmer 2.02 orf pre diction|S.pneumoniae|TIGR4|NC_003028.1|ORF|010
ctgtcaagaaaatcattttcaagttttcacacctttctcaaaaaagttaaaaaattttctcaaaaacgcttgactctgacc

SEQ ID NO: 3446 - DNA, 84 bp, Streptococcus pneumoniae
  misc_feature (1)..(84): tiling:Spneumo1:WAN024FJ8; Cluster includes WAN023SIY NC_0 03098.1_1804||||1410352..1410435|+|84 bp|Glimmer 2.02 orf prediction|S.pneumoniae|R6|NC_003098.1|ORF|111
ctgtcacaatcaccaagtgaagttgtttctttgtcatctttttctccttatatcaaaagaagtttggcaacaccaaacttcaac

SEQ ID NO: 3447 - DNA, 96 bp, Streptococcus pneumoniae
  misc_feature (1)..(96): tiling:Spneumo1:WAN024DNO; Cluster includes WAN023SIF NC_0 03098.1_1981||||1543714..1543809|+|96 bp|Glimmer 2.02 orf prediction|S.pneumoniae|R6|NC_003098.1|ORF|111
ctgtcatttcaagaaggagtaatcctttatctactaatggacggaacrgaattcaaccgcttgtccgatatgttttctaaggattatatagtaaaa

SEQ ID NO: 3448 - DNA, 73 bp, Streptococcus pneumoniae
  misc_feature (1)..(73): tiling:Spneumo1:WAN0249DJ; Cluster includes WAN024E34 R6.I G_2256.2||||2035554..2035626|+|73 bp|Between spr2043 (comC ) (- strand) and () (- strand)|S.pneumoniae|R6|NC_003098.1 |IG|110
ctgtcatttttttctcccaaagtgtacttttttaagaaaaaagccgggaaaattcccagctttgctattatat

SEQ ID NO: 3449 - DNA, 533 bp, Streptococcus pneumoniae
  misc_feature (1)..(533): tiling:Spneumo1:WAN024GA2; Cluster includes WAN02447D spr0 793|argR|15902837|NP_358387.1|792887..793357|-|471 bp|Argi nine repressor|S.pneumoniae|R6|NC_003098.1|ORF|111
ctgtcgacctcgctcagtccatgcttaccttaccttgctaaaaggagttacattattatgaataaatcagaacaccgccaccaacttatacgcgctcttatcacaaaaaacaagattcatacacaggctgagttgcaagcccttcttgctragaacgacattcaagtaacccaggcaaccctctcacgcgacatcaaaaatatgaacctatcaaaagtccgcgaagaagatagcgcttattatgttcttaacaatggttccatctcaaaatgggaaaaacgtctcgaactytacatggaagacgcccttgtctggatgcgcccagttcaacaccaagtcctactaaaaacccttcctggactggctcaatcctttggttctatcattgatactttgagcttccctgacgctatcgctaccctttgtggtaatgatgtctgtcttatcatctgtgaagatgcaratactgctcaaaagtgctttgaagaactgaaaaaattcgccccaccatttttctttgaagaataactaat

SEQ ID NO: 3450 - DNA, 111 bp, Streptococcus pneumoniae
  misc_feature (1)..(111): tiling:Spneumo1:WAN024BDT; Cluster includes WAN023S9U NC_0 03028.1_1984||||1501032..1501142|+|111 bp|Glimmer 2.02 orf prediction|S.pneumoniae|TIGR4|NC_003028.1|ORF|010
ctgtctaacttttggggggcagttcattcaacacctgatactatgcgtttttcttatttgaaatactttttactcaacctctttatactcaatgaaaatcaaagtgcaaac

SEQ ID NO: 3451 - DNA, 93 bp, Streptococcus pneumoniae
  misc_feature (1)..(93): tiling:Spneumo1:WAN024DES; Cluster includes WAN023RYK cont ig_1612_2||||166..258|-|93 bp|Glimmer 2.02 orf prediction| S.pneumoniae|670|WAN01UDBY|ORF|000
ctgtctattttaaacaagtttatctttgcttaccctctcttgttgacaaataattttcattattttgggaagatacctgctgatttccgtcgg

SEQ ID NO: 3452 - DNA, 189 bp, Streptococcus pneumoniae
  misc_feature (1)..(189): tiling:Spneumo1:WAN024DQP; Cluster includes WAN0242SJ SP06 21||15900529|NP_345133.1|589469..589579|+|111 bp|hypotheti cal protein|S.pneumoniae|TIGR4|NC_003028.1|ORF|121
ctgtctccattcaaatgtaaagtacttgctagtttatcagaaactttcctgataaaccaatatatatcttttatgtctgtgatagaaaaacttaatcatgaaaaatccctgcaagctctttcaaattatggtagaatggaagcagtagaattagaaaaggaaatcgattatgaaatttctykaactaat

SEQ ID NO: 3453 - DNA, 166 bp, Streptococcus pneumoniae
  misc_feature (1)..(166): tiling:Spneumo1:WAN024AI7; Cluster includes WAN0247M0-rc R 6.IG_96||||83672..83837|-|166 bp|Between spr0075 (+ strand ) and spr0076 (rr08) (+ strand)|S.pneumoniae|R6|NC_003098. 1|IG-rc|110
ctgtctctcctttgataaaaacagtgctatactgctttaagtataacactatttttattgttttacgatgattttaatctgctattgaaagaaagtcctgattgctgattgagttgttaaactaatcttagtcagcccactatccatcatttatttccttagctga

SEQ ID NO: 3454 - DNA, 1046 bp, Streptococcus pneumoniae
  misc_feature (1)..(1046): tiling:Spneumo1:WAN024FDS; Cluster includes WAN0243KS spr1 608|prmA|15903650|NP_359200.1|1583980..1584957|-|978 bp|Ri bosomal protein methyltransferase|S.pneumoniae|R6|NC_00309 8.1|ORF|211
ctgtgccaaaaagataaacttctcttagacacaagcgtcttcagagaatttcctattttggttttgtgttttacgggcttggtattaataatggaaacatggcaagagttaaaagttacagtgaagcgtgagggagaggagttggtttccaatctcttgattgagctgggagcgcaaggwgtygcratygaagacagymtggactatrtgggaaatgtkgaycgytttggmgagattttcccagaggtggagcagcaagaagaaatcgtagtgacmgcctactaccctgacacggtggatgtgacagtggttgaggcggayttgcaggctcgyytagcagaattgacrgattttatggatttgggwgarktmaaratrggkacgactgccttggctgaggaagactgggcagacaactggaagaaatactatgarccwgctcgtatcactcatgatttgaccatygttccctcttggacagactatgaggcgactgcgggrgaaawrattatcaagctrgatcctggsatggcttttggtactggracccayccaactaccaagatgagcctytttgccttggaacaggttcttcgtggtggcgaracrgtgctagatgtggggactggttcaggggttctctcyattgcyagctcgctwctkggkgcyaargaaatyttcgcctatgacctggatgatgtggcggttcgtgtkgctcaggaaaatattgarctyaaccctggmatggaaaatatccaygtwgckgctggagayttgcttaagggwgtkgarattgargcagatgtsatygtrgctaatatcttggcggatatyctcattcatctrayrgasgatgcytatcgyttggtmaaggaygaaggctacctsatcatgagtggcattatcaaggayaagtkggacatggtgcgysagtcggctgartcrgctggatttttcctygaaacycacatgrttcaaggggartggaatrcctgtgtctttaagaaraccaaggatatytcwggkgtgattggaggctarctaat

SEQ ID NO: 3455 - DNA, 81 bp, Streptococcus pneumoniae
  misc_feature (1)..(81): tiling:Spneumo1:WAN024DYQ; Cluster includes WAN023QRX cont ig_1348_17||||10636..10716|+|81 bp|Glimmer 2.02 orf predic tion|S.pneumoniae|670|WAN01UE5W|ORF|000
ctgtgcgaaagattggttaggaagaaaaatcgtgaagcaactgcctctgccaagctgactcgtcaccgtgacttggccacc

SEQ ID NO: 3456 - DNA, 117 bp, Streptococcus pneumoniae
  misc_feature (1)..(117): tiling:Spneumo1:WAN024CTK; Cluster includes WAN023SGY NC_0 03028.1_2||||1538..1654|-|117 bp|Glimmer 2.02 orf predicti on|S.pneumoniae|TIGR4|NC_003028.1|ORF|011
ctgtggaaaacagcctttaaacaagtcatatcaagttttttagcttgtttaaaaaatgtggataaaaaagataaaaaactaaaagttatccacaaattatttgattttctttttgat

SEQ ID NO: 3457 - DNA, 930 bp, Streptococcus pneumoniae
  misc_feature (1)..(930): tiling:Spneumo1:WAN024C4M; Cluster includes WAN02417B |pon A||AAL60066.1|||930 bp|penicillin-binding protein 1A|S.pne umoniae||AY072702|ORF|000
ctgtgggatatctacaactccgatcaatacgtctcttaccctgacgatgatttgcaagtcgcatccacggtcgtagatgtttcaaatggtaaagtcatcgcccaacttggagctcgtcaccaagcaagtaacgtttcatttggtaccaaccaagctgtggaaaccaatcgtgactggggttcaacaatgaaacccatcaccgattatgcacctgccatagaatacggtgtatatgattccactgcaactatggttaatgatattccttataactatccgggaacaagcacacctgtctacaactgggatcgagcatattttggtaatattactctgcaatatgcccttcaacaatctcgtaacgtacccgccgttgagacactaaacaaggttggtttagatagagctaaaagtttcctaaatggtttaggaatcgactatcctgtaatgcactattcaaatgctatttcaagtaatactaccgaatctagtaaacagtacggggcaagtagtgaaaaaatggccactgcctatgccgcattcgcaaacggcggtatttaccacaaaccaatgtacatcaataaggttgtctttagcgatggtagcgaaaaagaattttctgaccctggcacaagagccatgaaagaaacgactgcttacatgatgacagagatgatgaaaacagtctggacttacggaactggtcgcggtgcctacctaccttggcttccwcaagcaggtaaaacaggtacttctaactatactgacgaagaaattgaaaagtatatcaagaacactggttacgtarctccagatgaaatgtttgtagggtatacymryaaatattcaatggctgtatggacgggctacacaaatcgtctcacaccaattgtaggggatggtctcacagttgctgccaaagtctatcgt

SEQ ID NO: 3458 - DNA, 2564 bp, Streptococcus pneumoniae
  misc_feature (1)..(2564): tiling:Spneumo1:WAN024GOK; Cluster includes WAN02448D spr0 757|parC|15902801|NP_358351.1|752241..754721|+|2481 bp|Top oisomerase IV subunit A|S.pneumoniae|R6|NC_003098.1|ORF|11 1
  misc_feature (2193)..(2193): n is a, c, g, or t
ctgtgtgaaaaagataaattctcttgtgagtttgcttacttcaagaattttctattttcacttggtattttatgggctttgtatcttatgwstaacattcaaaayatgtccctggaggacatyatgggagagcgytttggkcgctactccaagtacattattcaagaccgggctttgccagatattcgtgatggvttgaagccggttcarcgycgtattctttattckatgaataaggatrgcaatacytttgacaagagctaccgyaagtcggccaagtcwgtcgggaayatcatggggaatttccacccacacggdgatwbwtctatctatgatgccatggtycgtatgtcwcarraytggaaaaaycgtgagattytrgtygaaatgcayggtaayaacggytcwatggacggrgatccdcctgcggctatgcgttatacygargcrcgtytgtctgarattgcwggytaccttcttcargayatcgakaaaaakachgttccytttgcwtggaactttgaygatacvgagaaagaaccracdgtcytrccagcwgcctttccaaacctcttrgtmaatggwtckactggkatttcrgctggwtatgccacagacattccwccbcataatttrgctgaggtyatwgatgckrcrgtttacatgattgaycayccracwgcmaagrtkgayaaactcatggaattyttrcctggacyagayttycckacwggrgsdatyatycarggtcgtgatgaaatyaagaargcytaygaractgggaaagggcgcgtggtygttcgttccaagackgarattgaaaagctaaaaggtggtaaggaacaaatcgttatyaytgagattccttatgaaatcaayaaggcyaatctrgtcaaraaaatcgatgakgtycgtgtyaataayaaggtrgcwggratygctsaggttcgygatgagtctgaccgtgatggtcttcgyatygckwtygarctyaaraaagacgcyaatackgagcttgttctcaaytayytwttyaartacacygacctacaaatcaactayaacttyaayatggtggcgattgayaatttyacrcctcgtcaggttgggatygtyccaatcytgtctagctayatygcycaccgycgwgaagtgattttggcrcgttcmcsstttgacaargaaaaggctgagaaacgtctccrtatygtcgaaggtttgattcgygtgatytcgattttggaygaagycattgcyctkatccgygcttctgagaataaggckgacscsaaggaaaacctyaarrtyagctatgaktttacrgaagarcargcygargcyatcgtwacyttgcaactktaccgtttgaccaatacmgaygtrgttgtyttrcaggaagaagaagcagarcttcgtgaraagattgcyatgctkgyggckattatcrgtgatgaamgkacyatgtacaatctyatgaagaaagarctycgtgaggtcaaraagaamtttgcractccdcgtttgagtwctttagaagacacwgcraaagcaatygarattgatacagctagtytkatygcygaggargatacctaygtcagcgtgaccaaggcmggttayatcaagcgtaccagyccacgttcctttgcggcktcmaccttggaagaaattggcaarcgtgatgatgaycgtytgatytttrykcaakctgyyaagacmacmcarcayctyttgatgttcacrasyyttggaaatgtcatytaymgaccaatccatgarttrgcagatattcgytggaaggacatcggagagcatytgagccaraccatyacaaactttgaaackaaygaagmaatyctttatgyggaagtmstrgawcagttygaygatgcgacaacytaytttgcdgyractcgyctyggtcaaatcaarcgbgtagarcgwaaagaattyacyccrtggcgracctayarrtctaagwcdgtyaagtatgctaarctcaaagmcgwkmcagaycagattgtagcagtrgctccratyaaactrgatkatgttstmttgrttagtcraaayggttatgcyctkcgtttcaatatcgarraggttcckgttgtcggtgcyaaggcwgcagktgtcaargctatraayytgaaagmagatgatgybctycaakctgsctttatytgyaatayntcdtcyttctacctyttgacycagcgtggwagyttraaacgtgtttchaywgasgaaattcyagcaacyagccgtgcyaaacgaggwytwcaagtcttgcgtgagttgaaaaayaaaccgcahcgtgtcttcttrrcaggagcrgttkcagarcaagghttygttgkygayytcttyagtayrgaagtggaygkgaacgaycaaaytctgcttgtycaatccaayaaaggaacaatctatsaaagycgattgcaagacttraacttgtcagaacgmacwagyaayggwagcttcatytctgacacgatttcagatgaagaagtttttgaygcttatcttmargaagtakttactgaarhtaaataactaat

SEQ ID NO: 3459 - DNA, 1199 bp, Streptococcus pneumoniae
  misc_feature (1)..(1199): tiling:Spneumo1:WAN024G28; Cluster includes WAN0243YN spr1 108|mutY|15903151|NP_358701.1|1108363..1109538|-|1176 bp|S imilar to A/G-specific adenine glycosylase|S.pneumoniae|R6 |NC_003098.1|ORF|121
ctgtgttatactagagatatgttagatttgaaagaatacggtatcgtcatgtggccggaggagaaagtcatttctttccgtgagaaacttctcgcttggtatgatgaaaacaaaagagatttgccttggaggagaagtaaaaatcctyatcacatctgggtatctgaaatcatgcttcagcagaccagggtggatacagttatcccttactacgaaagattyytggactggtttccaactgtcgaaagtctggcaactgcgyctgaggagagtttactgaaagcttgggagggcttgggctattattctcgagttcgcaatatgcaggctgcagcccagcagattatgactgactttggtggccaatttccaratacctatgaaggaatttccagcttgaaagggattggaccttacacagcaggagccatttccagtattgcttttaacttgcctgagccagctgtagatggtaatgtcatgcgggtcttggcgcgtctgtttgaagtcaaccacgatattgggattccaagtaatcgaaaaatttttcaggcaatgatggagatcttgattaatccggatcgtccrggtgattttaatcaagccttgatggacttagggtctgatattgagtctcctgtaaatcccagacctgaagaaagcccagtcaaggactttagtgcggcatatcagaatggaaccatggaccgttatccaattaaatctcctaagaaaaagcckgttcctatttatcttaaagccttagttgtgaaaaattctcaaggacaatttttacttgaaaaaaatgaaagcgaaaagctcttggcaggtttytggcatttcccctttatagaagttgataacttttcgcaagaagagcagtttgacctctttcatcaggttgcggaagaaagtgtgaactttggycccagtccagaagagagtttccagcaggactatgacctagatgttgattggcttgatgtttgttttgatacagtccagcatgtttttagtcatcgaaaatggcatgtrcagattgtagcaggtcaggtgagtgacttccatgatttttcagatagggaagttcgytggctttcaccagaagaattcaagaattacccacttgccaaaccccaacaaaaaatctggcaggyttatgcacaagccaacttagacagtagccaagactarctaat

SEQ ID NO: 3460 - DNA, 515 bp, Streptococcus pneumoniae
  misc_feature (1)..(515): tiling:Spneumo1:WAN024DJU; Cluster includes WAN0244LH spr0 285|basA|15902329|NP_357879.1|284437..284913|-|477 bp|Glut hatione peroxidase|S.pneumoniae|R6|NC_003098.1|ORF|111
ctgttacaatgtagaaaaagaaaagaggccctcatgacttcactttatgatttttccgttttgaaccaaaacaaccaagcaactcccttggatagctatcgtggcaaagttctcttgattgtcaacactgctactggatgtggtttaacgccccagtaccagggacttcaagaactctatgaacgctatcaagatcagggcttygaaatattggatttcccttgcaatcagtttatgggacaagcacccggcagcgcagaggaaatcaacrccttctgtagcctacattttcaaaccaccttcccacgttttgccaagattaaggtcaacggtaaggaagcagaccctctctatgtctggttamaagaccakaaatcyggcccactargaaaacgartcgaatggaatttcgctaagtttctcatyrgtcgwgatgggcaagtctttgaacgcttttcttcaaaaacagacccaaaacaaattgaagaggcgatacaaactctactataactaat

SEQ ID NO: 3461 - DNA, 78 bp, Streptococcus pneumoniae
  misc_feature (1)..(78): tiling:Spneumo1:WAN024DNP; Cluster includes WAN023S94 NC_0 03028.1_2151||||1622273..1622350|-|78 bp|Glimmer 2.02 orf prediction|S.pneumoniae|TIGR4|NC_003028.1|ORF|010
ctgttccgtccattagtagataaaggattactccttcttgaaatgacagatgaacttgtttcttataaaaatgttgtc

SEQ ID NO: 3462 - DNA, 65 bp, Streptococcus pneumoniae
  misc_feature (1)..(65): tiling:Spneumo1:WAN024ACM; Cluster includes WAN024EIE R6.I G_935.2.2||||887319..887383|+|65 bp|Between B (transposase ) (+ strand) and spr0900 (+ strand)|S.pneumoniae|R6|NC_003 098.1|IG|110
ctgttcctagtcaacctgcaagccctgtcccagctccaagctcagctccgactcaagatcctaga

SEQ ID NO: 3463 - DNA, 171 bp, Streptococcus pneumoniae
  misc_feature (1)..(171): tiling:Spneumo1:WAN024AZT; Cluster includes WAN02421P SP16 60||15901495|NP_346099.1|1562176..1562337|-|162 bp|hypothe tical protein|S.pneumoniae|TIGR4|NC_003028.1|ORF|020
ctgttgattcaataccgggatttgaagcaccgcaagaatctgttacaattttataagaaatattctgagaacaatatcttatccttatatttccagcgagcaggagatggtgtgagtcctgtaatccctattgataagattatcctctcaaaaactcaagtcykaactaat

SEQ ID NO: 3464 - DNA, 192 bp, Streptococcus pneumoniae
  misc_feature (1)..(192): tiling:Spneumo1:WAN024DR7; Cluster includes WAN023SMA NC_0 03098.1_414||||327094..327285|+|192 bp|Glimmer 2.02 orf pr ediction|S.pneumoniae|R6|NC_003098.1|ORF|101
ctgttgcaaaatataagaaaggatttagtatttctcttgaatgctgaatccttttttacatttgtaaagaaagattctaaatgtactgacccccaaaagttrgagcctctttttgtcagaatagagaaaatttttgttaattttacttgtttcctattgctttctcagttattatttgttatattaaaagta

(The sequence listing continues in the following parts.)
